United States Patent Application Publication US 2006/0134663 A1 - sequence listing, part 89

SEQ ID NO: 252819 - DNA, 420 bp, Homo Sapiens
cccatgaaagccccccttgggacatccctaacctaagataagtgggcccaaagccctcccaagaaccctcatgtccccacgcaaagcttggggattgtatttgggaccctaccccttctgcgagctgaaaatgaaacaggaaaacatggcgatcccacatggtcctacccagaacccagatagctgagctcatgctgagtgagtacagtaagatcttcggctcagaggaagactgacagacaagacaagctactgaatacgttcacatctgtcttgatgcctaatatttttacatttctgtaaacatatttctgaaatattttttgcctttcaagcgacagatgcctcattttgtgaaaacttaatgatgattttgtgtttaagttccaaacatttgaataaaataattgacaaaaaaaa

SEQ ID NO: 252820 - DNA, 546 bp, Homo Sapiens
agtttaccctaagatacttcgggcaatatttttaaccaacccaaaagctcttcaggtcatttctgaagaggacaaggtgaatcttggcttggaacaccatttttgggctcttgctactgaatgaatcagaaaggaattttttctgaagagcattagaaagtaaaggagatgttaaaataagttcttgaagtatgttttatatttatctaaaacactgattttaaaagtttacattcaaatgtgtattcaaaagaagtactgatttgtaattattatagtttgtgtgtatcatcccttttaaccgtgcctaacaactgtacttaaattttgttttctagtgtaacaaatgtttcccataagattttctagagccaaataatgggagtgaaaaattccttaagtgttatataagaaaatatattagaaaatcagctttggattatacgatttctaaaatatactaatacagaatcctcagtaatatgttttgaattggattttttctcagaactgttacataataaataatacatcaaccagaaaaaa

SEQ ID NO: 252821 - DNA, 622 bp, Homo Sapiens
cggtattcctgattgtgcagtcaagtcatcttcatgttcttctcacacaatgctctcctccatccttcttcattcatgccgtatactctgttgtgcatcgccttccacttggtccactgtgcctctaaactgtgatcaaatgttagagtagaaaacctaggaagggatcaagaatgaggatctgattagaccaatcctaaaaagccatcttactgccccctgaaaaattagggcccaccatggtagaataaaaatatttaaattattctcccaagcatttacccaaggactgtggaagaggccaaggatgtgccctggagaaaaacagggcacgtggaggtactggatggactcaccaaaatgaaaagcagcctgtccagagctgtaggagctgaaacagtttatgcgatgacaatttaggttatgagaacggtatgaaactaccttgtgtgtgagaagcttaaggcaacaactaggaaaccgggaaacggttgatccaggttttgtaccaatcgcaaaaaatccaggtttcgtgcccaggcaaaacctcactaatgataaggtgggattcccaagtagggacaaagagatccccaagagttaggaggccttcacacatctt

SEQ ID NO: 252822 - DNA, 1239 bp, Homo Sapiens
  misc_feature (88)..(88): n is a, c, g, or t
  misc_feature (91)..(91): n is a, c, g, or t
  misc_feature (110)..(110): n is a, c, g, or t
  misc_feature (130)..(130): n is a, c, g, or t
  misc_feature (132)..(133): n is a, c, g, or t
  misc_feature (136)..(137): n is a, c, g, or t
  misc_feature (141)..(143): n is a, c, g, or t
  misc_feature (147)..(148): n is a, c, g, or t
  misc_feature (151)..(151): n is a, c, g, or t
  misc_feature (153)..(153): n is a, c, g, or t
  misc_feature (161)..(162): n is a, c, g, or t
  misc_feature (171)..(171): n is a, c, g, or t
  misc_feature (173)..(173): n is a, c, g, or t
  misc_feature (175)..(175): n is a, c, g, or t
  misc_feature (181)..(181): n is a, c, g, or t
  misc_feature (186)..(186): n is a, c, g, or t
  misc_feature (192)..(192): n is a, c, g, or t
  misc_feature (196)..(196): n is a, c, g, or t
  misc_feature (198)..(198): n is a, c, g, or t
  misc_feature (207)..(207): n is a, c, g, or t
  misc_feature (323)..(323): n is a, c, g, or t
  misc_feature (325)..(325): n is a, c, g, or t
agtttgtacaaaaaagcaggctggtaccggtccggaattcccgggattccgcaaccttgagcggcatccgtggagtgcgcctgcgcantancgaccgcagcaggaaagcnccgccggccaggcccagctntnnccnnacannnactnnaananaggacgcnntcgagtagntntncaccanccctngcaacnagancntctaccccnaactctgctggccttgaggtggggaagccggggagggcagttgaggaccccgcggaggcgcgtgactggttgagcgggcaggccagcctccgagccgggtggacacaggttttaananatgaatcctacactcatccttgctgccttttgcctgggaattgcctcagctactctaacatttgatcacagtttagaggcacagtggaccaagtggaaggcgatgcacaacagattatacggcatgaatgaagaaggatggaggagagcagtgtgggagaagaacatgaagatgattgaactgcacaatcaggaatacagggaagggaaacacagcttcacaatggccatgaacgcctttggagacatgaccagtgaagaattcaggcaggtgatgaatggctttcaaaaccgtaagcccaggaaggggaaagtgttccaggaacctctgttttatgaggcccccagatctgtggattggagagagaaaggctacgtgactcctgtgaagaatcagggtcagtgtggttcttgttgggcttttagtgctactggtgctcttgaaggacagatgttccggaaaactggggaggcttatctcactgagtgagcagaatctggtagactgctctgggcctcaaggcaatgaaggctgcaatggtggcctaatggattatgctttccagtatgttcaggataatggaggcctggactctgaggaatcctatccatatgaggcaacaaaagaatccctgcaagtacaatccccagtattctgctgctactgacaccggatttgggggacatcccctagccagaaaaggccctgatgaaagcagttgccacctggggggccccatttctggttgctattgaagcagggcatgaaccccttcctggtccataaagaaaggaattaatttttgaccccaactggtacaatcaaaaacatggatcatggcggtgctggggggttggcctaacgcattttgaaagccccgaaattctaaaaccactaaatttttggcccggcgg

SEQ ID NO: 252823 - DNA, 1040 bp, Homo Sapiens
  misc_feature (929)..(929): n is a, c, g, or t
  misc_feature (934)..(935): n is a, c, g, or t
  misc_feature (948)..(948): n is a, c, g, or t
  misc_feature (950)..(950): n is a, c, g, or t
  misc_feature (957)..(957): n is a, c, g, or t
  misc_feature (963)..(963): n is a, c, g, or t
  misc_feature (981)..(982): n is a, c, g, or t
  misc_feature (991)..(991): n is a, c, g, or t
  misc_feature (993)..(993): n is a, c, g, or t
  misc_feature (1003)..(1003): n is a, c, g, or t
  misc_feature (1005)..(1005): n is a, c, g, or t
  misc_feature (1007)..(1007): n is a, c, g, or t
  misc_feature (1017)..(1017): n is a, c, g, or t
  misc_feature (1020)..(1020): n is a, c, g, or t
  misc_feature (1030)..(1031): n is a, c, g, or t
  misc_feature (1038)..(1038): n is a, c, g, or t
ggagaaccgcgacctccgcaaccttgagcggcatccgtggagtgcgcctgcgcagctacgaccgcagcaggaaagcgccgccggccaggcccagctgtggccggacagggactggaagagaggacgcggtcgagtaggttttaaaacatgaatcctacactcatccttgctgccttttgcctgggaattgcctcagctactctaacatttgatcacagtttagaggcacagtggaccaagtggaaggcgatgcacaacagattatacggcatgaatgaagaaggatggaggagagcagtgtgggagaagaacatgaagatgattgaactgcacaatcaggaatacagggaagggaaacacagcttcacaatggccatgaacgcctttggagacatgaccagtgaagaattcaggcaggtgatgaatggctttcaaaaccgtaagcccaggaaggggaaagtgttccaggaacctctgttttatgaggcccccagatctgtggattggagagagaaaggctacgtgactcctgtgaagaatcagggtcagtgtggttcttgttgggcttttagtgctactggtgctcttgaaggacagatgttccggaaaactgggaggcttatctcactgagtgagcagaatctggtagactgctctgggcctcaaggcaatgaaggctgcaatggtggcctaatggattatgccttccagtatgttcaggataatggaggcctggactctgaggaatcctatcccatatgaggcaacagaagaatcctgtaaagtacaatcccaagtattctgttgctaatgacaccggctttgtggacatccctaagcaggagaaggccctgatgaaggcagttgcaactgtggggcccatttctgttgctattgatgcaggtcatgagtccttctgttctataaanaaggnnttattttgagccnantgtagcntgaaanatggatcatgggtgctgnnggtggctangntttgaaacananancaaataaaanaanattggctggnnaaacacngg

SEQ ID NO: 252824 - DNA, 1461 bp, Homo Sapiens
cgcagcaggaaagcgccgccggccaggcccagctgtggccggacagggactggaagagaggacgcggtcgagtaggtgtgcaccagccctggcaacgagagcgtctaccccgaactctgctggccttgaggttttaaaacatgaatcctacactcatccttgctgccttttgcctgggaattgcctcagctactctaacatttgatcacagtttagaggcacagtggaccaagtggaaggcgatgcacaacagattatacggcatgaatgaagaaggatggaggagagcagtgtgggagaagaacatgaagatgattgaactgcacaatcaggaatacagggaagggaaacacagcttcacaatggccatgaacgcctttggagacatgaccagtgaagaattcaggcaggtgatgaatggctttcaaaaccgtaagcccaggaaggggaaagtgttccaggaacctctgttttatgaggcccccagatctgtggattggagagagaaaggctacgtgactcctgtgaagaatcagggtcagtgtggttcttgttgggcttttagtgctactggtgctcttgaaggacagatgttccggaaaactgggaggcttatctcactgagtgagcagaatctggtagactgctctgggcctcaaggcaatgaaggctgcaatggtggcctaatggattatgctttccagtatgttcaggataatggaggcctggactctgaggaatcctatccatatgaggcaacagaagaatcctgtaagtacaatcccaagtattctgttgctaatgacaccggctttgtggacatccctaagcaggagaaggccctgatgaaggcagttgcaactgtggggcccatttctgttgctattgatgcaggtcatgagtccttcctgttctataaagaaggcatttattttgagccagactgtagcagtgaagacatggatcatggtgtgctggtggttggctacggatttgaaagcacagaatcagataacaataaatattggctggtgaagaacagctggggtgaagaatggggcatgggtggctacgtaaagatggccaaagaccggagaaaccattgtggaattgcctcagcagccagctaccccactgtgtgagctggtggacggtgatgaggaaggacttgactggggatggcgcatgcatgggaggaattcatcttcagtctaccagcccccgctgtgtcggatacacactcgaatcattgaagatccgagtgtgatttgaattctgtgatattttcacactggtaaatgttacctctattttaattactgctataaataggtttatattattgattcacttactgactttgcattttcgtttttaaaaggatgtataaatttttacctgtttaaataaaatttaatttcagactaggggctgtattactatgaagaagaaacttgtgca

SEQ ID NO: 252825 - DNA, 389 bp, Homo Sapiens
  misc_feature (16)..(16): n is a, c, g, or t
gggccatgggtggccnaccgtaaagatggccccaaagacccggagaaacccattgtggaaattgcccctcagcagcccagcctaccccccacgtgtgaagctggtggatggtgatgaggaaggaccttgacctggggatggcgcatgccatgggaggaattcatccttcagtctacccagcccccgctgtgtcggatacacactcgaatcattgaagatcccgagtgtgatttgaattctgtgatattttcacactggtaaatgttacctctattttaattactgctataaataggtttatattattgattcacttactgactttgcattttcgtttttaaaaggatgtataaatttttacctgtttaaataaaatttaatttcaaatg

SEQ ID NO: 252826 - DNA, 955 bp, Homo Sapiens
acggatttgaaagcacagaatcagataacaataaatattggctggtgaagaacaggtataaattgccagaaatacttacatttgaaattcaaaagagaatacttatttgcaaacagtgtttggatacagttccacatgcccttagcatacttctgaaatccccagaagtctaagttgaacatataatattaatgtttgattataaaagtaagaaactgtcacaaatatcttgggagtatgaatatagtctttgttccattgtataaaggtgtatctaaatctgaacagtttttaaattctgaggcatatctggctgcaaagacatcctattgttttcctgtctctgatctgtagttctgtgaaaggtcacagtttggaggctgggatggaaattatgtccaggttatgtcaagaattttttaaggataaacaggaacattgcctggtcccggattccttctggttaagtctatggcccccggcacagtggtttaagttgggtgttcccgggtaataaccctttgggcccttattctttctctgaaatggaaaacctgcctcttttttcagctggggttgaagaatggggcatgggtggctacgtaaagatggcccaagaccggagaaaccattgtggaattgcctcagcagccagctaccccactgtgtgagctggtggacggtgatgaggaaggacttgactggggatggcgcatgcatgggaggaattcatcttcagtctaccagcccccgctgtgtcggatacacactcgaatcattgaagatccgagtgtgatttgaattctgtgatattttcacactggtaaatgttacctctattttaattactgctataaataggtttatattattgattcacttactgactttgcattttcgtttttaaaaggatgtataaatttttacctgtttaaataaaatttaatttcaattg

SEQ ID NO: 252827 - DNA, 1502 bp, Homo Sapiens
gggctctggcactgtcattggcagcaatttctttatcaccaacagtgtcattggccccggctgccacattggtgataacgtggtgctggaccagacctacctgtggcagggtgttcgagtggcggctggagcacagatccatcagtctctgctttgtgacaatgctgaggtcaaggaacgagtgacactgaaaccacgctctgtcctcacttcccaggtggtcgtgggcccaaatatcacgctgcctgagggctcggtgatctctttgcaccctccagatgcagaggaagatgaagatgatggcgagttcagtgatgattctggggctgaccaagaaaaggacaaagtgaagatgaaaggttacaatccagcagaagtaggagctgctggcaagggctacctctggaaagctgcaggcatgaacatggaggaagaggaggaactgcagcagaatctgtggggactcaagatcaacatggaagaagagagtgaaagtgaaagtgagcaaagtatggattctgaggagccggacagccggggaggctcccctcagatggatgacatcaaagtgttccagaatgaagttttaggaacactacagcggggcaaagaggagaacatttcttgtgacaatctcgtcctggaaatcaactctctcaagtatgcctataacataagtctaaaggaggtgatgcaggtactgagccacgtggtcctggagttccccctgcaacagatggattccccgcttgactcaagccgctactgtgccctgctgcttcctctgctaaaggcctggagccctgtttttaggaactacataaagcgcgcagccgaccatttggaagcgttagcagccattgaggacttcttcctagagcatgaagctcttggtatttccatggccaaggtactgatggctttctaccagctggagatcctggctgaggaaacaattctgagctggttcagccaaagagatacaactgacaagggccagcagttgcgcaagaatcaacagctgcagaggttcatccagtggctaaaagaggcagaagaggagtcatctgaagatgactgaagtcacactgcctgctcctttgggtgtgattgagtgccctcctggctcctgggctgggacaagtgaggaactagctgcagagggatgagtgacccaccatccaggctgagactgaaaggagcacaggctggaactacagtattctttcccctgctaccaaccatgtgcctcccatcctgactgtggagctgggatgtggaagtggggctggaacaaagcttctgcctagggaggagctaagcacgccccggcagttgggaggaaggccagagggaacagcctttgtgcctccggcctcttccctccggggaacagccagaagagcaggccgggcctcctttccggctggctgggaattatggctcaatatcacaaaggagaggagcggggtataactaaaaattggggcagcggtgtcgat

SEQ ID NO: 252828 - DNA, 645 bp, Homo Sapiens
ttccggttcctagcgttaactgcgaccggggttcagcgctcgggtgaggagctggtggcgtcggcaggttcgaggcgattcgagctccagctaggatgatcgaggttgtttgcaacgaccgtctggggaagaaggtccgcgttaaatgcaagtatccactggcagccgagaggcagtggtacccgcaggggtgcttggcgtgaggcaggcaactcaatctgtgttgtcggatggttttagttaaacccgggagagggggcggatggggtcctggcagatggtattctgccctagaatgtcctcttcctcgttctaccgcttccatttgccttaactgctctgcgcccagcacggatgataccatcggggaccttaagaagctgattgcagcccaaactggtacccgttggaacaagattgtcctgaagaagtggtacacgatttttaaggaccacgtgtctctgggggactatgaaatccacgatgggatgaacctggagctttattatcaatagatgagaatcctcatcttcctgccccgctttcctctcccatcctcatcccccacactgggatagatgcttgtttgtaaaaactcaccttaataaagacttagatgttgctttgttgttgtctctgtatgaa

SEQ ID NO: 252829 - DNA, 914 bp, Homo Sapiens; identical to SEQ ID NO: 15328

SEQ ID NO: 252830 - DNA, 671 bp, Homo Sapiens; identical to SEQ ID NO: 15329

SEQ ID NO: 252831 - DNA, 842 bp, Homo Sapiens
  misc_feature (498)..(502): n is a, c, g, or t
  misc_feature (504)..(544): n is a, c, g, or t
  misc_feature (546)..(592): n is a, c, g, or t
  misc_feature (594)..(634): n is a, c, g, or t
  misc_feature (636)..(642): n is a, c, g, or t
  misc_feature (644)..(647): n is a, c, g, or t
  misc_feature (649)..(652): n is a, c, g, or t
  misc_feature (654)..(665): n is a, c, g, or t
  misc_feature (667)..(667): n is a, c, g, or t
  misc_feature (671)..(671): n is a, c, g, or t
  misc_feature (673)..(735): n is a, c, g, or t
  misc_feature (742)..(742): n is a, c, g, or t
gggagcgttaactgcgaccggggttcagcgctcgggtgaggagctggtggcgtcggcaggttcgaggcgattcgaggtgagggggtcaagcggagaggctcggagtcggagaaagctgtcgcgacccagccacccagggtctggggtcggtgggagctccagctaggatgatcgaggttgtttgcaacgaccgtctggggaagaaggtccgcgttaaatgcaacacggatgataccatcggggaccttaagaagctgattgcagcccaaactggtacccgttggaacaagattgtcctgaagaagtggtacacgatttttaaggaccacgtgtctctgggggactatgaaatccacgatgggatgaacctggagctttattatcaatagatgagaatcctcatcttcctgccccgctttcctctcccatcctcatcccccacactgggatagatgcttgtttgtaaaaactcaccttaataaagacttagatgttgcnnnnnannnnnnnnnnnnnnnnnnnnnnnnnnnnnnnnnnnnnnnnncnnnnnnnnnnnnnnnnnnnnnnnnnnnnnnnnnnnnnnnnnnnnnnntnnnnnnnnnnnnnnnnnnnnnnnnnnnnnnnnnnnnnnnnncnnnnnnnannnncnnnngnnnnnnnnnnnncncccntnnnnnnnnnnnnnnnnnnnnnnnnnnnnnnnnnnnnnnnnnnnnnnnnnnnnnnnnnnnnnnntcatccnccctttacctaatttttcggcaactctgccccccagtaaggaacccccggggtcctaccggaaggcgttccaccgcgcaaccccctcgtacccatcttgt

SEQ ID NO: 252832 - DNA, 634 bp, Homo Sapiens
  misc_feature (455)..(467): n is a, c, g, or t
gggtttgggcgcccgccgcgagtatggtgtaggttacgccctctgttgagcccgcccaggtgttggtcctttattctctccgcgcctctgtatgttgtggggaaatttggagggggatgcgggtttcccaccggggaggggctttgcgcgctgtttgcggcgcgcgtgttgtggttgccgtatgtaaagtctcccaggctggctccgagttgtaacatgggaaaggggtgcgggcgtaccgccagaagtttcggggagggttattttgggcagatccccccggttaaaggattttaccggtggtctcgccggttgaaattctcgagggggttttttggatggataccggggggcgaaagaatgggaagtgctctagccgttgtgggggggcaacaatttcccgcaggatgcgcctttgtccatgatttcgccaagctccgagatctggaggggcnnnnnnnnnnnnnctcgggaagggccccattgtgttggttgccgggaattcggccattttggccggggtgttatcaaatcatatttcaccgtgaatattcagtggagaacttctctacctggatgagctagtaatgatttcagatcatgctatccccagaaataaaagcaaaaaaatatt

SEQ ID NO: 252833 - DNA, 1032 bp, Homo Sapiens
  misc_feature (35)..(35): n is a, c, g, or t
  misc_feature (348)..(374): n is a, c, g, or t
tgagaatagggaaaagagagagcgaaatgggggtnaagaggataaaagagggtggagatgtgagaggggtgtaggaggaggggggagagaaagattgtgttgggggggatgggttttttgaaaaagaacacatatagtttaattgatactttgccaatacaaaaataagcatccacagaatgtttatttactgtttaaattactccatattttcatatactgtgaacagaaaatatattttaccccacatatagtaaaagcaaacaagtgcaatctttcaaacattaaaatcataatcaaatctgtacaacagataaataaatgtatacctctaacagttagcttgtnnnnnnnnnnnnnnnnnnnnnnnnnnncatttattgcccaaattcaccagtttacttaaaattctacttatggtaatacagctcaatcataacaacttgcatgtttactaccactgcacaagtttagactgataaatatttaaaataggaggtgggtaataggaaataccaaatggctataaagagctttccaaatattggaaataatatacgaaaattaattagtggggataacatattaaatggatccacagggtaactggtattacactggtatagcttgaggaaaggaaacaggtgaacgtttggattggaaaaaaaattttggcttttttataaaacgaagcaacaataacatcaacaatgacaaaaccctgtcatggagcctcagaactattctgtgagacaaagtgtacaaagatttaggcttgcatacccgaaaaccacagttaggaagaaaaatcatttcaggaaacaacatcagaacaagaacacatataaattaaaggcatactgtttatcattccacttcattgcacatataagaaaacaatactgccgtcattcttgagtaagaaagtttccaatgaaagaggaagttccacaatgaatacaggtgcagacagtcttattaccacaaatttagttatatcaaaacacttggtggtgtccctaagttaattaa

SEQ ID NO: 252834 - DNA, 592 bp, Homo Sapiens
agaccactgacaaagggatcactagagatgttagtccactgtcacccaatagtatattgttacctacaaccttgggtaagatgggataagttaacatcagtggcaagatacacattcaatgtaaaatagccttaacacaataacaacaattttggtttattaaaacaaattaagttcacacattgtcattaaaaaggcattttgaaattcactgtattttaattaccttaatttgcaaatggtaaggcaatttccttctaaaattcaaattgtttctcttactaagcagattattatcctgatcacttaccacactcctatcatcctgtcacttacgatactgctgtaaactaactaataagtggcctttccacttagaatttcttcgtgtgtcttaggtttcagtttacttaatcctccatggaaaagtatataaatctgtccatctaatatagaagaacctctcacaactctggtgcaaccactgaccatgttctttcacataaattctagaaatgaagacacagcatcaaatgtaagagttaaattacattgaaatttgcttttgaaaaatattgaatccttttaatat

SEQ ID NO: 252835 - DNA, 842 bp, Homo Sapiens
  misc_feature (442)..(442): n is a, c, g, or t
  misc_feature (734)..(746): n is a, c, g, or t
agcgactgccaccatggggctggtttttatgggacctctcaaaggagcgagatcgttcacgcctgtccctatgatgtcccctttaatgcctgggtttcttggctgcatctgagtgatcccgagacttgctctgagatcgagaacgagattttttcctttaatgaccatgtctgtttgaactttttaaatcatctctggaatgcttggccttaaggtgaggagaaccatgattatgatgtcttcgagggctttcactgtgactgcggaacctgcttcttgatctcgagctgtatgttccagatcgactccgcctattattatagcttagataataaaaatttgaagtttaggttcagtttctatggggaacagattattccggtggttgctcataacaggttcaaaacaaaactaccagctacataaatgacaaaccagaacntttcaaaatctccccacccctcactgctgtatgcccaagcctatatataacatattaaatcttaagcaaatgttcttatgtctttattccaagggaagtaattagcaattttaatagtgtcctagagctatgctttttattaagtatctcccacatgttcaaaagacattgaagagccacgaagagctaacaatctaattacaggcctaactaaagaagattcattgactggttaatttgattattggttattaataaggggttaatgaaacacattttctaactgaaattnnnnnnnnnnnnngaagttttcacattatgaacaatactatggccctcaagcactttgtgggtagctcatacacttctccaaaacacatgggagaaaatataacagaat

SEQ ID NO: 252836 - DNA, 355 bp, Homo Sapiens
  misc_feature (333)..(333): n is a, c, g, or t
gtttgtaattctttttctttttaatttaaaagacaactacaagaagaaataattataaatctacattggtagacatataatgcataaagatgtaatttagatgacaataacacaatgttcgggaaggaacagagctatatagaaagaaagtctttacatattactgaaatgaagttcgtattaatccaaacaagactgttatgaattaagatgttcattgtaatcccagggcagccactaagaaaacagctcataaaatatagtaaaagcttgtaacatgtacacaaattaggctcaaaatgggataacaggaccaaaatgtaggggcctaanatggatacaacttttcaaaagg

SEQ ID NO: 252837 - DNA, 2041 bp, Homo Sapiens
  misc_feature (400)..(400): n is a, c, g, or t
ggaagtcggcgtgtcgagtggctcttcctggctgctgaggcgggttaaggtctgagggtcttgtggggccacggcgctgatcaccaggtgtttggcttggtcggttcttaatcctcgcctggcaatgggcgacgtacacctggcataacttgccgggtggcgttccgcgacgcgaacatgcagcgggcccactaataagacggactgggcaccgctacaacctgcggcggaaaggtggccagcatggccccagtgaccgccgaggggctcccagaagcgagtgcgggcccagcgggccgtcgcgaaggaggagagcaagggctcggccacctactgcaccgtttgcagtaagaagtttgcctctttcaacgcctacgagaaccacctcaagtcccggcgntcacgttgagctggagaagaaggccgtgcaggcagtgaatcggaaagtggagatgatgaatgaaaagaacttggagaaaggactgggcgtggacagtgtggacaaggatgccatgaacgcggccatccagcaggccatcaaggcccagccgtccatgtctcccaagaaggcgcccccagcgcctgcaaaggaggccaggaatgtcgtggccgtgggtactggtggccgtgggacccacgaccgagacccgagtgagaaaccaccccggctccagtggtttgaacagcaggcgaagaagttggcaaagcagcaggaggaggacagcgaggaggaggaagaggacctggatggagacgattgggaagatattgattctgatgaagaattggaatgtgaggatactgaagcaatggacgatgtggtggagcaggatgcagaggaggaagaggctgaggaaggcccaccccttggtgccatccctatcacggactgcttattttgttcccatcattccagctcgctgatgaagaatgtggctcacatgaccaaagaccacagtttctttattcctgatatagaatatctttcagatattaagggactgattaaatacttgggagagaaagttggtgttggcaagatttgcttgtggtgcaacgagaaagggaagtccttctactccacagaagctgtacaggcacatatgaatgacaaaagccactgtaagctcttcacagatggcgatgctgctttggaatttgcagacttctatgattttaggagtagctatccagatcacaaggaaggggaggaccccaataaggctgaggagttgccctcagaaaagaacttggaatatgatgatgaaaccatggaattgattctgccttctggtgccagagtgggtcatcgctccttgatgagatactacaaacagcgatttggcttgtcaagagctgtggcagttgccaaaaatcggaaggccgtgggccgagtacttcagcagtacagagccctgggatggactggcagcacaggagcggctcttatgcgagagcgagacatgcagtatgtccaaaggatgaaatcaaaatggatgctgaagacaggaatgaagaacaatgccaccaagcagatgcactttcgggtccaagtgagattctgagagtctgctgggattgagcaatcatctcctgcccaagtttcctccttgccctgaggaccagtgaaagacagatcataggagagacccttttgctgctacttcattcgttctgacctaataataaaagttagaaccataaaacccaaatgtacatgaataaaccagaccaatgtcccacactactgggtactgacactcgccttcaatatgtccgatcttcagactctgcttctttcttatcaacacattcgaacctgctgattccactatgtggatctgaagtgcatgaacagatattgcaggattttaacaaagctgttaaacataattacatatccagaacaagagttaggatcatgctatgattttactctagaatggaaaagacatggacttatatgtttattggcaaaccggagctgatcacataaattgtcccgacattacaagacctaaagtgacaacctagcatacaa

SEQ ID NO: 252838 - DNA, 612 bp, Homo Sapiens
  misc_feature (515)..(515): n is a, c, g, or t
ggaagtcggcgtgtcgagtggctcttcctggctgctgaggcgggttaaggtctgagggtcttgtggggccacggcgctgatcaccaggtgtttggcttggtcggttcttatttctcgcctggcaatggcgacgtacacctgcataacttgccgggtggcgttccgcgacgcggacatgcagcgggcccactataagacggactggcaccgctacaacctgcggcggaaggtggccagcatggccccagtgaccgccgagggcttccaggagcgagtgcgggcgcagcgggccgtcgcggaggaggagagcaagggctcggccacctactgcaccgtttgcagtaagaagtttgcctctttcaacgcctacgagaaccacctcaagtcccggcgtcacgttgagctggagaagaaggccgtgcaagcagtgaatcggaaagtggagatgatgaatgacgccgccatccagcaagccataaaggccaagccgtccatgtctcccaagaaggcgcccncagcgcctgcaaaggaggccaggtgtcgtggccgtgggtactgggtggccgtggacccacgaccgagacccgagtgagccacccccgcttcgtggtt

SEQ ID NO: 252839 - DNA, 1643 bp, Homo Sapiens
  misc_feature (1294)..(1294): n is a, c, g, or t
  misc_feature (1528)..(1601): n is a, c, g, or t
  misc_feature (1622)..(1622): n is a, c, g, or t
aggtatttcaaatccaggcagagcacacaccagtttattttgaaatgcaacacagatcagtattttatgaatacaacttattactacattatcaggtaaaaacagctttcaaatgcatgcatagaaagttaagcgtagtctctggactccttatttctaaatatacaaaaaatacatttaaattatataattttagtgaatcaaagacttataaaattacaattttggttttcacaacatagaaaaaatacaaaaatgactatatatacggttgtacaattttttacccaaatttcaaaggagcagtatgtattgaatttaatgttttataatgttttatctgaaactcagaactgcaagtaatttgcaggttgtaccatatcaatgccaaccttttattataaatgaataaccaaaaaaataagtgaaaaatgagggcacgatctcttcttacacctcttcaactctccagcatctaaacctttcctgtcagaagtctgctctggagacttttttcatctgcaaggacagtgctttattccatgactaactctccatggtgcctctggataatggttggtacgtgttaaatgaataagcccaacctcagcaaacagaacgcagcaagatgtagattagcagtctgtgctgacaaaagcactactgcggacctcaaagaattctctgtcagaagaaggcccccacggagggatctgaaatacataatcaagtgggtagttgggaggatgatgcctttgactatgccctgaaatgaaacctctaagtctgacaaaatacccacaaaaacatgaccttccttgttcacactttataagaaggtgtgacatttggtggtgtggttgttctcaatttataaaataataaatgacttcaaaggagaaatgaattcatgttagggataaagaaaccagttactgagagaggttactgaaggacacagtgacatgccttacttatctgccataagtattctaaatgttgatgtacaaaaatacacactggggttgagaccctttttgaaaagggagctgtgtgctgtgttctcattgccaaagttcaattcaatgcaacaccactgtttgcaacagaatgttttttataagtagtgacaaattataataaggaggcccaaataaaacccccagtccagcaaccctggaaaagctgcatttttcatcctgatttctagaatttttccaaaaacaactgaaaaaatctaacagaacaaagtaaatgacaaatataacccaagttgattctattttatagtagnaaatacattatggaagaataaaatgagagaaaagtcatgcaaaaaatctttccccacatattttgtctatcaaatacaagaatagattctaatttcaacatgtccaagttgagtgctgactttaagaagcagaattttaatgttcaattcaaaaataatttattacacacctgcctgcattaaattttcaaacttctataaaaataagcacttaaaaatttagttttccagggnnnnnnnnnnnnnnnnnnnnnnnnnnnnnnnnnnnnnnnnnnnnnnnnnnnnnnnnnnnnnnnnnnnnnnnnnnatcaagaccatcctggctaancacggtgaaaccccgtctctt

SEQ ID NO: 252840 - DNA, 778 bp, Homo Sapiens
  misc_feature (129)..(192): n is a, c, g, or t
cataataataattccagtgacctccatccccataagcatcattcccatgaacagcatccccacggacaccatccccatgcacaccatcctcatgaacatgatacccatagacagcatccccatggacannnnnnnnnnnnnnnnnnnnnnnnnnnnnnnnnnnnnnnnnnnnnnnnnnnnnnnnnnnnnnnnccccactgccatgatttccaagactatggaccttgtgacccaccaccccataaccaaggtcactgttgccatggccacggcccaccacctgggcacttaagaaggcgaggcccaggtaaaggaccctgtcccttccattgcagacaaattggatctgtgtaccgactccctcctctaagaaaaggtgaggtgctgccacttcctgaggccaattttcccagcttcccattgccgcaccacaaacatcctctaaagccagacattcagccctttcctcaatcagtctctgaatcatgtccagggaagttcaagagtgggtttccacaagtttccatgttttttacacatacatttccaaaataaaatgtgattcctttgaagaggaaaatgaataatacattgaattagaaacataaataaaatgaccagtaattgtgaaaattacagttcttttcaacctactttcatactgaagatgcagcaaaatgtgaatgggtgctgcctattagtagttaattctgtcactcaccactacatcacttgagactctatgccactcagaatctccttctttcctggacttctc

SEQ ID NO: 252841 - DNA, 838 bp, Homo Sapiens
  misc_feature (13)..(13): n is a, c, g, or t
  misc_feature (34)..(34): n is a, c, g, or t
  misc_feature (54)..(54): n is a, c, g, or t
tggggaatgaatnatggatcctctaagatcccangggggcttgaaatggaaggncttggtgggtaagaaagaaacgctcatgacccaccccagtggaagggatgtccccaaatgaggcggtacaccattgatgttctcatgttcctgagggtcgaagacttcacagtttatgacaaggtttttcgggctttccaagtccaaggcttctacatcatagaacaaaattgctctgcagaatccaaagacattggggtgtctggggaaatggtgtctggagcagttccgcacagagaagtccacgaagtaaccagttccttcccctcctctcactcttgcaactctctcgattcggtccactctgaaagaggcaaagtcatcattctcctctttgtacttctcaagggctatgttggcttgttttctgtagcgctcagtatcctcaaagaaatctatgaggaccggactatctttggtattggccagtgctgaagagacagaacttgtggtgcagttaaagtcaatcactctgaggtcctgagattcatgggaatgtcttgtagctattaccttacattgtccgatcactatttcagatggacgtctggaatcaggtggctcacagtcattccagtatttcctggataggaccactctgtccaagtgggcatcagcaatccgcagcaattggaaaaggtagccatcccgtcgccttttattgatcaggtctagagctttctcagcctccggctcaacagcactgcagtcagtgggactcacggcacacgaatactgcaatgtgatcaaaagcagtgctgcaatgagtgccttcattttgtta

SEQ ID NO: 252842 - DNA, 778 bp, Homo Sapiens
  misc_feature (110)..(110): n is a, c, g, or t
gttcctccatgttccctgagggtccgaaagacttcaacagtttaatgaacaaggtttttcgggcctttcccaaagtcccaaggcttcctaacatcaatagaacaaaaatngctctgcagaatcccaaagacattggggtgtctggggaaatggtgtctggagcagttccgcacagagaagtccacgaagtaaccagttccttcccctcctctcactcttgcaactctctcgattcggtccactctgaaagaggcaaagtcatcattctcctctttgtacttctcaagggctttgttggcttgttttctgtagcgctcagtatcctcaaagaaatctatgaggaccggactatctttggtattggccagtgctgaagagacagaacttgtggtgcagttaaagtcaatcactctgaggtcctgagattcatgggaatgtcttgtagctattaccttacattgtccgatcactatttcagatggacgtctggaatcaggtggctcacagtcattccagtatttcctggataggaccgaacagtccgattcttgcacatctaagactaagtaatatacagttgtattttccactctgtccaagtgggcatcagcaatccgcagcaattggaaaaggtagccatcccgtcgccttttattgatcaggtctagagctttccagcctccggctcaacagcactgcagtcagtgggactcacggcacacgaatactgcaatgtgatcaaaagcagtgctgcaatgagtgccctcgtgccaattcc

SEQ ID NO: 252843 - DNA, 642 bp, Homo Sapiens
tacatcatagaacaattgtgttctgcagaatcaaaagacattggggtgtctgggaaaatggtgtctgagcagttccgcacagagaagtccacgaagtacccagttccttcccctcctctcactcttgcaactctctcgattcggtccactctgaaagagctgtagcgctcagtatcctcaaagaaatctatgaggaccggactatctttggtattggccagtgctgaagagacagaacttgtggtgcagttaaagtcaatcactctgaggtcctgagattcatgggaatgtcttgtagctattaccttacattgtccgatcactatttcagatggacgtctggaatcaggtggctcacagtcattccagtatttcctggataggaccgaacagtccgattcttgcacatctaagactaagtaatatacagttgtattttccactctgtccaagtgggcatcagcaatccgcagcaattggaaaaggtagccatcccgtcgccttttattgatcaggtctagagctttctcagcctccggctcaacagcactgcagtcagtgggactcacggcacacgaatactgcaatgtgatcaaaagcagtgctgcaatgagtgccctcgtgccaattcctgcagcccgg

SEQ ID NO: 252844 - DNA, 999 bp, Homo Sapiens
  misc_feature (30)..(30): n is a, c, g, or t
  misc_feature (35)..(35): n is a, c, g, or t
  misc_feature (50)..(50): n is a, c, g, or t
  misc_feature (107)..(107): n is a, c, g, or t
  misc_feature (141)..(141): n is a, c, g, or t
aggaaagggctgaatgtctggctttagagnatgtntgtggtgcttagagnagggagtcggtacacagatccatttgtctgccaatggaagggacagggtcctttacntgggcctcgctttcttaagtgcccaggtggtggnccgtggccatggcaacagtgaccttggttatggggtggtgggtcacaaggtccatagtcttggaaatcatggcagtggggatggtgtccatggggatggtgtccatgggggtggtgtccatgagaatggtgtccatgggggtggtgtccatgggaatcctgtctatgggtatcatgttcatgagaatggtgtgcatgggaatggtgtccgtggggatcctgttcatgggaatgatgcttatgggaatggaggtcactggaattattattatgagaatgtctttgggccccatttgtgccaaaagtggcatgttgacaacttgagcaggacatgggcaatagtggaggagggccttgtggaagtgggggtccatgtgagtgatctctttcatctggaggaggtgggggtccatgttcgtgtggcttgtggggatgatgatgatctctagatccatggggcttgaatggaggcttggtggtagaagaacgctcatgcccaccccagtggaagggatgtcccaaatgaggcggtacaccattgatgttctcatgttcctgagggtcgaagacttcacagtttatgacaaggtttttcgggctttccaagtccaaggcttctacatcatagaacaaatctgctctgcagaatccaaagacattggggtgtctggggaaatggtgtctggagcagttccgcacagagaagtccacgaagtaaccagttccttcccctcctctcactcttgcaactctctcggttcggtccactctgaaagaggcaaagtcatcattctcctctttgtacttctcaagggctttgttggcttgttttctgtagcgctcagtatcctcaaagaaa

SEQ ID NO: 252845 - DNA, 1019 bp, Homo Sapiens
ctcacatggacccccacttccacaagggccctcctccactattgcccatgtcctgctaagttgtaacatgccacttttggccaaatggggcccaaagacattctcataataataattccagtgacctccatccccataagcatcattcccatgaacagcatccccacggacaccatccccatgcacaccatcctcatgaacatgatacccatagacagcatccccatggacaccacccccatggacaccatcctcatggacaccacccccatggacaccatccccatggacaccatccccactgccatgatttccaagactatggaccttgtgacccaccaccccataaccaaggtcactgttgccatggccacggcccaccacctgggcacttaagaaggcgaggcccaggtaaaggaccctgtcccttccattgcagacaaattggatctgtgtaccgactccctcctctaagaaaaggtgaggtgctgccacttcctgaggccaattttcccagcttcccattgccgcaccacaaacatcctctaaagccagacattcagccctttcctcaatcagtctctgaatcatgtccagggaagttcaagagtgggtttccacaagtttccatgttttttacacatacatttccaaaataaaatgtgattcctttgaagaggaaaatgaataatacattgaattagaaacataaataaaatgaccagtaattgtgaaaattacagttcttttcaacctactttcatactgaagatgcagcaaaatgtgaatgggaaaagagatggcctgagaagagagatcaaatggaaaggagaggaaagaactcagtgctgcctattagtagttaattctgtcactcaccactacatcacttgagacaaatctatgccactcagaatctccttctttcctggacttaactctaattctagagtctctgttactgcttgggctatacctgggcatactaataaagtatggtattgaaactattgttaaaa

SEQ ID NO: 252846 - DNA, 1703 bp, Homo Sapiens
  misc_feature (1444)..(1468): n is a, c, g, or t
aatagagaaaatgtttcagcctgaaaactcaaaatctcttcttctaagagcacactgtcagacatctggatggtcacttactgagcaggatccctacaataatattgtccgtactgcaatagaagcaatggcagcagtatttggagggactcagtctttgcacacaaattcttttgatgaagctttgggtttgccaactgtgaaaagtgctcgaattgccaggaacacacaaatcatcattcaagaagaatctgggattcccaaagtggctgatccttggggaggttcttacatgatggaatgtctcacaaatgatgtttatgatgctgctttaaagctcattaatgaaattgaagaaatgggtggaatggccaaagctgtagctgagggaatacctaaacttcgaattgaagaatgtgctgcccgaagacaagctagaatagattctggttctgaagtaattgttggagtaaataagtaccagttggaaaaagaagacgctgtagaagttctggcaattgataatacttcagtgcgaaacaggcagattgaaaaacttaagaagatcaaatccagcagggatcaagctttggctgaacgttgtcttgctgcactaaccgaatgtgctgctagcggagatggaaatatcctggctcttgcagtggatgcatctcgggcaagatgtacagtgggagaaatcacagatgccctgaaaaaggtatttggtgaacataaagcgaatgatcgaatggtgagtggagcatatcgccaggaatttggagaaagtaaagagataacatctgctatcaagagggttcataaattcatggaacgtgaaggtcgcagacctcgtcttcttgtagcaaaaatgggacaagatggccatgacagaggagcaaaagttattgctacaggatttgctgatcttggttttgatgtggacataggccctcttttccagactcctcgtgaagtggcccagcaggctgtggatgcggatgtgcatgctgtgggcgtaagcaccctcgctgctggtcataaaaccctagttcctgaactcatcaaagaacttaactcccttggacggccagatattcttgtcatgtgtggaggggtgataccacctcaggattatgaatttctgtttgaagttggtgtttccaatgtatttggtcctgggactcgaattccaaaggctgccgttcaggtgcttgatgatattgagaagtgtttggaaaagaagcagcaatctgtataatatcctctttttgttttagcttttgtctaaaatattattttagttatgatcaaagaagagagtaaagctatgtcttcaatttaatttcaatacctgatttgtactttccttgaaagctttactttaaaataccttacttataggcctggtgtcatgctataagtatgtacatacagtttcacttcnnnnnnnnnnnnnnnnnnnnnnnnnctctctatactctctataacaatactttatcaagaactctggacaatggtattatttttaaaaatcatggtgatgtatttattagaatgtttcttataaatctgtttactttttatattaagaattaaactgtacctaaaaaaactctgactattcccatttgtcagtttagcattacattgtcttgagcaccagaaaataaaatccatatattaataaaaacctatcttgaaaa

SEQ ID NO: 252847 - DNA, 621 bp, Homo Sapiens
ataagtaaaatactcagttgaatgtaaggaaattaagctcccagtagattcaagggaattgtgctaacagaaaagatgaaattcgggcctaagaaaccttacatattacctcttgatagcagatgttatctctttactttctccaaattcctggcgatatgctccactcaccattcgatcattcgctttatgttcaccaaatacctttttcagggcatctgtgatttctcccactgtacatctgaaacatgaaatggtggttccattaacttcattattttgtgataaagatatctgtttaccataatattcaatataattaaacattttattacataagtaaatgactgtaaaaatgtaaaataagaattttttaatgcattatgaaagcatctcttctgaaattacttaagaaaaatttattctggatgcctttatgcatccaattctcttttcaacatttgtcaaccaagaaatgactgaatgacctaataattatatatatagacaagtacctgaaggttgctgaataattcaccacttaacacaaatggataaacagcaacactcccataaatattttttgataagaagtaaatcttttagcatattccatccatt

SEQ ID NO: 252848 - DNA, 734 bp, Homo Sapiens
  misc_feature (28)..(28): n is a, c, g, or t
  misc_feature (138)..(138): n is a, c, g, or t
  misc_feature (234)..(234): n is a, c, g, or t
  misc_feature (242)..(243): n is a, c, g, or t
  misc_feature (621)..(621): n is a, c, g, or t
  misc_feature (644)..(644): n is a, c, g, or t
  misc_feature (692)..(692): n is a, c, g, or t
  misc_feature (710)..(710): n is a, c, g, or t
gataggtttttattaatatatggatttnattttctggtgctcaagacaatgtaatgctaaactgacaaatgggaatagtcagagtttttttaggtacagtttaattcttaatataaaaagtaaacagatttataaganacattctaataaatacatcaccatgatttttaaaaataataccattgtccagagttcttgataaagtattgttatagagagtatagagagtttttngggatttnnctttatttttgaagtgaaactgtatgtacatacttatagcatgacaccaggcctataagtaaggtattttaaagtaaagctttcaaggaaagtacaaatcaggtattgaaattaaattgaagacatagctttactctcttctttgatcataactaaaataatattttagacaaaagctaaaacaaaaagaggatattatacagattgctgcttcttttccaaacacttctcaatatcatcaagcacctgaacggcagactttgggaattcgagtcccaggggcccaaatacattggggaaacacccaactttcaaacaggaaattccataatccctgagggtggggtatcaccccctcccaccacatggacaagggantatctgggcccgtcccaggggangtttaagttcttttggatgaggttcaggggactagggggttttttggncccagcagccgaggggtnctttcggcccaccaggaatgcaca

SEQ ID NO: 252849 - DNA, 872 bp, Homo Sapiens
  misc_feature (108)..(108): n is a, c, g, or t
atataggtaccaaacagtcttcagttacactgtgacccaatcatcagtgtttctatcaccaagacttggccaacggccaacagctgcagatccgttctgtgaaggaanagctagcccaaggcttgcaatagtgctgtggcttcgctggaaggaggccaatccctttaggtaatcaggtcggcgtgggcaggactcatccccaggactgtcatcttctgacctgggttctgctcccaactgtttatgatctgctttgaccactggaaatcccagcactccctttgggacatcactgacagagacctgggctgagaggacagcttccatttcacaaacagtttttgcagactcacagctactgatgaatgcgtcctctttgccttttttcagtgtgtcggaactccccaaagaattttgtttctttgattgggtggcaacataagtatctgcaatattttgtaacctgtcgatactacaacccaaacttccagtcagtttttgtggattgcgttagtagtgaagaagtaggggaatgctggtaggcttctaggaacggcagcatatggggcggccatctgttgtggaattaatattagagggaattctcttccttcatatggtgaagcagtaaaaccagatgggcttattaccataaatccagggctcataagggaccttcctccactgctggaatgcctcaggtacatgattgaccgcactttctcctgaaagatcttgccatctctcggggcatgggtgtgagttgcccctctttgtattcctgcaaaacctgacaagtcagtagaaagtgatgaaccacttgagctttcaataactgcttaatattaaacatctgctggtggtgatctgct

SEQ ID NO: 252850 - DNA, 1582 bp, Homo Sapiens
ggggccctgtgagttcctccggccgggctgcggggctccgctcagtccgggagcgcagctgggccgcggcgctccgacctccgctttcccaccgcccgcagctgaagcacatcccgcagcccggcgcggactccgatcgccgcagttgccctctggcgccatgtcgcagaacggagcgcccgggatgcaggaggagagcctgcagggctcctgggtagaactgcacttcagcaataatgggaacgggggcagcgttccagcctcggtttctatttataatggagacatggaaaaaatactgctggacgcacagcatgagtctggacggagtagctccaagagctctcactgtgacagcccacctcgctcgcagacaccacaagataccaacagagcttctgaaacagatacccatagcattggagagaaaaacagctcacagtctgaggaagatgatattgaaagaaggaaagaagttgaaagcatcttgaagaaaaactcagattggatatgggattggtcaagtcggccggaaaatattccccccaaggagttcctctttaaacacccgaagcgcacggccaccctcagcatgaggaacacgagccgtcatgaagaaagggggcatattctctgcagaaattctgaaagttttccttccatctctgctgctctctcatttgctggccatcggattggggatctatattggaaggcgtctgacaacctccaccagcaccttttgatgaagaactggagtctgacttggttcgttagtggattacttctgagcttgcaacatagctcactgaagagctgttagatcctggggtggccacgtcacttgtgtttatttgttctgtaaatgctgcgttcctaatttagtaaaataaaagaatagacactaaaatcatgttgatctataattacacctatgggatcaataagcatgtcagactgattaatgtctactgtgaaaatttggtagtaaattttcatttgatattagatataaatatctgaatataaataattttaatatactagtcatgatgtgtgttgtattttaaaaattatctgcaaccttaattcagctgaagtactttatatttcaaaagaatgaataacattgataataaaatcgctactttaaggggtttgtccaaaataaatattgtggccttatatatcacactattgtagaaagtattatttaatttaaatggatgcaggttgtctactaaagaaagattatatataactatgctaattgttcataatcaacagaaaccaagatagagctacaaactcagctgtacagttcatacactaaactcttcttgcttttgcattataaggaattaagtctccgattattaggtgatcaccctggatgatcagttttctgctgaaggcacctactcagtatcttttcctctttatcactctgcattggtgaatttaatcctctcctttgtgttcaacttttgtgtgcttttaaaatcagctttattctaagcaaatctgtgtctactttaaaaaactggaaatggaaaaaaattaaatcttggcaattcttcag

SEQ ID NO: 252851 - DNA, 194 bp, Homo Sapiens
  misc_feature (15)..(15): n is a, c, g, or t
  misc_feature (25)..(25): n is a, c, g, or t
cctcgctcgcagacnccacaagatnccaacagagcttctgaaacagatccccatagcattggagagaaaaacagctcacaggtaagctggaaggagaatgtgcagttgtaaaagtatttgtgatctgtttgtacaggaaacggttttaaatgtaattgagcacctcagagaaaagtcgggctttaagggtgttt

SEQ ID NO: 252852 - DNA, 356 bp, Homo Sapiens
  misc_feature (79)..(79): n is a, c, g, or t
gctcccccaacagactaaagtccccaggtcactgcatcccccaaagagggcgaggctccctatataaggacggactganagcaggagcaagtcccagaacgcggcccgaggcgaacagcagcccactgtccctagaggtgacacgggcacttccagctgtgactgtcacccactgaagacatcggcactgtaacacatacacttgttgatgcgcgcctacctgtcacagtgagagctcttggagctactccgtccagactcatgctgtgcgtccagcagtattttttccatgtctccattataaatagaaaccgaggctggaacgctgcccccgttcccattattgctgaagtgca

SEQ ID NO: 252853 - DNA, 715 bp, Homo Sapiens
  misc_feature (36)..(36): n is a, c, g, or t
  misc_feature (61)..(61): n is a, c, g, or t
  misc_feature (182)..(182): n is a, c, g, or t
  misc_feature (189)..(308): n is a, c, g, or t
  misc_feature (381)..(441): n is a, c, g, or t
gtcttcctcaaccttgtgtcccttactgaaataaantctggttccttttgccactccatancccaatatggttagctgaacccctgccctcctcacatgcctgttgttacatacccttagcctggtgattaattttccttgttttccccaagtcaataaaaagattgcagacccaggcacgngtgtcannnnnnnnnnnnnnnnnnnnnnnnnnnnnnnnnnnnnnnnnnnnnnnnnnnnnnnnnnnnnnnnnnnnnnnnnnnnnnnnnnnnnnnnnnnnnnnnnnnnnnnnnnnnnnnnnnnnnnnnaggcatggtggcatgtgcctgtaatctcagcctacttgagaggctgaggtgggaggatcaattgagccccacnnnnnnnnnnnnnnnnnnnnnnnnnnnnnnnnnnnnnnnnnnnnnnnnnnnnnnnnnnnnnagatcctgtctcaaaaaatgaaaataaaaagattgcagagttcctcagagcccccaacacaaggccaggcacgaggtaatcatttaacccatgcttatagacttaaaatgaatagttaggaaagtgttagacgctgaaggctaagactgggctaaatctatgttatgcagacagaccgcaagcttataggtacaaaattaaggtgtgtgggtccttctcttttcgtcgttaaaaaatccaactttctaataaacttacacatggtttaataatt

SEQ ID NO: 252854 - DNA, 456 bp, Homo Sapiens
  misc_feature (39)..(39): n is a, c, g, or t
cctgtctcctacaaaaacctacaaaaaattaccccccgncatggtgccatgtgccctgtaacctcagcctacttgaagaggcctgaggtgggagggatcaattgagccccacgaggttgaggcctgtagtgagcctgtgatggtacccactgcactcccagccctgtgtgacagagcaagatcctgtctcaaaaaatgaaaataaaaagattgcagagttcctcagagcccccaacacaaggcccaggcacgaggtaatcatttaacccatgcttatagacttaaaatgaatagttaggaaagtgttagacgcagaaggctaagactgggctaaatctatgttatgcagacagaacgcaagcttataggtacaaaattaaggtgtgtgggtccttctcttttcgtcgttaaaaaatccaactttctaataaacttacacatggtttcactgacaaa

SEQ ID NO: 252855 - DNA, 1069 bp, Homo Sapiens
  misc_feature (975)..(975): n is a, c, g, or t
  misc_feature (986)..(986): n is a, c, g, or t
  misc_feature (1060)..(1060): n is a, c, g, or t
ggggcctcctcagtcggccgctcaggctgcggctcctcccggggccggttcccgctgtctcagccgcggcgcagagggcacatcggcctgaccgactagccggctgccagtgccgggagccgccgcgtccatccccgcccgcctggccggggacccaggactgagtcgtccagctgcgcccctcgcccatagccccagcggtcgccgggcgggcgagcagctcttcggcccttcccggacagcgacgcagtcgcagcgcgcgccctaacacagatgtgggaagataaatgaaggggtctagatgtaaatgtcagtggaaaggagagctaccatcactaagggctgaaaacacagttaaatcactttcaaagttaaaagactattaagaacacaagatggggactcctgcttctggaaggaaaagaacacctgtgaaagaccgattttctgcagaagatgaagctttgagtaacattgccagagaggcagaggcaaggctggcagcaaaacgggctgcccgggcagaagcaagagatatacgcatgagagaactggaacgacaacaaaaagagttggatgaaaaatctgacaaacagtatgctgaaaattatacaagaccttcatctcgaaattctgcctcagcaacaacccctctaagtggaaactcatccagacgaggaagtggggacaccagcagcttaatagatccagacacttcattaagtgaattgcgggatatctatgaccttaaggaccagatacaggatgtagaagggagatacatgcaggggcttaaagaactaaaggaatctttgtctgaagtggaagaaaaatacaagaaagccatggtttccaatgcacagttagacaatgagaagaacaatttgatctaccaagtagacacactcaaggatgttattgaagagcaggaggaacagatggcagaattttatagagaaaatgaagaaaaatcanaggagttaganaggcagaacatatgtgtagtgtgctgcagcataagatggaagagcttaaagaaggcctgcggcaaagagatgancttattgag

SEQ ID NO: 252856 - DNA, 795 bp, Homo Sapiens
  misc_feature (194)..(204): n is a, c, g, or t
  misc_feature (334)..(346): n is a, c, g, or t
  misc_feature (720)..(720): n is a, c, g, or t
  misc_feature (731)..(731): n is a, c, g, or t
  misc_feature (759)..(759): n is a, c, g, or t
  misc_feature (769)..(769): n is a, c, g, or t
gaggggaaaggggtgagtgagtggtgagcaacgtagagagcggtgggcctggaggggaggggagaggggagtggacgtgcagcgagagtgagttagctaaagtgtggttcgaggctactagcactactaagggaatccgcaaaacaaccaacctaaaaaatcagtaccactgtcagctaacataataatgtaannnnnnnnnnnaaagacaaccattattgcagtatttcaaatctgaaatgggttactttcaaaaagtgttacaattgcctactaagataatttcttccatgctttattataaagtgcagaaacaacatgacttctgtatttnnnnnnnnnnnnnctacggttcatttttctagatactgcacacattccgcaggcaattttaaacttggatcttctgttgacttcagatgtggttggtatcactgctcagatacagagttatgatgatcagtagaaaagtctctatttcacagcatgggtttctttagaaacaggctcctgtgcaaaggcagtacttttaccatgaacatctctaagactgtggattattaaatataagtggataatatacatggggtttactggggatattggaaaaataaaagataatgaacccaatttaggtaaatcaacataaatacaaaacagaggcgaattaggccctctacaactggagctcgtcccgcggcttgagcctggggtctttcnggggaccgttntcaaacctagtgggggggagtgaccctntccccggttngctttcccgggggtccgttgtcgggt

SEQ ID NO: 252857 - DNA, 745 bp, Homo Sapiens
  misc_feature (100)..(100): n is a, c, g, or t
actacaggtatcaatgacaaataaaagtagaaaagtttaaagaaatgcttcagagtatataaagatcaaagtactgtcatgactcctcaacactggattntgctcactttacttctctgcttctagacatttagccaaaggtagtctttgttgagactcataagaaaaggaagagaccttatgacctattgtgaacttcattgtttctaataagtaggctttgagcttggtcgagatgatagcattaataaaattcacactggacttcaagaatgcatttaattataaactaaatactatgtcttttagaaaatttcaactccttctaacagttctaatctctcttcttttcaatactttcttcttataggtcatcaggcattgaaaacatattgatacctatctgccatgtttctgttggcaaatataaaatattaatatagtgtgattttttaaatttttccaaaagctgtgatattggctagttacaatgacatactactaaatataatagtctagcacataaaaaagcattctaccattagtgtgtttgtatatgtgtatgcacatacatacataattgagttatctaaaatgtggttcaggctactatcactactaaagaaatccacaaaacaaccaacctaaaaaatcagtaccactgtcagctaacataataatgtaatttagatatgaatcatcagcatgaaaaaaagtaataccttaacaggtacatttctttttt

SEQ ID NO: 252858 - DNA, 363 bp, Homo Sapiens
atagactttgtaacgcagatgtcacttctcatgccagccctgccctggttagctcttctggaggaatactgcagataagaaaaggttaagtccactgaggtatgagtttatagaactccactgtatgtatccagctatactagaacattttgccaagacactggaggactctttcattatctactgtgaagaataaagacttagaggctatataataagttctggattgtgtgtgtaaaaatcatgagttaaaaaagacttgggggagaaagtaaaactagtagaagttacatataattttgaaatttcaccacattgtcaacttactacaggtatcaatgacaaataaaagtagaaaagttt

SEQ ID NO: 252859 - DNA, 1493 bp, Homo Sapiens
cgcaggaaggaattccatttattggggatgcattttcacaatatatgtttattggagcgatccattatcagtgaaaagtatcaagtgtttataaaatttttaggaatggcagattcacagaacatgctagtcagcttgcagttttacctcgtaaagataacagagaattatagtcaaaccagtaaacaaggaatttacttttcaaaagattaaatccaaactgaacaaaattctaccctaaaacttactccatccaaatattggaataaaagtcagcagtgatacattctcttctgaactttaaattttctaaaaaaatatgtaatagtgatcaggaggagctcttgttcaaaagtacaacaaagcaatgttaccttaccataggccttaattcaaactttgatccatttcactccaatgacgggagtcaatgctacctgggacacttgtatttgtaaattctgatttagcttattgtagacttgtgcctactttgtcatgagggtttgacttctgcattcttcgtggctttccttcctttggcttaggtttgctaaagctagaagattcaattgctctttacagacttatgaggaagatagactttgtaacgcagatgtcacttctcatgccagccctgccctggttagctcttctggaggaatactgcagataagaaaatagttatttgggaggctccctcagtgtggtaggaattgagactaacacaattttggttaagtccactgaggtatgagtttatagaactccactgtatgtatccagctatactagaacattttgccaagacactggaggactctttcattatctactgtgaagaataaagacttagaggctatataataagttctggattgtgtgtgtaaaaatcatgagttaaaaaagacttgggggagaaagtaaaactagtagaagttacatataattttgaaatttcaccacattgtcaacttactacaggtatcaatgacaaataaaagtagaaaagtttgaagaaatgcttcagagtatataaagatcaaagtactgtcatgactcctcaacactggattttgctcactttacttctctgcttctagacatttagccaaaggtagtctttgttgagactcatacatggaatttctgtctgtacaatattggcactaaatttcttgtctttcaattttagaaaaggaagagaccttatgacctattgtgaacttcattgtttctaataagtaggctttgagcttggtcgagatgatagcattaataaaattcacactggacttcaagaatgcatttaattataaactaaatactatgtcttttagaaaatttcaactccttctaacagttctaatctctcttcttttcaatactttcttcttataggtcatcaggcattgaaacatattgatacctatctgccatgtttctgttggcaaatataaaatattaatatagtgtgattttttaatttttca

SEQ ID NO: 252860 - DNA, 2151 bp, Homo Sapiens
  misc_feature (2024)..(2050): n is a, c, g, or t
tggtgtaaccggcccggaattacgggatatcgtcgaccacgcgtccgcgccacatcccggcagccctcctaccggcgcacgtggtgccgccgctgctgcctcccgctcgccctgaacccagtgcctgcagccatggctcccggccagctcgccttatttagtgtctctgacaaaaccggccttgtggaatttgcaagaaacctgaccgctcttggtttgaatctggtcgcttccggagggactgcaaaagctctcagggatgctggtctggcagtcagagatgtctctgagttgacgggatttcctgaaatgttggggggacgtgtgaaaactttgcatcctgcagtccatgctggaatcctagctcgtaatattccagaagataatgctgacatggccagacttgatttcaatcttataagagttgttgcctgcaatctctatccctttgtaaagacagtggcttctccaggtgtaactgttgaggaggctgtggagcaaattgacattggtggagtaaccttactgagagctgcagccaaaaaccacgctcgagtgacagtggtgtgtgaaccagaggactatgtggtggtgtccacggagatgcagagctccgagagtaaggacacctccttggagactagacgccagttagccttgaaggcattcactcatacggcacaatatgatgaagcaatttcagattatttcaggaaacagtacagcaaaggcgtatctcagatgcccttgagatatggaatgaacccacatcagacccctgcccagctgtacacactggcagcccaagcttcccatcacaggttctaaatggagcccctggatttataaacttgtgcgatgctttgaacgcctggcagctggtgaaggaactcaaggaggctttaggtattccagccgctgcctctttcaaacatgtcagcccagcaggtgctgctgttggaattccactcagtgaagatgaggccaaagtctgcatggtttatgatctctataaaaccctcacacccatctcagcggcatatgcaagagcaagaggggctgataggatgtcttcatttggtgattttgttgcattgtccgatgtttgtgatgtaccaactgcaaaaattatttccagagaagtatctgatggtataattgccccaggatatgaagaagaagccttgacaatactttccaaaaagaaaaatggaaactattgtgtccttcagatggaccaatcttacaaaccagatgaaaatgaagttcgaactctctttggtcttcatttaagccagaagagaaataatggtgtcgtcgacaagtcattatttagcaatgttgttaccaaaaataaagatttgccagagtctgccctccgagacctcatcgtagccaccattgctgtcaagtacactcagtctaactctgtgtgctacgccaagaacgggcaggttatcggcattggagcaggacagcagtctcgtatacactgcactcgccttgcaggagataaggcaaactattggtggcttagacaccatccacaagtgctttcgatgaagtttaaaacaggagtgaagagagcagaaatctccaatgccatcgatcaatatgtgactggaaccattggcgaggatgaagatttgataaagtggaaggcactgtttgaggaagtccctgagttactcactgaggcagagaagaaggaatgggttgagaaactgactgaagtttctatcagctctgatgccttcttccctttccgagataacgtagacagagctaaaaggagtggtgtggcgtacattgcggctccctccggttctgctgctgacaaagttgtgattgaggcctgcgacgaactgggaatcatcctcgctcatacgaaccttcggctcttccaccactgattttaccacacactgttttttggcttgcttatgtgtaggtgaacagtcacgcctgaaactttgaggataactttttaaaaaaataaaacagtatctctttaatccctgggnnnnnnnnnnnnnnnnnnnnnnnnnnngagggcgggggcaaaaaatccccggggggcccattcgcgacacccgttttgtgaaagggccaagggaggataaacagaagagcggggtaaacggcggggaa

SEQ ID NO: 252861 - DNA, 604 bp, Homo Sapiens
ccattcatatgtgaaaaaaataaataatactctgtggcacttcaatttaaatcattccattatgaaaatttcttaattgaagggagactatttcttcaaaactctaaattaaacagagctttatcaattaagtttacagcaatatagcccttagaaatacatatttcttcattttataataatacttcccccttaaaaatttgccatggtttgtcacagatttaaaatacaaggcacctaatgctataaaagaataatacagtaaatgtagtgtaagtgaaccagatattttctcaaatacttattctttttaaagtcccatgaaatttgcacaaacatgcttgttgcataaattaaacattttttgtgtggttaatttgcaatattctacaaaacccaaaaatataatccacacttattacaggtagcttattttagcattttacctgtcagaaatactggtctatgaacacttaagtgatttcttgaaaacattttcataatatattccagcatttaacatgtgaaaataaagtcccagaacattaggatttattccttgattagttcaaatgatttcaacagctgaattccttgagatgtg

SEQ ID NO: 252862 - DNA, 866 bp, Homo Sapiens
gtgcgccctgggcgcgctcgggattctcgcctggcgcggctggggaaggtgaacagtgtggcccgccatgttcttctccgcggcgctccgggcccgggcggctggcctcaccgcccactggggaagacatgtaaggaatttgcataagacagctatgcaaaatggagctggaggagctttatttgtgcacagagatactcctgagaataaccctgatactccatttgatttcacaccagaaaactataagaggatagaggcaattgtaaaaaactatccagaaggccataaagcagcagctgttcttccagtcctggatttagcccaaaggcagaatgggtggttgcccatctctgctatgaacaaggttgcagaagttttacaagtacctccaatgagagtatatgaagtagcaactttttatacaatgtataatcgaaagccagttggaaagtatcacattcaggtctgcactactacaccctgcatgcttcgaaactctgacagcatactggaggccattcagaaaaagcttggaataaaggttggggagactacacctgacaaacttttcactcttatagaagtggaatgtttaggggcctgtgtgaacgcaccaatggttcaaataaatgacaattactatgaggatttgacagctaaggatattgaagaaattattgatgagctcaaggctggcaaaatcccaaaaccagggccaaggagtggacgcttctcttgtgagccaagctggaggtcttacctcttttgactgaacccccccaagggaacctggaatttggggtacaaaccagggcctttaattttaatatggaaactggaataattgtccctaaagaaaaaaa

SEQ ID NO: 252863 - DNA, 808 bp, Homo Sapiens
  misc_feature (620)..(620): n is a, c, g, or t
  misc_feature (622)..(627): n is a, c, g, or t
gaggcaattgtaaaaaactatccagaaggccataaagcagcagctgttcttccagtcctggatttagcccaaaggcagaatgggtggttgcccatctctgctatgaacaaggttgcagaagttttacaagtacctccaatgagagtatatgaagtagcaactttttatacaatgtataatcgaaagccagttggaaagtatcacattcaggtctgcactactacaccctgcatgcttcgaaactctgacagcatactggaggccattcagaaaaagcttggaataaaggttggggagactacacctgacaaacttttcactcttatagaagtggaatgtttaggggcctgtgtgaacgcaccaatggttcaaataaatgacaattactatgaggatttgacagctaaggatattgaagaaattattgatgagctcaaggctggcaaaatcccaaaaccagggccaaggagtggacgcttctcttgtgagccagctggaggtcttacctctttgactgaaccacccaagggacctggatttggtgtacaagcaggcctttaatttatattgaactgtaaatatgtcactagagaaataaaatatggacttccaatcttccnannnnnncacgcccccccacaaaccacccttgtgggcccgcctccgcccctccaaaaagtttctaaaaccattcctttgggcccccgggcccccgaaagggaaaagggaaaatggccctaacctggttccctaaggaaaacccggggccaggacataagggttgggaatccccccccataaaaaaacg

SEQ ID NO: 252864 - DNA, 1837 bp, Homo Sapiens
  misc_feature (1508)..(1508): n is a, c, g, or t
ggtgggcaaagaaaataccattgaacatcttctacctcttttcttagctcagttaaaggatgagtgtcctgacgttcgtttgaatatcatctccaatttggattgtgtaaatgaagtgattggaatccgtcagctctctcagtctctccttcctgccatagtggagctggcagaagatgccaaatggagggtccgcctggccatcattgagtatatgccgctgctggcaggccagctgggtgtggaattctttgatgaaaagctgaattctttatatatggctgggctcgtggaccatgtatacgccatccgagaagctgccaccaacaacctcatgaaactagttcagaagtttggtacagagtgggcccaaaatactattgttcccaaagtgttagtaatggcaaatgatcctaattacttgcatagaatgaccactttattctgcattaatgcactgtctgaggcctgtggtcaggaaataactactaagcaaatgctgcccatcgtattaaaaatggcaggagaccaagtagcaaatgttcgcttcaatgtggccaaatctctacaaaagattggaccaattctagataccaatgctttacagggagaagtgaagccagtactacagaagttaggtcaagatgaagacatggatgtcaaatactttgcacaggaagctataagtgttcttgcattggcataatgaggagcaggagggaaaaggcctttactagattcttgtcacaaatttctagtcaatgtgttcttaactgggtggagaaagaatggaaaaccttcaagatctcatccaagcaaatggcaacaacttagaagaaatcatttagtgacttaattctttctaaagatgaaatgggattgttttttactcgtcttccttgttaaatcattatttaagccgttcttattgaccaattcctgacacttgattgtctcctaatgctttatccatcaccacctgggctcctgcatcctcactgtggaatcaggcaccagccacataatgttccagacaaagcctggaagggtgtggacccagacgtggagtggagtgattctcttgacgtttacatatatctctgtgtctctccatcattccaaagctaaatgtacatgtttagaataacttattttataaactcttcgggagacatgttgagatttgaccgtaatgaaagccacattttcctgaattatgatggtctgcattagtctcatgtgaaaggggaatgtggaagctcagggttaatgtagtggttgttttggtttttatttgctcaattttgtctgtactcatgtcattcagaaacctgaagtgtggctgcatcttgctgctaatgtgtgatgttgacgcctaactgaatttgaacagctcaccactgtgcctacatttaaaaatacttctctctcttttctaaaaagctttaactgtagtgcctcctaataagcagtatgtttgtttcattgtgagattgcagttcctgtanttccgaatgagtctaagaacccacagggataatactgtgcagatttcctgttcctttaccctggctacgcttccagcagtattgacacctagtccttgctgcattgtacagtagcttttcaaactgcagttttattgcctaagtttttagtatgggtgatactggagtcttatcatttgaagtgtttgcttttctacttttacagtaaaacctcattaattctgaaatttaagataatgagttaagctgaagagtttactgaagcaaattaatagtgaggaagcctatttgaactacttaaacagtattaaagccctttttaaaatgat

SEQ ID NO: 252865 - DNA, 172 bp, Homo Sapiens
ccaggcagagggcggaccgggtgggcaggggcctgagggtggctcggccagcccaccagccaatggacccctcctcaggccgccagtgtcgccctgcccctttttaaaacaaaatgccctcgtttgtaaacccttagacgcttgagaataaaccccttccttttcttccaaa

SEQ ID NO: 252866 - DNA, 644 bp, Homo Sapiens
  misc_feature (526)..(534): n is a, c, g, or t
catactcagtaagtgtttaatgaagaagagacagatggaaagagatgggcgaggaaggctgatgttacaaatataaactttgtcagcactttcaaaacaatagcaaatacacttaaatacatacaaagtttattaaaaataggttgcaactgaaatacagtagaaatggaaaactacagcagttttgatgttttctcatagtaatgcagttctgaaaagcacttttacacatattcacatttgacctcactgcccaaagatggggccaaatccacttgtgtatgggtttcacaaccacacatacaaataacagaaaagtaattcatctgcatctctttaaagaaagtgtggatttagtcaccataaggctgccagtgtcctcaagatatttgggaggtgcctgcttttcctagaacttctgctgcaagcaagcaaatccttcctaaacactcagaaccattcactctcttactcaaacaaggaaatggtaagagcacactttcaaataaaaaccctgatagaggtnnnnnnnnntatttacactcgcatttttaatgatttatcatacaacttttattaaaagtgatttcgaaggcagtaaaaagcccctatacctctctttgaaagtgtgcctattttcctaa

SEQ ID NO: 252867 - DNA, 943 bp, Homo Sapiens
  misc_feature (770)..(770): n is a, c, g, or t
  misc_feature (772)..(772): n is a, c, g, or t
ccagattctagaaggtagcaatgaagtgatgaggatactgatctctagaagcctgcttcaggagtagaacccacacttgttctggcctggtgttcagtgcgactgcagtcagtgttgagtggtgccatgtgggccgctctattccaaaggaatcatggattagacccaagggctgagctcctctagggcaggacctgcaccctgtgtgttggcaccagcatcgggtcttggactggggcagaatccccagtggaaccggaagagctggactgatgagaaacatcagaagaacacatactaccttgttttcctaatgccagaagggtgaccagtgaagattcaccgttcaaaccatggaaagtcctttcttgggatccactttatcttgattagtctgcattttactagttcactggatccctcctctaggggcctgggaactttaactgatgctcttcctgattctagagcaaaggtgtggaaaggggaaatggaggaatgccctcctgtctgggccgttctctgggccacagctacagatgcaaaaggtttctctggatagaacacctctgaatgtaaatcatgataaaagggatatttggaaactaactcctaagctgtgatttagggtgtatttctacttctggactgcctcaatatcaagggctgagacttttgaattttgaatattcgttgggtttcatgttaaaaagcctgtggtctaggagggctattcagggttccttttcctgataaacactttgaatatntnttttgtgtttttgtttccttttctgaagctgttcctccttttaaatatttttaatcacattgataaaatctatccttcatccacctctggttctactatagttgatttttattttaaatgtttaattgtatttgattaaacacttaactggattttggaataataaaactc

SEQ ID NO: 252868 - DNA, 1536 bp, Homo Sapiens
  misc_feature (667)..(667): n is a, c, g, or t
  misc_feature (884)..(924): n is a, c, g, or t
ttctgagagaagagctgaaaaaaatgctaaataagagatctaggcctttgatggaaactattaggctctacagacttgtcaaaatagacaagttgcttcatttcccccttttctaaaacagatgcagattaaatgtttttttgcatgaatgcacattgacattctgttcaactgttttctaaatgcaacactgcgggtttcaacagtatgctttcatttaaacaaagaatattatatgcatggtcaatttagtttaagagatgaaaaaaaactttactactatgaaaattgcttatcaaatactctcctcttttataaggtgtttttaaaagcaacacaggaccaaaagcatcccaactattactttatttatattactatgcttaagttacatggaaaaagacaacccagcagttctgtcccatctcagaaaaagtttccaatcaacaccaattatgtggtgacaaataactaggaatggtgacatctttgggccaagactgacaaggaagaatgggctctggtgctacggttcatctccaacaagaatatggcacaccggccagcacaagccatgctaacactgagcctttagcgctgggcacagattcggatctcttctctgaagctagcaaatcaagtgaaataactgggtttaaaacacaangtttaaaatgaagcccaagtttaaaaaccatactcctaacattttcctttcacaattgacataaaacacactttttcactctaacagcccagatttttttccttacatagctcaccacatagctgcagacagactctgctgcctcaagatgtaaacatagggtaaaaaattaacggcatctgcataatattctctctacacacgtgctgttggatgnnnnnnnnnnnnnnnnnnnnnnnnnnnnnnnnnnnnnnnnngttccatcttagattctcacaacctcttgttccgcagttcattaatccgactctgatgctaaggtgacagtgtatgtaagtagatttttgttttcagtgaaggagacctgggaaaagatggatttctctctgtatcttcaagagttatcagatggtacatgctcctcaaagccctcactctctcgaactagagcacgttccaggatcacgcggccttccttatatcgctggctgtcttcagtggcaaactcatagatccatcccagtttgctattgcagtttttgcagctcacatctcgaaccatgtggcggccagtgagcatgacccgatcttgaacttcgctgtactgcaggttaactaccttgttaaaaagaaatgctctgccagtggcgcctgtgaaacgagtggagatgagttctgagcggttggtcaggatcgtatcacagtttgcacaagaaaacagacgggtaccaccgatatgatcaaggaaaattctgcccatttttatggctgaagttctaaaaaccctgagcggcggtgagatccgcggctgccagcggcttgtcgctcttcagctggtatgaagcccctcggccacccgagtctccagt

SEQ ID NO: 252869 - DNA, 416 bp, Homo Sapiens
gagactcgggtggccgaggggcttcataccagctgaagagcgacaagccgctggcagccgcggatctcaccgccgctcagggtttttagaacttcagccataaaaatgggcagaattttccttgatcatatcggtggtacccgtctgttttcttgtgcaaactgtgatacgatcctgaccaaccgctcagaactcatctccactcgtttcacaggcgccactggcagagcatttctttttaacaaggtagttaacctgcagtacagcgaagttcaagatcgggtcatgctcactggccgccacatggttcgagatgtgagctgcaagcgatataaggaaggccgcgtgatcctggaacgtgctctagttcgagagagtgagggctttgaggagcatgtaccatctgataactcttg

SEQ ID NO: 252870 - DNA, 386 bp, Homo Sapiens
aatcaacaccaattatgtggtgacaaataactaggaatggtgacatctttgggccaagactgacaaggaagaatgggctctggtactacggttcatctccaacaagaatatggcacaacggccagcacaagccatgctaacactgagcctttagcgctgggcacagattcggatctcttctctgaagctagcaaatcaagtgaaataactgggtttacctttcacaattgacataaaacacactttttcactctaacagcccagatttttttccttacatagctcaccacatagctgcagacagactctgctgcctcaagatgtaaacatagggtaaaaaattaacggcatctgaataatattctctagtgccgaattcctgcagc

SEQ ID NO: 252871 - DNA, 827 bp, Homo Sapiens
  misc_feature (319)..(330): n is a, c, g, or t
  misc_feature (460)..(460): n is a, c, g, or t
  misc_feature (728)..(730): n is a, c, g, or t
  misc_feature (732)..(735): n is a, c, g, or t
  misc_feature (738)..(741): n is a, c, g, or t
  misc_feature (743)..(743): n is a, c, g, or t
  misc_feature (749)..(749): n is a, c, g, or t
  misc_feature (751)..(755): n is a, c, g, or t
  misc_feature (775)..(775): n is a, c, g, or t
  misc_feature (785)..(785): n is a, c, g, or t
ggttcagggaaaaatgagtaaatctccaacaggtggctttcaattcaagcataaatactatcttaaacttaaagaaagaagatttgaggtgcagtagtggaaagttaaccagcaaaagcacattaaacaagggtaaggttcattatacagacttaagtccatgcattctcaattgataagactcttcagggattaagttatccttctcttcttggggtcaaaagaggtagcttttaaagggggatttcctttatagaggtaaattttccttacacaagtgtaactttaactctgttttaacaacttccttggttagcannnnnnnnnnnncaaaataattagctgggaataattcttaagccaaagggacatatttgggggttgcatattctggtttcctaccattatatttgggggtggcatagttgggccttatacactgtgttccaccggcaatganaagagttcttgtttttcctccagcaatttgtcatttgttaaagagtttagcagttctaagagatatagaccagctgtgctatctttttgtggttttcagttctctagtatgttgagcatctttttgtaagtgtacttgccatctgtagatcttctttggtgaggcgtctgttcagatctgtgtgcatttttaatggggctgtttaacctaatggttagttttaacaattttttatgtatttttgaataacaaattctcagatcccaannnannnnaannnnanaaacanannnnnccattgtcgggccgccttcnggcccttcgnaggaagctttcctaaaacccatttcgttttgcccgccgcggg

SEQ ID NO: 252872 - DNA, 891 bp, Homo Sapiens
agggcttcaggggccctgtcaaagttatacccgtggattgaaagatgaatcgctggcttatatctatcattgccaaaatcattatttttgtccaattggcttcgaagcaacccctgttaaagctaataaagcattcagcaggggacctctctcaccacaggaagttgaatattggatcttaattggagaatcaagtagaaaacatcctgccattcactgtaaaaaatgggcagatattgttactgatctaaacactcaaaatccagaatacctggatatccggcacttagagaggggactgcagtatagaaaaacaaagaaggttgggggaaatttgcattgcatcatagcattccagagacttaactggcaaagatttggcctttggaactttccatttggaaccattagacaagaatcacaacctccaacacatgcccagggaattgccaaatctgagagtgaagacaatatttccaagaagcagcatgggcgtctgggccggtctttcagtgctagtttccatcaggactcggccatggaaacaagatgtctagtatccatgagagaaggaacagtggttaccaggttacagtgattacgatgggaatgattgactatgcttgctactgaacagctggcattatatatgaaactgctatatacaggactgtataaacgacagtagaagattttagtgaagcctacattaaataggagccagatcttgtggtataacaaataaccctgtaggtctcccagaaacagaaagacggatctgaataccgggcggggaaccgaaaatataagcgaaaaacccacaaaaattggcccctaagagcaaagaatataaaccgcggcccagcaaagttcccacacacccaaacaacc

SEQ ID NO: 252873 - DNA, 1135 bp, Homo Sapiens
  misc_feature (7)..(7): n is a, c, g, or t
  misc_feature (23)..(23): n is a, c, g, or t
  misc_feature (29)..(30): n is a, c, g, or t
  misc_feature (35)..(35): n is a, c, g, or t
  misc_feature (41)..(41): n is a, c, g, or t
  misc_feature (63)..(63): n is a, c, g, or t
  misc_feature (65)..(65): n is a, c, g, or t
  misc_feature (74)..(74): n is a, c, g, or t
  misc_feature (76)..(76): n is a, c, g, or t
  misc_feature (83)..(83): n is a, c, g, or t
  misc_feature (116)..(116): n is a, c, g, or t
  misc_feature (120)..(120): n is a, c, g, or t
  misc_feature (171)..(171): n is a, c, g, or t
  misc_feature (192)..(192): n is a, c, g, or t
  misc_feature (285)..(285): n is a, c, g, or t
tttattncgctgtccacgaaggnaccacnngacancaaagngaggagcctctaccagtctaangngatttattntngtgccantgcttcacagacattaagagacatcagaaatangcanctacaccggtatgtctgagagaatacacgcatctgtgggctaatggtcctnacttccatctataacaatatncttagactagaacagacagaaaatgtagggattatggtagcacagtgacatatgagggagagttaacttctctatccgcacaaatgtaaaggntttcactctgattttcagtgagctagatttactacccatacacaaaagtcaagaattctagcatttctgatctttaaaaagtagagaatgtgctattatacagagttgattttgcttttgaaaaagcatagtccttcaaaagatattactatcattttgggaaaaactagatattaaaaggtaaaggatcctaatcgtatcctactcattttggaaacatttcaaaatccagtgtgtccagtgcctagtaacttcctatattaaaactctgaaaagcctaacttaataatttgtaatgtattcattttgttagaataacaccactgaaggggctgataagcattacttagaaaatcatgatgaataaataccatttattatccattatgtaaaaaatattcacttgctaaaaaagcttctggaaatggtagtggtgctgagttttagggtttgtttgtttgttttcaggtaaaatttttccttacatacaataaacagatcttttcctcaagaaatccatttttcagataatatacaggcaagtttcagaatgtcatgaattatcatgtaaataactggaatgtaaattaacggtgcttgaggggccatttttaaatacagaaagtacgcctattcatgaacagtttaagtagttgaaaaaatatatacaaaaataaaggttgaagttgaaacaatggtataaagtacacttgcaatctaaaccatggtagagagcatcttcatctagtgattgactattcaatgttaacatatgcatgcatctattttttagaaatcacatatacaggccaggcgcggtggctcatgcctgtaattccagcgctttgga

SEQ ID NO: 252874 - DNA, 1364 bp, Homo Sapiens
  misc_feature (11)..(11): n is a, c, g, or t
  misc_feature (14)..(14): n is a, c, g, or t
  misc_feature (28)..(28): n is a, c, g, or t
  misc_feature (31)..(31): n is a, c, g, or t
  misc_feature (47)..(47): n is a, c, g, or t
  misc_feature (54)..(54): n is a, c, g, or t
  misc_feature (62)..(62): n is a, c, g, or t
  misc_feature (64)..(64): n is a, c, g, or t
  misc_feature (67)..(68): n is a, c, g, or t
  misc_feature (70)..(70): n is a, c, g, or t
  misc_feature (91)..(92): n is a, c, g, or t
  misc_feature (95)..(95): n is a, c, g, or t
  misc_feature (97)..(99): n is a, c, g, or t
  misc_feature (120)..(120): n is a, c, g, or t
  misc_feature (138)..(138): n is a, c, g, or t
  misc_feature (142)..(142): n is a, c, g, or t
  misc_feature (154)..(154): n is a, c, g, or t
  misc_feature (157)..(157): n is a, c, g, or t
  misc_feature (176)..(176): n is a, c, g, or t
  misc_feature (256)..(256): n is a, c, g, or t
  misc_feature (259)..(259): n is a, c, g, or t
  misc_feature (275)..(275): n is a, c, g, or t
  misc_feature (285)..(285): n is a, c, g, or t
  misc_feature (287)..(287): n is a, c, g, or t
  misc_feature (292)..(292): n is a, c, g, or t
  misc_feature (304)..(304): n is a, c, g, or t
  misc_feature (306)..(306): n is a, c, g, or t
  misc_feature (308)..(309): n is a, c, g, or t
  misc_feature (313)..(313): n is a, c, g, or t
  misc_feature (318)..(318): n is a, c, g, or t
  misc_feature (342)..(342): n is a, c, g, or t
  misc_feature (344)..(344): n is a, c, g, or t
  misc_feature (384)..(384): n is a, c, g, or t
  misc_feature (391)..(391): n is a, c, g, or t
  misc_feature (400)..(401): n is a, c, g, or t
  misc_feature (408)..(408): n is a, c, g, or t
  misc_feature (467)..(467): n is a, c, g, or t
  misc_feature (738)..(738): n is a, c, g, or t
  misc_feature (1125)..(1136): n is a, c, g, or t
  misc_feature (1138)..(1139): n is a, c, g, or t
  misc_feature (1141)..(1143): n is a, c, g, or t
  misc_feature (1145)..(1146): n is a, c, g, or t
  misc_feature (1149)..(1150): n is a, c, g, or t
  misc_feature (1152)..(1154): n is a, c, g, or t
  misc_feature (1156)..(1160): n is a, c, g, or t
  misc_feature (1190)..(1208): n is a, c, g, or t
  misc_feature (1261)..(1293): n is a, c, g, or t
aacaaattaancanacaaatataatttntcntccattttttaaaaantatttcntttacttncncanntnttttaaattttcaaaattttnnatncnnntatacccttaccttttaatanctatttttcccaaaaatnatantaatatcttttnaanaactatgctttttcaaaancaaaatcaactctgtataatagcacattctctactttttaaagatcagaaatgctagaattcttgacttttgtgtatggntantaaatctagctcactnaaaatcagantnaaacncctttacatttntncnnatanagaanttaactctccctcatatttcactntnctaccataatccctacattttctgtctgttctagtctaanaatattnttatagatnnaagttangaccattagcccacagatgcgtgtattctctcagacataccggtgtagatgccatattnctgatgtcttcttaatgtctgtgaaagcaactggcatctacaataaatcacacttagaactggttagaggactccctcacttttgttgtccatgtggttcccttccgtggaccagccgtaataaagagccaaggtagtgatggtggccacgtgcctcgttgctatttttaaagtaatattcagatgtggttttaaatttagattatgtattccttttgaaacataagaaaaacatttaaacctatgctgaaaatacgataaaagaaaaacnactccaatatgctaaaagttaaatatggtatttaagaaaatagtcatgtatgcaattgagaaagtctataatttattttacagaaaagctggaagattatgactagatatggaaatattttttccgaacttttttttatatttcctccgacttacctctttttgaaaagagagtttttattaaatgaaccatcatgatattggctgaaaagttctacattctattattgtattgtaacacacatgtattgatgattttcattaagagtttcagattaactttgaaaaatattccacatggtaatcttataaattctgtttaattacatctgtaaatattatgtgtgtgatagtattcaataaagtaaaatcaaattgtctttggaannnnnnnnnnnncnnannncnncannannncnnnnntaaacacaacccccggaacaaacaacaacnnnnnnnnnnnnnnnnnnnttgtgggccggcccccgcccctccaaaaaaatttttttacaccatttgttttnnnnnnnnnnnnnnnnnnnnnnnnnnnnnnnnnaaaacagggcccataaacctgtttttccatagaaaaaacctgggggccttgaaaaaaggggcttgggaatt

SEQ ID NO: 252875 - DNA, 1171 bp, Homo Sapiens
ttgctccaattgtgtcagcgaactatggctcttcctgtaggacgaggaatgtttaccttgttttcgtaccatcctgttccaacagagccattgcctattcctaaattgaatctgactgggcgtgcccctcctcggaacacaacagtagaccttaatagtggaaacatcgatgtgcctcccaatatgacaagctgggccagctttcataatggtgtggctgctggcctgaagatagctcctgcctcccagatcgactcagcttggattgtttacaataagcccaagcatgctgagttggccaatgagtatgctggctttctcatggctctgggtttgaatgggcaccttaccaagctggcgactctcaatatccatgactacttgaccaagggccatgaaatgacaagcattggactgctacttggtgtttctgctgcaaaactaggcaccatggatatgtctattactcggcttcttagcattcgcattcctgctctcttacccccaacgtccacagagctggatgttcctcacaatgtccaagtggctgcagtggttggcattggccttgtatatcaagggacagctcacagacatactgcagaagtcctgttggctgagataggacggcctcctggtcctgaaatggaaaactgaactgacagagagtcatactccttagctgctggcttggccctgggcatggtctgcttggggcatggcagcaatttgataggtatgtctgatctcaatgtgcctgagcagctctatcagtacatggttggaggacataggcgctttcaaacaggaatgcatagggagaaacataaatcaccaagttatcaaatcaaagaaggagataccataaatgtggatgtgacttgtccaggtgctactctagctttggctatgatctacttaaaaaccaataacagtgtcttctaggaagcccagacacatggagaagttctgagtgttttggccgatagtcccagatgaggttccagcaacagctgggatcacccatgagatgtgagtgaggaaggctttgagatggtttcagccctagccaccactgacctcataagagaccacaagaatgagaatcacctggccaagcccagcagaccttcagaattcagaaataaaataattcatcttattttaaaaa

SEQ ID NO: 252876 - DNA, 546 bp, Homo Sapiens
ttctccctttagaaaaagtaaatgtgtgcagaattaacaaagtgtttaaaaatagatatttattattttactatttggatgaatgtgtagggcagtgcttccttggcactggggatatttcattgagcaaaactaaaaatatcttccctcatggagtttatgttatagtaagaccatacatgtacctctataataactattacgttagaaggtataaagtattgtgaaaaatatatagagcagtagtggagtgggaagaaatgttttgaaatagagcttgagattcttgattgtcttgccctctacttgaacagtgtcttctaggaagcccagacacatggagaagttctgagtgttttggccgatagtcccagatgaggtctccagcaacagctgggatcacccatgagatgtgagtgaggaaggctttgagatggtttcagccctagccaccactgacctcataagagaccacaagaatgagaatctacctgccaagcccagcagaccttcagaattcagaaataaaataattcatcttatttt

SEQ ID NO: 252877 - DNA, 483 bp, Homo Sapiens
  misc_feature (63)..(63): n is a, c, g, or t
ccatcctccatggggtgattccccggctgttgctgggaaccctccatctggggacctatcggncccaaaaaccacctccgggaaccttcttcccatggtggtctggggctttccttggaaggacactggttccaaggtaggaggccaggccaatccaggaatcctcaagctctattttcaaaaacatttccttcccactcccactactgctctatatattttttcacaatacttttatacctttctaacgtaatagttattatagaggtacatgtatgtcttactataacataaactccatgagggaagatatttttagttttgctcaatgaaatatccccagtgccaaggaagcactgccctacacattcatccaaatagtaaaataataaatatctatttttaaacactttgttaattctgcacacatttactttttctaaagggagaaatgtggaacactgaaaagctccttgaatctta

SEQ ID NO: 252878 - DNA, 1569 bp, Homo Sapiens
ggtggggcttcgccggcgtggggcgcaaaggaacgcgtgtgtgaagaggggtttcccaccccgcgtgcctggtaaaaggactcgcgccacccgccccgggggctgtcaatgttggtattatcagaagcctcgcggctggcgatttccccgggtggactcggagtccccaggtatagggcgcctcgccagaagcttgccctttgtgtgaaatatgggtttcaaaaacagcggggttcgggggtgcccccccgcggggccggtttatttgttattggtggaaagaaatgtcccaagcgcccctaatgtccaggggcgcaggggatttctcctttagggaaagggcgcggttattgggccccggggtttccacgttaacccttggggggcacccggcggcccccacaacagaaggtgtctaagaaaaggtttttggagggggccggggccgggccggcaaggggctaatcacaggtggcgcgggccggtttttggaagacaaaatgttttattttaaaacattgaaaaaacattaaaagacaaatgtccattatgtaaccaggaatgttaaatatatggaaacggtaaatctctaaaatgtggtaggtacttccagagctaaatgttgcaagttatcctacttttttctctaatatcaacaatacctgatacgatgaaaaataacaaaaagaccttactaattatccaatcaaagtcatcatctttgggtaaatttatatcaacacaacttaaagttttgtccaagatgttcctgacacatgaagcttccagttgaatttcagaaatgttaacaaaagtatcttccttttttgcctgtgaatgtttgagtattgctgtattgttggcttatatccactacagatactggttctaggccagcccaaggatcttcaagcattgaaggcttgaaataattttccaactcattagacattcttttttctctaacacgccctgatccaaatggtgtagatgtccttggagaaccctgggggtgggtctgctgctgccctggggagtagccgaattgctgctgggaccccgcgggggacctggagtaggagccagggtagccgccaggggacggagacccgaaccggccccccgggaagctgccgccgtgtcgcggagagtgactgctcccgtacggcctagaccggggcccgtacggcggcgtgtggtgcggactcccgtacccgtctcgaggggagggcggccgtggtccgcccccgcccggggttccccggaagctgcttccgctaccccaacctcctccacccggaccagggtaaggaggagttgggggccgaaaattctgtcgctgcatatcaggagccaaagccgaaaacctcgcagccgcgttctcccaccggaactgtatcaaccggccctccgcagagaactgctagtcctttaccaaaacagtcctccgaccgcagccacctacggcacatcagttccggcgtcacaaatggattccaggggcggcgggattacctaaatcactgacttggcgagagactcagtggatttaagtgaaaagaggaagaa

SEQ ID NO: 252879 - DNA, 730 bp, Homo Sapiens
tatactaccagttgtgtctttagatgtcacacaagtccaaataagtggtcatacttctttattcagggtctcagctgcctgtacacctgctgcctacatcttcttggcaacaaagttacctgccacaggctctgctgagcctagttcctggtcagtaataactgaacagtgcattttggctttggatgtgtctgtggacaagcttgctgagtttctctaccatattctgagcacacggtctcttttgttctaacttcagcttcactgacactgggttgagcactactgtatgtggagggtttggtgattgggaatggatgggggacagtgaggaggacacacccagcccgattagttgttaatcatccaatcacatctgattgttgaaggttattaaattaaaagaaagatcgatttgtaacatactctttgtatatatttattatatgaaaggtgcaatattttattttgtacagtatgtaataaagacatgggacatatatttttcttattaacaaaatttcatattaaattgcttcactttgtatttaaagttaaaagttactatttttcatttgctattgtactttcattgttgtcattcaattgacattcctgtgtactgtattttactactgtttttataacatgagagttaatgtttctgtttcatgatccttatgtaattcagaaataaatttactttgattattcaagtggattccttata

SEQ ID NO: 252880 - DNA, 668 bp, Homo Sapiens
  misc_feature (47)..(60): n is a, c, g, or t
aaccacctagggcattattccccaagctccaagattctgcacgagcnnnnnnnnnnnnnnctgggaaagcgcgcccattgtgttggtacccgggaatcgggcattaatgcccggaaaataaaaagattttttttatccttgaaattaattctcaaagcaaatgtatttggtagatgtttcaattgggagaattttgctttgcctttaaaacaaacaaaataaacctgtcttggggtctgcccacctcaaaacctctggtaacttgacatgtagaaggagttcagaattctttgataatgtgtggttttcacttttggttggattaaacaaaaataaaattagagtccatagcactttgtaaactaatgtgaagtttcttggtgaatcataaaagctacctgtatgtactttataatttaatggtctgttagtaaaaattgtcagcattttatctttttctcttctcattacattttagtctccaatctttcccactctcagcagtcacagttttgcagagcaaaacatttttagaaactgaatatgtgtgagttctatataaaatgaatgtgttagtaacatccatctgctgatcaaggaggcattggatctggtactagaaggtgaaattgattgtagctatcaaagcattttatcaatgtaagccc

SEQ ID NO: 252881 - DNA, 515 bp, Homo Sapiens
gtgggtaaagaaacctttaatgaggattcaaggttaataaggaagacgcagagggccagcactcagccccaacctcctcacgtgtacatggctccatggaggttctccagtcggtgttgctgctgctgttttcgagccttatctcgtctgtgctcctcataagtgtcgtcatcagtgggcagctcatagcggcacaagggacaggaatttgtcttgcttagccagggcagaatgcagctggaatggaaaaggtgatggcaaggcatctcaatggcagtctcctcctccagcctgagagcctctgatgactgtcctggggaggttctcaaccacagtcttggcagctggtggaggcaggtggtggtcccaatctactaccaaccccaagtcttcaaagtccatcctattgaaaagtgaccttgcgagctccagcagcatgttggttcgcgtctcctgctcagggtccgacggctcgcagtcgtgttcatcgaaataggacgccatggctgcccccc

SEQ ID NO: 252882 - DNA, 790 bp, Homo Sapiens
attggccagcgccgctaggccgctatcgagcagggtccgagggctgtgtcagaaggctgggcagccatggcgtcctatttcgatgaacacgactgcgagccgtcggaccctgagcaggagacgcgaaccaacatgctgctggagctcgcaaggtcacttttcaataggatggactttgaagacttggggttggtagtagattgggaccaccacctgcctccaccagctgccaagactgtggttgagaacctccccaggacagtcatcagaggctctcaggctgagctcaagtgccccgtgtgtcttttggaatttgaggaggaggagactgccattgagatgccttgccatcaccttttccattccagctgcattctgccctggctaagcaagacaaattcctgtcccttgtgccgctatgagctgcccactgatgacgacacttatgaggagcacagacgagataaggctcgaaaacagcagcagcaacaccgactggagaacctccatggagccatgtacacgtgaggaggttggggctgagtgctggccctctgcgtcttccttattaaccttgaatcctcattaaaggtttctttacccccatgaccccctacctgtccgctttaaaaatctgttcggccgccttcggcccctcaagaaacttttttaaaaccattccgtttggccccgcgcgggccacccaggtcaacgggaaccatgggcctaagcctgttttccctaggaaaatccctgggccatggacttagggccttggtaatcccccccc

SEQ ID NO: 252883 - DNA, 636 bp, Homo Sapiens
  misc_feature (97)..(97): n is a, c, g, or t
  misc_feature (108)..(108): n is a, c, g, or t
tgttctgcagtcctgtaatatcatctagtgtcctcttattcagcccatgtattcacaaatgcttgaatttatatttaaattcaatatcattcaatgncggcaaatgcnccaagcctgcccgggactggtccaaaggtggacatttagcttggccctctataagctccaattcaaaataagaaagcatcagaatcaaaaattgcttgatttcgtggatagcgaacaatcttccaggacatattgtagctcccgatccaaagggcatgtagtcatcaagatacctatcatatttaaaagtcaaagggtctgggtagatttctggatctaagtgcattaactgtgggtaaagagctatgatgtcatcttttcggatgttgtaggaaccgtcctcaaggtgcaaagtgaaatcctccttagctgtccggatgttgagggaggcactggaaagcctcagcgattccttgattatactatctaatactggcaggtcattcagttctgcttgactcaaacaaataggattgccttccaagctgactttttgaccagcattctctaatgttcttttcacttcttcagtagctgctttcattgcttctgggttcctaatcatttgaaataaactccagaaagtcg

SEQ ID NO: 252884 - DNA, 748 bp, Homo Sapiens; identical to SEQ ID NO: 4527
  misc_feature (437)..(456): n is a, c, g, or t
  misc_feature (458)..(468): n is a, c, g, or t
  misc_feature (470)..(477): n is a, c, g, or t
  misc_feature (479)..(494): n is a, c, g, or t
  misc_feature (496)..(501): n is a, c, g, or t
  misc_feature (503)..(508): n is a, c, g, or t
  misc_feature (512)..(515): n is a, c, g, or t
  misc_feature (518)..(590): n is a, c, g, or t
  misc_feature (597)..(597): n is a, c, g, or t
  misc_feature (599)..(600): n is a, c, g, or t
  misc_feature (604)..(605): n is a, c, g, or t
  misc_feature (623)..(623): n is a, c, g, or t
  misc_feature (625)..(625): n is a, c, g, or t

SEQ ID NO: 252885 - DNA, 2018 bp, Homo Sapiens
  misc_feature (1608)..(1608): n is a, c, g, or t
ggcaggagcagctcaagtgcatcattgtcctgagagagaggagcagcgcggttctcggccgggacagcagaacgccaggggaccctcacctgggcgcgccggggcacgggctttgattgtcctggggtcgcggagacccgcgcgcctgccctgcacgccgggcggcaacctttgcagtcgcgttggctgctgcgatcggccggcgggtccctgccgaaggctcggctgcttctgtccacctcttacacttcttcatttatcggtggatcatttcgagagtccgtcttgtaaatgtttggcactttgctactttattgcttctttctggcgacagttccagcactcgccgagaccggcggagaaaggcagctgagcccggagaagagcgaaatatggggacccgggctaaaagcagacgtcgtccttcccgcccgctatttctatattcaggcagtggatacatcagggaataaattcacatcttctccaggcgaaaaggtcttccaggtgaaagtctcagcaccagaggagcaattcactagagttggagtccaggttttagaccgaaaagatgggtccttcatagtaagatacagaatgtatgcaagctacaaaaatctgaaggtggaaattaaattccaagggcaacatgtggccaaatccccatatattttaaaagggccggtttaccatgagaactgtgactgtcctctgcaagatagtgcagcctggctacgggagatgaactgccctgaaaccattgctcagattcagagagatctggcacatttccctgctgtggatccagaaaagattgcagtagaaatcccaaaaagatttggacagaggcagagcctatgtcactacaccttaaaggataacaaggtttatatcaagactcatggtgaacatgtaggttttagaattttcatggatgccatactactttctttgactagaaaggtgaagatgccagatgtggagctctttgttaatttgggagactggcctttggaaaaaaagaaatccaattcaaacatccatccgatcttttcctggtgtggctccacagattccaaggatatcgtgatgcctacgtacgatttgactgattctgttctggaaaccatgggccgggtaagtctggatatgatgtccgtgcaagctaacacgggtcctccctgggaaagcaaaaattccactgccgtctggagagggcgagacagccgcaaagagagactcgagctggttaaactcagtagaaaacacccagaactcatagacgctgctttcaccaactttttcttctttaaacacgatgaaaacctgtatggtcccattgtgaaacatatttcattttttgatttcttcaagcataagtatcaaataaatatcgatggcactgtagcagcttatcgcctgccatatttgctagttggtgacagtgttgtgctgaagcaggattccatctactatgaacatttttacaatgagctgcagccctggaaacactacattcccagttaagagcaacctgtgcgatctgctagaaaaacttaaatgggcgaaagatcacgatgaagaggcccaaaaagatagcaaaagcanggacaagaatttgcaagaaataatctcatgggcgatgacatattctgttattatttcaaacttttccaggaatatgccaatttacaagtgagtgagccccaaatccgagagggcatgaaaagggtagaaccacagactgaggacgacctcttcccttgtacttgccataggaaaaagaccaaagatgaactctgatatgcaaaataacttctattagaataatggtgctctgaagactcttcttaactaaaaagaagaatttttttaagtattaattccatggacaatataaaatctgtgtgattgtttgcagtatgaagacacatttctacttatgcagtattctcatgactgtactttaaagtacatttttagaattttataataaaaccacctttattttaaaggaa

SEQ ID NO: 252886 - DNA, 945 bp, Homo Sapiens
  misc_feature (781)..(816): n is a, c, g, or t
  misc_feature (836)..(848): n is a, c, g, or t
gacactggccccgtactgtggctccaaattccctggtaaacagtggtgcagtggggaattcagagccaggctttcgaggactgactcctccaattccttgggaacatgcaccgcgtccccatttcccccttgtcccagcttcgtggccttatggtttgcatcaaaacttcatgcatcagggaaatgcccgattccagcccaacaaacctttctatactcaagacagatgtgccacccgtcggtgtagagagcgttgtccccacccaccaagaggaaacgtgtcggagtaatgcgagtccattttctttcagcgggtccaccgatgcacagcaaccagccaatcctgctggctcaaggggtatccgtacctcaatgtcagttacatttcaccagaaaaagtgacatttaatggaaagcaaaacaaatcaggtcctgatttaaaattttaacacgtttagatagcttatttaaattctaagactgtttttacagactgtattatttgtatataaatatgaactatagtttttactagtatcaccaaattgagtgatacaaatttcatctattttattaccctatttttaagggaattttatgttttgtttaaccttgatgaattgtataaagagagaatttaaaaaattacattctttattttctattagctgtattcatactttggttgcttcagactttatatattgttcttaaaagttaggaaagaatttcatgtgttttaaattgtcacttctattctttacagaaccttgtagtgccnnnnnnnnnnnnnnnnnnnnnnnnnnnnnnnnnnnntacaacatgaagattcagannnnnnnnnnnnnccatacttgtatattgaacattcaaacttgaatggaaagttgattttgtctgtatttgaagtacttctattttaagttaataaatctttttgacaag

SEQ ID NO: 252887 - DNA, 1305 bp, Homo Sapiens
  misc_feature (33)..(33): n is a, c, g, or t
  misc_feature (803)..(811): n is a, c, g, or t
aaaagtgacaagacagatctacagataatcagnctatatatgattatctgttgacaacagagagtagtgtacataaggtaaacaccagagctcacatatattaccaccagattttttttaaaccaaattccggtttaaaaatcacacactgacaacacagaaatacgaaatgctaggaaaagtctagcatatgaaggaaaaacatgtcttatgcattctaatataattttttacaatctagcataaaggcaaatgcggtttttttaaaaatgcagtccatatacaattatagaaaaaacattagtcaagccacctaatataaccaatttcacagatagcactcatttaatataatgtccaaaaatttccgagtgagtgtctacgtatcagttagaataatgcccacaagtatctccaaactacaaaatatcagcgagtaaatgaaaatcacacatctctctttgaaagactgaagcttgtctatgagttaaaaggcaacatctatgaactaactttctttaaaaagacttaaactgccctatctagagcaatacatgtttcctagctatacatgcaagctgggctgtgtggtaaaaatgactcagttacttaaaaaaggcagaaaagatccaaaataaccagagctcaagctaagctggtgaaaccacagagacactgaagcccagcaactcccaagaagctgaggattaagattaaaaataaactctggatactgaatcctatatcaacactctgaatttatatttattgttagtaatttctattattcttttctttgggtnnnnnnnnntgttttaaaaagaaccaatgttttggaataagcaatgtaactctgatcattctgctatgtgactaccaaaaaggctgttgttgttttagccctaccacttggtaagatagaaagctctccacacacaaggcccagagaaggctgatatcacaagtcagtgtgagttacactcttctcatgcaatggagctactaaaatacatacatttggtcttacaaaaaaattacaaaactaacaaatctttttctccagaattataaaagatagaatctatgaatcagtactaatgtgatcacagaaaaatagcaaactgaagtcaaaaagcacaggctgcccatcatagagtccccagtctatttaatattttcgacctgctctgaggatggagggtgtcaacaccttagaataccatgatgggctttaaaactgggtaaagaatcatccctagggttagggcaaatgtaacttcacttattgcttacacacaggaaaaa

SEQ ID NO: 252888 - DNA, 802 bp, Homo Sapiens
  misc_feature (664)..(664): n is a, c, g, or t
  misc_feature (717)..(717): n is a, c, g, or t
  misc_feature (738)..(738): n is a, c, g, or t
  misc_feature (755)..(755): n is a, c, g, or t
ccagactattcccacagtgctccaaatgcacatgaacaacagtgacggctccagccttcgacccagagccccgtgcccagtgcgtcagtgggcctggggttccaggctacatcaagcactgatggtgtcagggctggtagttaccaaatcagggttaagaaacatcagggccacatttcactaccttcacagatcaaactcagcagcggaagaaaacagccaaagttggcctaaaattggcgctggaatttgggctgggaaaaatcttgtggttatttcctttaaaaaggaacaaaactttagtatttaattagttgatttatttaatgtaatttcaaacaattaaattatgaataatgcaatgtacagtagaatcacgttttgattttattaacactgaccaagtttaactccatatgaagtgtaagcttgatatcgtttatgatgtctatcaactgtaccaaaagtaaaacatttaaaaacaatcatctgaatgtcaagttttctctccataaaggacttgccaccttaagggaccccaagtctgcctggaaacatgagccacatcaatgccgggtaaaggcctgccatggaccctaatctgcatcctggggaaaccctctttttgcctgaggcttccccaggcccccaaactaggctgggnctgggggagaggggagcagggcagggttccagggggtgttcaaggcacacggntttgaggccaaggcaggcacnaataatcccatctttanggactccctcattctgggggatgggctcccacaaattcccttaaaca

SEQ ID NO: 252889 - DNA, 1550 bp, Homo Sapiens
ggggcgcggcggcgcactgaacagtctccttccacaaaaccatggcgtcgctcaaatgtagcaccgtcgtctgcgtgatctgcttggagaagcccaaataccgctgtccagcctgccgcgtgccctactgctcggtagtctgcttccggaagcacaaagaacagtgcaaccctgaaactcgtcctgttgagaaaaaaataagatcagctcttcctaccaaaaccgtaaagcctgtggaaaacaaagatgatgatgactctatagctgattttctcaatagtgatgaggaagaagacagagtttctttgcagaatttaaagaatttaggggaatctgcaacattaagaagcttattgctcaatccacacctcaggcagttgatggtcaacctcgatcagggagaagacaaagcaaagctcatgagagcttacatgcaagagcctttgtttgtggagtttgcagactgctgtttaggaattgtggagccatcccagaatgaggagtcttaagatggattattgtgctgcttgctcaagcgtgtgcttgactcctggaacctgcctgctccctctcccagaccagctagtttggggctggggagctcaggcaaaagaggtttccaggatgcagattaggtcatgcaggcctttaccggcattgatgtggctcatgtttcaggcagacttggggtccttaaggtggcaagtcctttatggagagaaaacttgacattcagatgattgtttttaaatgttttacttttggtacagttgatagacatcataaacgatatcaagcttacacttcatatggagttaaacttggtcagtgttaataaaatcaaaacgtgattctactgtacattgcattattcataatttaattgtttgaaattacattaaataaatcaactaattaaatactaaagttttgttcctttttaaaggaaataaccacaagatttttcccagcccaaattccagcgccaattttagggccaactttgggctgttttcttcccaaaagtgcttatgtgggaattggggatccccagtgtaggtgacagacaggtcatgactgctgctgagtttgatctgtgaaggtagtgaaatgtgggccctgatgtttcttaaccctgatttggtaactaccagccctgacaccattcagtgctttgatgtagcctggaaccccacgccccactgacgcactgggcacggggcatctgggtccgaaaggctggagccgtcactgttgttcatgtgcatttgggagcactgtgggaatagtctggcagctgtgtgctgattaaatgtctttggcaaggcagggggcaggaaaaggccttgtggaaacaaaggcaccaaggatcaccccagcccagtgaaggcagaagaggtcacgtggatcagcctgtgtctttccagcagaatctgattaaagcctgtaatgctgtagggtgaaggttcagggcagatgtcagcataccgcagtggagactttctgcagtgaaactttatcgatccctgaggcagcgctcggatggacgt

SEQ ID NO: 252890 - DNA, 424 bp, Homo Sapiens
  misc_feature (11)..(11): n is a, c, g, or t
ctaaaacagcnagtcctgcaaaaactccccacaaaacaaaaggccccttgccatgtaaaagctcctccatgaagctttgcctttgtccttcctcccctgaatcgaggttgacccatccaactgccctgaaggtgtggattgaagccaataagcttccttaatgttgcagattcccctaaattctttaaattctgcaaagaaactctgtcttcttcctcatcactattgagaaaatcagctatagagtcatcatcatctttgttttccacaggctttacggttttggtaggaagagctgatcttatttttttctcaacaggacgagtttcagggttgcactgtttagggcacgcggcaggctggacagcggtatttgggcttctccaagcagatcacgcagacgacggtgctacatttgagcgac

SEQ ID NO: 252891 - DNA, 664 bp, Homo Sapiens
  misc_feature (532)..(532): n is a, c, g, or t
  misc_feature (572)..(572): n is a, c, g, or t
  misc_feature (595)..(595): n is a, c, g, or t
agattataggatgtgcatttctccttagaatgaagtctgggtatttccatttgcatctggatttagatgatttagggacaaaattacctacatgtgataagttgaactcttcctaatgactattcttattcttctcttatttcatctttatctcaagacattatctttaattcagcaaatcaagtatttccctagaaagctatgtattaaaactctctatgaaaagttaaaataaaacatagagttgcctaaactgagaagttttgagtcactgtttggaatttcactccctcgctaatattgtatgtgaaatctgctgtgcaacatttgaaaatgaaattatgtttcctgggatttctgtgataatttttgaattcttactagagtaagattattctgtatccataaggattaatattacttatcctttaacaaaattagaattgcccctaaagaatgctgttttagctacagcaacattgaaatttttaaataaatgtctcgtttgggtagaaaggcaaaaatgggtctnaaaatttattgggtcccttttttaacccaaatactttccngctaattcagggttgggccaatnctggccccactgtctgtttttgtaaataaattttctttggaacacggcctgttccttcctttatggtac

SEQ ID NO: 252892 - DNA, 955 bp, Homo Sapiens
ttgtggcagacctgttccactccttggcagtcagcgcagaaccttgtgtattgaagattcagagcctttttgtgttagatgaaaacagctatccattacaacaagatttctccctcctggatttttatcctgacatggtaaagcatggagccaatgcccgtctctgaggccagaggaagaaattgcaggcatttcaaggaagaagtactgaaatgatttgtcttttgaaataaatgaatgacagggcttttgctttggattttttatgaaatatattttacaaagagaattgcactagatatataaattaaaacttttttctaagaaaatcctgtgaggtttaaaaagattgtttttgtcttttggtttcttcctttcttctggagaaatgatctaccagtcaaggcaatatgtagcagatccctgggaattaaaggtttgcccatttgttcactgtatttagtccctgctacattccaggcatcgtactaagtatggggaaccacaaaaaagacactccctcaaaaactgctgcagtgctttcgcttatccctacctaaaaaaccgccaatgtgaaatcattcccttgaatataactataatgataatgcattagtttatataaacctatgttaagacaaggtcaagacaagggtgtctttttataaaaagtattgaaaatgaaggaaatgagatcatgtttcaatttattaaagcagggaaaagcgttctgtgcttagttcgtgtctaggatttgagtgccttactgaatgcatttaccagcaaacatgtagcaatctgttctctcattgtgattgtggaaaaagctcatgtaaaatgatagtccttaatgaggaagtatggcgtgggacttattctgtaagttcaaagtatgctgagtgttaatagattatcatattgcctgaaaataaattcatgatgacatggcccagcc

SEQ ID NO: 252893 - DNA, 341 bp, Homo Sapiens
ccaagaatctcctatctggaacctgcgactgcagggtcatggaatcatcagtcccaacatctgtaaaaacgattgcaaaattgaagtgagtgcccttcctagcttctgggtagacttcactaagcttgtcagttctttcaaggttgcatccatccaagtgtagatctgcaactcgctggacggtacatttccccgggagaactcgtccattcggtggtggcggccgttattggtggtgaagacccgtagcaacagtgggcatgtcttctcgcggtcgatcggtttctctggctccttcttaatttcctcctgggtaacgcgcgactccaccgccatcttcc

SEQ ID NO: 252894 - DNA, 845 bp, Homo Sapiens
  misc_feature (799)..(799): n is a, c, g, or t
  misc_feature (801)..(803): n is a, c, g, or t
  misc_feature (814)..(814): n is a, c, g, or t
agacttagtgctcatgctcgctgcaggggtcggaggtcagggcgagcgtctcgcaggccgtaggaggaagatggcggtggagtcgcgcgttacccaggaggaaattaagaaggagccagagaaaccgatcgaccgcgagaagacatgcccactgttgctacgggtcttcaccaccaataacggccgccaccaccgaatggacgagttctcccggggaaatgtaccgtccagcgagttgcagatctacacttggatggatgcaactttgaaagaactgacaagcttagtaaaagaagtctacccagaagctagaaagaagggcactcacttcaattttgcaatcgtttttacagatgttaaaagacctggctatcgagttaaggagattggcagcaccatgtctggcagaaaggggactgatgattccatgaccctgcagtcgcagaagttccagataggagattacttggacatagcaattacccctccaaatcgggcaccacctccttcagggcgcatgagaccatattaaattctatttactatttgttgaatttatttttccgtcagttatgtaaaataaacatactcttcttcctcccctgattattgccattaagcctttaaattctaaacaaattataatgcatcatctatttaggagttagatttggatgtgctattgtatgattacgaatagtctgtatgtttcaagcccttctgtaaaatatgaagaaaagtgctcttagcattctgtgtaaaactgtactgttaaatatatgtgtggtaatccatacancnnnaaaccacaaanaacaacaacacacatgttcggccggccctca

SEQ ID NO: 252895 - DNA, 1166 bp, Homo Sapiens
  misc_feature (98)..(121): n is a, c, g, or t
  misc_feature (1116)..(1116): n is a, c, g, or t
tgcggaatgaacagctgtctaaaagcggcggtacggtccggaatcccgggatatcgtcgacccacgcgttcggttatcaccttagccactgtaatttnnnnnnnnnnnnnnnnnnnnnnnntgtcttggtagaggtcgttaattagactcaacatgtactgccttttgcagtctattatgacagtgtcttttagcacaaataatagagctaaaaaatgtcctgtcacttccattataagaaatctggattcatatctaagtgtatattataatactgtacagttaagagttcagaacaagtggtaatgttttctcttaatttaactcatttgtgccttctttactcattcaaacacacatacattttacatatagtttatttctttatgaaatgctaatcttcagcccgtaccaaaaagtagagtggagcctctttgcactactactatcaataaattttaaatcagttggatttttaagcattttttaaaagctgacattaaagtaaatctaaaaaaagtttaacaaactggccaagacactaatttttatgtataatcacaatattttatactcacctttattgactaaaaataattatgctacatgttgtcctgcatcagaagaattatttcttcttgccagtgttttgggatttgaagataatggttccactcaaagaacctattattttctctactgaggaacccaatgtagaacttgcactgatatttttattactgcctttatatgaatctataggtatctaaatgttaaggcatgtatgatctttgatcatttcttttttcaaattaaagttgtataaaagtttcaatatcttgccttaaattagttgcctattctttctaggattcaaatattgtgacatttaaaaaagaaaacattcacttttgaaacttagacttcagatcaaaaaggactgaacccccactatcataatccatacattcatttccatgttgtttgactagcagtgcatatatgaatgaatatggtaattaatcttacctataagaaccaaatactttaattatattaagatagtgaataaagatgtataatatttttattaataccttgaatatattcagtggnattgaatgtgacttcataactgtactacgtatgattaaaataaaaaataa

SEQ ID NO: 252896 - DNA, 699 bp, Homo Sapiens; identical to SEQ ID NO: 2868

SEQ ID NO: 252897 - DNA, 984 bp, Homo Sapiens
  misc_feature (917)..(917): n is a, c, g, or t
  misc_feature (937)..(937): n is a, c, g, or t
  misc_feature (969)..(969): n is a, c, g, or t
gaaacaaataaaaaatactgtaataaaagtacttataaacatactaatcctctttcaggaccctaaagttgcaggttagtaggtcttcaaggacaaatctgtaagtttcttatttctgtagtgcaagtaaaatttcactttttgaaactatagagagatccctttctgattagcctacagaacttaaagtgagggaaccatttcctctcacagacaaagaggcctgggatattaggactttggggtttgagagcatcatggggcagacagatggtggatggtctggacaagaagcgagtaagccactgcggttggtcatactgaagggaattgatggcaagaggatcccctgagcaagtcagaagttactctcatcagtcgttcatggtcacaacctgaggtactctgctgagtgggcaaggctgaagaagaggcctgtggaatgcagcattacctgctggacagagcagggcaggcagttctatgccttggagctcctgactgcagggactctgtccccacactcagaaagactcagctcactcaatgagagaatgtgatttactttatagaacgtataatcaactttgttgaataatttgttctattaaggctgtctaaagtatgtgatgtcttcatcatagtatgaagtgttgaaaattaataacgagcctagtttaggaaaaagctgcttaaaactgtggctctaagagagtaatcataaaataccttagataaaattgcactatggaattttcattgagtatgtttaaattattggcttgtctactaatacacatctgcttcaaaatgaacatatttcataaaattggcatcaattttaatgacgctcctggtatggaacctcagatataccctattggagacaatcctttgatcataaattctccccaacntataaatcactttatgtctntatcatataaaaaaattcactggccgtcgttntaccgtcgtgctggg

SEQ ID NO: 252898 - DNA, 612 bp, Homo Sapiens
acacttcatattatgatgaagacatcacatacttagcagccttaatagaacaattattcaacaaagttgattatacgttctataaagtaaatcacattctctcattgagtgagctgagtctttctgagtgtggggacagagtccctgcagtcaggagctccaaggcatagaactgcctgccctgctctgtccagcaggtaatgctgcattccacaggcctcttcttcagccttgcccactcagcagagtacctcaggttgtgaccatgaacgactgatgagagtaacttctgacttgctcaggggatcctcttgccatcaattcccttcagtatgaccaaccgcagtggcttactcgcttcttgtccagaccatccaccatctgtctgccccatgatgctctcaaaccccaaagtcctaatatcccaggcctctttgtctgtgagaggaaatggttccctcactttaagacttgcactacagaaataagaaacttacagatttgtccttgaagacctactaacctgcaactttagggtcctgaaagaggattagtatgtttataagtacttttatcacagtattttttatgtgtttcggacacagggtcttg

SEQ ID NO: 252899 - DNA, 273 bp, Homo Sapiens
  misc_feature (13)..(13): n is a, c, g, or t
  misc_feature (78)..(78): n is a, c, g, or t
gtctgcccccatnatgctccacaaaaccccaaaagtcccaaaaacccccaggccccctttgtctgtgaagaggaaaanggtccccctcactttaaagttctgtaggcctaatcagaaagggatccccctatagtttcaaaaagtgaaattttacttgcactacagaaataagaaacttacagatttgtccttgaagacctactaacctgcaactttagggtcctgaaagaggattagtatgtttataagtacttttattacagtattttttat

SEQ ID NO: 252900 - DNA, 642 bp, Homo Sapiens
ttcaacagctgaaatattagttactggtttattccatgccagttttagatcttgcccttgaaacgagctccatgaactgcagctgcttcagcttctgctcttgtcttgaatgtaattactgcatgaagtgaggaatcatcaatctgacaatcttcaatttcaccatattgcgcaaaatgaggaagaagatcttctctatcgctctccgtaaatgcagaaatctccaatgccctgggacggtgatccaccacagcatgaccaggcacacctcgccctcgccctcgccccctgcctcggccatgaactgcacctcgacctcttgaatgaattcctctgccccgaccagatgaaagaatccctcgtttggcagcttccagctgtaattctgtatactttctcctaagttcagtgacttcttctccagcctgcatcttcttatataaatccagttctgtgtcaagtaattccttctgcatctgagtcttggtttttatactttttggaagacagcgtccaggagaagcagctttgacctcatctttcaacttggtaatattttttgtcaaaacctctaaagttttcattatttctgctttatcttcagacttcattgttttgtttttctccagttttgaaattaac

SEQ ID NO: 252901 - DNA, 1697 bp, Homo Sapiens
  misc_feature (690)..(690): n is a, c, g, or t
gaaaggtacttgagtttgtccaaagtggtgccgttttctcactatgctgggacattgctgctacttctggcaggtgtggcctgcctccgaggcattggccgctggaccaacccccagtaccggcagttcatcaccatcttggaagcaacacatcggaaccagtcttcagaaaacaagaggcagcttgccaactacaactttgacttccggagctggccagtcgacttccactgggaagaacccagcagccggaaggagtctcgagggggcccttcccgccggggtgtggccctgcttcgcccagagcccctgcaccgggggacagcagacaccctcctcaaccgggttaagaagctgccttgtcagatcaccagctacctggtggcgcacaccctagggcgccggatgctgtatccaggctctgtgtacctgctgcagaaggccctcatgcctgtgctgctgcagggccaggcccgactggtggaagagtgtaatgggcgccgggcaaagctgctggcctgtgatggcaatgagattgacaccatgtttgtggaccggcgggggacagctgagccccagggacagaagctggtgatctgctgtgaggggaatgctgggtttttatgaaggtgggctgcgtctccacgcccctggaagctggatattcagtcctggggctggaatcatccnaggctttgctggaaagcacgggggtgccattcccgcagaatgaggctaatgccatgggatgtggtggtcccagtttgccatccaccggcctgggcttccagccccaggacatcatcatctacgccggggccatcggcggcttcactgccacgtgggcagccatgtcctacccagatgttagtgccatgatcctggatgcctcctttgatgacctggtgcccttggccttgaaggtcatgccagacagctggaggggcctggtgaccaggaccgtgaggcagcatctcaatctaaacaacgcggagcagctgtgcagataccagggtcctgtactgctgatccggagaaccaaggatgagatcatcaccaccacggttcctgaggacatcatgtccaaccgaggcaatgacctcctgctgaagctcctgcagcatcggtatccccgggtgatggcagaggagggtcttcgagtggtgaggcagtggttggaggcctcctcacagctggaggaagcctcaatttatagccgatgggaggtggaagaggactggtgtctgtctgtcctccgctcctaccaggcagaacacgggcccgacttcccctggagcgtgggggaggacatgagtgcagatggacggcggcagctggctttgtttctggctcggaagcatctgcacaactttgaggccactcactgcaccccactcccagcccagaacttccagatgccctggcacctctagggaccaactgggactcattatggaagaatggggtgagaggagacatgaggaaagaccctcttatttgtgattctctgtgttcatgttgctgtttatagtttgtggaaagtgggggaccatcccccttctcaccactgttcctcttgcacgtttcccctcattcatgtggctgtacttaaccttctccaacatacatcctgcattacatgaatggattattcctaataattaataaaaaggtattttttctactatcaggctaaa

SEQ ID NO: 252902 - DNA, 913 bp, Homo Sapiens
gcccgagccggggccatggcgaagctgctgagctgcgtcctaggcccccggctctacaaaatctaccgggagagggactctgaaagggccccggccagcgtccctgagacgccaacggcagtcactgccccccattccagctcctgggatacgtactatcagccccgtgccctggagaaacatgctgacagcatcctggcactggcttcagtattctggtccatctcttattactcctctcccttcgccttcttctacttgtacaggaaaggttacttgagtttgtccaaagtggtgccgttttctcactatgctgggacattgctgctacttctggcaggtgtggcctgcctccgaggcattggccgctggaccaacccccagtaccggcagttcatcaccatcttggaagcaacacatcggaaccagtcttcagaaaacaagaggcagcttgccaactacaactttgacttccggagctggccagtcgacttccactgggaagaacccagcagccggaaggagtctcgagggggcccttcccgccggggtgtggccctgcttcgcccagagcccctgcaccgggggacagcagacaccctcctcaaccgggttaagaagctgccttgtcagatcaccagctacctggtggcgcacaccctaaggcgccggatgctgtatccaggctctgtgtacctgctgcagaaggccctcatgcctgtgctgctgcagggccaggcccgactggggggaaaagtgaaatgggcgcccggcaaagctgctgggcctgtgatggcaatgagattgacaccatgttttgtggaaccggcgggggaaagctgagcccccaggaacaaaaacctggggatcctgctgtgaaggggaaatgctgggttttaataagggggggctg

SEQ ID NO: 252903 - DNA, 439 bp, Homo Sapiens
  misc_feature (24)..(24): n is a, c, g, or t
  misc_feature (258)..(258): n is a, c, g, or t
aacagggccccgaacttccccccnggaaccgtgggggaaggaacatgagtgcaagatggaacggcggcaagctggcctttgtttccgggcctcggaaagcatcctgccacaactttggagggcccactcactgcacccccactccccagcccccagaacttcccagatgcccctggcaccctctagggacccaactgggactcattatggaagaatggggtgagaggagacatgaggaaagaccctcttatttgtgantctctgtgttcatgttgctgtttatagtttgtggaaagtggggaccatcccccttctcaccactgttcctcttgcacgtttcccctcattcatgtggctgtacttaaccttctccaacatacatcctgcattacatgaatggattattcctaataattaataaaaaggtattttttctact

SEQ ID NO: 252904 - DNA, 857 bp, Homo Sapiens; identical to SEQ ID NO: 169435
  misc_feature (671)..(671): n is a, c, g, or t
  misc_feature (673)..(676): n is a, c, g, or t
  misc_feature (678)..(678): n is a, c, g, or t
  misc_feature (680)..(680): n is a, c, g, or t
  misc_feature (682)..(682): n is a, c, g, or t
  misc_feature (684)..(684): n is a, c, g, or t
  misc_feature (686)..(686): n is a, c, g, or t
  misc_feature (689)..(690): n is a, c, g, or t
  misc_feature (693)..(694): n is a, c, g, or t
  misc_feature (696)..(700): n is a, c, g, or t

SEQ ID NO: 252905 - DNA, 1273 bp, Homo Sapiens
  misc_feature (427)..(427): n is a, c, g, or t
  misc_feature (429)..(429): n is a, c, g, or t
  misc_feature (436)..(436): n is a, c, g, or t
  misc_feature (448)..(448): n is a, c, g, or t
  misc_feature (453)..(453): n is a, c, g, or t
  misc_feature (484)..(484): n is a, c, g, or t
  misc_feature (1232)..(1232): n is a, c, g, or t
  misc_feature (1239)..(1239): n is a, c, g, or t
  misc_feature (1252)..(1252): n is a, c, g, or t
cgctcccgctgagaggagacagccagtgcgactccaccctccagctcgacggcagccgccccggccgacagccccgagacgacagcccggcgcgtcccggtccccacctccgaccaccgccagcgctccaggccccgccgctccccgctcgccgccaccgcgccctccgctccgcccgcagtgccaaccatgaccgccgccagtatgggccccgtccgcgtcgccttcgtggtcctcctcgccctctgcagccggccggccgtcggccagaactgcagcgggccgtgccggtgcccggacgagccggcgccgcgctgcccggcgggcgtgagcctcgtgctggacggctgcggctgctgccgcgtctgcgccaagcagctgggcgagctgtgcaccgagcgcgacccctgcgacccgcacaagggcntnttctgtnacttcggctccncggcnaaccgcaagattggcgtgtgcaccgccaaanatggtgctccctgcatcttcggtggtacggtgtaccgcagcggagagttcttccagagcagctgcaagtaccagtgcacgtgcctggacggggcggtgggctgcatgcccctgtgcagcatggacgttcgtctgcccagccctgactgccccttcccgaggagggtcaagctgcccgggaaatgctgcgaggagtgggtgtgtgacgagcccaaggaccaaaccgtggttgggcctgccctcgcggcttaccgactggaagacacgtttggcccagacccaactatgattagagccaactgcctggtccagaccacagagtggagcgcctgttccaagacctgtgggatgggcatctccacccgggttaccaatgacaacgcctcctgcaggctagagaagcagaccgcctgtgcatggtcaggccttgcgaatgaacctggaagagaacattaagaagggcaaaaagtgcatccgtactcccaaaatttccaagcctatcaagtttgagctttctggctgcaccagcatgaaggacataccgagctaaattctgtgggagtatgtaccgacggccgatgctgcacccccttacaggaaccaccaccctgccggtgggagtttcaagttgcccttgacgggcgagggtcatggaaggaaggaacatggatgttttcattcaaggacctgttgccttgccattttacaactgttccccgggaggacaatggacatcttttggaattcgntgttaanttacagggaaggntgtttacgggaggacatgggg

SEQ ID NO: 252906 - DNA, 1467 bp, Homo Sapiens
  misc_feature (31)..(31): n is a, c, g, or t
  misc_feature (60)..(60): n is a, c, g, or t
  misc_feature (63)..(63): n is a, c, g, or t
  misc_feature (980)..(1000): n is a, c, g, or t
  misc_feature (1052)..(1068): n is a, c, g, or t
acaacgcctcctgcaggctagagaagcagancgcctgtgcatggtcaggccttgcgaacngancctggaagagaacattaagaagggcaaaaagtgcatccgtactcccaaaatctccaagcctatcaagtttgagctttctggctgcaccagcatgaagacataccgagctaaattctgtggagtatgtaccgacggccgatgctgcaccccccacagaaccaccaccctgccggtggagttcaagtgccctgacggcgaggtcatgaagaagaacatgatgttcatcaagacctgtgcctgccattacaactgtcccggagacaatgacatctttgaatcgctgtactacaggaagatgtacggagacatggcatgaagccagagagtgagagacattaactcattagactggaacttgaactgattcacatctcatttttccgtaaaaatgatttcagtagcacaagttatttaaatctgtttttctaactgggggaaaagattcccacccaattcaaaacattgtgccatgtcaaacaaatagtctatcaaccccagacactggtttgaagaatgttaagacttgacagtggaactacattagtacacagcaccagaatgtatattaaggtgtggctttaggagcagtgggagggtaccagcagaaaggttagtatcatcagatagcatcttatacgagtaatatgcctgctatttgaagtgtaattgagaaggaaaattttagcgtgctcactgacctgcctgtagccccagtgacagctaggatgtgcattctccagccatcaagagactgagtcaagttgttccttaagtcagaacagcagactcagctctgacattctgattcgaatgacactgttcaggaatcggaaccctgtcgattagactggacagcttgtggcaagtgaatttgcctgtaacaagccagattttttaaaatttatattgtaaatatnnnnnnnnnnnnnnnnnnnnnatatatatatatatgtacagttatctaagttaatttaaagttgtttgtgccnnnnnnnnnnnnnnnnnaatgctttgatatttcaatgttagcctcaatttctgaacaccataggtagaatgtaaagcttgtctgatcgttcaaagcatgaaatggatacttatatggaaattctgctcagatagaatgacagtccgtcaaaacagattgtttgcaaaggggaggcatcagtgtccttggcaggctgatttctaggtaggaaatgtggtagcctcacttttaatgaacaaatggcctttattaaaaactgagtgactctatatagctgatcagttttttcacctggaagcatttgtttctactttgatatgactgtttttcggacagtttatttgttgagagtgtgaccaaaagttacatgtttgcacctttctagttgaaaataaagtgtatattttttctataaa

SEQ ID NO: 252907 - DNA, 417 bp, Homo Sapiens
  misc_feature (76)..(76): n is a, c, g, or t
ccccttggaaaatttcccaatggtaagccccccaaattccctgaaaccccccaagggaagaatggtaaaagcctgnccggatccgtccaaagccatgaaaagggatacctatatgggaaattcctgcctcagatagaatgacagcccgtcaaaacagattgtttgcaaaggggaggcatccagtgtcccttggcaggctgatttcctaggtaggaaatgtggtagcctcacttttaatgaacaaatggcctttattaaaaactgagtgactctatatagctgatcagttttttcccctggaagcatttgtttctactttgatatgactgtttttcggacagtttatttgttgagagtgtgaccaaaagttacaatgtttgcacctttctagttgaaaataaagtgtatattttttct

SEQ ID NO: 252908 - DNA, 799 bp, Homo Sapiens
atgtaccctaatctgacagatgagcattgtgttccaagtagaaatgtgcaacaaatctccgaaaatccaaggggtctagagaagcacctgggttacaggctctgtgtagttgccatgcattgttcatggctacatcaatcatgtagctcaccaaaattgagtaccatttcttgcttcttatcctcaccctgtatttcgaaataatttgatccattttagctacaccttccttgcattcatcatacacttttactatggatggttgacttatctgagggatttcttcgttatcagcatcacaacagcttacctcattgactggttctatgcccacagcattggagcacagactgataatgccatccccataccaacgacacaaaattatctcattgttttcttctactcggaaatcaaaataccctctcttcatttttttcatatgttctacattcataaggggacatttttcggtcctgttctcacgaattgttcctgttgccctcacccccttctttttcaaggctgacaacaatttgacacttgtaaagaagctatcaaaacacaggtgatagggatactgacctctctctaaaagaacatcagcgaagttcatcactagatttccacctaacccaagatcaggatcctcatctaccttcatagttgattcttcttgatagggttcaaaccaaaccagataaccctgtgtggttgtaccacaccaaattttatagccaattctaataggctttccattcaggaattggtcactatcaaagcattcacacattgactt

SEQ ID NO: 252909 - DNA, 546 bp, Homo Sapiens
gtttctcagctggaaaagaagccacacaggaaatgacaacgacgctgaatcccagcctccctccccagagcagaagtcccgcaggacagacagacacagacagcgctagtgaccagcacggttctcatgtaaattacaagccccagccgccagccccgccttctcttcctcctcctccgtcttcttccctggccctggtcaggccctgtggagccccagctctgggtccctagcccgggtcccaggcagcccaggctccctcctgagctgagaaacggaacctcgcgaaccactggtggcacatccttctcctcccccgcccctgatcacccgcccccggatcagaaatatatctatattctcgactaaagtctcatcaggaaatatttcctgtcttttattttaagcatcaaattgttttagttgatttaaaaagggaaaaatacaggaaagaccaaaaaaaggccaagggtgttgttggggcgtctgtctaatgtggtgggtctttttttgaggggtctcctaaaataaaatattttgataagc

SEQ ID NO: 252910 - DNA, 770 bp, Homo Sapiens
  misc_feature (521)..(521): n is a, c, g, or t
  misc_feature (687)..(687): n is a, c, g, or t
agggagttgggtgggagaaggaggaggcggcgaatcacttataaatggcgccgaagcaggacccgaagcctaaattccaggagggtgagcgagtgctgtgctttcatgggcctcttctttatgaagcaaagtgtgtaaaggttgccataaaggacaaacaagtgaaatacttcatacattacagtggttggaataaaaattgggatgaatgggttccggagagcagagtactcaaatacgtggacaccaatttgcagaaacagcgagaacttcaaaaagccaatcaggagcagtatgcagaggggaagatgagaggggctgccccaggaaagaagacatctggtctgcaacagaaaaatgttgaagtgaaaacgaaaaagaacaaacagaaaacacctggaaatggagatggtggcagtaccagtgagacccctccaccctcctcgggaagaaaagggcccgggtagatcctactgttgaaaatgaggaaacattcatgaacagagttgaagttaaagtanagattcctgaagagctaaaaccgtggcttgttgatgactgggacttaattaccaggcaaaaacagctcttttatcttcctgccaagaagaatgtggattccatttctgaggattatgcaaattacaagaaatctcgtggaaacacagataataaggagtatgcggnttaatgaaatttgtggcaggggattaaaagaataccttccacggaaatgtttgggtaccccagcctactctataaaatttgaa

SEQ ID NO: 252911 - DNA, 2796 bp, Homo Sapiens
  misc_feature (1308)..(1308): n is a, c, g, or t
  misc_feature (1312)..(1312): n is a, c, g, or t
  misc_feature (1321)..(1321): n is a, c, g, or t
  misc_feature (1327)..(1327): n is a, c, g, or t
  misc_feature (1806)..(1943): n is a, c, g, or t
  misc_feature (1946)..(1946): n is a, c, g, or t
  misc_feature (1993)..(2004): n is a, c, g, or t
  misc_feature (2048)..(2057): n is a, c, g, or t
  misc_feature (2094)..(2105): n is a, c, g, or t
  misc_feature (2338)..(2338): n is a, c, g, or t
  misc_feature (2584)..(2584): n is a, c, g, or t
  misc_feature (2695)..(2695): n is a, c, g, or t
  misc_feature (2697)..(2697): n is a, c, g, or t
  misc_feature (2715)..(2715): n is a, c, g, or t
gggtgcgcgggtcgcggtgctgtgaggtctgcgggcgctggcaaatccggcccaggatgtagagctggcagtgcctgacggcgcgtctgacgcggagttgggtggggtagagagtagggggcggtagtcgggggtggtgggagaaggaggaggcggcgaatcacttataaatggcgccgaagcaggacccgaagcctaaattccaggagggtgagcgagtgctgtgctttcatgggcctcttctttatgaagcaaagtgtgtaaaggttgccataaaggacaaacaagtgaaatacttcatacattacagtggttggaataaaaattgggatgaatgggttccggagagcagagtactcaaatacgtggacaccaatttgcagaaacagcgagaacttcaaaaagccaatcaggagcagtatgcagaggggaagatgagaggggctgccccaggaaagaagacatctggtctgcaacagaaaaatgttgaagtgaaaacgaaaaagaacaaacagaaaacacctggaaatggagatggtggcagtaccagtgagacccctcagcctcctcggaagaaaagggcccgggtagatcctactgttgaaaatgaggaaacattcatgaacagagttgaagttaaagtaaagattcctgaagagctaaaaccgtggcttgttgatgactgggacttaattaccaggcaaaaacagctcttttatcttcctgccaagaagaatgtggattccattcttgaggattatgcaaattacaagaaatctcgtggaaacacagataataaggagtatgcggttaatgaagttgtggcagggataaaagaatacttcaacgtaatgttgggtacccagctactctataaatttgagagaccacagtatgctgaaattcttgcagatcatcccgatgcacccatgtcccaggtgtatggagcgccacatctcctgagattatttgtacgaattggagcaatgttggcttatacacctctggatgagaagagccttgctttattactcaattatcttcacgatttcctaaagtacctggcaaagaattctgcaactttgttcagtgccagcgattatgaagtggctcctcctgagtaccatcggaaagctgtgtgagaggcactctcactcacttatgtttggatctccgtaaacacatttttgttcttagtctatctcttgtacaaacgatgtgctttgaagatgttagtgtataacaattgatgtttgttttctgtttgattttaaacagagaaaaaataaaagggggtaatagctcctnttcncttatctancttttnttttcatttcaaaattgctgccagtgttttcaatgatggacaacagagggatatgctgtagagtgttttattgcctagttgacaaagctgcttttgaatgctggtggttctattcctttgacactacgcacttttataatacatgttaatgctatatgacaaaatgctctgattcctagtgccaaaggttcaattcagtgtatataactgaacacactcatccatttgtgcttttggttttttttatggtgcttaaagtaaagagcccatcctttgcaagtcatccatgttgttacttaggcattttatcttggctcaaattgttgaagaatggtggcttgtttcatggtttttgtatttgtgtctaatgcacgttttaacatgatagacgcaatgcattgtgtagctagttttctggaaaagtcaatcttttaggaattgtttttcagatcttcaataaattttttctttaaatttcnnnnnnnnnnnnnnnnnnnnnnnnnnnnnnnnnnnnnnnnnnnnnnnnnnnnnnnnnnnnnnnnnnnnnnnnnnnnnnnnnnnnnnnnnnnnnnnnnnnnnnnnnnnnnnnnnnnnnnnnnnnnnnnnnnnnnnnnnnganggcgcgccccgcctcgccccccaaaaaacttttcaaagcatttggtnnnnnnnnnnnncccccaaataagaaaagggagaacggcccccgtgttttgttttnnnnnnnnnntctcgccccccccgcgctgcgcctccggttttccacnnnnnnnnnnnncaccccccccgggggcaaacccgaagtcgcgtcgcgcaacacaccgccacaacggcactctcccccagcgcccccgcccagggggtaccactcccccaccccgggcgcccgcacacgcggtaacctccgaacagaatcagaaagtccaactcgtcccgcacgcccgctccactttcctttttatacaaagcacaacgagaggacatccataccccccccttgagccacggagncctctcttccgcccgccgcggcactgtggagcaccgaagctctcgctccacacacagcggcggccgcgagattagctacccactccctcactatataacctcgactcacagaagcgcctcatcaacacaaacatacattgtgatagcggccctgcttgttgcagcagataaagagccttgatggctgtccgccgctcgcgggcaccagaacgcacgctcgccgcacgcgtctcagtatacaaagantttggttctctaattatctagtgtggggaggagggagagagctctgtaccaccccaccataaaaagcgctccatgaccggaataaatatgcgcgctcgccatctctacagnangaagtctcttgcggtcgntggggtttaccaccacataggaagagatgcatgcttccccccgccgccgaccaaaacacccacttcttcgagcgggttgaa

SEQ ID NO: 252912 - DNA, 787 bp, Homo Sapiens
ggcccggacttgggagatgcgaccacgcgtcgccacgcgtcggtgagaccaggattgaaacaagatggcgggttcgtggtgagaagccgtcaaggagtagaaattggtatgcttagaagcagattctaaaagcagtttctcttcagaacatcttttttcataccacttgataagcatcttgaaacaccatggctgtagctgcagtaaaatgggtgatgtcaaagagaactatcttgaaacatttatttccagtccaaaatggagctttatattgtgtttgtcataaatctacgtattctcctctaccagatgactataattgcaacgtagagcttgctctgacttctgatggcaggacaatagtatgctaccacccttctgtggacattccatatgaacacacaaaacctatccctcggccagatcctgtgcataataatgaagaaacacatgatcaagtgctgaaaaccagattggaagaaaaagttgaacaccttgaggaaggacctatgatagaacaacttagcaaaatgttctttactactaagcaccgttggtatcctcatggacggtatcacagatgtcgtaagaatctgaatcctccaaaagacagatgatgccgaggttcctgggggaatcaaagagaaatgtgcctcatttgccatttgagaaaatgcagtctggtgtattcagtaatatatagtaaagtaataatgataaaatatcttttcatatattaagaatgggtacttttatataaagtaattctggatttgacattctcaaa

SEQ ID NO: 252913 - DNA, 2117 bp, Homo Sapiens
  misc_feature (386)..(445): n is a, c, g, or t
  misc_feature (1799)..(1799): n is a, c, g, or t
  misc_feature (1856)..(1888): n is a, c, g, or t
  misc_feature (1949)..(1957): n is a, c, g, or t
ggcatcttgataatttgttgttgagagctgttcattctaaaatgtaatgaaattcagtctagttctgctgataaagatcatcagttttgaaaggttactgattttcctcttccctcttagttttttacccaatatatggagaagagtaatggtcaatcttaacattttgttttaattgtttaataaagctgctgggcagtggtgcagcattcctacctagtgtcataaaagcaaaatacttacatagctttcttaaaatataggaatgacattacatttttaggagaaagtaagttgctttgcaccgcctacttaattcttttccatatattgtgatacaaacttttgaatatggaatcttactatttgaatagaaatgtgtatgnnnnnnnnnnnnnnnnnnnnnnnnnnnnnnnnnnnnnnnnnnnnnnnnnnnnnnnnnnnngcatgctgtgaaacttgactacacaacataaatcactttttaaattccaggaacgggtagtctgacacggtgattatccttttgaggctgaatccgttattaacttgttatttaggtttttactcccagtagcaagggattctaagttagttgcacttacatgattattgttatttaaaactaagaataaaggctgcattttcaaagataaattggaattgctgttggtgaaataacaaccaaaatactgaatctgatgtacatacaggtttctacaggaagagatggtataatttacaatttggagatttaataaccagggctacccagaaaaagtgacttgataacatggtaccaataagtaagggatgctctctcggtttgcttttgccactttcaagattttaacttctcaggttattaatcaaaattattgtataagttagccaatagaatttttaggttaaaacaacagatggggggtttgtggagtgtttaatgtcatgggcatttttagtagcatagaccctttgttctgcatttgaatgtttcgtatatttttgtttcacagttaatcttccctccccaagtttgctattcaaatcaactgcctgaatgacatttctagtagtctgatgtatttttctgaggaatagtttgtgattccaatgcaggtgtcttcattaccattacctctacactgcagaagaagcaaaactcctttattagaattactgcacatgtgtatggggaaaatagttctgaaaggctagaatgatacaagtgagcaaaagttggtcagcttggctatggagtggtggcaataatctctaaacattccaaaagaccatgagctgaacctaaactcccttggaatctgaacaaaggaatataaaattgccatttgaaaactgaccagctaatctggacctcagagatagatcagccagtggcccaaagccatttcaagtacagaaattatagagactacagctaaataaatttgaacattaaatataattttaccactttttgtctttataagcatatttgtaaactcagaactgagcagaagtgactttactttctcaagtttgatactgagttgactgttcccttatccctcacccttccccttccctttcctaaggcaatagtgcacaacttaggctattttcgcttccaaatttgaatgaacccccttcatgccctgaattttctctcttttgaaagacccctgccctcccatccgtgtctaaaagggaaatgcacccctctaggcttccgaactaaaatcgccccccgggcaccgcgccaccgcaaaaagataaccacacccaccctgttccgcccnaccccccaacccccgccaaccttccctaaagatgaccccgatatggcttctgttatnnnnnnnnnnnnnnnnnnnnnnnnnnnnnnnnntcatttacatttacacgatccgccccctccattgccgcatattaccgaaccgcgtacccgnnnnnnnnnacattcgtaatctcgcacctcattaccccctatccccaccccgcgccggcatgcgatcagacagagggtagcggtgagccctcaggccccgcctattatcttgtctctccccccgccccgccacacagatcgcaccgcgcacgcgatatatacgcgccct

SEQ ID NO: 252914 - DNA, 446 bp, Homo Sapiens
gacgcattcacgcactcccaggttgcacctgctgctggcggtgagcagggggttcagcagcttgaaccggaattccccgagggggctctccccagcttaaactttgttgtttaaatttgttaactttttatattaatgactattgaaagtggtaataaaaatttatattataggcttcaatgttttcatgaatgttacccaaaaagctgtgttttctttggtcagaggtcaaaatttatgaaaaacaaaatgctgtatgaatggaaatcattttgcaattgagtgacacttcattgtaattcacagtgtaaatttaatccaaactgaaattttgtttcaactgaatttgtaattaactctgaatttgtttttaatcattagtaatatttcagttgggtatctttttaagtaaaaacaacaaataaactctgtacatgtaaaacgtg

SEQ ID NO: 252915 - DNA, 1833 bp, Homo Sapiens
agcacatgtatgaggagaccagcagcaaaacataaccatatgtgttttgcgttacttcctctaaaaagaatttgcaggcacctgttaatttaacttctaagatggagatttagaactagaatattgagttttatagcactattttagaatacaaaaagatacacaatcattctgttttttgaaattccatgtgattcaaactgctccctattatttgggtattaatttgcactaatagcaaaatgtaatggcagatcagctttgagagtggtcctaagcagtaaactggatgatgttgcattagaaaaacatcaataattcatatttaagttttagtagttactactgatttgataatcacttaaattttatatatcttaatgtattttttcagactcctaattaattcccacattcactgtaactaggggcatagtccattctgttaggattatatcctctccttagaaatgttttccatcctgttgtggggatttggtattaatgtttcttcattgattatggaacttttgttccctgaagctagttaactgtgtctaaagttaaataaatacagcagaatgattggtttaacctggtcgcaactgtgtatcacatccctgtagaaacatgattagggatatgttgtgatatcacatgatggagtgatctttctaaggacgagtattctgctgcgtaggaggtgtgaatcatctgttgtcgtacagttagtcctatcatatactctaatctatatgagtgtgagatgtgattgctatactattggataaacatacgcagctctttttctattatgatagagtggtatgcataaacataagatttgtaatgtttcatttataaactgccttcttcaacacatgttaatagtgttttctcaaagtattgatagtatgtcttccagaatttcacaatatgcttacagtaaatatttcctagcttgttgaaatgttcaattctttgttggctttcttcttgattctgtgggggtgtataacaagcctgaaggacattgtaatcatttcttacaaggtgaaaattaagaaagattgtgtatgagagcctatatagttgttttatccattatcatctttgattaagactttaaaaaaatgctatttccagttaatgcatttggccctattgaattttcagggaccagaaaacattaaaaagttctgcatcttataatggtaaccaattaagcttgagattgttctgaaagtatcaattgctttaaaactgttgtaagtacagttggcaagatctccaagctgaaacttacacgttaaaacttttgcctgtaagaatttgcacatgaatgttaatggaaaacacaaaacttaagatggcccaaaacaaaagccacaaacagttcatcatttggtgcttagtctttgtaagggctctctgtggtttgacttactccagctaccgttaaatgagggcaaatcaccttaaaacatgttcatttgattcataacaaggaaaattgggtctatgattttttgccaatcttagcctaaaagaaattgctttagcttctggtcagcactgattaaaatgtgaatagtgaagtggctatcctaaactggtttatctccacccacactatcatagatttcttaggtaaatacaattcttatctagtggtattctacttgtattcagaatactgtattaaaattttactatttcatttttgtattctgtgcttattttttttgctcacgcatgtatgcttagtataaatgtgtcacttctaaagttttgtctctgacttttagaaataaatttcagaaaaattgtttc

SEQ ID NO: 252916 - DNA, 741 bp, Homo Sapiens
  misc_feature (149)..(159): n is a, c, g, or t
  misc_feature (628)..(628): n is a, c, g, or t
  misc_feature (631)..(631): n is a, c, g, or t
cttgtatatgcctgtttgattggttcctgacataccagaaaatcactgtcaaaacattagcttaacatttgttaaggaaacaaaaagacttcggtgaccacaccttataaaccaaacagttttgtaaatcactttggaaaatttcactnnnnnnnnnnntccttaacaatataataagtaaagaaaatttaaaaccacaaaacatcactgtgtttgtagggggaggtctgatttacagagtaaccacatagtaattataattattagaatgtccagttttcaaaaaacgttacaaggcatacaaagaatgggaaagtgtggctcattcaaaggaacaaaataaagtgacagaaaatatccctaaagaaacccagacatcaaacttaccagacaaagactttaaaacaactgtcttcattatactcaaatgtcaaaaggaaaacataaacaaagaaataaaggaatcagaaaaaatattaaaaagtaggaatatcagcaaagagataacaaattctggagtggaaaactacaatgataaaaatttaaaaatcaccagagggatttaagagtatatttgcacacacagaggaagccatgaacttgaagagaagaaaatggaaaatactcntgngaacagaaagattaaaaaataacaatgggcccagactaatgaatctgtgggacattatcaaatagaccaacatttatattctagaaagataattattggttgtaaaaggt

SEQ ID NO: 252917 - DNA, 1928 bp, Homo Sapiens
  misc_feature (1733)..(1742): n is a, c, g, or t
gtagcgaggcctgggtggcggcaggttgatgtgtttgtgcttccttctacagccaatatgaaaaggcctaagttaaagaaagcaagtaaacgcatgacctgccataagcggtataaaatccaaaaaaaggttcgagaacatcatcgaaaattaagaaaggaggctaaaaagcggggtcacaagaagcctaggaaagacccaggagttccaaacagtgctccctttaaggaggctcttcttagggaagctgagctaaggaaacagaggcttgaagaactaaaacagcagcagaaacttgacaggcagaaggaactagaaaagaaaagaaaacttgaaactaatcctgatattaagccatcaaatgtggaacctatggaaaaggagtttgggctttgcaaaactgagaacaaagccaagtcgggcaaacagaattcaaagaagctgtactgccaagaacttaaaaaggtgattgaagcctccgatgttgtcctagaggtgttggatgccagagatcctcttggttgcagatgtcctcaggtagaagaggccattgtccagagtggacagaaaaagctggtacttatattaaataaatcagatctggtaccaaaggagaatttggagagctggctaaattatttgaagaaagaattgccaacagtggtgttcagagcctcaacaaaaccaaaggataaagggaagataaccaagcgtgtgaaggcaaagaagaatgctgctccattcagaagtgaagtctgctttgggaaagagggcctttggaaacttcttggaggttttcaggaaacttgcagcaaagccattcgggttggagtaattggtttcccaaatgtggggaaaagcagcattatcaatagcttaaaacaagaacagatgtgtaatgttggtgtatccatggggcttacaaggagcatgcaagttgtccccttggacaaacagatcacaatcatagatagtccgagcttcatcgtatctccacttaattcctcctctgcgcttgctctgcgaagtccagcaagtattgaagtagtaaaaccgatggaggctgccagtgccatcctttcccaggctgatgctcgacaggtagtactgaaatatactgtcccaggctacaggaattctctggaattttttactgatgcttgctcagagaagaaggtatgccaccaaaaaggtgggaatcccaaatgttggaaggtgctgccaaactgctgtggtctgagtggacaggtgcctcattagcttactattgccatccccctacatctggactcctcctccatattttaatgagagtattgtggtagacatgaaaagcggcttcaatctggaagaactggaaaagaacaatgcacagagcataagagccatcaagggccctcatttggccaatagcatccttttccagtcttccggtctgacaaatggaataatagaagaaaaggacatacatgaagaattgccaaaacggaaagaaaggaagcaggaggagagggaggatgacaaagacagtgaccaggaaactgttgatgaagaagttgatgaaaacagctcaggcatgtttgctgcagaagagacaggggaggcactgtctgaggagactacagcaggtgaacagtctacaaggtcttttatcttggataaaatcattgaagaggatgatgcttatgacttcagtacagattatgtgtaacagaacaatggctttttatgannnnnnnnnnaacattttaagcagactgctaaactgttctctgtataagttatggtatgcatgagctgtgtaaattttgtgaatatgtattatattaaaaccaggcaacttggaatccctaaattctgtaaaaagacaattcatctcattgtgagtggaagtagttatctggaataaaaaaagaagatacctattg

SEQ ID NO: 252918 - DNA, 997 bp, Homo Sapiens
aagaagcgaggcctgggtggcgaattcggcacgaggcttccttctacagccaatatgaaaaggcctaagttaaagaaagcaagtaaacgcatgacctgccataagcggtataaaatccaaaaaaaggttcgagaacatcatcgaaaattaagaaaggaggctaaaaagcagggtcacaagaagcctaggaaagacccaggagttccaaacagtgctccctttaaggaggctcttcttagggaagctgagctaaggaaacagaggcttgaagaactaaaacagcagcagaaacttgacaggcagaaggaactagaaaagaaaagaaaacttgaaactaatcctgatattaagccatcaaatgtggaacctatggaaaaggagtttgggctttgcaaaactgagaacaaagccaagtcgggcaaacagaattcaaagaagctgtactgccaagaacttaaaaaggtgattgaagcctccgatgttgtcctagaggtgttggatgccagagatcctcttggttgcagatgtcctcaggtagaagaggccattgtccagagtggacagaaaaagctggtacttatattaaataaatcagatctggtaccaaaggagaatttggagagctggctaaattatttgaagaaagaattgccaacagtggtgttcagagcctcaacaaaaccaaaggataaagggaagataaccaagcgtgtgaaggcaaagaagaatgctgctccattcagaagtgaagtctgctttgggaaagagggcctttggaaacttctgggaggttttcaggaaaacttgcagcaaagccaattcggggttggaagtaattgggtttccccaaaggggggggaaaaagcagccattatcaatagcttaaaaaccagaacagatggtggaatgttgggtggatcccatgggggcttaaaggggagcatgccaagttggccccctttggggacaaaccagatcccaattcctaggataggcc

SEQ ID NO: 252919 - DNA, 868 bp, Homo Sapiens
ggggcttcagttcacacgtggcgccagcggaggcaggttgctgtgtttgtgcttccttctacagccaatatgaaaaggcctaagttaaagaaagcaagtaaacgcatgacctgccataagcggtataaaatccaaaaaaaggttcgagaacatcatcgaaaattaagaaaggaggctaaaaagcggggtcacaagaagcctaggaaagacccaggagttccaaacagtgctccctttaaggaggctcttcttagggaagctgagctaaggaaacagaggcttgaagaactaaaacagcagcagaaacttgacaggcagaaggaactagaaaagaaaagaaaacttgaaactaatcctgatattaagccatcaaatgtggaacctatggaaaaggagtttgggctttgcaaaactgagaacaaagccaagtcgggcaaacagaattcaaagaagctgtactgccaagaacttaaaaaggtgattgaagcctccgatgttgtcctagaggtgttggatgccagagatcctcttggttgcagatgtcctcaggtagaagaggccattgtccagagtggacagaaaaagctggtacttatattaaataaatcagatctggtaccaaaggagaatttggagagctggctaaattatttgaagaaaagaattgcccaacagtgggtgtttcagagcctccaccaaaacccaaagggttaaagggggaagattaaccaaggcggtgtggaaggccacaagaaaagaatgcctgcctcccaatttccgaaaggtggaaggtcctggctttttggggaaaaagaaaggggccctttttgtgaacaacactttcctttggaaggggggtttttcacct

SEQ ID NO: 252920 - DNA, 541 bp, Homo Sapiens
  misc_feature (407)..(407): n is a, c, g, or t
  misc_feature (488)..(488): n is a, c, g, or t
  misc_feature (505)..(505): n is a, c, g, or t
ttgccgctcaaactcagatgcataattatgcatttcatttaaatattttgtcacatacgttccaatttatttcactcttgaactaatacccgacattgtgtaggtgtggggaatttgtcacactgtcatcacttcctagatgaaatatactacacaataagctgggtatagcagcttacactctttatttaaaagatggtaaatactgaatggcaaaagaatagtagaaaccagttgagtcagttgtaaaagtcaactggctccccactgcctagcaatggccctggcaaagggcacgtactccggctttgccgagaacagagttggatccaatcaatcttcagggactatcagaactgtttcctcgtacctcacccatgtacacagaagacaaagggtaccctctntactcacctgatttatttaatataagtaccagctttttctgtccactctggacaatggcctcttctacctgaggacatctngcaccaagaggatctcntgcatccaacacctctaggacaacatcggaggcttc

SEQ ID NO: 252921 - DNA, 742 bp, Homo Sapiens
  misc_feature (117)..(117): n is a, c, g, or t
  misc_feature (124)..(124): n is a, c, g, or t
  misc_feature (127)..(417): n is a, c, g, or t
acgccaaggggtttcccaagtcaaaccgttgtaaacgccggcccagtgaattgtaatcgaccccccaaaagggcaaattggccaagtgagcccgaattcggcggcaatttttgtttntggattnttnnnnnnnnnnnnnnnnnnnnnnnnnnnnnnnnnnnnnnnnnnnnnnnnnnnnnnnnnnnnnnnnnnnnnnnnnnnnnnnnnnnnnnnnnnnnnnnnnnnnnnnnnnnnnnnnnnnnnnnnnnnnnnnnnnnnnnnnnnnnnnnnnnnnnnnnnnnnnnnnnnnnnnnnnnnnnnnnnnnnnnnnnnnnnnnnnnnnnnnnnnnnnnnnnnnnnnnnnnnnnnnnnnnnnnnnnnnnnnnnnnnnnnnnnnnnnnnnnnnnnnnnnnnnnnnnnnnnnnnnnnnnnnnnnnncgaatgcataatttttcaaagctcagaaagctctgtctattctctttgggttcaggtaaaattgctaggggggctaacatgccaaataataaatgaaatatttgactccaaaaatgagtcagaaagcaaaaccatttaaaaaattgctcctatattctacactttttaggagcacaatgggaaccaaacaagaatgttaaaataaagaagatacaaaggtgttggtttttttaaagcctgtgaaaataaattaaggtaaattcctggcctaagccgggctaaagggccatttccggtccccacccaatgggccgcttcccagaat

SEQ ID NO: 252922 - DNA, 470 bp, Homo Sapiens
caggagaagcagccactgacaatgccccctcctggccgcagggtcttctgtgcagcctcccatggatcaatataccagttagttaaaacacacatcagtattttctgtcctttagcaacgatgatgatatttgccaccagcgagtgtgatctgtgaggcgattttaaaatgcagtcctgggattctactgtattgaaacacctttgattttctatttgaatacttccaagctttgtaattatgccaccatgtgctcgtgatcgtaagaaattaattttaaactaaatattcttcagtatcccttttcatatatattttcacctcatatacatagtttgggataaaatagtgtaaagagtataggaaaatgcaacaaattaaagggtaggacattaaataaaacaccaatttaccttgttcttcaaagtttttaaggttcaaaaatttattggtattttactgtgccgaat

SEQ ID NO: 252923 - DNA, 581 bp, Homo Sapiens
attcaatacagtagaatcccaggactgcattttaaaatcgcctcacagatcacactcgctggtggcaaatatcatcatcgttgctaaaggacagaaaatactgatgtgtgttttaactaactggtatattgatccatgggaggctgcacagaagaccctgcggccagggaggggcattgtcagtggctgcttctcctgagctccacgccttcattgcagctgcatgttcgatacaatacacctgcttcacagccccatggacatccctacaggtactgtcatgtgaagccttgcctagtagttctctcccagggcaaatgaagctcacagttttgcaaggtggaaacctcttattcacatttgctttgattccccgatggagtagactgcctttgttccatacaggcaaagtaaggatattttaatatcatcctacttcttattagcatttcatttgtctatgtactgtatttcatttgtatgtctcctgaaacatccaaatagagaacataagaacactttatgtacaatctggaaaaaaattacctgagaaatcaattaaagatttttcccctttaaaa

SEQ ID NO: 252924 - DNA, 2171 bp, Homo Sapiens
  misc_feature (2036)..(2036): n is a, c, g, or t
acttgctggggtcggggctgcgcgacggcgcaggggctgcggggagcgccgcgcaggccgtgcagttcctagcgaggaggcgccgccgccattgccgctctctcggtgagcgcagccccgctctccgggccgggccttcgcgggccaccggcgccatgggccagtgcggcatcacctcctccaagaccgtgctggtctttctcaacctcatcttctggggggcagctggcattttatgctatgtgggagcctatgtcttcatcacttatgatgactatgaccacttctttgaagatgtgtacacgctcatccctgctgtagtgatcatagctgtaggagccctgcttttcatcattgggctaattggctgctgtgccacaatccgggaaagtcgctgtggacttgccacgtttgtcatcatcctgctcttggtttttgtcacagaagttgttgtagtggttttgggatatgtttacagagcaaaggtggaaaatgaggttgatcgcagcattcagaaagtgtataagacctacaatggaaccaaccctgatgctgctagccgggctattgattatgtacagagacagctgcattgttgtggaattcacaactactcagactgggaaaatacagattggttcaaagaaaccaaaaaccagagtgtccctcttagctgctgcagagagactgccagcaattgtaatggcagcctggcccacccttccgacctctatgctgaggggtgtgaggctctagttgtgaagaagctacaagaaatcatgatgcatgtgatctgggccgcactggcatttgcagctattcagctgctgggcatgctgtgtgcttgcatcgtgttgtgcagaaggagtagagatcctgcttacgagctcctcatcactggcggaacctatgcatagttgacaactcaagcctgagctttttggtcttgttctgatttggaaggtgaattgagcaggtctgctgctgttggcctctggagttcatttagttaaagcacatgtacactggtgttggacagagcagcttggcttttcatgtgcccacctacttacctactacctgcgactttctttttccttgttctagctgactcttcatgcccctaagattttaagtacgatggtgaacgttctaatttcagaaccaattgcgagtcatgtagtgtggtagaattaaaggaggacacgagcctgcttctgttacctccaagtggtaacaggactgatgccgaaatgtcaccaggtcctttcagtcttcacagtggagaactcttggccaaaggtttttgcggggaggaggaggaaaccagctttctggttaaggttaacaccagatggtgcccctcattggtgtccttttaaaaaatatttactgtagtccaataagatagcagctgtacaaaatgactaaaatagattgtaggatcatatggcgtatatcttggttcatcttcaaaatcagagactgagctttgaaactagtggtttttaatcaaagttggctttataggaggagtataatgtatgcactactgttttaaaagaattagtgtgagtgtgtttttgtatgaatgagcccattcatggtaagtcttaagcttgttggaaataatgtacccatgtagactagcaaaatagtatgtagatgtgatctcagttgtaaatagaaaaatctaattcaataaactctgtatcagcccccccaccaaaacgtccccgcaataacccacaaaaatgtccggcccgcctcgcgcccttaaaaaacctttcctaaaccatttccctttgggcgcgccggggccccagccaggtaaagttgaaacttgggcccataccgtgttttccctaacgaaaacccctgggtcatgaactcagtggcttggaatttttcccccaataaaaacacccgcccgggcgggaaacccgaagccgtctttgaaacccaaccccaatatgcccgcctcttgaaggttccttccctgggattctatccccatgggagtcccccagccaagncctcaatatctcaattttacccccccgcccttgttccccttcttcccaaataaatgggcccctatattacatttacccatttctggccaaacctggtaaaccccctccaccacaccggcttggattgataccctg

SEQ ID NO: 252925 - DNA, 1006 bp, Homo Sapiens
  misc_feature (20)..(20): n is a, c, g, or t
  misc_feature (38)..(38): n is a, c, g, or t
atagggaattttgccttcgngccaagaattcggcacgngcaacctgatccctggctttccaaattcctatcacggtatagaaaaacccatcacattgaaccacgtaccattagccaggatgagatccttgaacgctgcttatattcacttatcaatgaagcattccgtatcttgggagaagggatagctgctagcccagagcacattgatgttgtctatttacatggatatggatggccaaggcacaagggcgggcccatgttctatgcttccacagttgggttgcccacagttctagagaaattgcagaaatattacaggcagaaccctgatattccccaactggagccaagtgactatctaaaaaaactggcttctcagggaaaccctcccctgaaagaatggcaaagcttggcaggctcccctagcagtaaattgtgattcagtcttccagattatgcctcacatgctagcatcaggtaatgctgactgaatttcagtgaaattaaatcaaaaatccaaagtaagattgttctgaaatacaaagcaaaataaataatcattagaatcttctgtgtaacgactctaatggtcaaatctttagagaatgtgcttcctatgcctctgaatctgtccttatcagataaattcaatgcatgaacttgtgtgaatataataccataatagcttatgaaagaggctcaagcataagttgagattctcaaatgcttttatcattggataaatgtgtcatcaattaataaatgataaatgcagcttagtcatacattcattttgactcctttcaatgtcacacacatagtattgatcagaaatcttatgaatcatacatacactcaacaaacattaaagttgtgggaacttaagttagtgtggcaaggcctttcctcttctgggctttcctcttctgtgtatggagaaataatagaaagtggtaagtcgctaacttagtgtaagaaaggtcttagagaacatctatacttct

SEQ ID NO: 252926 - DNA, 934 bp, Homo Sapiens
  misc_feature (655)..(821): n is a, c, g, or t
  misc_feature (851)..(851): n is a, c, g, or t
  misc_feature (911)..(911): n is a, c, g, or t
atctttaggaatgtgcttcctatgcctctgaatctgtccttatcagataaattcaatgcatgaacttgtgtgaatataataccataatagctaatgaaagaggctcaggcataagttgagattctcaaatgcttttatcattggataaatgtgtcatcaattaataaatgataaatgcagctaagtcatacattcattttgactcctttcaatgtcacacacatagtattgatcagaaatcttatgaatcatacatacactcaacaaacattaaagttgtaggaaaaagacagttggaaattggtaagggaactgagtacttcaaaccagcacagggaacttaggttagtgtgggcaagcctttcctcttctggtctttcctcttctgtttatggagaaataatagaaagtagtaagtcgttaacttagtgtaagaagggtcttagagaacatctaaccttctaggatttcccaattctgtgatagagtaatgacaccagttttcctgtcatgacaagcctctgtgatgttacatatggaaatggttgaatcttgaaaaatctaaaattgttgcaaaacatattttgtatgattttgttgtaagagttcttctctttttactttttgccttgtgtagttaaaaattaaggggctnnnnnnnnnnnnnnnnnnnnnnnnnnnnnnnnnnnnnnnnnnnnnnnnnnnnnnnnnnnnnnnnnnnnnnnnnnnnnnnnnnnnnnnnnnnnnnnnnnnnnnnnnnnnnnnnnnnnnnnnnnnnnnnnnnnnnnnnnnnnnnnnnnnnnnnnnnnnnnnnnnnnnnnggggccggggcacagtgggcttcacacctngttaattcccaggcactttggggtgggctgagggcgggaggggtttgttttgaggggccngaatttttgaggacccggccggg

SEQ ID NO: 252927 - DNA, 689 bp, Homo Sapiens
atgcgtgcagtgttgcctcgcccaaagaagactacaatctccagggaaacctggggcgtctcgcgcaaacgtccataactgaaagtagctaaggcaccccagccggaggaagtgagctctcctggggcgtggttgttcgtgatccttgcatctgttacttagggtcaaggcttgggtcttgccccgcagacccttgggacgacccggccccagcgcagctatgaacctggagcgagtgtccaatgaggagaaattgaacctgtgccggaagtactacctgggggggtttgctttcctgccttttctctggttggtcaacatcttctggttcttccgagaggccttccttgtcccagcctacacagaacagagccaaatcaaaggctatgtctggcgctcagctgtgggcttcctcttctgggtgatagtgctcacctcctggatcaccatcttccagatctaccggccccgctggggtgcccttggggactacctctccttcaccatacccctgggcaccccctgacaacttctgcacatactggggccctgcttattctcccaggacaggctccttaaagcagaggagcctgtcctgggagccccttctcaaactcctaagacttgttttcatgtcccacgttctctgctgacatcccccaataaaggaccctaactttcaaaaaaaa

SEQ ID NO: 252928 - DNA, 1302 bp, Homo Sapiens
  misc_feature (101)..(101): n is a, c, g, or t
  misc_feature (166)..(166): n is a, c, g, or t
  misc_feature (617)..(617): n is a, c, g, or t
ttccccttaacccggtttatgggttgttgaccggccaatccattcttccaggtgggccaataagggaatcccccccgattttccaaatcttaaaattcccnctatgattccccccagggaaaccaaattcaaggaaaaaattaaaccctctttctctttattatgnccataccatcccaccaagataaattagatgagtgtcacaccatgattctcattttgcaaaattaattaacacacaaaaaatactgttggggtggcaggaaatttccacaattgaaaaactgaattccacaactgacaactgaaatttcagttttctagacaatttaaaatttacccaaatcccataaaaataaacataattccatttcacgaaaaccactggataatgtttaacaaagtctttgtagccaataggtttataaatacctgaattacaaataaatcagtcattattatgggaagtaggaatattatagaagagggcaaacaaaatcacttaaaatggccaaattccagaaacaggatttcagataagagggtacaagttttttaaaaatgaccactagccggtaagatcagaaccaatcatcctgccatatcatccataaaanaaaattaccatcttccgctttccctcttcacgtgagtaccaaattgaagggtttagaggccctcaaatgggtatcactcataaaggcaattttcatggtttaatatagaaattactctaatgtgagaacacaacatgggaactattcaaaatacacctttctatgcaaaattgagtttgtatctattttagcattttaaatgagcactctgcaactgagaccaaatatcaatcatctcttgaggttttctactatgtactaacatcagatctacataggagcagatgttatttttgtttttctcctcgatatcaaatgtcctgaagcctttgtgtttctctggaacgaggccgagtttctgaaggcacattccagtataaacgtcatcaatggggtagagatggacctggtcagtgatatggtacagcctcaggcccaggtggccggagtagaggaacccccctccccctgcataggaaaggtagaggccagagtaaacaacttctgggatgtagtacttcagcttcttatcccgatgaggtccagcattgtggatcacatcacctatgaagagatctttggctttggtcttggataaactattcaagtaattcaggatgtgatgggtgttcacaaaaacatcgtcatcgcccttgaaaacaaactcagtgtctgggcaggaagt

SEQ ID NO: 252929 - DNA, 360 bp, Homo Sapiens
aaatttccacaattgaaaaactgaattccacaactgacaactgaaatttcagttttctagacaatttaaaatttacccaaatcccataaaaataaacataattccatttcacgaaaaccactggataatgtttaacaaagtctttgtagccaataggtttataaatacctgaattacaaataaatcagtcattattatgggaagtaggaatattatagaagagggcaaacaaaatcacttaaaatggccaaattccaggaaacagggatttcaggataagagggtacaagttttttaaaaatggaccactaggccgggtaaggatcaggaaccaattcatcctggccatattcatccgta

SEQ ID NO: 252930 - DNA, 634 bp, Homo Sapiens
cagaatattagcttcaggatcagctgggggtatggaattggctgaggatcaaacgtatgtaggtgaaaggataccaggatgttgctaaaggtgagggacagtttgggtttgggacttaccggggtgatgttagatctggaacccccaagtgaggctggagggagttaaggtcagtatggaagatagggttgggacagggtgctttggaatgaaagagtgaccttagagggctccttgggcctcaggaatgctcctgctgctgtgaagatgagaaggtgctcttactcagttaatgatgagtgactatatttaccaaagcccctacctgctgctgggtcccttgtagcacaggagactggggctaagggcccctcccagggaagggacaccatcaggcctctggctgaggcagtagcatagaggatccatttctacctgcatttcccagaggactagcaggaggcagccttgagaaaccggcagttcccaagccagcgcctggctgttctctcattgtcactgccctctccccaacctctcctctaacccactagagattgcctgtgtcctgcctcttgcctcttgtagaatgcagctctggccctcaataaatgcttcctgcattcttctgcaa

SEQ ID NO: 252931 - DNA, 567 bp, Homo Sapiens
ggctccaacactggggcccctcatccggccttcagcctcctctgatgaagccaatccaggatggccatatcccaggcctgtccctttcctccagccagtagcctgttggacacagcctcctttgctgctagtgtcgatatcttctttatcaacaagtttacgatcactgtcagtttccctgcgatcatttcctcttcctttaaactttccctctcgttctctcctttccagataggctagctcctgctcagactgttttatcttccggtggatttccaggttttgcttgtgcaggtctgacagctgctggtgtttgatcagaacttctttattgggaaactgccttctgcaaagcagacaagccagtttattccagtcagtgagtttgtcttcttcattctccttcttggtttgctcctctcgcttctggggctgtgctgtgcggggctgtgggggaggggtctgttcctcctcttcttcctcctcatagtcactgtctcctccatattcacccaagaggccgatcagtggggtgtaacaactttgaggttggaggggggactctct

SEQ ID NO: 252932 - DNA, 1013 bp, Homo Sapiens
  misc_feature (978)..(978): n is a, c, g, or t
ctggcttgtctgctttgcagaaggcagtttcccaataaagaagttctgatcaaacaccagcaactgtcagacctgcacaagcaaaacctggaaatccaccggaagataaaacagtctgagcaggagctagcctatctggaaaggagagaacgagagggaaagtttaaaggaagaggaaatgatcgcagggaaaagctccagtcttttgactctccagaaaggaaacggattaagtactccagggaaactgacagtgatcgtaaacttgttgataaagaagagatcgacactagcagcaaaggaggctgtgtccaacaggctactggctggaggaaagggacaggcctgggatatggccatcctggattggcttcatcagaggaggctgaaggccggatgaggggccccagtgttggagcctcaggaagaaccagcaaaagacaggccaacgagacttatcgagatgctgctcgaagagtcatgcttgctcgatataaagaactcgattaagaaaggagacaagttccatgggatacaacctccctcttgttttgtttggctctccttttcctttgttactgctcttgcctgctagaactttttttaaataaactttttttccatgcccgaaaccccatccccccttttcccttttttccttgccggcccgctttcgggccctcggaaaaggttttcctgaaccatttgcgtttgggcgccgccgggcccccagtaaggcaaagtggaaccttgggtccctacccggttttccccaagaatgaccctgggttcatgaccctaagcgcttgtggatttctcccccaaataaaaaaacccgcccgcgcgggcaaaccgaaggcgggctcctgaaacaaaattcccaccatgggaggttttctggaggggccatttacctgggatctccccccccactggaagccccccatgtgggacctcccgcatttccaaatttttggntccccgccccccgggccacttatattttttatttt

SEQ ID NO: 252933 - DNA, 1150 bp, Homo Sapiens
ggaaacatgggcgagtatacgcggctgcacaacgccttggcgctaatccgcctccgaaacccgccggtcaacgcgatcagtacgactttactccgtgacatgaaggactacagaaagctgtaatagaccatacaattcgtggcttcagtgctcctaggacatttggccttacactgggacatgtagtagatgaaatacagagaaatgagaagcccgtggtggcagcaatccaaggcatggctttcggagggggactagagctggccctgggctgtcactataggattgcccacgcagaggctcaagttggcttaccagaagttacactgggacttctccctggtgcaagaggaacccagcttctccccagactcactggagttcctgctgcacttgacttaattacctcagctttcaaagtgagatgactctcagattcattgaagacgtattttagcagatgaagcactcaagctgggcattctagataaagttgtaaactcagacccggttgaagaagcaatcagatttgctcagagagtttcagatcaacctctagaatcccgtagactctgcaacaagccaattcagagcttgcccaacatggacagcatttttagtgaggccctcttgaagatgcggaggagcaccctgggtgtcttgcacaggaggcttgtgtccgtgcagtccaggctgctgtgcagtaatccctatgaagtgggcatcaagaaggaggaggagctgtttctatatcttttgcaatcagggcaggctagagccctgcaatatgctttcttcgctgaaaggaaagcaaataagtggtcaactccctccggagcatcgtgggaaaacagcatcagcgcggcctgtctcctcagttggtgttgttggcttgggaacaatgggccgaggcatttgtcatttcttttgcaagggccaggattcctgtgattgctgtagactcggacaaaaaccagctagcaactgcaaacaagatgataacctctgtcttggaaaaagaagccttcaaaatgcaacagagcggccacccttggtcaggacctgaagcagtatttgaggaaatgagcctgaagaagcaggtctttgctgaactctcagctgtgtgcaaaccagaagcatttttgtgcac

SEQ ID NO: 252934 - DNA, 719 bp, Homo Sapiens
  misc_feature (21)..(21): n is a, c, g, or t
  misc_feature (38)..(38): n is a, c, g, or t
agtggtgtgtggcctgggaanaaagggccgaggcatgncaattccttttgcaaaggcccccggatccctgtgattgctgtagactcggacaaaaacccagctagcaactgcaaacaagatgataacctctgtcttgggaaaaagaagcctcccaaaatgcaacagagcggccacccttggtcaggacccaaaaccccaggttaacttcatctgtgaaggagcttggtggtgtagatttagtcattgaagcagtatttgaggaaatgagcctgaagaagcaggtctttgctgaactctcagctgtgtgcaaaccagaagcatttttgtgcactaatacttcagccctggatgttgatgagattgcttcttccactgatcgtcctcacttggtcattggcacccacttcttttcgccagctcatgtcatgaagttgttagaggttattcccagccaatactcttcccccactaccattgccactgttatgaacttatcaaaaaagattaaaaagattggagtcgttgtaggcaactgtttaggatttgtggcgaatcgaatgttgaatccttactacaatcaggcatatttgcttgcagaagaaggcagctcaccataggaggtagatcaggtgctggaagagctcggatcttgggaccttgtacagtgcctgatcttgctgcgttggatgtggactgtgcccgaacatggagttaggggt

SEQ ID NO: 252935 - DNA, 459 bp, Homo Sapiens
  misc_feature (198)..(198): n is a, c, g, or t
tttttccattaagttgtaggaatttattttaaataacctacagttgattaaaagggaattcatgataaaaatagaagatacttgaggaaagatgtgggaaatggactctgcacacacactaaactaacaatgcctctaaaactaatgattatagcaaaaaatgtcttcacattaaaattctgcttttcatgttttttnccattttttacacaattacaaaagaaaaaataaaagccctaaaatcttgattatttttcctttttttggaccaaatactcattttcctctaagtttattgacctgtgaaactttttatacaataaaatctttcaagtgaaagattagggttaaaaagaaaaagatggatatcttaaagggtacagcgaatctcagaacaaaggatgatgggaaatggtttcgtcacgattatttcttatcttagattcctcgccttcatcc

SEQ ID NO: 252936 - DNA, 1702 bp, Homo Sapiens
ccaggtgtcacctgagggttatgcccacctcacccacctgctgatgggccttgccagtggccgcattatccttatcctagagggtggctataacctgacatccatctcagagtccatggctgcctgcactcgctccctccttggagacccaccacccctgctgaccctgccacggcccccactatcaggggccctggcctcaatcactgagaccatccaagtccatcgcagatactggcgcagcttacgggtcatgaaggtagaagacagagaaggaccctctagatctaagatggtcaccaagaaggcaccccaaccagagcacctatgttagctgagcggatgaccacacgagaagagtccacttcaggccagactaacttagagacagctgtggtggcccttacattaggaccaggccttagaggcaggcacagggggagccactttggcccagacacatttctgaggcagccattgggggagccatgctgggccagaccaccttagagggctgtcgggggagcgcacttcggaccagaccaccttagaggagacatgtgggaggagccattctggaccagaccaccttagaggatgctgttgggggagccacgctgggccagactacctcagaggaggctgtaggaggagctacactggcccagaccacctcggaggcagccatggagggagccacactggaccacaatacgtcagaggaggctccagggggcaccgagctgatccaaactcctctagcctcgagcacagaccaccagacccccccaacctcacctgtgcagggaactacaccccagatatctcccagtacactgattgggagtctcaggaccttggagctaggcagcgaatctcagggggcctcagaatctcaggccccaggagaggagaacctactaggagaggcagctggaggtcaggacatggctgattcgatgctgatgcagggatctaggggcctcactgatcaggccatattttatgctgtgacaccactgccctggtgtccccatttggtggcagtatgccccatacctgcagcaggcctagacgtgacccaaccttgtggggactgtggaacaatccaagagaattgggtgtgtctctcttgctatcaggtctactgtggtcgttacatcaatggccacatgctccaacaccatggaaattctggacacccgctggtcctcagctacatcgacctgtcagcctggtgttactactgtcaggcctatgtccaccaccaggctctcctagatgtgaagaacatcgcccaccagaacaagtttggggaggatatgccccacccacactaagccccagaatacggtccctcttcaccttctgaggcccacgatagaccagctgtagctcattccagcctgtaccttggatgaggggtagcctcccactgcatcccatcctgaatatcctttgcaactccccaagagtgcttatttaagtgttaatacttttaagagaactgcgacgattaattgtggatctccccctgcccattgcctgcttgaggggcaccactactccagcccagaaggaaaggggggcagctcagtggccccaagagggagctgatatcatgaggataacattggcgggaggggagttaacctggcaggcatggcaaggttgcatatgtaataaagtacaagctgttaaa

SEQ ID NO: 252937 - DNA, 886 bp, Homo Sapiens
  misc_feature (706)..(706): n is a, c, g, or t
  misc_feature (776)..(776): n is a, c, g, or t
  misc_feature (802)..(802): n is a, c, g, or t
  misc_feature (846)..(846): n is a, c, g, or t
  misc_feature (865)..(865): n is a, c, g, or t
  misc_feature (871)..(871): n is a, c, g, or t
ggatgggggagcagggggatgatggtcctatgcaagtctaaaacttagcaaggcacgtttcatgagatcttaggctcatgaataatcctctttggtcctatactgtcctctccaggaccccctgggcggtggtcctgacccgatagatctgccaggcaggggtgactcccccgtggcttttgttggagaccatctggcctgtggaaactggggcagtatccctcatgatctctaaatagccaagagaagagtcattcttgtatggaacaatggacattcacagccttcctcattcctggctttaggacttcagatacaatcatgtcagagctcagggcttcaacatatgaattttgggggcacagttcagtccatagcaatacttccattcccctgacctgcaacatgtccagttacttcgaaaagtacttgtcatccactatattaataacatgctcattgccagcctatgaaacaagttgaccactccatacataaggtcatagataatatgacacatgcaggttgagttgtcagccctgataagatcccaagacttgcccaacaagtgcagtccctggagctacctggtccagtaattagaggagtattcctgataaagtcaaatattgtccttggcagcccccacctaaaagaagctcaatagctgggtatgcctgtttgtctattggagataacatgtatncacatctgagtattattttgcctcctttagttaaaattacccacaacacagccaccttggatgggggccntcaacaacagcagattcgagggggcnactatggcttaactggggcctgactttatgtagggcctggggantacggtctcttgatttttncctacngttgggtatggggca

SEQ ID NO: 252938 - DNA, 1893 bp, Homo Sapiens
  misc_feature (196)..(196): n is a, c, g, or t
  misc_feature (379)..(379): n is a, c, g, or t
  misc_feature (385)..(385): n is a, c, g, or t
tgggggagacacggaggaccccctggctggagctgacccacagagtagggaatcatggctggagaattggatagcagagtaatgtttgacctctggaaacactcattctcaatgcaagatcctccgctgcaatgctgagtacgtatcgtccactctgagccttagaggtgggggttcatcaggagcacttcgaggnggaggaggaggaggccggggtggaggggtgggctctggcggcctctgtcgagccctccgctcctatgcgctctgcactcggcgcaccgcccgcacctgccgcggggacctcgccttccattcggcggtacatggcatcgaagacctgatgatccagcacaactgctcccgccaggccctacancccctnccccgccccggggccccgcccttccaggcgcgggctccggcctccctgccccggacccttgtgactatgaaggccggttttcccggctgcatggtcgtcccccggggttcttgcattgcgcttccttcggggacccccatgtgcgcagcttccaccatcactttcacacatgccgtgtccaaggagcttggcctctactggataatgacttcctctttgtccaagccaccagctcccccatggcgttgggggccaacgctaccgccacccggaagctcaccatcatatttaagaacatgcaggaatgcattgatcagaaggtgtatcaggctgaggtggataatcttcctgtagcctttgaagatggttctatcaatggaggtgaccgacctgggggatccagtttgtcgattcaaactgctaaccctgggaaccatgtggagatccaagctgcctacattggcacaactataatcattcggcagacagctgggcagctctccttctccatcaaggtagcagaggatgtggccatggccttctcagctgaacaggacctgcagctctgtgttggggggtgccctccaagtcagcgactctctcgatcagagcgcaatcgtcggggagctataaccattgatactgccagacggctgtgcaaggaagggcttccagtggaagatgcttacttccattcctgtgtctttgatgttttaatttctggtgatcccaactttaccgtggcagctcaggcagcactggaggatgcccgagccttcctgccagacttagagaagctgcatctcttcccctcagatgctggggttcctctttcctcagcaaccctcttagctccactcctttctgggctctttgttctgtggctttgcattcagtaaggggaccatcagtcccattactagtttggaaatgatttggagatacagattggcatagaagaatgtaaagaatcattaaaggaagcagggcctaggagacacgtgaaacaatgacattatccagagtcagatgaggctgcagtccagggttgaaattatcacagaataaggattctgggcaaggttactgcattccggatctctgtggggctcttcaccaatttttccagcctcatttatagtaaacaaattgttctaatccatttactgcagatttcacccttataagtttagaggtcatgaaggttttaatgatcagtaaagatttaagggttgagatttttaagaggcaagagctgaaagcagaagacatgatcattagccataagaaactcaaaggaggaagacataattagggaaagaagtctatttgatgaatatgtgtgtgtaaggtatgttctgctttcttgattcaaaaatgaagcaggcattgtctagctcttaggtgaagggagtctctgcttttgaagaatggcacaggtaggacagaagtatcatccctaccccctaactaatctgttattaaagctacaaattcttcacaccatc

SEQ ID NO: 252939 - DNA, 1150 bp, Homo Sapiens
  misc_feature (524)..(553): n is a, c, g, or t
agacaccggtgtcatgagcaggaaggaaccgctggaaacactgaagagttatcgccagtgtgacccttcagaacgaaagttatatggaaaatcaccactctttgggcagtattttgtgctggaaaacccagggaccatcaaagtgggagaccctgtgtacctgctgggccagtaatgggaaccgtatgtcctggaatattagatgccttttaaaaatgttctcaaaaatgacaacacttgaagcatggtgtttcagaactgagacctctacattttctttaaatttgtgattttcacatttttcgtcttttggacttctggtgtctcaatgcttcaattgtcccagtgcaaaaagtaaagaaatatagtctcaataacttagtaggacttcagtaagtcactttaaatgacaagacaggattctgaaaactccccgtttaactgattatggaatagttctttctcctgcttctccgtttatctaccaagagcgcagacttgcatcctgtcactaccactcgttnnnnnnnnnnnnnnnnnnnnnnnnnnnnnntgggtgggctggaagaatgtcctagaatgtgttattgcccctgttcatgaggtacgcaatgaaaattaaattgcaccccaaatatggctggaatgccacttcccttttcttctcaagccccgggctagcttttgaaatggcataaagactgaggtgaccttcaggaagcactgcagatattaattttccatagatctggatctggccctgctgcttctcagacagcattggatttcctaaaggtgctcaggaggatggttgtgtagtcatggaggacccctggatccttgccattcccctcagctaatgacggagtgctccttctccagttccgggtgaaaaagttctgaattctgtggaggagaagaaaagtgattcagtgatttcagatagactactgaaaacctttaaagggggaaaaggaaagcatatgtcagttgtttaaaacccaatatctattttttaactgattgtataactctaagatctgatgaagtatattttttattgccattttgtcctttgattatattgggaagttgactaaacttgaaaaatgtttttaaaactgtgaataaatggaagctactttgaaaa

SEQ ID NO: 252940 - DNA, 797 bp, Homo Sapiens
acagactctatcatcacaccactaatctaagttctcagaagttaaacattacaagacttcagaacaacataggcgtctttggctccatttaacagaagaaggaccatagtgatcatttaagcaaaaaggtagctgccttgcttccagttctaccatcctctagcaacccatctttctcttatttgatgtctctgatcagctcctcttccagcacaaactggagaaaggggatcctttctgttttcttggaggcctctgaactcaataacaggtctgcaataaaaatgtatggagaaagctggtgattagtttgtacatatggacaagttcaaggcagtatggtctacttctgggaaggcctggattccatttgctcctgatggaaaaaccctagtcccagcagtgtttagaatgaactggagaaggcagatgaaagatgtgttatctcaatctcctccaatgctccctttggaaattcacagaagattagggctccccacagaaacagcagctggcctgggctggtcttctgactaactggagctgaatacaaaaagtctgatgggttgactgagtcggtgactgccaattggagcctgaagcccccaaagtcttctctagacttgatgatgaagcaccagttacagttctcccagctcgccttccattgcccgcaccatgacatacagctcggccagacccaccacagaggcgacgatcaatgcagctagcacccgcgaggccatttctgtgaagatatattggcttccaaggtaagtgcagacgaaggcagcaac

SEQ ID NO: 252941 - DNA, 1115 bp, Homo Sapiens
gagccggctagatatggcgtcctctttgcttgcgggcgagcgattggtgcgtgctttgggccccggcggggagctggagccagagcggctaccccgaaagctgcgggccgagcttgaggccgcgctggggaagaagcacaagggcggtgatagctccagtggcccccaacgcttggtttctttccgtctcatccgggatctgcaccagcatctgagagaaagggattccaaactatacctccatgagctcctagaaggcagtgaaatctatctcccagaagttgtgaagcctccacggaacccagaactagttgcccggctggagaagattaagatacagctggccaatgaggaatataaacggatcacccgcaacgtcacttgtcaggatacaagacatggtgggactctcagcgacctgggaaagcaagtgagatcattgaaggctctggtcatcaccatcttcaatttcattgtcacggtggttgctgccttcgtctgcacttaccttggaagccaatatatcttcacagaaatggcctcgcgggtgctagctgcattgatcgtcgcctctgtggtgggtctggccgagctgtatgtcatggtgcgggcaatggaaggcgagctgggagaactgtaactggtgcttcatcatcaagtctagagaagactttgggggcttcaggctccaattggcagtcaccgactcagtcaacccatcagactttttgtattcagctccagttagtcagaagaccagcccaggccagctgctgtttctgtggggagccctaatcttctgtgaatttccaaagggagcattggaggagattgagataacacatctttaaaacagaaagaactggtcttggtctatcagtacctcttcctgaatctggtacccatctgccttctccagttcattctaaacactgctgggactagggtttttccatcaggagcaaatggaatccaggccttcccagaagtagaccatactgccttgaacttgtccatatggacaaactaatcaccaactttctccatacatttttaatgcagacctgtaattggattcaaaaacctccaagaaaaacaaataggagaaggatggt

SEQ ID NO: 252942 - DNA, 642 bp, Homo Sapiens
acagagtgccaaaggttactcctagcagtgccatcagcagcatagcaagagagaaccacgaaccagaaagattgggcttaaatggaatagcagagacaacagtagctatggaagtgacataacctaaaacacgtggctctgacctgtgctaatggtgtgcagtcattcatattccagctgaatgcaaaaggcaacactctgtggatcacagagtgtaacaatggacctaaatggactatagtatattggatgttaaatccatatatgatgtatattttgtaaaattgggaaaatcactaccttgtaaaatagtttatttgtatcatcaatattatttctggtacttgaatagtagatattcatcatcatgcttttgcacttgaatttgcaactgaatggattttaaaaaataattctttaatgggatcatgagcatgaaatgggatcctgcatcacttgttttaactatttattttgccatgtttacattttgtatcttgtaaaaataaatccaactttgtgtctaaaaagttaaagattcatagctaggaaatgaaattcttgaaatttttttctaaaggaacttgaaagttttcacttggttcattttggtttacaatttgactagatggactttttgga

SEQ ID NO: 252943 - DNA, 758 bp, Homo Sapiens
  misc_feature (313)..(313): n is a, c, g, or t
ggtaggaaaaagagtgaagtagagaagggaaaagagcgaaagatgaatatttgatcaccttcaaggctatatttaaaggtagaattataaatcaaaaacaggcattggtaaacaaggtatggtcgctaaaatacatttcgttaaaagcagattgttgtaccatttacttgaaacaatcctttatggaacaacgcatatggtatgaactcgaccaaggaaatataacagactttaattcccttaccgcgactataagtttcatatgtaaacatgattaccaattactgctactaaacttgtacggccttaactngccctctcccacccaccaccccccttaaatataaaattggaaacatttccttcaagtctgatgtccatcagtgcaatctgctggaaggggcatgtaatggtttaattcttaaatccacctttgctttaatgccctaacatgtcaaactcctcttcccctctggtcatttcttagcagtcagcaagtattcaaagattaaatgtccaagaagaccagtacctttaaacccttcttctggcatacaaacttgcatgacatcatccattgcagcataatctgcaattggttcatcagccttcaataaaatgacagattcaggaatgacgccaagggtgcctaggatggcacagtcatcacttaaaatctttccatcaattgacaaattctggtcaaaaggagcacctgaagatgcatgcatgatctgaattttcaattcttttaacgt

SEQ ID NO: 252944 - DNA, 915 bp, Homo Sapiens
gactggagaggtggtcatgggtgtttacagcgtatcttttacgggatacgtctttatcccagcagacagtctaatgcctaagcatcctatccattaccaggtgtccctctcataggaaactcatttacactggcagtacccctgtggttcttgtctgacctacatctagtctattcctgccaagatagccattctctaggagatccctgaccaggaaagaagttcaattcaagtgtgttggtcaggtgagacacagaggaagcaactcaacaaaacacatgaaatgaaacaacagaagcagtttattacttacagatcctgcatgcctcacagggccagcgggaaggggaaagcctgtattgcaggctatggcatttcccaagcaggtttcctgcagagagttctcactggtgcatttagagcaagccagtatatctgtgtggtccacataggctgtggggtcagtgtatctagctgttttttagggaggcagtatcctggaggtggctgtacaaggcagttatctggatctaacatattaagaacttggaggaggtggataactgcaaactgtgtcaagggtgactaagcctgcttctggaatgagaaagttaaacttaggttaaaaacggatgctgaagctacataaaaagaatttacgacaatgagatatgatcacctttgtcccatgtttgccctctcttgttttattcatgtgtttgttcattcattcatttactcatttatgaacacccttaaacaactctccagccaagatttaacaacatcaactattaattacattttctttaagtaccttatctacccaagtaagagtcaacattctcataaatactgcatgactatataaactatgatttgtccattctgtgcaacaaacagcaactattagaa

SEQ ID NO: 252945 - DNA, 453 bp, Homo Sapiens
  misc_feature (340)..(340): n is a, c, g, or t
aaatctaggttttttcatcctttttaatatcagccttgtgtcccacagaatggaggctccagagtgaaattaatgacactttgtcgatgaagatcttgattgtgacctctgtggaaaatgagccatgaaccaaccaataagcaggcttagtcacccttgacacagtttgcagttatccacctcctccaagttcttaatatgttagatccagataactgccttgtacagccacctccaggatactgcctccctaaaaaacagctagatacactgaccccacagcctatgtggaccacacagatatactggcttgctctaaatgcaccagtgagaactctcntgcaggaaacctgcttgggaaatgccatagcctgcaatacaggctttccccttcccgctggccctgtgaggcatgcaggatctgtaagtaataaactgcttctgttgtttcaa

SEQ ID NO: 252946 - DNA, 788 bp, Homo Sapiens
  misc_feature (732)..(732): n is a, c, g, or t
atgcaacaccggaacaattacaatctgaccagatgttcttgcaaaactgattatggatgattggccagggtatgacttgaatttattcacgtacccacagcactattatggagacttggagtatgtcctcatccctcatggtatcattgtggacagaattgagcggctggccaaggatattatgaaagacataggatatagtgacatcatggtcctgtgtgtgcttaaaggaggttacaaattctgtgctgatctcgtagaacaccttaagaacatcagccgaaattcagatcgatttgtctcaatgaaggttgatttcatcagactaaaaagttacaggaatgaccagtccatgggtgagatgcagataatcggaggcgatgatctttcaacgctggctggaaagaatgttctcattgttgaggatgttgtcggaactgggaggaccatgaaagcactactcagcaatatagagaaatacaagcccaacatgattaaggtagccagtttgttggtgaagagaacatccagaagtgacggctttagacctgactatgctggatttgagattccaaacttatttgtggtgggatatgccttagattacaatgaatacttcagagatctgaatcacatatgcgtcatcaatgagcacggtaaagaaaaatatcgagtctaaagacatgaattctcaccactaaagtcccagatagcatcatatttacgcctgtncttgggaagccagctgtcaagtttgtccccccaggcatcttcactcagcaggatat

SEQ ID NO: 252947 - DNA, 2272 bp, Homo Sapiens
  misc_feature (1670)..(1671): n is a, c, g, or t
  misc_feature (1713)..(1713): n is a, c, g, or t
  misc_feature (1725)..(1725): n is a, c, g, or t
  misc_feature (1782)..(1782): n is a, c, g, or t
  misc_feature (1793)..(1793): n is a, c, g, or t
  misc_feature (1803)..(1803): n is a, c, g, or t
  misc_feature (1842)..(1842): n is a, c, g, or t
  misc_feature (1845)..(1847): n is a, c, g, or t
  misc_feature (1851)..(1851): n is a, c, g, or t
aatgtgctaacctgcttttctctttttgtaaacgtttttgcattacaggctgcattcttgccttactgtatagaaaaagaaaaaaggctgggtttactattgcacattttaagcttttatacctttatcttcttggaatggtcagattctgaactggacagtcagaaccacaggtctgctgttaagggattttaaattgtgcatttttaaccctacagtgaaataacttaagatatccctgtgttcacagtgtgaggggctgttttatgtcatgttggcataaattgttttgtaaaagggaaagtgtttctaaaggtgtttcagcgcttgtgctgatacaaagtaagttattacttgcaccaggtggtttggccactgaattaatactgtatagcaagagaaacaatcttatttttttggacaacatgttttattaagttcttcatttctgttgattttttttattgcatttatgattcagtggctgggaattgagaatttatttgaaatagaataggtaacacctcagcgtactatagaaaatgcactcagctcaactgctgtgtttaaaatacacattttaaatccctctttacagacactaacataaaagtacatctttctgggttgtaaacatgtggtagtaccagagtattgtatagtcaatgttaaataaaagccaaaactggaatgtgcagaaagtaggctttggttaatttgtggattcatttttatttttgtctttgtttaactttttaaaaaaataagatttctggagtagattggtatattctgttaaagacttacagtgatccattttgcttacactgttgcatcacaagggactcacccagggaccatgacctgctggtgtgtgtgtatatttacaaaaacaaaacaaacaaaccacccattgggatataaggtagcaatcacaaactaaagactgcggcttgttgaggtgcaataccctgactcccaaagttagttacagtgggttttattgtttttgtgactgaaggatttattcagactgctgtactcttcatttgatgtaacaaaatgctattaatctaaatatttgtaaataaagtacctgtatctagattaaattaaaattggttgcattattttctgaactataatagggtttttcttcaggtgaacaatttgacgtgtcatcagtttttattgcagcactgtccatattcattgtataaagagaggtctacgtatgtagcatataaaaccacatcactaagtaatagacccacagctttattcttgtgtttacattacccttgaaatgttttcagtcaacccttttcagtgtaagatcagcacatttggtggctgatgctgttctcctttgactgtaccgggagccagattctatcatatgcatgtgtaatcccctgtaatacactcaggtgctcacaaatagagcagattgtcatattgtaacatgcgtgtgccagacaccgggcagtacactttggaaagaatgtgaaatccttttaatttttaatccatagcttactgcttgtgcagtcacctgcctctcgaggttgctcattgcccttggacctgtgaggaggcccccagattagtaattggggcttagtactatttatgcttaaatagatcttccactacaatgttgaagtctnncttatggataataacgtgtttgatggagtaacttattattgntttgtgggtggnggtttacacgttaatagaggtagtacaatttctttggaaaggtgccttttgaagccngctgttaagcnccatacattnccccccctctcaaattcggtaagacagtagttttggggnacnnntttncccatgtgtcttttaagtgtgattttaaaaaaatgagtcgttcagctcaatccccctaaacagaagaaaagcccaaataattaccctcccatcccccttcatgtgggaatatagagaggggtcatgtggcattttagagaaaagataatttatcctcattcaacacaggcccagaaaattgtgtcccagaaggatgtcagtaattgtgactaggccaggccttttagcattttgctaagacttgaaacaaaaaatgtaaatacaaaagaaatcaagttttgttttgaaagatgccttctagaacttactgtgtattaataaattgtcactttcattgtctttattgtaactccattgatcccgtatcttaacggttcacgtctagccaaataactgttttggaataaaaaccttggtggtg

SEQ ID NO: 252948 - DNA, 585 bp, Homo Sapiens
tagtaaaattttgctggccaaaaggttgtatttctccaatttaccttttcattttaataaatggcagtcatttttttaaattttatgtaaaaggtaaaatgaattagctatcatgaagcagattccaatgatgaatgtataggttgagtgattaaccaatttgcagtggtggattgagaagtccagttggatttcattgggacagactgcaaagtgtagttgtttgagcaaccccaaagaaactttgggtttttgaagacaatcagaatgattacctttctacctctaactaatcaggtattgattgacaactttttggcattataaataaagtaaaatagatctctgcattccaaaatatgttttttagtttatttatatcctgaagaaatggtaagttttcactggaactgattacagtaaacaataatatgtccccttagtctttctgacatttttatatagattgagattgaaaaaccgtgcatttggggcagtggtattatggtcatttcgttgctattttctgttttaataaaatcctagaactagtagcaaccgagtaaagattgagtttgcaagata

SEQ ID NO: 252949 - DNA, 404 bp, Homo Sapiens
ggagaagagaattagcgtttgcagcagtgtatcatctactaataaaattaaactaatgttgctgcttcattagttggtgggagaagggacacatccactcttggaggaatatatttactcaataatggcaccttacatttataaattgtaacagttgtctaataacgtttctttaatttaaatatgtaagttgcagagctaataaatgaaatgaccaagactttaattataataaaaataagaaacttgactattctagaagttatacttggattttttcctgggaaaatggagaactactttttatatgtgtatgtttttatgcaattagcattgtattcttggttcagggaaatactttcctaaagcaataatgttagatattaaagattaaaatttaatgt

SEQ ID NO: 252950 - DNA, 707 bp, Homo Sapiens
  misc_feature (69)..(289): n is a, c, g, or t
  misc_feature (559)..(570): n is a, c, g, or t
  misc_feature (696)..(696): n is a, c, g, or t
acaaaaatttaacgcgaatttttaccaattattacggcttcaaaattcattcggcaatcaggttgcccnnnnnnnnnnnnnnnnnnnnnnnnnnnnnnnnnnnnnnnnnnnnnnnnnnnnnnnnnnnnnnnnnnnnnnnnnnnnnnnnnnnnnnnnnnnnnnnnnnnnnnnnnnnnnnnnnnnnnnnnnnnnnnnnnnnnnnnnnnnnnnnnnnnnnnnnnnnnnnnnnnnnnnnnnnnnnnnnnnnnnnnnnnnnnnnnnnnnnnnnnnnnnnnnnnnnnnnnnnnnntgggccgaggcggccgacatgtttttatgtttatagtgttcttatttttttacaattttacattcacatttatttatctaatacaatggaaatacaaaggaaaaagttaaagtgtctcaataagtaaaggacagagctagctttttttggaactttttaaacgtttcatattttactcttaaaactactgttgtccaacaacattttatatatcacagtgtttccacatcaaaactgatggcaaagttacatgtccgcagggaacttaannnnnnnnnnnncctaattgctaatgctgcagtcaaagctgctaatatcttttgcttaaagcactaatgacctatcataagaaagagttgcaccccagtaccctggtatttttcactgggttctaaagaggcaaaggnaaaattaaaac

SEQ ID NO: 252951 - DNA, 1091 bp, Homo Sapiens
  misc_feature (51)..(81): n is a, c, g, or t
  misc_feature (443)..(443): n is a, c, g, or t
cacccccagtaccccggtatttttcaactgggttcctaaagagccaaaggnnnnnnnnnnnnnnnnnnnnnnnnnnnnnnnggaggagggcagggtaggagagagcccagtaggtggtttttgtcctgtggttcggattcttgagggagtgagggattccagggcatgtaccaaaagcaagagctccacccactcgaaaattacagatgggtttgattttacattgagttctccagcttccttatgaacaagactttcctagccctcatcctcattactgagtatagataaacaggaaagcatggtctgaagctgccccttgacaaaaaagctgttctttccttcctctcccattccaataactggagcgggggagactctccattctgagggctcaatgcagtattaaaaacattcccctctggcaagaaataaccagttanatgcagcactagtagttagtatataggctacttcccacccccacccaccccctcagcattccatctcctgcccccagatctattcagttaatgtctctaggtctaagtggtccgcaggttggagcctggggggttgctgatggatttctgcaaattgctgatgttgaaattctgcaaggaggcagttcccacaggttggaactggccaagtggctgtggtgctgggccacccgtcccactccattgagcgccaaatggggtagctggaaagccatactgctgtggggggcacatagacttggtgaagtgacctagagaggtagctgatgctgcagagatgggggcagagccacccaggttcgaggtcatggagatgcacagttgcccaggtgcagagaacttccttgccattccagggccctcataattcatgtgccctttgcttcctctcctgcctgagagattcatggcatctcgggcccaattgtctaccaacttgtgcaagtcatctgtgaatgtgcccttcctgctggacgtcatggcaggaggctgagcttgggcggcttggctgttcactgttgccccaacagtgtttgtgctgctgggttccttgacctgggagcagaaaggcttggtactgaaatggca

SEQ ID NO: 252952 - DNA, 977 bp, Homo Sapiens
  misc_feature (112)..(122): n is a, c, g, or t
  misc_feature (694)..(694): n is a, c, g, or t
gggccgcataggctttttaaaggtgctttcacatagcacaggcattacccgtagtcgtgtcaaatagcagttggtgtcttcattttatgtatatttatcatataagtctgannnnnnnnnnnaagcgtcttgaatggttttctggagagacagcattggtaagtggcacatgacggtatcccagtcataagagggttgcatgattcctttgagtgtttgatttgaaaagcctagtcttgtctctcaagagcatctcggacccagaacattctccagtagtgcattcagttcaacacagcaagtgcttcattgcatggaaaacactttgaagacaaaaaagaaatcttatttctttttttgtagccttcctgatatttacagtaataccattaactgttttatcgatagcaaaaaaggatactttttgcaatgttattagatgttctatagtgctacaaggaattgccttccgaatggaggttcatgtataatactcatttacaattcaatatataattacacaaataatttttaaatataatcaatagtaaagactgttctgtggatggtagtgtttaatacattttctattttgtacagtgatttcaggcctttggttttcttaaaatcagcagctgtttggcctaattcttagcattatttggtcctttgcgccagaacttttttgcgcacngctttttgtgatctgtgttaaaaacctgcattgccaacattgcagctcgaacttaaacttgttattcaaataaatatttaattttttaaattgctcttgtataatcagatgccccttttagtattattttagaagcgttgggagggttttgcctaaagtacaatttatcgggaaaaactagattttagttttataaaacttttaagtctttcatggggacctatattttcttggaattaaattttgtaggtctaggataaatagggcaatctaaaaagggtgt

SEQ ID NO: 252953 - DNA, 419 bp, Homo Sapiens
tcacatggtgaggtcaagggatatctgtaggcacctacttcacagggtccatgctgaaagactgcaaccaatacacagggcttatctgggggcatacactggaccgatatagtttcacaatcaaaatatttcccaacaaaatgtgcactgatattctggtccccagtcagctgcacctggcctgagttttttagtcaggaaaaatttctcaaagatgattctgtttttcctccataaatactatagggcaattgcccaaaagccaggccataaatggcaagagccacgtgcttcacctaggcccaagtggttgctgtgccctcagtgttgacagactaacaggagggaatgggtgttcaggcttaactaagccactactaccatcaccaccctccaggttaaaagaaaaagatgaaagg

SEQ ID NO: 252954 - DNA, 897 bp, Homo Sapiens
  misc_feature (767)..(767): n is a, c, g, or t
gggccagcagcccctaggagcccagcgccgccgccatgtcctccggggctagcgcgagcgccctgcagcgcttggtagagcagctcaagttggaggctggcgtggagaggatcaaggtctctcaggcagctgcagagcttcaacagtactgtatgcagaatgcctgcaaggatgccctgctggtgggtgttccagctggaagtaaccccttccgggagcctagatcctgtgctttactctgaagactcgagagaagtttgctgaggaatgccttcaagcacaaagtgatgaatgactgccttcaagtctcaagaaaacacttttccctaacttttagagatatttcagccctttcctgtggcctggtcctatagccaaaatcacagatattcatgagtttctacttgagtgagaaaactgggtgaaggaatagaattttaaatagtaataactgcttgttttttttgtgcaagtacttttatacataagataaacaaaaaccttaccaccaaacataccaaaatgcacctctttcataagtgagttactaagatttctatacctggaatatcatgtatgtttcatttactggatgtttacattttaggaaggaaaatagttttgtttatttaaacaactgaatacttataaactgttgttcctggaagttatttattccataaaaaatttggttccttttggcatgaatttataatttcctaaatgaagacccagaaagtacaaatttgctggggaggaagaatagngctttattaatcaactgatggtcttgattttttctaaatgggaagattgcttttatttttaaccctaattaggggagcagattcttagcaaactttcttttggaaaaagttaatggtaatgatgtgcatt

SEQ ID NO: 252955 - DNA, 1259 bp, Homo Sapiens
tataaacgttgtttaaaaagcagcggtccggtccggaatcccgggatatcgtcgacccacgcgtcgagcgccgccgccatgtcctccggggctagcgcgagcgccctgcagcgcttggtagagcagctcaacttggaggctggcgtggagaggatcaaggtctctcaggcagactgcgagagcttcaacagtactgtatgcagaatgcctgcaaggatgccctgctggtgggtgttccagctggaagtaaccccttccggggagtcctagatcctgtgctttactctgaagactctaggagagaagtttggctgaggaatgccttcaaagacacaaaggtgatgaatgactgccttcaagtctcaagaaacacagcttttccctaactttgtacgagatatttcagcgcctttcctgtggcctggtcctatagccaaaatcacagatattcatgagtttctacttgagtgagaaaactgggtgaaggaatagaattttaaatagtaataactgcttgttttttttgtgcaagtacttttatacataagataaacaaaaaccttaccaccaaacataccaaaatgcacctctttcataagtgagttactaagatttctatacctggaatatcatgtatgtttcatttactggatgtttacattttaggaaggaaaatagttctgtttatttaaacaactgaatacttataaactgttgttcctggaagttatttattccataaaaaatttgttcttttctcatgaatttataattcctaaatgaagaccagaaagtacaaattgctgggaggaagaataggctttattaatcaactgatgtcttgatttttctaaatggcaagattgctttatttttaacactaattatgggagcagattcttagcaaacttccttggacaaagttaatgttatgatgtgcattaggctgcccccatcgtgtatataaatgaagcagatttgattttcgtactccttacgtttctctgctttgtagttgtggctgtacttaaagaaatacagaatttcatatatttaaaaatgtttaaaatgtgacccacagaacattgtaaatgattaaaaactaacatgaaaatattacaacctaaaagaattcttaacttcacaagtgttttacttcgacgatgtgcctttgatttaatttgggacacttttttagaaggatacattattcgtggtttgaacggtcttgaagagctggaaataaaattctgcttatt

SEQ ID NO: 252956 - DNA, 819 bp, Homo Sapiens
agaaagggttttgtcaaatgttttctgaaaatctgagtaattcaaagcatgcctctgcccctttaatatttttaataacctgcattgttgctgtctgccaaatattaaattgaaatcttcatttcaattttattatctggaaagggcactggattgctctgcaaccaaagaaagcaatatggaatgaaaaaactcattcacttttgtcttattttcttttaaggtgtattggcatgtaatttgcatagagaaggtcctctggttagtctctcaaattgaggctgtttagggaaatccttattcagttggtggcagtggttggtttaaagtagaaggaaataagatcgccttaataccagaaatgattagaagtgctgatttagattcaacaaataccatatgtccttatcattttttgtaagaagaaattggttaagtcctaactttcaatgtgtacccaaatacttgtatttatgcttttgataaaatgtattttcagcattaatacacatccgattatgccttatttatatatgaagaataaagttaccatgttatactgttatgtcctaaaattcaaatcactatttgagaaaccctcaaattggtgctttcattatataatgatacatttagacaaaaccccaaactaagccatttgaaacaagattctctccattgcagtttgtagcaatgttatttctgtgtatgtcatgagaaggctaaatatcagtgttaatttcttgtttgaatccgtgaaatcatgcctgtaaagcccaaacatttgtaacaaactccctaataaatttagagaaagtc

SEQ ID NO: 252957 - DNA, 375 bp, Homo Sapiens
ataagaccaactctaaaggaacctggttcccaaggatgtataggccatggttcatctttcagaggacacagtttacttgcttcagaaagatgctcatcccaccatgtaccactctttccatgaagacctctaacaaaaagccagatgtgtgttctgttccccgggcccagggcagcacccaggccgtccccgagtcgacccagcacctgggcgccgacctgcgtcagcagcctccaacccggcatggattagcccgggaagactcgactcacgacttccgggcgccctgccgctctgctttcagggagtccccacgccaccgccacgtggacgcagtagccgtggggaagttttcgcaatggccgccggaacggt

SEQ ID NO: 252958 - DNA, 1793 bp, Homo Sapiens
cttttttctttccgtcgcagagagcatcggccggcgaccgttccggcggccattgcgaaaacttccccacggctactgcgtccacgtggcggtggcgtggggactccctgaaagcagagcggcagggcgcccggaagtcgtgagtcgagtcttcccgggctaatccatgccgggttggaggctgctgacgcaggtcggcgcccaggtgctgggtcgactcggggacggcctgggtgctgccctgggcccggggaacagaacacacatctggctttttgttagaggtcttcatggaaagagtggtacatggtgggatgagcatctttctgaagaaaatgtcccattcattaagcagttggtctctgatgaagataaagcccaattagcaagtaaactgtgtcctctgaaagatgaaccatggcctatacatccttgggaaccaggttcctttagagttggtcttattgccttgaagctgggcatgatgcctttatggaccaaggatggtcaaaagcatgtggtcacattacttcaggtacaagactgtcatgtcttaaaatatacgtcaaaggaaaactgtaatggaaaaatggcaaccctgtctgtaggaggaaaaactgtatcacgttttcgtaaagctacatccatattggaattttaccgggaacttggattgccgccgaaacagacagttaaaatctttaatataacagataatgctgcaattaaaccaggcactcctctttatgctgctcactttcgtccaggacagtatgtggatgtcacagccaaaactattggtaaaggttttcaaggtgtcatgaaaagatggggatttaaaggccagcctgctacgcatggtcaaacgaaaacccacaggagacctggagctgttgcaactggtgatattggcagagtctggcctggaactaaaatgcctggaaaaatgggaaacatatacaggacagaatatggactgaaagtgtggagaataaacacaaagcacaacataatctatgtaaatggctctgtacctggacataaaaattgcttagtaaaggtcaaagattctaaactgcctgcatataaggatctcggtaaaaatctaccattccctacatattttcctgatggagatgaagaggaactgccagaagatttgtatgatgaaaacgtgtgtcagcccggtgcgccttctattacatttgcctaacatctttggacgtggcagaaccttacatattctgtgagcttcgatgagccagagtgatatcataaccaccagaaatcatactctcctttcttagtcacaacaaaatcacacatgtcatctttgtcaagggcataaatatatcattcatacccccattaaattttgttagaaaaattaccacattaaatatatgagttaagtagattggatttgctgaaattggtgttgggcatattagcaaaatattcttaatttgtggactcgattcttttttactacatatttcccaagttatcttaagatgtctgtaaatttaacttttattaaagttttgtcaatctttgtgaaatagtggttgtggaacagtagaaaaccatatggggactatagtgcaacctatttgggtaaagaaaccatttgctaaaatggagaaagtaaatagatttttatttaaattacagaaacatgttaaaggccggacaaaggaaagacaataaaatcataaattatcggtcctgtttacatttttgttgggagaggtgattactttttagttttatcactcaattataagatcagt

SEQ ID NO: 252959 - DNA, 487 bp, Homo Sapiens
tagtgaggaaggtaagtccagctaggtggaacacattggcattgttgaggccaccacctgccctggctcctctttggactccatacacagcactgtccactgctgctaatgccacccaggaatccattccagttgccatattaagagacacagtttggcctggagaatatgcatctgcatcaggagacagatgaacctggagctggttgcccacatttttcctcaatatttaaccagactgaatcagacactaattctgctgtctgttctcctgtgacgatgtaatagaccagaagtcgggatgaaggaaccatgttctgtgttactggaatgtttatactttgataagatgcatctgaaaatttctccctcgtgccaaagtggataattttgcccttggataaaatcaagtaattatagtgagttattttgtcaatatatgggcttttgggggtaacaataatattcagatgttctccctcgtgcc

SEQ ID NO: 252960 - DNA, 2474 bp, Homo Sapiens
  misc_feature (118)..(118): n is a, c, g, or t
  misc_feature (2041)..(2042): n is a, c, g, or t
tgaggggggtcggaggtgattcacccgcgggggtccggcgtggagttacatgagaccggcgaggcggcgacgagtataatagtgcgcgcggtggggtgggtgataatagcgcggctgngtggggtgtgtttagtggcgactaagctaagtcggcgcggttgggtgtagtagtgaccgcagattggacggatccgtgggcgggtgctgagtgtatatatagcgggatagggtcgggttgttgggatggggtgatacaataataagttcatccgcgcgctcgtctgaatacgggcggttcaggacgattctctatgcgacatgaagaaaaagtcgtgtcaatatgtcacactggggcgcaaccacggttacgactggctaaagatgcgactagaatagcacgcgataagtagcgaagagaatagcaagatgaggggatatgaaatagggggtctaactatggaggtgagaacgtaccccgcggtgtgtatataggtagtgcgccagggtggggagaacccatgcgggcgaggtggggcattatcgggggtataatgtatgggaaccggcgtgggtattttagcccgcgcggggcggatttttgttatctggtggggaaagtacaaggcccgggatcgattgagcaatgttttttcttggggaagtcaaactagggggccgggtgccgcggacgttgggggatgcggggggtcaaaagaaatggtctgaaataattctagagtggccagggcggcgggacagatagtgttcgtgttgtgtgggggggtttggtagttcatgcaataaaatttttattgtgaatagcttcaatcaaaaaaggtttcataagattatgtacaatgcggaatgtacaattatgaatgtatgcctttttgacaagagggtaccattcttgagcagcaatacaattttaaaaatataaagatgcagtatcatttctgatataaagttacttaaaaaaatccaaggtcttagggaattcacaaatcataactagaagtaacttttattaatttaatgtacacataattaccaaattttaatacattaaaaatgtgtaaatgcccacagactgtacaaaaattaacaccccattttgttaaaagttcccaaccacctcccaccataaatatacaaaaacctatttttagatatgtcaaaattgcatgcatgaatattttctaaagcttgaattttgctcttcactggataatgttatctatagctgtttctgtaacagactacataaacattgatatattatttaccatgcctttgaaactgtgcaggactttcataaacatggggaacaaaataaatagagtaaaaactgcaacagttttgtttagatgcaagtgcaattgggaaagctttcgaatttcaggattataaaactactataaaagtatttattctgttgttggcttagccacttgtattcaagcattatttgcagcattgctttacagcagttggtgctagaagatacaaaacatatagttaccactatttatacttgagggagaaaaaaaactttaaacaaccctgagggagacacacattaaaaatcttgttatttatttaaaaagttaaaaagttacatatcattatttaacaattactttcccagacatttctgtcctttaagtatgtgcataaataaaatttaaatcagcaatattcatcttaatacatcaaaataatatatgtacagattttaaaatttaggtctgtataaactcaaataatttaatgtgaaattcagaatcaaaattactatgtaatggtaacctacgagagaagactcagtctatctatggcactgagtagaacccacacctggcttcacaggcattcttcaaataacattctcaacgtgaataacccaccttgtctatattcaaatctaacttcctacaaatgcttttccagccacctaaacacctcattcctttgaaaacaatatggacagaagagatataaaacccttactaactctaaatgttaaaaaagtgggggggtnngtcaaaaaaagctctttatgatcatgctcttaaagatgttaaatacaatcggataattgaatttttaagctgctacttagcaattactttcattatatgcttcaggacttaaaccaaagaataaaatgcacaattgtggaaatcactgaagaataacacgagcatatttgaaattaatatggaaattataaaatgatccagagaataagtaactatagaaaatagtgctaattcacagctcaagaggtctaagatgcatagcttcatagaatcattcatggaacaactgttatcatctaatgtgtattaatagcatattatacatttgatggaaaacttcgattatatttttgcaggaatcatcagtggcaatagcagtaacagtgatcctgagtgtaatttctatttttctatagttaccaaacatcatcc

SEQ ID NO: 252961 - DNA, 465 bp, Homo Sapiens
caatccatgagctaaacttccgctgagacagctctctattcaacctgtcagtaaaactctgtattagtgtgtttcctcctgccactatttacactgccatagagacctggtctgatatcaatatcacacatcccaacacttgtggtgacaacatgactgactcctaacattgtgtttcctgataacccctttacattggaagggtcaaataatccttctggaatctttagccgctctgcaccaaaatcacaattgtagccattggggaattcataatgaacagttggcatctgtgcagccacttgttcatcataagttgaatctgacacttgaagtaccgaagcttgaaaatcctggataacacaattacacatataattgtgccaagacctcgtaacctgaggcaacttctcttttcttttccagtttgctggagatccttcacgaacagcttcttttgatgca

SEQ ID NO: 252962 - DNA, 856 bp, Homo Sapiens
  misc_feature (4)..(4): n is a, c, g, or t
  misc_feature (17)..(19): n is a, c, g, or t
  misc_feature (32)..(32): n is a, c, g, or t
  misc_feature (44)..(44): n is a, c, g, or t
  misc_feature (46)..(46): n is a, c, g, or t
  misc_feature (71)..(71): n is a, c, g, or t
  misc_feature (74)..(74): n is a, c, g, or t
  misc_feature (80)..(80): n is a, c, g, or t
  misc_feature (83)..(84): n is a, c, g, or t
  misc_feature (87)..(87): n is a, c, g, or t
  misc_feature (93)..(93): n is a, c, g, or t
  misc_feature (102)..(102): n is a, c, g, or t
  misc_feature (105)..(106): n is a, c, g, or t
  misc_feature (112)..(112): n is a, c, g, or t
  misc_feature (131)..(132): n is a, c, g, or t
  misc_feature (136)..(136): n is a, c, g, or t
  misc_feature (143)..(143): n is a, c, g, or t
  misc_feature (145)..(145): n is a, c, g, or t
  misc_feature (149)..(149): n is a, c, g, or t
  misc_feature (157)..(157): n is a, c, g, or t
  misc_feature (227)..(227): n is a, c, g, or t
  misc_feature (230)..(232): n is a, c, g, or t
  misc_feature (234)..(234): n is a, c, g, or t
  misc_feature (236)..(236): n is a, c, g, or t
  misc_feature (239)..(240): n is a, c, g, or t
  misc_feature (242)..(242): n is a, c, g, or t
  misc_feature (244)..(244): n is a, c, g, or t
  misc_feature (252)..(252): n is a, c, g, or t
  misc_feature (256)..(256): n is a, c, g, or t
  misc_feature (264)..(264): n is a, c, g, or t
agtngttgaacagatgnnnatttttaattatnatataaaaaatngnataaattgagattatggtgcagagnggnttaagnttnnagnaggatnattttaccnttnnaatgtnaaggggttatcaggaaacnnaatnttaggantnagtnatgttgtnacaacaagtgttgggatgtgtgatattgatatcagaccaggtctctatggcagtgtaatagttggcaggnggnnncncnctnntncngagttttnctgncaggttgnatagagagctgtctcagaaaactcctccaagtatgcggttgaaattgattgaaaataatacaacagtggaacgaaggtttagctcatggattgacggctccattctagcctctttgggtacctttcaacagatgtggatttccaagcaagaatatgaagaaggagggaagcagtgtgtagaaagaaaatgcccttgagaaagagttcccaagcttctaccttccttttgtcaccttacgtttcatagctttagtatactcaggaaaagaatgaccatcttttgtagaatgtttatacatttttgcatatttcaatttccacttaaattttttaaagctttaactggctctataaattaagtttgtgctttccttgaaatgcacttattcttattacaagcattttataattttgtataaatgtctattttctctgaaatattttgctttcagtaaaatgctttccaactctgtttagtgtattaattaccagtggattggtagaactgctttttattgactagtaaaagttactgcctatgctttttaccttaggcttacagaattaaataaaaattagccattccagaaat

SEQ ID NO: 252963 - DNA, 882 bp, Homo Sapiens
  misc_feature (403)..(414): n is a, c, g, or t
cctgaaaatcagccagtatttgaaggactaatttttctctgcatcagttataaggaagcttcccatctatgaacaggaacaaaaaaagtatctacaaaccttgtaaacagatctgtatcatttataaacataaataatccaaattattaacagccaacagcagaaattaaactatcaattcaacgatccagggctctttgtcttgcccagttttactcctccctctctctcccatccagggactgagataaactaaagctctgctaatacactgttcagggaccatgcttggggtactactgatgatccacagggtcacttacgctgaggttactgtttatctggtcaggttcatttctcccaccccccaaaaagcaccctcagtctggcagaaagctttgcnnnnnnnnnnnnaaaaaaataaatctacattcgtacaagtgtgtcttctgttgaagtccaaagacaagaatactagcttgtccatcacaatatgtgaaaagacccagtttcaatttgtttctttacaatgcagctagtgtgttaacattcagcttacaatcagagtgatgtttccaaactatgtagtgggcttcctggggatgaagaggtagcagacttgttcatttctattgtaaggtgaattccactgtcaacagcattgttatttttgttgggagagggtggaggactggagttacgttttgtaggagcatcatcttcggcatcagtgtcatcaataagggggatatgaggctctgaatcttctatcctaaactcaggatgtgtcataaagttgtgaatcgaacttcttgattccggtttttctaacacttcaaaaaagaacaacgaaaagcattaacacaccgatctttggtttgg

SEQ ID NO: 252964 - DNA, 697 bp, Homo Sapiens
  misc_feature (15)..(15): n is a, c, g, or t
  misc_feature (86)..(86): n is a, c, g, or t
tgagacttcgttttntgttccagcaaccctggttgggggtcagacttgatacactttcaggttgggagtggacccaccccagggcntgctgaggacagagcagccaggccgtcctggctcactttgcagttggcactgggttggggaggaagagagctgatgagtgtggcttccctgagctggggtttccctgcttgtccagttgtgagctgtcctcggtgttaccgaggctgtgcctagagagtggagatttttgatgaaaggtgtgctcgctctctgcgttctatcttctctctcctccttgttcctgcaaaccacaagataaaggtagtggtgtgtctcgaccccatcagcctctcacccactcccagacacacacaagtcctcaaaagtttcagctccgtgtgtgagatgtgcaggttttttctagggggtagggggagactaaaatcgaatataacttaaaatgaaagtatactttttataatttttctttttaaaacttggtgaaattatttcagatacatattttagtgtcaaggcagattagttatttagccaccaaaaaaaagtattgtgtacaatttggggcctcaaatttgactctgcctcaaaaaaaagaaatatatcctatgcagagttacagtcacaaagttgtgtattttatgttacaataaagccttcctctgaagggaaa

SEQ ID NO: 252965 - DNA, 845 bp, Homo Sapiens
  misc_feature (79)..(79): n is a, c, g, or t
  misc_feature (138)..(138): n is a, c, g, or t
  misc_feature (803)..(803): n is a, c, g, or t
gtctcaagtcacacctcaacagacaccagaacatacactcaggagagaagcccattgtgtgcaaggactgtggccggcngcttcagcagcaatccaacctcatcagacaccagaggacgcactcaggcgagaagccgntggtgtgtggggagtgcgggcgaggcttcagcagaagtcaaaccttgttgcacaccagaggacgcactcaggggagaggccgtatgtgtgccgagagtgcgggcgaggctttagcaccaggcctggtctcatcaggcacaagcggaagcacgtcgagggagaagccctacactgtgcaaggcagtgtggactgggctttggcaataagtcaagctctaattacacacaagcgggctcactcggaagagaagccttgtgtgtgcagagagtgtggccaaggctttctccaaaagtcacacctcaccttacatcaaatgacacatacgggggagaagccatatgtgtgcaagacgtgtgggcggggcttcagcctcaagtctcacctcagcagacacaggaagaccacgtctgtccaccacagactgccagtgcagcccgaccctgagccgtgtgcagggcaaacttcggattccttatactctctctgaaggcaaagatggggacaaggactaagagtcagaatgttgacactttgatgaaatggagtagagaaatgcattctgtaagtggtcaaaggacatttgactgtttactttctccacactaagtcttctccatgttttgtggccttcggttgtaataaacttggcttctttatacaaaancacagggccttaacaaaaacacaaacgtggtgggccgccctc

SEQ ID NO: 252966 - DNA, 260 bp, Homo Sapiens
atggcccgggccgtaaacaaacggagctgcggaggagcgggtcccgggatgtgaccggggctctgcttgtggctgcggcggtggcttctgaggctgtcgggtctttgcgggttgcggaagggggccccaatacccttcttcttcaggtcttaaaaagctggccgtggtgcaataaggaacttaaaacaatggaagagcggaaagtgaagaggaggagtcctaagtcttttagtgcccactgtactcaggttgtcaatgcc

SEQ ID NO: 252967 - DNA, 473 bp, Homo Sapiens
  misc_feature (59)..(72): n is a, c, g, or t
  misc_feature (101)..(109): n is a, c, g, or t
aaatccggccattatggccgggcttttagctatattcacaaggctttgttatataaggnnnnnnnnnnnnnnagtaagtgtcttctaatttctattgtgannnnnnnnncagtgactcctgagttttttagaagtgtttttgccccaagcctgtgaggatatctttttttattattgatttctatgtacatttaatggcattgtggtcatggaatgtggactgtatgaagaccttgttacttaattagtagaaagattataattcttagaaacccatactgcaatactagaataaattttttccaattttaaattcaatgtgctagaaaatcccaaacaatatgctttagggtttgtaatttaaccaaatgaatttgcagtactctcattacttaggtttcttcctttgaatctgagatcttaaagtttagcagctgcatgaagagcatgtccacaaaattcttttcttagtt

SEQ ID NO: 252968 - DNA, 709 bp, Homo Sapiens
  misc_feature (633)..(633): n is a, c, g, or t
  misc_feature (670)..(670): n is a, c, g, or t
cggacatcatgtgtatcccaacctaccacaagagagctttccaggactaaaccactttaaaggcaaatgcttccacagcagggactataaagaaccaggtgtattcaatggaaagcgtgtcctggtggttggcctggggaattcgggctgtgatattgccacagaactcaaccgcacagcagaacaggtcatgatcagttccagaagtggctcctgggtgaagagccgggtctgggacaatggttatacttgggacatgctgctcgtcactcgatttggaaccttcctcaagaacaatttaccgacagccatctctgactggttgtacgtgaagcagatgaatgcaagattcaagcatgaaaactatggcttgatgcctttaaatggagtcctgaggaaagagcctgtatttaacgatgagctcccagcaagcattctgtgtggcattgtgtccgtaaagcctaacgtgaaggaattcacagagacctcggccatttttgaggatgggaccatatttgagggcattgactgtgtaatctttgcaacagggtatagttttgcctaccccttccttgatgagtctatcatcgagaagtcaaccatagcagtgattggctttgtccagtcccttgnggctgccattcccacagttgacctccagtcccgctgngcagcacaagtaataaagggaacttgtactttgccttct

SEQ ID NO: 252969 - DNA, 591 bp, Homo Sapiens
  misc_feature (54)..(54): n is a, c, g, or t
catgtcaaaatgcaggaaatgataagttagatataaagaacatagttctgattntgaagtgttagtggaactcaaacagaaatgattagtgctctcttaagatcatgacatgattcttaaagtggctatttcagagcctagaaataacactgtattactgactaatgtaatttttaaatagcaaagcccctgtctgggtagtcagtaaccagaaatcctagagaaaatgatgattaggtcaacacaaggaaaacagcgattaacagaataggaattgcaaagagcttcagccaatggaaaaagaagcaaggcttctgaagtctcccgaccactcgtgtctgcatgggtttcaacgaccggtcccactgggtcagtatggcatttctggctcctggccactgccctgggcccaccagcctaaactggtagggactacaagggccaaaataaacttccatggccaatttgggatctgtgagaaacagccatgggatgttgggctttgccacaatgaaggaggagagttcatccatataaacaatgtaatctgtctgtatggtctcgcttttgccaaaccatttgcgctttttc

SEQ ID NO: 252970 - DNA, 738 bp, Homo Sapiens
ttcggcacgaggacggttggacaggacgtagacacacagaagaaaagaagacaaagaacgggtaggaaaattaaaaaggttaccatggggaagaaagtggccatcattggagctggtgtgagtggcttggcctccatcaggagctgtctggaagaggggctggagcccacctgctttgagaagagcaatgacattgggggcctgtggaaattttcagaccatgcagaggagggcagggctagcatttacaaatcagtcttttccaactcttccaaagagatgatgtgtttcccagacttcccatttcccgatgacttccccaactttatgcacaacagcaagatccaggaatatatcattgcatttgccaaagaaaagaacctcctgaagtacatacaatttaagacatttgtatccagtgtaaataaacatcctgattttgcaactactggccagtgggatgttaccactgaaagggatggtaaaaaagaatcggctgtctttgatgctgtaatggtttgttccggacatcatgtgtatcccaacctaccggactataaagaaccaggtgtattcaatggaaagcgtgtcctggtggttggcctggggaattcgggctgtgatattgccacagaactcagcccgacagcagaacaggtcatgatcaagttccagaagtgggctcctgggtgatgaaccgggtctgggactggttatccttgggacatgctgctcgtc

SEQ ID NO: 252971 - DNA, 392 bp, Homo Sapiens
gttggacaggacgtagacacacagaagaaaagaagacaaagaacgggtaggaaaattaggttaccatggggaagaaagtggccatcattggagctggtgtgagtggcttggcctccatcaggagctgtctggaagaggggctggagcccacctgctttgagaagagcaatgacattgggggcctgtggaaattttcagaccatgcagaggagggcagggctagcatttacaaatcagtcttttccaactcttccaaagagatgatgtgtttcccagacttcccatttcccgatgacttccccaactttatgcacaacagcaagatccaggaatatatcattgcatttgccgaacatcctgattttgcaactactggccagtgggatgttact

SEQ ID NO: 252972 - DNA, 1217 bp, Homo Sapiens
  misc_feature (25)..(25): n is a, c, g, or t
tggttgtacgtgaagcagatgaatncaagattcaagcatgaaaactatggcttgatgcctttaaatggagtcctgaggaaagagcctgtatttaacgatgagctcccagcaagcattctgtgtggcattgtgtccgtaaagcctaacgtgaaggaattcacagagacctcggccatttttgaggatgggaccatatttgagggcattgactgtgtaatctttgcaacagggtatagttttgcctaccccttccttgatgagtctatcatcaaaagcagaaacaatgagatcattttatttaaaggagtatttcctcctctacttgagaagtcaaccatagcagtgattggctttgtccagtcccttggggctgccattcccacagttgacctccagtcccgctgggcagcacaagtaataaagggaacttgtactttgccttctatggaagacatgatgaatgatattaatgagaaaatggagaaaaagcgcaaatggtttggcaaaagcgagaccatacagacagattacattgtttatatggatgaactctcctccttcattggggcaaagcccaacatcccatggctgtttctcacagatcccaaattggccatggaagtttattttggcccttgtagtccctaccagtttaggctggtgggcccagggcagtggccaggagccagaaatgccatactgacccagtgggaccggtcgttgaaacccatgcagacacgagtggtcgggagacttcagaagccttgcttctttttccattggctgaagctctttgcaattcctattctgttaatcgctgttttccttgtgttgacctaatcatcattttctctaggatttctgaaagttactgacaatacccagacaggggctttgctatttaaaaattaaaattttcacaccacctgcttttctattcagcatcttttgcagtactctgtagacattagtcagtaatacagtgttatttctaggctctgaaatagccactttaagaatcatgtcatgatcttaagagagcactaatcatttctgtttgagttccactaacacttcaaaatcagaactatgttctttatatctaacttaaatcatttcctgaaacattttgacatgattcctttttccttttaaacaatgtatgaaagatgtattttaaatctaaataaagagcaaattaagcagaataattataa

SEQ ID NO: 252973 - DNA, 384 bp, Homo Sapiens
  misc_feature (97)..(97): n is a, c, g, or t
  misc_feature (374)..(374): n is a, c, g, or t
gagaaaaagcgcaaatggtttggcaaaagcgagaccatacagacagattacattgtttatatggatgaactctcctccttcattggggcaaagcaancaatcccatggctgtttctcacagatcccaaattggccatggaagtttattttggcccttgtagtccctaccagtttaggctggtgggcccagggcagtggccagggagccagaaaatgccatactgacccagtggggaccggtcgttgaaacccatggcagacacgagtgggtcggggagatttcaggaagccttgcttcttttttccattgggcttgaagctcttttgcaattcctatttctgtttaatcgctgtttttccctgtgttttgaccncaatcatcat

SEQ ID NO: 252974 - DNA, 631 bp, Homo Sapiens; identical to SEQ ID NO: 45059

SEQ ID NO: 252975 - DNA, 1518 bp, Homo Sapiens
agactatatgttcaatattatcactgcacttataaacaaagaatgatatgtgagaagatggccaatccagtgcagcttggttctacatattttagggaggcatgaggcatcaatcaaatacattgaaggagtgtagggggtggggggttctaggctataggtaaatttaaatattttctggttgacaattagttgagtttgtctgaagacctgggattttatcatgcagatgaaacatccaggtagcaagcttcagagagaatagactgtgaatgttaatgccagagaggtataatgaagcatgtcccacctcccactttccatcatggcctgaaccctggaggaagaggaagtccattcagatagttgtggggggccttcgaattttcattttcatttacgttcttccccttctggccaagatttgccagaggcaacatcaaaaaccagcaaattttaattttgtcccacagcgttgctagggtggcatggctccccatctcgggtccatcctatacttccatgggactccctatggctgaaggccttatgagtcaaaggacttatagccaattgattgttctaggccaggtaagaatggatatggacatgcatttattacctcttaaaattattattttaagtaaaagccaataaacaaaaacgaaaaggcaagttacgagactgacttatttttaacttctgtgtgttgagctactgtaagcttggcttttgttaaagacatacagcaattagctatgcaaacataagcattgttctgaaaaaaaatatatagatagatatgtttatctccataactcataactgggagtattatacccaagaggctttgttacaaggtattttttatcctgttagtaaatattttcctgtaattctataataagcaaataaattttcatggttggggtagatgcaaaagtgacacataatcgtttagaaagcaactaaacttgttttaccagctgtttaggcatttttgtaacccctccttgatttggaggtttgaccttgacctaatttttttctttaaaaccagcccttacaatcttctgccccctcctcttctgtgacagtagctgggcctagagggaagggggcttgtatagtttgtgcagcagagcattctcagtgaaatacagatcccggcccagtgggatgccaaaatgacggagagccacatctctgatcttcaaaatatcatgatttgggttttccatattttctgagataaccgagccatcctcccacttccagacctcattcgacttctggcgagataatccgacccaacgaattaaatgagtccctggctttgatgtactccacaatgttccggttgtcaatcttcaggagagtagcattcatgtcagtgcagtactgcttactctcttcccatgttaagttgtgcctgaagaacccatagcagctatctccataatatctccagtttgtgtcacaggggctgcatttatgacctttgaaagtgccctttag

SEQ ID NO: 252976 - DNA, 1060 bp, Homo Sapiens
aaactacattttgcaaagtcattgaactctgagctcagttgcagtactcgggaagccatgcaggatgaagatggatacatcaccttaaatattaaaactcggaaaccagctctcgtctccgttggccctgcatcctcctcctggtggcgtgtgatggctttgattctgctgatcctgtgcgtggggatggttgtcgggctggtggctctggggatttggtctgtcatgcagcgcaattacctacaagatgagaatgaaaatcgcacaggaactctgcaacaattagcaaagcgcttctgtcaatatgtggtaaaacaatcagaactaaagggcactttcaaaggtcataaatgcagcccctgtgacacaaactggagatattatggagatagctgctatgggttcttcaggcacaacttaacatgggaagagagtaagcagtactgcactgacatgaatgctactctcctgaagattgacaaccggaacattgtggagtacatcaaagccaggactcatttaattcgttgggtcggattatctcgccagaagtcgaatgaggtctggaagtgggaggatggctcggttatctcagaaaatatgtttgagtttttggaagatggaaaaggaaatatgaattgtgcttattttcataatgggaaaatgcaccctaccttctgtgagaacaaacattatttaatgtgtgagaggaaggctggcatgaccaaggtggaccaactaccttaatgcaaagaggtggacaggataacacagataagggctttattgtacaataaaagatatgtatgaatgcatcagtagcctgaaaattgccttatttctccctttcttcctcactggagttatttttaatattatctttcctatcagaattacctagtcccttctttgaatatacagaagccatcacgtgagtttatcatttgcttcccaattgttctattttcctttaattttctttcttcttgtccttcatttctaattacctgaacatggtatgatttactgcatcttcagatatacacatataacatcaaaa

SEQ ID NO: 252977 - DNA, 825 bp, Homo Sapiens
  misc_feature (707)..(715): n is a, c, g, or t
ggtagcggtccggaatttcgggatatcgtcacccacgcgtccgcacaaacgcagaatttgtataaccatatgacttcatagttgtgatctcaaaaaaagaaggaatttctcctttgtttcttgcagttaatgtaagaatactttaaatctctaagcttctgaagtgttagaggtagagatggtctagtaaagatgtagtagtaatgttttatccatttagcatgtgtttattttttcatatgtactcaaaggtgacttattggttcacctcagtgatattacagctaaaaaaatcattcattagcaaaaggaaaagtggtctcaaccaaacatcagaagtgtttcttattattattttatattgagttgaatattgaactctaacagttttctacatacaaaacacagtgtcatgaaggttattcataattgcattatagaggaatgtagtatgtcataagtactttgtaaagatttgacattcaactgtagtatccatatgttgcttaaatttccttatgagccccatgatggaaagacttaaagatgaatttgagaaaaattgaaagaaattagattatcaggttctgttaaattgttacatgtatcttgcttaaatttctgtttattaatttatatccacccaagtacataaagcaaatttggaggaaacaactgaagttgtgcaatattttctgataattgcnnnnnnnnnaattcttgggttttctacttaaacataatgtctgtgtcatcaagtattatagtcagacttttctttttttctagattgttaaaattggcaaatgaacttttttaaaaatc

SEQ ID NO: 252978 - DNA, 1345 bp, Homo Sapiens
  misc_feature (690)..(690): n is a, c, g, or t
  misc_feature (953)..(1103): n is a, c, g, or t
  misc_feature (1114)..(1130): n is a, c, g, or t
  misc_feature (1171)..(1234): n is a, c, g, or t
  misc_feature (1244)..(1252): n is a, c, g, or t
ggtacaaaattcaaactgtgaaggtttatgcttcattaattatgaccatactttttcattttctgacgatccctgatttccttatggactcaataagaatcttttatatcaagtaaaatgaaagttgatgatagaatatcaaatagggaattggatatgaaatctaagagtgtgagtcacttgcatatgtaaggcttggggttttggcatatttccttaggccacagggacaggtttctgagttgttccccttttcaagcctctggaaggccagtgccagcagcaggcctgggtttaaccttcttcccatgtgagctggaaaaactttggcatcttaattagcctggaatcatacacctgatccccaaacattgcctgctctcaatgaaacatgcttgggaaatggaagggactcagaaagtcgaaatcccaagaactccaagccaaaagtgttaggttttagtgaaattggtgccaggtataaccatacctgttgggcccagaattattatcacagcctttctgacccaaactttcaaaagcaaataaacagcatataaaacgttaattatctttccattgtaattgtgatgatctactctgtatgggtaccaaaatcaccttctctcttcaagtcaaagttgaatttagaactttgaatacagggtcaaaaaatgtagaaaatatcanttttatattcccctaatctatatagctgaaaaaaggttggatttttccttagctgaatatgaaatacctcttaaacataaattagttcctccccagggaaagaatcttattttaacaatccatttcaggaaagaggttctgctgccgtaaaggcagaaattttatttttatcccttttatttgaatgagagatttgaaaatcgaattatgtaaatatttcaatgcatctgctattattttgtggagtttattaaactactttnnnnnnnnnnnnnnnnnnnnnnnnnnnnnnnnnnnnnnnnnnnnnnnnnnnnnnnnnnnnnnnnnnnnnnnnnnnnnnnnnnnnnnnnnnnnnnnnnnnnnnnnnnnnnnnnnnnnnnnnnnnnnnnnnnnnnnnnnnnnnnnnnnnnnnncttttgggcgnnnnnnnnnnnnnnnnnaaaaaattttttaaaacttttttttgggggggggggccccnnnnnnnnnnnnnnnnnnnnnnnnnnnnnnnnnnnnnnnnnnnnnnnnnnnnnnnnnnnnnnnntttctccccnnnnnnnnnccgcccgggggaccacaagggttttgaaaaaaacccgagggggtgtttggggggttttttgggctttcaaccagggggcccccgggcgccttt

SEQ ID NO: 252979 - DNA, 828 bp, Homo Sapiens
  misc_feature (197)..(206): n is a, c, g, or t
acctcgatcctgatgcacagggtccaatgctgtgatgctgatcttccttgaaaccatagcatgctactcttcacagtgacgttgtactctcctcattctgcactgcaaggccactcttcttcattgtgagatgcacataacaatgtttaggatattgcagtgtaggcttttttaaagaccaaaggtagctgaatggnnnnnnnnnnaaatgagtacaactctagcattttgaagttccagttgtaaatgtatttgtttaccagtaggtttgtgaaattggttctttgtatgggggatggtcctttttcacacagctaggtcttttcagaagtggtggaaattggcagctggggtactttcagtttggactgatattcatcacacctcagataaaatgcagagtaatatatagttgcactttataaatggtggttaaatggaaatgttcaagccattttatagttgtgatgcacaatataatttaagtgcttctgtcaaagtattcctccagtacaatttgtatagtttgctgcccttgatgagcaaaaagtatttatcttgggcttatctgaatgatcaggatgagatttaatgcccatatcttaccagttcagttatctccagagccatttcaccctttagagggagtcacatgcacggagtgggaatgtcaaaggtgggttattatccagtctgccttacccttaatctgttcacagatatttattctaaggcttttttttctaaaagtattggatagaaatgaagggttgcgcttatttctaaagagtggaaccggagtttcatcaaaaaaatccaatggttaaa

SEQ ID NO: 252980 - DNA, 1469 bp, Homo Sapiens
atcgacggaagtgcacctgactgagcggaagtaggagctctcagaggctaagaaggtggagaccggagaagctgtgaggttctttagcgtcacctccctcactgggcagcatgggggagaagtcagagaactgtggggttccagaggatctgttaaatggtttgaaggttacagatactcaggaagccgagtgtgctggccctccagttcctgatcccaaaaatcagcattcccagagtaagctgctcagggatgatgaggcccatctccaggaggaccagggagaagaggagtgttttcatgactgcagtgcctcatttgaggaggagccaggagcggacaaggttgagaacaaatctaatgaagatgtgaattcctctgaactagatgaagaatacctaatagaactggaaaaaaacatgtcggatgaagagaaacagaaaagaagagaagagagcactagactaaaggaggagggaaatgaacagtttaagaaaggagattatatagaagctgaaagttcttatagtcgagccctcgaaatgtgcccatcctgcttccaaaaggagaggtcgattctattttcaaatagagctgcagcaaggatgaaacaggacaagaaagaaatggccatcaatgactgcagcaaagcaattcaattaaaccccagctatatcagggcaatattgaggagagcagagttgtatgagaagacggacaagctagatgaagccctggaagactataaatctatattagaaaaagatccatcaatacatcaagcaagagaagcttgtatgagattacctaagcaaattgaagaacgtaatgaaagactaaaagaagagatgttaggtaaattaaaagatcttgggaacttggttctccgaccttttgggctctccacggaaaatttccagatcaaacaggattcctctaccggctcgtactccatcaatttcgttcaaaatccaaataataacagataacaaagataacaaaagctttacaagctgacttggaattgtgtgctgcttgctgttagctaggggaaaggccctgccaatgtttaacttttaaaagcatcttatctaaaagaaaggctatccagtagagcccagtgctcccttgtccctcttttatgatcagggtgaaatgtacttcctgatgtaatgaacctaatttgatttccattttaaggtggtgtctgtgcagctggtgtccccgattctggctgtcctatgtccaggaagaagcccatttgttgaggctgaccttcctgatcatacacacacacagcccagcaaaagcctctcctgaaccaaacaaacctgttggttgggagactgcccagacatgattgatgacgggttcccgcctgctgtcccctccctgatcacacagctaacgaggctgcctccagcatttcctgatttcctctgtggtaataaaagctttctgtgcttata

SEQ ID NO: 252981 - DNA, 782 bp, Homo Sapiens
  misc_feature (306)..(415): n is a, c, g, or t
  misc_feature (592)..(626): n is a, c, g, or t
gggggtctaggtggctggcagaggcacatgcagaccctgcctggagcctgccctaggacgctgggcgggtcagtctccgtgcaggatgtgagcagcgtccctgggctctatccgcgaggtgccagtagcgtgtgcaggtacatacacgtgcgtgcacactgtgatgacacccggaaatgtctcaggatgttgaaatgtgtccttgggggcagaagtgtccccagttgagaatctgccccagaggaacacacccacaccaggcctcaggattttgtgttgatcaagttccaaggaaaaggaacatcnnnnnnnnnnnnnnnnnnnnnnnnnnnnnnnnnnnnnnnnnnnnnnnnnnnnnnnnnnnnnnnnnnnnnnnnnnnnnnnnnnnnnnnnnnnnnnnnnnnnnnnnnnnnnngaaagaaagaaaatgagagatccaggtttaaaaattcataaacaccacaaggaaacaatacactatgagacccagcagaagcaacagattgactctagacccagatactagaattatcagagagaatataaagtaacagtgttttatatatctaaagaaataaaagagatttctggnnnnnnnnnnnnnnnnnnnnnnnnnnnnnnnnnnnccctggtcggccgccttcggccttcaaaaagttttctaaacaattcgttttgggggccgggggcccattagggaaatggaacatgggccaaagttggtttcccaaagaaaaaaccctgggccaataaacaaagggcttgggaattcccccccaaat

SEQ ID NO: 252982 - DNA, 410 bp, Homo Sapiens
  misc_feature (45)..(45): n is a, c, g, or t
  misc_feature (52)..(52): n is a, c, g, or t
  misc_feature (88)..(241): n is a, c, g, or t
ggctggcagggtctaggtggctggaaaaggcacatgaaaaccctncctggancctgcccctaggacgctgggcgggtcaagtctccgnnnnnnnnnnnnnnnnnnnnnnnnnnnnnnnnnnnnnnnnnnnnnnnnnnnnnnnnnnnnnnnnnnnnnnnnnnnnnnnnnnnnnnnnnnnnnnnnnnnnnnnnnnnnnnnnnnnnnnnnnnnnnnnnnnnnnnnnnnnnnnnnnnnnnnnnnntgccccagaggaacaaacccacaccaggcctcaggattttgtgttgatcaagttccaaggaaaaggaacatctcagccgggcgtggtggttcacgcctggaatcccagcacttgaggccaggagttccagagcagcctgggcaacgcagtgagagaccccatctctaca

SEQ ID NO: 252983 - DNA, 1355 bp, Homo Sapiens
gggctgcaggattcggcacgaggcgccgcgtccccggcccaaccatggcgtcctccgcggccggctgcgtggtgatcgttggcagtggagtcattgggcgaagctgggccatgctgtttgccagtggaggcttccaggtgaaactctatgacattgagcaacagcagataaggaacgccctggccctgagtgtggaagagcagctgtcactcatcagtggttgtcccaatatccaagaagcagtagagggcgccatgcacattcaggaatgtgttccagaagatctagaactgaagaagaagatttttgctcagttagattccatcattgatgatcgagtgatcttaagcagttccacttcttgtctcatgccttccaagttgtttgctggcttggtccatgtgaagcaatgcatcgtggctcatcctgtgaatccgccatactacatcccgctggttgagctggtcccccacccggagacggcccctacgacagtggacagaacccacgccctgatgaagaagattggacagtgccccatgcgagtccagaaggaggtggccggcttcgttctgaaccgcctgcaatatgcaatcatcagcgaggcctggcggctagtggaggaaggaatcgtgtctcctagtgacctggaccttgtcatgtcagaagggttgggcatgcggtatgcattcattggacccctggaaaccatgcatctcaatgcagaaggtatgttaagctactgcgacagatacagcgaaggcattgagaaggttaaccaggacatgtgcatgaaggtccctgatgacccggagcacttagctgccaggaggagtggagggacgagtgcctcatgagactcgccaagttgaagagtcaagtgcagccccagtgaatttcttgtaatgcagcttccactcctctcattggaggccctatttgggaacactgcaagcccttaatcagccctctgtgacataggtagcagcccacggagatcctaagctggctgtcttgtgtgcagcctgagtggggtggtgcaggccggtagtctgcccgtcactttggatcatagccctgggcctggcggcacagcagcacttgcgttctcggggctgtcgatttcctgccacctgggcagataacctggagattttcaccttttcttttcagcttgattgcatttgactatattttacagccagtgattgtagtttcatgttaatatgtggcaaaatatttttgtaattattttctaatccctttctgagtactctggggccctgcatttatgaggcacctaccttcatttttctaacgcttattctgaataaaagtttttgattccttaaaaa

SEQ ID NO: 252984 - DNA, 657 bp, Homo Sapiens
accattccatcaggaatccaaatgagactcagaacaatagcacaagctggcctgtcttcaaaagcactgaacaaaaatatctaaccttgaatacagagtcaacaagaataatgacgaaactacgtgctcaacaatgtcgattctggacatcattttttccaaaagtcttggaaatgacaggaaatattgatgaaacagaatgggagtggaaagcaggattccatcgctggaacaattacatgatggactggaaaaatcaatttaacgattacactagcaagaaagaaagttgtgtgggtctctaattaatagatttaccctttatagaacatattttcctttagatcaaggcaaaaatatcaggagcttttttacacacctactaaaaaagttattatgtagctgaaacaaaaatgccagaaggataatattgattcctcacatctttaacttagtattttacctagcatttcaaaacccaaatggctagaacgtgtttaattaaatttcacaatataaagttctacagttaattatgtgcatattaaaacaatggcctggttcaatttctttctttccttaataaattaaagttttttccccccaaaaatatcagtgctctgcttttagtcacgtgtattttcattaccactcgta

SEQ ID NO: 252985 - DNA, 794 bp, Homo Sapiens
  misc_feature (454)..(454): n is a, c, g, or t
  misc_feature (638)..(698): n is a, c, g, or t
tattctgtttatttaaataaggataagactacttaaaagactttttacatacaaaaatgtacaaggttaaacttttctgtactgaattacaaaacctgcacaagcatgtaataaaagagcacacttaaaaacattctcgaccattatttagcctctaaaaattactgaagttcaacagtagtaaatagaggaagctcacttaatgtaagtatttaaaaggtcacattgctattgaatgagtctctagatcaattttagaattgtctctcaaaacttaagtcaaccaaaatattatttcaaatagtaattccaattctgaagaattttaataccagcaaatatattatggcctcatagtagtaactgaaccaactttccaaagtgcctggtagctgtccagatgaattaggctgctttggaaaactgtactgtctctacagccattgagaagccnattcagtgccctggtagggacctgagactttccagaattcacacagcagtctatgatccctcaaatgtaagaggacagggggtcagcctatcttcacctctcagtgaatgtggagggccaagcaatatgacttgcaaacctaagctagaagcttgggatctacagtaaggaggaaggagaattnnnnnnnnnnnnnnnnnnnnnnnnnnnnnnnnnnnnnnnnnnnnnnnnnnnnnnnnnnnnngaaaaaacaaggatgcctgctaatggcaggaagtggtaaagtgcctataactacaacttacaagccacccactaattctaatgccattcatttgcc

SEQ ID NO: 252986 - DNA, 544 bp, Homo Sapiens
ctttcaataagtaacactagtttccagatggtactctagctcaggcatgagaatctgttcttaaaagtgggacattatttcaatcataaacataatttactagaatggacatttggcaaagcaagtccattatccacctgccatcacagtcacttttttagtcaccagtgaaggcaagcctgaaggacacctactccaaagtgcttcccaaaaatttgccacaggggctgattcctactctgtttgaggcattcttttgtgctgaaagattgtcaccagaaagacaactgaaagacaaatattgctgcttgggagcagttgtggcaccagtgtggctcccactgtagcaattaaagtgctgagcaagttggagctggcagggatttgggtttgggttctttggaaagctgggagtgggcaaagggtcttgtgctgcccagagccagagctgttgggaccacagtagccctatttgcataaataactgaaatacaacccttttctgtaagtcgtccaataaataaaataataccacacctaaaaa

SEQ ID NO: 252987 - DNA, 698 bp, Homo Sapiens
  misc_feature (60)..(70): n is a, c, g, or t
  misc_feature (257)..(318): n is a, c, g, or t
cgattctcgcccagccttcccgagggagaagaaactaaatatgtcttttgccccaacatnnnnnnnnnnngcattccccttttcgcactgggtgggtgtccagtataactgtgtttcccaaggtctaattgaagcgacgaaacctttcctcaagagggaaaggaacatggacggatttccaagagtctgaaacatttagttttcacctttctgggcccatttaattggggctttatattacaaagagctttgggaannnnnnnnnnnnnnnnnnnnnnnnnnnnnnnnnnnnnnnnnnnnnnnnnnnnnnnnnnnnnnccatatttaatccgcatataaatgtggatataatatataatatcctaatatgagcatgcccattattctctgtctatgaaacaaaaatggcatttttcaatggatttgttttggatatataattagttcatttgctgtttagaagccttgccaaaagtgtttagattttggtactgcaactgctttcctcttgcccagaaatgttttgcctcttcttttcctacaagttaaatgttcttttatctcagatataaaccatgaacagtaatgatagtccctgacatataaatcttagtaaaaagtggttaaaagtctaaaactcagtatgaaaaacatatcttgttagaataaattaaaaccttttaaaaattaaaaaattg

SEQ ID NO: 252988 - DNA, 758 bp, Homo Sapiens
gcgaagtcattgaccgatcgaatacaggtctggaagtctgaggtccaatataataaaaaatctagtcttcaccttctatcctagggatagacattaggaatatttgaggatgttgttcttggtcttcacgttcatgcattttccctctatttttataattggatcaatgaatcaataagcaaatatattttaactgcataaagataaaaataggcgttgtccaattatggaaatatatggtgaaataagaaatactattcacatttattaaaaacactgaggtcttctttctattaacaaataaatgactcagaggtattactcgcttgctgcaggatggcatatacagtaaaaataataataacgtatgtgaggtcatttgggtcaggaccatgttcatggttgtttgttttctcaagaaaaaatagtttcacacatacttacatgactaatagaatgaaaggagaaatgtgtggataaatggacagaatatttccatctttttatcttttttgctttgtactctcacaatgaacaccctcaagttgacttaagcacccttccatggtcataaggtttctggttgcctctgtgtgttaaaagcttggagaccaatgccttctgctgtgatcgcgttctccacagttgcctctgggtaggagcctggacactaatagaaaatggatgcactggagctgatttaaacattctttggtggtcacaagatgtatagctgcctctgtatgtttggcgcatgg

SEQ ID NO: 252989 - DNA, 664 bp, Homo Sapiens
cgaatttaaatttttttccgattccccacatatttgtatgtcaaaattattcccgcccatacccaccttgatttagccactctgttttccttttagaccaagcatcatggttcactggcctacaaattttctaaaaattatttttaggtttcataacaagtaatatttttaaatgtgtgttaagaacacaaaaaaggtaatgtggccgctattataaccacatgggtcatcctctaaaacaagtgttgtgaggttggtgttaaatataaattgtgaatgatgattaagtacatttactgatttcattctactatatgcaatcctgaaatatgagaataggtatatttaacttgttaggtaatttaatgaaatatatttgctgatatcattctactatatacaatcctgacattatgtaagaagaaaaaaggcaattccactattgacaggatataggaatgatcaaaattacttaacataaattttgaaaaattaaatttcccatgcatattttaacttctccattagtccaacaggttgtatgatgcttataagggaattatttggcaaagaaatattttctttttaagaatgcagtatatgagtatagtcacaaggggtcataaattcacacccagttttttaaaaatgagcccattggatt

SEQ ID NO: 252990 - DNA, 664 bp, Homo Sapiens
ataacatggcctcacttaatggggggccctgggaacctcagggtctctttacttctaccaaaccaattgaaaactccgcaacaagagactgctaccagaatgcacaagcccttgggttttggacatataaatacccaaagatggtggccaaaacaatccttttgatggcagctacaagcctgctattggactctatttaaacagaacacttgccccctgaagcactgtatgtgaccttaagacctaagctgcccatctcatgcaggtattattaccgaaaaataaaaatggaagccccagtttagaaataccctaaggctgactacccgcaaccgtgtaaccaaaactaatcattctgattttcctgaaatgctgtctctgatcataaatgaaatgcaaaatgtaagctttacatccttgccagcatgattcactgaaattaaaccaatcagctatagaccaacaagcttaaacagctcaacttgccctaaaaagaatgtataacagccaattataaaaaaggtcaaaatattccccccctttatgcattataaactgtgttgtaactgctgtaagattaatttcttaccacttgatttgagtcttctagattgtggtctgtacttcttgtttgaacaataaacttttaaatttttctttaaaa

SEQ ID NO: 252991 - DNA, 806 bp, Homo Sapiens
  misc_feature (779)..(779): n is a, c, g, or t
taggggtcatattcattaaaaagcccaaaaggctacctttgccttaacccttctgtagtacaggaatgattcttagatttgtttccttttgttatagaagcaaatattgtttttttaaaatagcctgagatgagaggttatattgtaccccaccagctaacacactaaggggatgacaaactattctctcggtaatttatatagcaaaacatctaataaatggtcatggtatcaaggataggtaacattacttccttcctcattaagttttacttcaaagggctaactttgtaaactaatgacagtggtttctgagggggtgaaaactgcttagattctggtgggttttgttactatgcttatccatattccctttaaaagtaacaaaaaacctgtagtgaattttaacttttaatgctttcctgtttaccctgcctaaatcagctcccactgccagcaatgggttaaccaaatgtaccaccacaagaccacctcctaggtctctatacttgtatgctggtcaagtctcaaacttagtcttcttgaagatcagaagatcactggtaagctctagaccatgttgaagaccatgttgaaaagactcatctgaactacaaccaggcttgagagggagacagtgccatgtctgatctttagagaaactgtactttaaaccacagcagttaagctttcggtgattctaaacttttcttagtggctgaagtgaatgaaattccttattcccatgtaacactaaacagggatttatgcttaaaacncccagcctccactcaactacatactgt

SEQ ID NO: 252992 - DNA, 649 bp, Homo Sapiens
aggtattcacgatataagcgcctcacaaattcacacagaatctgatacactgagtgcaatatgggtgcatgcagcagcacctgagtactatatagatatatgtgtgtataagagttgcgcctccacagtcatgctgcacacatggccgtagatgtgtaatgcaagtgattaaggaatgctatctagcccaaacacatagtgaaatgttgaatgtaatccatgagaatcagacatacagtgtaatgctgaacaacacaggtatgtctagattggcgttatgcatgaatacagctcgtcttcaatcacatccgaggcagataacaccaacagaatctgtatgcaactgtggtgtgtaccagagtgaggtaacaatggtgacggcaagctgaagaggcaccattggttcaaacaactgtcctaggattagaggtgatgacagaagccgcaatgagtgtagtttgaacaaccgcacctgtgtaaaagaaaatcggacactactgaatgaatgtatcgacaacagattgataaatctttagtagtacgaagaaactctcgatatgcgaaagcgggtctcatcaacgctggccaacaacagatgaatcagatgtcacctgtcattagctcgataatatgaggctgtataacacag

SEQ ID NO: 252993 - DNA, 1297 bp, Homo Sapiens
gcacagatgatgctgaataatcccctatttgctggaaatcctcagcttcaagaacaaatgagacaacagctcccaactttcctccaacaaatgcagaatcctgatacactatcagcaatgtcaaaccctagagcaatgcaggccttgttacagattcagcagggtttacagacattagcaacggaagccccgggcctcatcccagggtttactcctggcttgggggcattaggaagcactggaggctcttcgggaactaatggatctaacgccacacctagtgaaaacacaagtcccacagcaggaaccactgaacctggacatcagcagtttattcagcagatgctgcaggctcttgctggagtaaatcctcagctacagaatccagaagtcagatttcagcaacaactggaacaactcagtgcaatgggatttttgaaccgtgaagcaaacttgcaagctctaatagcaacaggaggtgatatcaatgcagctattgaaaggttactgggctcccagccatcatagcagcatttctgtatcttgaaaaaatgtaatttatttttgataacggctcttaaactttaaaatacctgctttatttcattttgactcttggaattctgtgctgttataaacaaacccaatatgatgcattttaaggtggagtacagtaagatgtgtgggtttttctgtatttttcttttctggaacagtgggaattaaggctactgcatgcatcacttctgcatttattgtaattttttaaaaacatcaccttttatagttgggtgaccagattttgtcctgcatctgtccactttatttgctttttaaacattagcctatggtagtaatttatgtagaataaaagcattaaaaagaagcaaatcatttgcactctataatttgtggtacagtattgcttattgtgactttggcatgcatttttgcaaacaatgctgtaagatttatactactgataattttgttttatttgtatacaatatagagtatgcacatttgggactgcatttctggaaacatactgcaataggctctctgagcaaaacacctgtaactaaaaaagtgaagataagaaaatactcttaaagctgagtatttcctaattgtatagaatcttacagcatctttgacaaacatctcccagcaaaagtgccggttagtcaggtttgttgtacagtaggtaacattgtctcaacattcattcacagattgactgtaaattaccttaatctttgtgcagactgaaggcactgtagtataccccgtgctt

SEQ ID NO: 252994 - DNA, 897 bp, Homo Sapiens
  misc_feature (721)..(721): n is a, c, g, or t
gcacgcgagatgtggtgacactatgtcagaaagacaattagctcattaaagagtggggtaaatagatgaatagccatcttgacatatccttgaaaagaaatcccctttgatgagaagtttctttgtaattccaatatagaaagatctcaggttttcattaccatttgcccagtgcaaatgcactatttccaggcattcaacaaattcaacagcactgatggctttcctaagtgctgggacacatcagatttcaacttgtgtcaaattgccaatttatgtgtatatgcccggtttttgggggtttcggtttaatctaaaggcagcaagtgagggccaagtacacagggttgctgtctttgcaaagctaccttgagagcattgtaacttaacaggtgaatgagttgtctactaagtggtgctctttatgtctcagataatgctgccagatttatcattctgaatcatagaggtgatcacatcggagtctgctcacagccttggccgcatacagggtatggtctaacactgctgacattcagagcttgctgtccgggtgccatactcgttctagacatgctggcatctcttcaccctcaatgctcacatcccatgactctcactgcgcccggcatccatcacatgtatgacacggagtgagtagagactaacctggactagagtcggttgattgcgtcattctagcaggactgcaagaatatcntaagctgcggactattagggtaagacatctggtttggtcatgggggggtagaaggcctcacaagtgtgggtcttggccgggcagtgtatttactaacgggaggagtctcctagacgcaggttatggaggggtcaccaccacgctgcgagtttgtggccacaaagctgttgttccgg

SEQ ID NO: 252995 - DNA, 722 bp, Homo Sapiens
  misc_feature (29)..(29): n is a, c, g, or t
  misc_feature (52)..(52): n is a, c, g, or t
aggtccacccctacccaggaaaagggaanaggccagaactcaaaacccagancctgccctgaatccacagggtgtaaagtgcctcctcaccctcactacagatgtacattaaatgttgatgggtatgcccgggagacagtgaaaaacctgatgggggaggtgaggcccataaaggggtaaagagaagggcagaaatgtctagaaaggagtattggcaccggaacagcaagctctgaatgtcagcagtgtttagaccataccctgtatgcgcccaaggctttgagcagactccgatgtgatcacatctatgattcagaaagataaatctggcagcattatctgagacataaagagcaccacttagtagacaactcaatcacctgctaagttacaatgctctcaaggtagctttgcaaagacagcaaacctctgtacttggccctcacttgctgcctttagattaaaacgaaacccccaaaaaacgggcatataacataaatggccaatttgacacaagttgaaatctaatgtgtcccagcactataggaaagccatcagtgctgttgaatttgttgaatgactgaaaatagtcgcatttgcacgtggccaatagtggtaatgaaaaactgagcaaggaatgtcaagatggctattcatctattcacccaactctttaaagagctaagtgtctctctcacatagtgtcaccacatctcgcgtgc

SEQ ID NO: 252996 - DNA, 845 bp, Homo Sapiens
gttctgtgttgatgtacagtttctcctaagaagaagcgaggtggttgaattttggaagcacttcttgaatcggattaacccatgctcttattgaattttttcatctgctctgtttagtttgatattaaagcaaaattaagaggtcttagtttttcctatagaacttttaatatgtcaaaagctatattgtctaaatttcagtacttaagcaaatactgagtagtgttttaaattcagaaatagagcttctattatgaacacatgagaatgatttttttctcttaatcattattaaggaaatattttaatttcatggtcatataatggtgataagtaatacctgattgtttccttttctgttctagtaactcagaggagatacgtgttttatttgtgatagcaaattcctaaatgaacattaggcaagtggtatcattatcaggccagctgcagcctcttgccttgacctgcattcctagaatttctctgttgctgtaattcttgattaagagaccttgactctcattttgtaattttgctaatcatcagcaaattcacttgcatgacgttactgccaaatatgaaggcagctgaattattatgagtgattgtggcagaagttttgtgccatggtgaaaactttgatgtttgcctggggtcattggatcccatctttttaaatgacattaccatgagtctgttgtcaaacctaaatatctttgtttgaatttaaaatgggactctatattgttgtagttcaggtcttcattgactaaaagattgagagaaatctgacataagaaaatattgttttccctgcaggaataaagaggaagttcccgtgg

SEQ ID NO: 252997 - DNA, 539 bp, Homo Sapiens
cctaaagagggcagagcactctggcgtatttcaaaatggtcccttctcccctgtctctgctagagccctgagggggctctgattttcgctgtgagaacctggcagcattccaggaagtaaaattcacaagagcatggagacctcctgtgagtgggtcttcccgggagtccttagctctcagacttgtccacatgctactgagaaagccggttgcccaaaagatggggtccttccctgtttggtgtcacgaagccgatacatgaaaccgaagccgactttattcagtgaccacggactgagaagcaggagcttggcccacagttcaacttctcaacaggtgagcgggcaggggctaaatgtagggtttctgtactgaaggggctggaggtgaacagcgaggggaagaatattcatgtcttctggaaatgggcggtgaacttcccgctgtcttcctttccttggctgcttttgtcagttgtcgtggctctaaccagtctcaactgttcgggtaaaaagaggaactttttatcacagccgtc

SEQ ID NO: 252998 - DNA, 402 bp, Homo Sapiens
cgggcgaccccccccgcgagtgctgtcagagggaatgggggtgacatcctcaatccgcccgatcttcatacccgagcgggcaagggctctgagggccgactgggccccaggtccaggggtcttggtcctacctcctgtggcccggagtttgatgtgtagggcggtgatacccagctccttgcacctctgggccacatcctgggcagccaacatagcagcatatggtgaggattcatctcggtctgcctttaccttcatcccaccagtcacacggcagatggtttccttgccagaaagatcagtgacatggacaaaagtgtcattgaaggatgcaaagatatggcagacaccaaatacatccttcccctttcgaggtgccatttctgcacgtcgtctccagac

SEQ ID NO: 252999 - DNA, 589 bp, Homo Sapiens
cctgcgagtgctgtcagagggtatgggggtgacatcctcaatccgcccgatccatacccgagcgggcaaggtctctgagggccgacatgtgtagggcggtgatacccagctccttgcacctctgggccacatcctgggcagccaacatagcagcatatggtgaggattcatctcggtctgcctttaccttcatcccaccagtcacacggcagatggtttccttgccagaaagatcagtgacatggacaaaagtgtcattgaaggatgcaaagatatggcagacaccaaatacattctctccttcagccacctgaggtccgaggctgatgacctgttcttccttcttttccttcccctttcgaggtgccatttttcacaagctcctccctgaaagcaaaacgggccttctgagaccaggaacgaactcaatcccgagttggccaggatccaggtgggccagccgcgcgtctcttgcccggcacctagctcggttcccacggaaagacccccgtctctcgtcccaagccccacagggtcccctcgccgcaggatgccccccgattgtcgcgcccgggcctcctacctgcac

SEQ ID NO: 253000 - DNA, 784 bp, Homo Sapiens
ggggctctctttccggtgtggagtctggagacgacgtgcagaaatggcacctcgaaaggggaaggaaaagaaggaagaacaggtcatcagcctcggacctcaggtggctgaaggagagaatgtatttggtgtctgccatatctttgcatccttcaatgacacttttgtccatgtcactgatctttctggcaaggaaaccatctgccgtgtgactggtgggatgaaggtaaaggcagaccgagatgaatcctcaccatatgctgctatgttggctgcccaggatgtggcccagaggtgcaaggagctgggtatcaccgccctacacatcaaactccgggccacaggaggaaataggaccaagacccctggacctggggcccagtcggccctcagagcccttgcccgctcgggtatgaagatcgggcggattgaggatgtcacccccatcccctctgacagcactcgcaggaaggggggtcgccgtggtcgccgtctgtgaacaagattcctcaaaatattttctgttaataaattgccttcatgtaacaaccctcatttttttagggtaacagatttacaccccatgagaataagggctcctggtcccccgtggttcggccgccctcgggccctcagaaaagtttttctaaaaccattcttttgtggcgcggcggggccccggtaagggtaagggggaaacttgggccaataagctggttttccctagggaaaaacccgtgggccacggaacctagggggctttggagatttctctccccacact

SEQ ID NO: 253001 - DNA, 160 bp, Homo Sapiens
ctagtggatcccccgggctgcaggaattggcacgaggtgccacccacctcctgagctgtgtttgtaaaatgactgctgacagcaagttcttgctgctctccaatctcatcagacagtagaatgtgaggaaaaacttttgcccgactgatttttaaaaagg

SEQ ID NO: 253002 - DNA, 911 bp, Homo Sapiens
gcgggtgctgctcatctgcctcgacctcttctgcctcttcatggcgggcctccccttcctcatcatcgagacaagcaccatcaagccttaccaccgagggttttactgcaatgatgagagcatcaagtacccactggccatcctcgcgatcatcacgggggaattctaccggatctattacctgaagaagtcgcggtcgacgattcagaacccctacgtggcagcactctataagcaagtgggctgcttcctctttggctgtgccatcagccagtctttcacagacattgccaaagtgtccatagggcgcctgcgtccttcacttcttgagtgtctgcaaccctgatttcagccagatcaactgctctgaaggctacattcagaactacagatgcagaggtgatgacagcaaagtccaggaagccaggagtccttcttctctggccatgcctccttctccatgtacactatgctgtatttggtgctatacctgcaggcccgcttcacttggcgaggagcccgcctgctccggcccctcctgcagttcaccttgatcatgatggccttctacacgggactgtctcgcgtatcagaccacaagcaccatcccagtgatgttctggcaggatttgctcaaggagccctggtggcctgctgcatagttttcttcgtgtctgacctcttcaagactaagacgacgctctccctgcctgcccctgctatccggaaggaaatcctttcacctgtggacattattgacaggaacaatcaccacaacatgatgtaggtgccacccacctcctgagctgtttttgtaaaatgactgctgacagcaagttcttgctgctctccaatctcatcagacagtagaatgtagggaaaaacttttgcccgactgatttttatatata

SEQ ID NO: 253003 - DNA, 455 bp, Homo Sapiens
  misc_feature (52)..(52): n is a, c, g, or t
  misc_feature (66)..(66): n is a, c, g, or t
cctctgcccttctgcctggggtcaaaaaggtggccctttttcctcctcccancccttgaaattgtncccctgttggccttccccaaagggccccatcctgcctggtaaaagtcccacacttcccaaagcccaagacccgagagggctttcactgccccaagcctctctcctgtgaccttgggattctgtcttggcagaatcctttgtcagcggctcttactctgtccttcctgtttggccacagctctttcaatcaatgggtattctagaaccgcaggatgtcagagctggaagggacgcgataccggtttacacaaggggaaactcctcgaggctctgggagggacggagggttttggtgacagagcgagagctaaaattgaggattcctgaatccagatcttgcctcccatcagccatctttctcccaataaatttttgttttgtgcaaggca

SEQ ID NO: 253004 - DNA, 1028 bp, Homo Sapiens
  misc_feature (968)..(968): n is a, c, g, or t
ggcctgggtggcgaattcggcacgagggatgaaaggagcaactaccaacatctgctacaatgtactggatcgaaatgtccatgagaaaaagcttggagataaagttgctttttactgggagggcaatgagccaggggagaccactcagatcacataccatcagcttctggtccaagtgtgtcagttcagcaatgttctccgaaaacagggcattcagaagggggaccgagtggccatctacatgcctatgatcccagagcttgtggtggccatgctggcatgtgcccgcattggggctttgcactccattgtgtttgcaggcttctcttcagagtctctatgtgaacggatcttggattccagctgcagtcttctcatcactacagatgccttctacaggggggaaaagcttgtgaacctgaaggagctggctgacgaggccctgcagaagtgtcaggagaagggtttcccagtaagatgctgcattgtggtcaagcacctggggcgggcagagctcggcatgggtgactccaccagccagtcccccccaattaagaggtcatgcccagatgtgcagatctcatggaaccaagggattgacttgtggtggcatgagctcatgcaagaagcaggggatgagtgtgagcccgagtggtgtgatgccgaagacccactcttcatcctgtacaccagtggctccacaggcaaacccaagggtgtggttcacacagttgggggctacatgctctatgtagccacaaccccttcaagtatgtgtttgacttccatgcagaggatgtgttctggtgcacggcagacatgggttgggatcacgggtcattcctacgtcacctatgggcccactggccaatggtgccaaccagtgttttttgttttgagggggattccccacataatccgggacgttgaaacgccctgttgggagccattggttggacaaaattacnaaggttgaaccaaagttcttaacacaagcacccccacaagcccatccgttttgtgggccc

SEQ ID NO: 253005 - DNA, 1035 bp, Homo Sapiens
  misc_feature (247)..(247): n is a, c, g, or t
aacgacggctactagcaagattcaaagataaaactcctgcccctcttcaacacctggacaccttgttagatggaacctacaagcaggtaattgctctagcagatgcagtggaggaaaaccaaggcaatctgttccagtcattcaccaggctgaagagtgccacccatttggtgattctgctgatcgcgctgtggcagaagcttagtgctgaccaggttgctattctggaagcggcatttctgcctancaagaagacactcaagaattgggctgggaagaaacggtggatgccgccatttcccacctgttgaagacttgcctgtcgaagagttctaaggagcaggctttgaacctcaacagccagctgaacatacccaaagacacaagccaactgaagaaacatatcaccttgctctgcgatagattatccaaaggtggccgtctctgcctaagtaccgatgcagcagccccacagaccatggtcatgccaggtggttgtactacaatcccagagtcagacctagaagaaagatcagtagaacaagactctacagaactgtttaccaaccacagacatctcactgcagagacacccaggcctgaagtttcacccctccaaggagtctcggaataattcaagtagagttgtttggttgagaggaacatccccatctcaaggccgaacctgtgtgaacctcatgccaagcacagatatagggctggcgcaggtgcttcctaaagctcaccttcctggagatgacatgcatagaaagaggggttgggactttttacttcactaggagaacttgtaacaccatggggaagtcagctgaaacttgtcttgttttgccaggaaaggaagtagttgcctttggtcatccatctgctaatagtcacagaatacagtgaaatgacatagttttgggttagattttataatgcaaagattcagatccaaaataatttcataccccattttttcacagaattcttatatagtaaatgtatcaagtttaaataaagcatctcattgtc

SEQ ID NO: 253006 - DNA, 604 bp, Homo Sapiens
  misc_feature (565)..(565): n is a, c, g, or t
tgaagtttatgaagaaggagcagcatgtaaagatggaagactctgggctggagatcagatcttagaggtgaatggaattgacttgagaaaggccacacatgatgaagcaatcaatgtcctgagacagacgccacagagagtgcgcctgacactctacagagatgaggccccatacaaagaggaggaagtgtgtgacaccctcactattgagctgcagaagaagccgggggcctaggattaagtattgttggtgatgccgatggaagactgatgcagggagaccagatattaatggtgaatggggaagacgttcgtaatgccacccaaggcggttgccgctttgctaaagtgttccctaggcacagtaaccttggaagttggaagaatcaaagctggtccattccattcagagaggaggccatctcaaagcagccaggtgagtgaaggcagcctgtcatctttcacttttccactctctggatccagtacatctgagtcactggaaagtagctcaaagaagaatgcattggcatctgaaatacagggattaagaacagtcgtgaanaaggccctactgactcactgggtcagcatcgctggaggg

SEQ ID NO: 253007 - DNA, 853 bp, Homo Sapiens
tgaagtttatgaagaaggagcagcatgtaaagatggaagactctgggctggagatcagatcttagaggtgaatggaattgacttgagaaaggccacacatgatgaagcaatcaatgtcctgagacagacgccacagagagtgcgcctgacactctacagagatgaggccccatacaaagaggaggaagtgtgtgacaccctcactattgagctgcagaagaagccgggaaaaggcctaggattaagtattgttggtgaaacgatactggagtatttgtgtcagacattgtcaaaggaggaattgcagatgccgatggaagactgatgcagggagaccagatattaatggtgaatggggaagacgttcgtaatgccacccaagaagcggttgccgctttgctaaagtgttccctaggcacagtaaccttggaagttggaagaatcaaagctggtccattccattcagagaggaggccatctcaaagcagccaggtgagtgaaggcagcctgtcatctttcacttttccactctctggatccagtacatctgagtcactggaaagtagctcaaagaagaatgcattggcatctgaaatacagggattaagaacagtcgaaatgaaaaagggccctactgactcactgggaatcagcaccgctggaggagtaggcagcccacttggtgatgagcctacatttattgcaatgatgcacccaactggagttgcagcacagacccaaaaactcagagctggggataggattgtcaccatctgtggcacatccactgagggcatgactcacacccaagcagttaacctactgaaaaatgcatctggctccattgaaatgc

SEQ ID NO: 253008 - DNA, 386 bp, Homo Sapiens
gtggagtcatcataaagagcttaacagagcatggggtagcagccacggatggacgactcaaagtcggagatcagatactggctgtagatgatgaaattgttgttggttaccctattgaaaagtttattagccttctgaagacagcaaagatgacagtaaaacttaccatccatgctgagaatccagattcccaggctgttccttcagcagctggtgcagccagtggagaaaagtccatccgaaatacaagcagatcatcaacaccagcaatttttgcttctgatcctgcaacctgccccattatccctggctgcgaaacaaccatcgagatttccaaagggcgaacagggctgggcctgagcatcgttgggggttcagacacgctg

SEQ ID NO: 253009 - DNA, 669 bp, Homo Sapiens
gtggagtcatcataaagagcttaacagagcatggggtagcagccacggatggacgactcaaagtcggagatcagatactggctgtagatgatgaaattgttgttggttaccctattgaaaagtttattagccttctgaagacagcaaagatgacagtaaaacttaccatccatgctgagaatccagattcccaggctgttccttcagcagctggtgcagccagtggagaaaaaaagaacagctcccagtctctgatggtcccacagtctggctccccagaaccggagtccatccgaaatacaagcagatcatcaacaccagcaatttttgcttctgatcctgcaacctgccccattatccctggctgcgaaacaaccatcgagatttccaaagggcgaacagggctgggcctgagcatcgttgggggttcagacacgctgctggtgaatggaattgacttgagaaaggccacacatgatgaagcaatcaatgtcctgagacagacgccacagagagtgcgcctgacactctacagagatgaggccccatacaaagaggaggaagtgtgtgacaccctcactattgagctgcagaagaagccggaaaaagcctaggataaagtattgttggtaaagaaacgatactggagtatttgtggtagacattgtc

SEQ ID NO: 253010 - DNA, 605 bp, Homo Sapiens
  misc_feature (549)..(549): n is a, c, g, or t
cacgaggagaggctaagccataatagaaagaatggagaattattgattgaccgtctttattctgtgggctctgattctccaatgggaataccaagggatggttttccatactggaacccaaaggtaaagacactcaaggacagacatttttggcagagcatagatgaaaatggcaagttccctggctttccttctgctcaactttcatgtctccctcctcttggtccagctgctcactccttgctcagctcagttttctgtgcttggaccctctgggcccatcctggccatggtggggtgaagacgctgatctgcccttgtaacctgttcccgaccatgagtgcagagaccaaggagctgaagtgggtaagttccagcctaaggcaggtggtgaacgtgtatgcagatggaaaggaagtggaagacaagcagagtggcaccgatccagggagaacttctattctgcgggatggcatcactgcagggaaggctgctctccgaatacacaacgtcacagcctctgacagtggaaagtacttgtgttatttncaagatggtgacttctatgaaatgggttatgaggatggagggatccctggagtgca

SEQ ID NO: 253011 - DNA, 627 bp, Homo Sapiens
cgcgacccaggccgagaagggaactgatgatgcaggatacacccccaccagagctgcctctcatgatcacagatgctgctactgcatacaggcccactccatctgcaacccagctccaccagggctcgtagaagtcaccatcttggaaataacacaagtactttccactgtcagaggctgtgacgttgtgtattcggagagcagccttccctgcagtgatgccatcccgcagaatcgaagttctccctcgatacggtgcactctgcctgtcttccacttcctttccatctgcatacacgttcaccacctgccttaggctggaacttacccacttcagctccatggtctctgcactcatggtcgggaacaggtgacagggcagatcagcgtcttcacccaccatggccaggatgggcccagagggtccaagcacagaaaactgagctctgccaaaaatgtctgtccttgagtgtctttacctttgggttccagtatggaaaaccatcccttggtattcccattggagaatcagagcccacagaataaagacggtcaatcaataattctccattctttctattatggcttagcctctcatccggaagaaaggaaaaagagaaagcaaat

SEQ ID NO: 253012 - DNA, 1296 bp, Homo Sapiens
  misc_feature (442)..(442): n is a, c, g, or t
ggaggtgtctgcttctgctgtcttgggctttttcgaggccttcatggggttttcatcatatgttggagttcccaggtccatctcagcttcatgctcaaggctggcatcatctcctgggctttcccaagtaggaggatcccactgagtctgccttgtgatcacatggtagtaataaatcttcccttctggatctcgagctgtcttccagttgggaggtaagacaatggtttttggtttgggaggagaggggggcggcagatccaagagattatttgtcacaaccatttcagatggctgcaagggctgaggctgccctgggtgcaactattgtagtcactgctgcggctggctgtaccaccactccttgtggatgagctgtgaaaatctgttgcccctggatatactgaagacttggctgggcataactctgtacaataggtgnagttgtctgtgaataaggtgatgtcacaccatagactgttggacatgtctgtccttgataatatatggttgcttgagactgtgcaggagagtactgctgctgtacactgacagactgttgggaatcccaaacactataattctgtccctgaactgggccgggggccggcactggcaagacagcaacgctggagtcttggtgtactacaccatcactctgggccacatactgggaactggaaacttccacaggagctgccacatgtggcaccactggtactggtggaggggcagaaaggggttctgtagaatgtcccaccaagggctgagcatgatcataaggagcaggagaacacactgggtccatgctgggtgtgggcaggagcacctttccagcattagggttgctgggatccacataggcctgcatgggataacctggtgggtaaccagcaaagggatgatgcggggcattataaccaagagagtcatagggcagtggtgatgtcattcccaggttctgcatctgttgctgttgtttctgagcctcccgttgagccacctcttgctcaaacaacttccggcgttcctctgtagaaagtttattgcggtctttaattcgtactttctttttagaagttggtgtatcatatctgtcatctggcctttttgttccccgctcataggcagaagagggtggtgagagggagcttcttcgtttccttttctctttattttgagtttgcttgtctgggtctctctctcttgacctattaggagtcttcggggcaggtgtttgatctctgaagccaacagcatcccttcctcgttcagttgttgtgttttccttttcag

SEQ ID NO: 253013 - DNA, 1214 bp, Homo Sapiens
  misc_feature (959)..(1000): n is a, c, g, or t
aaagagcgaggcctgggtggcgaattcggcacgaggcttacctcccaactggaagacagctcgagatccagaagggaagatttattactaccatgtgatcacaaggcagactcagtgggatcctcctacttgggaaagcccaggagatgatgccagccttgagcatgaagctgagatggacctgggaactccaacatatgatgaaaaccccatgaaggcctcgaaaaagcccaagacagcagaagcagacacctccagtgaactagcaaagaaaagcaaagaagtattcagaaaagagatgtcccagttcatcgtccagtgcctgaacccttaccggaaacctgactgcaaagtgggaagaattaccacaactgaagactttaaacatctggctcgcaagctgatcacggtgttatgaataaggagctgaagtactgtaagaatcctgaggacctggagtgcaatgagaatgtgaaacacaaaaccaaggagtacattaagaagtacatgcagaagtttggggctgtttacaaacccaaagaggacactgaattagagtgactgttgggccagggtgggaggatgggtggtcaggtaagacagactctagggagaggaaatcctgtgggcctttctgtcccacccctgtcagcactgtgctactgatgatacatcaccctggggaattcaaccctgcagatgtcaactgaaggccacaaaaatgaactccatctacaagtgattacctagttgtgagctgttggcatgtggttagaagccatcagaggtgcaagggcttaaaaaagaccctggccagacctgactccactcttaaacctgggtcttctccttggcggtgctgtcagcgcacagacccatgcgcatccccacccacaaccctttaccctggatgatctggaattatattttaatggatatgggaatatattgaaaataannnnnnnnnnnnnnnnnnnnnnnnnnnnnnnnnnnnnnnnnnagcctctacatgctaggatcacaggaagactttgtaaggacagtttaagttctcctgcaaggtttaatttgttatcatgtaaatattccaaagcaggctgccttgtggttttggccagccttgtgctatgttgataagattgatttactgcttaaaatcactttactttatccaatttttactgaactttttatgtaaaaaaataaaatcaatt

SEQ ID NO: 253014 - DNA, 965 bp, Homo Sapiens
aagagcgaggcctgggtggcgaattcggcacgaggcttacctcccactggaagacagctcgagatccagaagggaagatttattactaccatgtgatcacaaggcagactcagtgggatcctcctacttgggaaagcccaggagatgatgccagccttgagcatgaagctgagatggacctgggaactccaacatatgatgaaaaccccatgaaggcctcgaaaaagcccaagacagcagaagcagacacctccagtgaactagcaaagaaaagcaaagaagtattcagaaaagagatgtcccagttcatcgtccagtgcctgaacccttaccggaaacctgactgcaaagtgggaagaattaccacaactgaagactttaaacatctggctcgcaagctgatcacggtgttatgaataaggagctgaagtactgtaagaatcctgaggacctggagtgcaatgagaatgtgaaacacaaaaccaaggagtacattaagaagtacatgcagaagtttggggctgtttacaaacccaaagaggacactgaattagagtgactgttgggccagggtgggaggatgggtggtcaggtaagacagactctagggagaggaaatcctgtgggcctttctgtcccacccctgtcagcactgtgctactgatgatacatcaccctggggaattcaaccctgcagatgtcaactgaaggccacaaaaatgaactccatctacaagtgattacctagttgtgagctgttggcatgtggttagaagccatcagaggtgcaagggcttagaaaagaccctggccagacctgactccactcttaaacctgggctcttctccttggcggtgctgtcagcgcacagacccatgcgcatccccaccccacaaccccttacctggagaactggaataaatttttaagggatatgtgaatatattggaaaatattgtttttt

SEQ ID NO: 253015 - DNA, 1206 bp, Homo Sapiens
  misc_feature (15)..(15): n is a, c, g, or t
  misc_feature (766)..(766): n is a, c, g, or t
ccctagaatcctggnaatctgaataataaatgccatcacattgtactaatacatacttcatctccacctagtgcactatgaattactacgaggaagaatctgtgtgcctatcttcctgtcttcagtgatgatatactgaaagaatggtgtaggagtagaaatattctatttaccagtgctaactctttttcacaaaaccaggcagagatctgctcatttttactctgtaaacttggaaaagttaatttattcaatctctattttgtcctaactagactgatcatcttattactaagatgaaggaatctattgcaagttacacgttactatcatcccctggtatgaaagagcgattttgaacctgaacatataaaagcattcaagatagtgtctggcacagtagaacagggattaacaagacactggacttgatcctcaaattatttaagccacagaagggattcagactctggccttttgattgaccaccttttaagattgcttgaaaagacaacgcccttcctattagcacagctgaagccaatccagaactaaacatcagcacacaaaaaataccaggatagatggaatcaaaagactctgaagccaaaaggaggctagggagagcaactgaacttagcaagctgaggacttcagtgtccatcatccgatcctgccctgtaacaacaggtctatatgatagagatattccatctgagctggaggccattatccttagcaaactaacacagaacaggaaaccaanatacatgttctcatttagaagtaggagcttaaatgatgagaactcaaggacacaaagaaaggaacaacagacactggggcctacttgagggtggagggtgggaggagggagaagagcagggaaaataactactgggtactaggcttagcaccttgggtgacaaaataatctgtacaacaaaaccacttgacatgagtttacctatataacaacctgcacatgtaccccagaacctaaaagttaaaaaaataaaagggatagtctatctgatgcttaaattgatctttaataaccttctgcatcccaccaccccaccaaaaccacaagagaaatatctcaatattctgtgggcttaaaaccacctacactgccccttgggttagagaacaggattccgtggtcctctttgaaaaatatacattaaagaaaatgttaattgc

SEQ ID NO: 253016 - DNA, 1201 bp, Homo Sapiens
gtgcacccaggaaatgtaaatgcaaccatcactgcttcttgtgcaggtgtgtgctttaacaatcagggctgcttttggtatcaagagtatgagctattaagagtttctaaaaatactgacctaactagtcagttgcctcccaccttaatatactattcaggcaagtcttcggaaaagtaatactactgtattccctagtcccaaaataaggtaggcatgaatatattcaaccttctttgcacatacaccaaggaagaatttaaatttctgcccttgagtagttttgtgttaggcaggaggaaaaacatattcaattttgaggtaggtaatcaacaggaatgagaaaaatacaagacagtctaagatctaacctttgcctacctttctaggcttatgtcttaatactcccgaagtggcacaagctaggttatttctagttcttaacagactactgtgcttttgcacaatgctctcaagttcagcttaagcagtgctcctctggaagttcacaccctaactgaactgtcactcttctttattttcttctagaatcctgggattatctgaataataaatgccatcacattgtacttaatacatacttcatctctttcacctagtgcactatgaattactacgaggaagaatctgtgtgcctatcttcctgtcttcagtgatgatatactgaaagaatggtgtagaagtagaaatattctatttaccagtgctaactctttttcacaaaaccaggcagagatctgctcatttttactctgtaaacttggaaaagttaatttattcaatctctattttgtcctaactagactgatcatcttattactaagatgaaggaatctattgcaagttacacgttactatcatcccctggtatgaaagagcgattttgaacctgaacatataaaagcattcaagatagtgtctggcacagtagaacagggattaacaagacactggacttgatcctcaaattatttaagccacagaagggattcagactctggccttttgattgaccaccttttaagattgcttgaaaagacaacgcccttcctattagcacagctgaagccaatccagaactaaacatcagcacacaaaaaataccaggatagatggaatcaaaagactctgaagccaaaaggaggctagggagagcaactgaacttagcaagctgaggac

SEQ ID NO: 253017 - DNA, 622 bp, Homo Sapiens
aacaggtcaggcccagatacaagcgaccgcgtagttgggagaagagcaatgctggaacagtgggtccctgtcttccacatttcctaaagtgggagggaggcggaggagtgggatagcttttgattgagggcattgacatttgtctaaggaattaaacaactgggcagctagatgacctcagtaaccagtctcgtctcagccccagccttttgatgctcatcatcttgtctggttttataaacagggagatgaatccaccttcatcggacttggcaggacagaggcatgttcatctgtgtaatcaggtttaatagcagtggcgcttgtgtagtttgcagtcctggtgcccagggtggaagccttctttgctcctttgtgttcctggggtgtgatggcatgcctggccctgcgccttccgtcctccaggctcccaagctgagggtcaggggccctgtcctgggcaggggccgtggaaggagcccttggtcaggagcttggagtagcaatgtccggttttctgaatgagaagcttcttgcttcgggttagataccagttaatttacccattggttttaataactaatacaatcttcttgagcacctactgtgtgtcagggcttgg

SEQ ID NO: 253018 - DNA, 687 bp, Homo Sapiens
  misc_feature (677)..(677): n is a, c, g, or t
tgacacacatagggtgctcagaaagatgtattagttaataaaaaacaatgggtaaattaactggtatctaacccgaagcaagaaaacactggcacactatttccagccaaacgaggctcatttcccgagtgttgttttgcttctcattcagaaaacccgacattgctactccaagctcctgaccaagggctccttccacggcccctgcccaggacagggcccctgaccctcagcttgggagcctggaggacggaaggcgcagggccaggcatgccatcacaccccaggaacacaaaggagcaaagaaggcttccaccctgggcaccaggactgcaaactatttcacaagcgccactgctattaaacctgattacacagatgaacatgcctctgtcctgccaagtccgatgaaggtggattcatctccctgtttataaaaccagacaagatgatgagcatcaaaaggctggggctgagacgagactggttactgaggtcatctagctgcccagttgtttaattccttagacaaatgtcaatgccctcaatcaaaagctatcccactcctccgcctccctcccactttaggaaatgtggaagacagggacccactgttccagcattgctcttctcccaactacgcggtcgcttgtatctgggcctgacctgtttggaantaaacctcag

SEQ ID NO: 253019 - DNA, 636 bp, Homo Sapiens
  misc_feature (66)..(66): n is a, c, g, or t
  misc_feature (92)..(92): n is a, c, g, or t
cagggcgaaaagacgtcgaagcttgaagtgtcaaagaatgtttagaatatgtgccttctgtgtgtnccgccttgtaagatctctgccaaagnatagttaaatacccagctttcaaacatcactcggtagcagaaagaatacatgccttctgtcacccaggccatcatgctttccgtgagggaattcaaggcatggccctgcagggttttgatgaaagtgtcgtttatgttttcagtggtatttccatccatcgggtcaatgcttctgtgcccaaatgccttcgcagaagtagcaaagtgaaattttttccaatcaaaatattttccgtggcacaacaccttatggtatgacaagggatttgtgatgaaatggacatattttcccattagtttgcaggtaaaaacatgaccatgtttcctttgatttgctctgaggaactcaagaggattggcaccaaattgcagagcacagcccaggtatggaattaatccattctctagaggtggttcacccgtttgccttctcctaattccaagaataagccatagacaacagcatgctgctatagcaatcccccaaatcaaagatgtggtcatcattttgcaaatctaggccaaaatctctgaggaagaaaat

SEQ ID NO: 253020 - DNA, 655 bp, Homo Sapiens
  misc_feature (35)..(35): n is a, c, g, or t
  misc_feature (44)..(44): n is a, c, g, or t
  misc_feature (47)..(47): n is a, c, g, or t
  misc_feature (49)..(49): n is a, c, g, or t
  misc_feature (53)..(53): n is a, c, g, or t
  misc_feature (218)..(218): n is a, c, g, or t
gcagtttctccggggcattgtgcgcagtcctgacnatgtgaatnggnanggcnttagaatatgtgctttctgtgtgtccggccttgtaagatctctgccaaagatagttaaatacccagctttcaaacatcactcggtagcagaaagaatacatcccttctgtcacccaggcagcggtctttgagttagagaagactgaaggtctcatgatacgttgnaggttaaccatcatgcttccgtgcagtggtatttccatccatcgggtcaatgcttctgtgcccaaatgccttcgcagaagtagcaaagtgaaattccaatcaaaatattttccgtggcacaacaccttatggtatgacaagggatttgtgatgaaatggacatattttcccattagtttgcaggtaaaaacatgaccatgtttcctttgatttgctctgaggaactcaagaggattggcaccaaattgcagagcacagcccaggtatggaattaatccattctctagaggtggttcacccgtttgccttctcctaattccaagaataagccatagacaacagcatgctgctatagcaatcccccaaatcaaagatgtggtcatcattttgcaaatctaggccaaaatctctgaggaagaaaatctctgattagaaag

SEQ ID NO: 253021 - DNA, 625 bp, Homo Sapiens
  misc_feature (216)..(239): n is a, c, g, or t
gaggactgctcgcgggcgggcggcggtcgggcgcgggtttgatttctgagccctataaaagcccatcctccgatggctgtgacaatgtggtcgtaaacccgtccggggccggccaatttgcatatttggaatgcgccgctataaacccggctggggttttgcagcgatttcttagatgtaaaaatgagatctcaatagcagcgggctgggcacatnnnnnnnnnnnnnnnnnnnnnnnngcccggagctggtttccgtctctcggctcggggctggaactccggcccaacctaggcgcgcagccgccacgagatggcgcacttccgatcaatgtcaaagccgccggggagccgggaaccccagcatgattcttggcctttgttcgcttctgatactaagagcagcacggtacattatttcacttgtcccgctccccttcataacagaggggactcaccctcaagaagtgattggtatggtaatttaaagcaacgcgcattcgctaggcctcgcgagcgtcgccgcgcggagaagccagctgtcccttggcagtgatttcggaaatgtgtcaaggcaattccggtgacacgaagcaccagacactggagctggagggggttctgtt

SEQ ID NO: 253022 - DNA, 1159 bp, Homo Sapiens
ggggtccccaacatggcggctccccaagacgtccacgtccggatctgtaaccaagagattgtcaaatttgacctggaggtgaaggcgcttattcaggatatccgtgattgttcaggacccttaagtgctcttactgaactgaatactaaagtaaaagagaaatttcaacagttgcgtcacagaatacaggacctggagcagttggctaaagagcaagacaaagaatcagagaaacaacttctactccaggaagtggagaatcacaaaaagcagatgctcagcaatcaggcctcatggaggaaagctaatctcacctgcaaaattgcaatcgacaatctagagaaagcagaacttcttcagggaggagatctcttaaggcaaaggccaccaaagagagcctggcccagacatccagtaccatcactgagagcctcatggggatcagcaggatgatggcccagcaggtccagcagagcgaggaggccatgcagtctctagtcacttcttcacgaacgatcctggatgcatgaagaatttaagtccatgtcgggcaccatccagctgggccggaagcttatcacaaaatacaatcgccgggagctgacggacgcttctcatcttccttgcgctagccctgtttcttgctacggtcctctatattgtgaaaaagcggctctttccatttttgtgagatcccaaaggtgccagttctggccctttcagctcctgtttcaggatctgtcctggttcctgagctctaggctgctaagctgagccacacacccctccgtttgcaccagttgcctgcaggttggatggaacacagtgccccacttttctgcaagtagctggcttgtaaagggtgaacagagccatgggaggaaggtctggcattgggatgccgccctggggacatacgaaccgcctccttccaccattgtgcactatgggaggccgctgctgcgtggagcacttaaagtccagcctccaggaccggatgcccctcctgtctcccgctcccatcgtgcccttaaatgccagatctggtggagggaagagagaagaggtaggaagaaaggtgatgaaaactcctggtcattccttgaataaacttgattttatttaatagaataaaatgtatttgattttgtaagataaa

SEQ ID NO: 253023 - DNA, 428 bp, Homo Sapiens
  misc_feature (393)..(393): n is a, c, g, or t
  misc_feature (405)..(405): n is a, c, g, or t
cgaatactgtaaccaagagattgtcaaatttgacctggaggtgaaggcgcttattcaggatatccgtgattgttcaggacccttaagtgctcttactgaactgaatactaaagtaaaagagaaatttcaacagttgcgtcacagaatacaggacctgggagcagttggctaaagagcaagacaaagaatcagagaaacaacttctactccagggaagtggagaatcacaaaaaggcagatgcttcagcaattcaggccttcatgggagggaaagcttaattcttcacctggcaaaattggcaattcggacaatcttaggaggaaaggcaggaactttctttcaggggagggaggttcttttttaaggggccaaagggaaaacccacccaaagnggagcctggggncccaggacttcccgttacccttc

SEQ ID NO: 253024 - DNA, 1928 bp, Homo Sapiens
ccatggcgatgagcctcctgttcatcatcctgcttcgcttcctggctggattatggtctgggtgatgatcatcatggtgattctggtgctgggctacggaatatttcactgctacatggagtactcccgactgcgtggtgaggccggctctgatgtctctttggtggacctcggctttcagacggatttccgggtgtacctgcacttacggcagacctggttggcctttatgatcattctgagtatccttgaagtcattatcatcttgctgctcatctttctccggaagagaattctcatcgcgattgcactcatcaaagaagccagcagggctgtgggatacgtcatgtgctccttgctctacccactggtcaccttcttcttgctgtgcctctgcatcgcctactgggccagcactgctgtcttcctgtccacttccaacgaagcggtctataagatctttgatgacagcccctgcccatttactgcgaaaacctgcaacccagagaccttcccctcctccaatgagtcccgccaatgccccaatgcccgttgccagttcgccttctacggtggtgagtcgggctaccaccgggccctgctgggcctgcagatcttcaatgccttcatggttcttctggttggccaacttcgtgctggcgccgggccaggtcacgctggccggggcctttgcctcctactactgggccctgcgcaagccggacgacctgccggccttcccgctcttctctgcctttggccgggcgctcaggtaccacacaggctccctggcctttggcgcgctcatcctggccattgtgcagatcatccgtgtgatactcgagtacctggatcagcggctgaaagctgcagagaacaagtttgccaagtgcctcatgacctgtctcaaatgctgcttctggtgcctggagaagttcatcaaattccttaataggaatgcctacatcatgattgccatctacggcaccaatttctgcacctcggccaggaatgccttcttcctgctcatgagaaacatcatcagagtggctgtcctggataaagttactgacttcctcttcctgttgggcaaacttctgatcgttggtagtgtggggatcctggctttcttcttcttcacccaccgtatcaggatcgtgcaggatacagcaccacccctcaattattactgggttcctatactgacggtgatcgttggctcctacttgattgcacacggtttcttcagcgtctatggcatgtgtgtggacacgctgttcctctgcttcttggaggacctggagaggaatgacggctcggcccagagctttaccttcatgtcttccaccctcaagaaactcttgaacaagaccaacaagaaggcagcggagtcctgaaggccccgtgctccccacctctcaaggagtctcatgccgcagggtgctcagtagctgggtctgttcccccagccccttgggctcacctgaagtcctatcactgccgctctgcccctccccatgagccagatcccaccagtttctggacgtggagagtctggggcatctccttcttatgccaaggggcgcttggagttttcatggctgcccctccagactgcgagaaacaagtaaaaacccattggggcctcttgatgtctgggatggcacgtggcccgacctccacaagctccctcatgcttcctgtcccccgcttacacgacaacgggccagaccacgggaaggacggtgtttgtgtctgagggagctgctggccacagtgaacacccacgtttattcctgcctgctccggccaggactgaaccccttctccacacctgaacagttggctcaagggccaccagaagcatttctttattattattattttttaacctggacatgcattaaagggtctattagctttctttc

SEQ ID NO: 253025 - DNA, 526 bp, Homo Sapiens
actggccatttgttagtggtttttttcttcttttaagaactgctgagacatccataaacattttcaaaatgcagggtatgtttttcagtgttaaggcaactgttctgatgtgtttttcctttgctctctatcaccaaatactgtacatataaatagtaagactgggctttgtgttgtccattgttaatcctaaatgcaacaaaacacatggagactttgaaaatccttcagaataatgctatagttaagattttgctaaagcaagtgttttttctaactccttgagctgcatattgccttgagtaatcatcatccggattgtatccatgattttgttctcacctcttcggtggcacttttgtttcttctgaattcttctcttgcccaatctttcaggtatttgcgatcagaatcatttggaacttgccgaattgtttgcaaaatccttctgtagaggagaagaacttgttgccttcttacgaactgctttaacgttagcgtcgctgggggtaagcgggaagcagcc

SEQ ID NO: 253026 - DNA, 750 bp, Homo Sapiens
  misc_feature (568)..(568): n is a, c, g, or t
  misc_feature (595)..(595): n is a, c, g, or t
  misc_feature (597)..(666): n is a, c, g, or t
ggggcgcgctgaggctccggcggacctctggtggacatggctgcttcccgcttacccccagcgacgctaacgttaaagcagttcgtaagaaggcaacaagttcttctcctctacagaaggattttgcaaacaattcggcaagttccaaatgattctgatcgcaaatacctgaaagattgggcaagagaagaattcagaagaaacaaaagtgccaccgaagaggatacaatccggatgatgattactcaaggcaatatgcagctcaaggagttagaaaaaacacttgctttagcaaaatcttaactatagcattattctgaaggattttcaaagtctccatgtgttttgttgcatttaggattaacaatggacaacacaaagcccagtcttactatttatatgtacagtatttggtgatagagagcaaaggaaaaacacatcagaacagttgccttaacactgaaaaacataccctgcattttgaaaatgtttatggatgtctcagcagttcttaaaagaagaaaaaaaccactaacaaatggccagtagatgctggacacatcatttngggaagtgtaaatcgaaactactatgnannnnnnnnnnnnnnnnnnnnnnnnnnnnnnnnnnnnnnnnnnnnnnnnnnnnnnnnnnnnnnnnnnnnnngaggtccagggagttcaagacccaccctggcccagcatgggggaaaacctcctcctcctactaaaaaatacaaaaatttaccct

SEQ ID NO: 253027 - DNA, 1264 bp, Homo Sapiens
atgtcgggtttatgctgaggacccctacaagtctggtggtttaccatctattgggagattgtctcagtaccaagaaccgttacatctacctggtgtccgagtggacagtggcatccaaccaggaagtgatattagcatttattatgatcctatgatttcaaaactaatcacatatggctctgatagaactgaggcactgaagagaatggcagatgcactggataactatgttattcgaggtgttacacataatattgcattacttcgagaggtgataatcaactcacgctttgtaaaaggagacatcagcactaaatttctctccgatgtgtatcctgatggcttcaaaggacacatgctaaccaagagtgagaagaaccagttattggcaatagcatcatcattgtttgtggcattccagttaagagcacaacattttcaagaaaattcaagaatgcctgttattaaaccagacatagccaactgggagctctcagtaaaattgcatgataaagttcataccgtagtagcatcaaacaatgggtcagtgttctcggtggaagttgatgggtcgaaactaaatgtgaccagcacgtggaacctggcttcgcccttattgtctgtcagcgttgatggcactcagaggactgtccagtgtctttctcgagaagcaggtggaaacatgagcattcagtttcttggtacagtgtacaaggtgaatatcttaaccagacttgccgcagaattgaacaaatttatgctggaaaaagtgactgaggacacaagcagtgttctgcgttccccgatgcccggagtggtggtggccgtctctgtcaagcctggagacgcggtagcagaaggtcaagaaatttgtgtgattgaagccatgaaaatgcagaatagtatgacagctgggaaaactggcacggtgaaatctgtgcactgtcaagctggagacacagttggagaaggggatcctgctcgtggagctggaatgaaggatttataacctttcagtcatcacccaatttaattagccatttgcatgatgctttcacacacaattgattcaagcattatacaggaacacccctgtgcagctacgtttacgtcgtcatttattccacagagtcaagaccaatattctgccaaaaaatcaccaatggaaattttcattgatataaatacttgtacatatgatttgtacttctgctgtgagattccctagtgtcaaaattaaatcaataaaactgagcatttgtct

SEQ ID NO: 253028 - DNA, 736 bp, Homo Sapiens
cccaggcgacaagagacggcaccctccagaataaagcatttctgcggcaagtctggttaggatattcaccttgtacactgtacaagaaactgaatgctcatgtttccactgcttctcgagaaagacactgaacagtcctgtgagtgcaatcaacgctgacagacaataaggccaaagcaaggttccacgtgctggtcacatttagtttcgacccatcaacttccaccgagaacactgacccattgtttgatgctactacggtatgaactttatcatgcaattttactgagagctcccagttgactatgtctggtttaataacaggcattcttgaattctcttgaaaatgttgtgctcttaactgcaatgccacaaacaatgatgatgctattgccaataactggttcttctcactcttggttagcatgtgtcctttgaagccatcaggatacacatcggagagaaatttagtgctgatgtctcctttcacaaagcgtgagttgattatcacctctcgaagtaatgcaatattatgtgtaacacctcgaataacatagttatccgagtgcctagttttgaaatcataggatcataataaatgctaatatcacttcctggttggatgccactgtccactcggacaccaggtagatgtaacggttcttggtactgagacaatctcacaatagatggtaaaccaaaagacttgtaggggtcctcagcataaacccgacat

SEQ ID NO: 253029 - DNA, 483 bp, Homo Sapiens
accccttccctttttaaccccaggcaaccgagagtctgtctgaaaagatccgcctattttggccattccaggtagcaaaaggccaaaaaatttgtgtgattgaagccatgaaaatccaaaatagtatgacagctgggaaaactggcacggtgaaatttgtgccctgtcaagctggaaacccagttggaaaaggggatccgctcctggagctggaataaaggatttataccctttcagtcatcacccaatttaattaaccatttgcaagaagctttcacacccaattgattcaagcattatacaggaacacccctgggcagctacgtttacgtcggcatttattccccaaagtcaaaaccaatagtgtgccaaaaaatccccaagggaaattttcattgatataaaaacttgcacatatgatttggacttcggctgtgaaattccctagtgtcaaaattaaatcaataaacctgggcctttggt

SEQ ID NO: 253030 - DNA, 482 bp, Homo Sapiens
  misc_feature (115)..(115): n is a, c, g, or t
aatattccacccttgtacactgtaacccaagaaaactgaaatgcctccaggtttccaacctgactcctcgaaaaaagaacactggaacagtccctcctgagtgcccatcaaacgnctgaacagacaaataaaggcgaaagcccaggttcccacgtgcctggtcacatttagtttcgacccatcaacttccaccgagaacactgacccattgtttgatgctactacggtatgaactttatcatgcaattttactgagagctcccagttggctatgtctggtttaataacaggcattcttgaattttcttgaaaatgttgtgctcttaactggaatgccacaaacaatgatgatgctattgccaataactggttcttctcactcttggttagcatgtgtcctttgaagccatcaggatacacatcggagagaaatttagtgctgatgtctccttttacaaagcgtgagttgattatcacctctc

SEQ ID NO: 253031 - DNA, 561 bp, Homo Sapiens
  misc_feature (71)..(87): n is a, c, g, or t
caaataagacaaaaagggtaaatagttcaaatgtttaacaaataaagtttagtattggtctttttaaaccnnnnnnnnnnnnnnnnngagagagagattaaaaacagtgcattacaaaaacaaaaatcaactttccttaagtggcacttctgaaagttgaactgacactaccagaagaaatttaggccagttaagacagggatgttcttactcaattggtcattaaaaacatccacttgtttgtaatacgtatttataattactttttgatgattgaaaaatagaacaaggttttactaggtttacttatgacaatgactagacaaccagagatccaactggcttagccctacttatccaaaagtacatttccaataagaatatacttcaaatgaatttacaatgtttctaccccattcgaattgtttgtggttctgcatttgctatatttttagtttcttccagcaaagggtagtatgaaaaactgattttgaaatcatgttaaaatgaaatatgttttaatttgcattagcagttggctataaaaagattatactttga

SEQ ID NO: 253032 - DNA, 1841 bp, Homo Sapiens
  misc_feature (1714)..(1714): n is a, c, g, or t
  misc_feature (1726)..(1759): n is a, c, g, or t
  misc_feature (1763)..(1763): n is a, c, g, or t
  misc_feature (1776)..(1776): n is a, c, g, or t
  misc_feature (1782)..(1782): n is a, c, g, or t
attcaacaaatatttattgagtgcctaccgtgtgccaggcactgctcaacaaatcaatgaaattattattatcatccttcttatggtcccatttgattgaagaggaaaactgaagtccagagaagttaggtgacttgcccgaggtaacacagcaggtgggtgttggatataagattaacacccaatatatccgatacctgagcccttgctctttccattgtgtgactctgtagaggtcctggggccgtgtgggtacggtgatcggtagcaacaaactggaacagatgccgtccaaggaggatgccattgagcacttcatgaaattatatgaagaaaaaaccgggaacgcttggcactccaaaaatttccacgaagtatcccaaaaagttctaccccctggagattgactatggccaggatgaagaggcagtgaagaagctgacagtaaatcctggcaccaagtccaagctccccaagccagttcaggacctcatcaagatgatctttgatgtggaaagtatgaagaaagccatggtggagtatgagatcgaccttcagaagatgcccttggggaagctgagcaaaaggcagatccaggccgcatactccatcctcagtgaggtccagcaggcggtgtctcagggcagcagcgactctcagatcctggatctctcaaatcgcttttacaccctgatcccccacgactttgggatgaagaagcctccgctcctgaacaatgcagacagtgtgcaggccaaggtggaaatgcttgacaacctgctggacatcgaggtggcctacagtctgctcaggggagggtctgatgatagcagcaaggatcccatcgatgtcaactatgagaagctcaaaactgacattaaggtggttgacagagattctgaagaagccgagatcatcaggaagtatgttaagaacactcatgcaaccacacacaatgcgtatgacttggaagtcatcgatatctttaagatagagcgtgaaggcgaatgccagcgttacaagccctttaagcagcttcataaccgaagattgctgtggcacgggtccaggaccaccaactttgctgggatcctgtcccagggtcttcggatagccccgcctgaagcgcccgtgacaggctacatgtttggtaaagggatctatttcgctgacatggtctccaagagtgccaactactgccatacgtctcagggagacccaataggcttaatcctgttgggagaagttgcccttggaaacatgtatgaactgaagcacgcttcacatatcagcaagttacccaagggcaagcacagtgtcaaaggtttgggcaaaactacccctgatccttcagctaacattagtctggatggtgtagacgttcctcttgggaccgggatttcatctggtgtgaatgacacctctctactatataacgagtacattgtctatgatattgctcaggtaaatctgaagtatctgctgaaactgaaattcaattttaagacctccctgtggtaattgggagaggtagccgagtcacacccggtggctctggtatgaattcacccgaagcgcttctgcaccaactcacctggccgctaagttgctgatgggtagtacctgtactaaaccacctcagaaaggattttacagaaacgtgttaaaggttttctctaacttctcaagtcccttgttttgtgttgtgtctggnggggaggggtgnnnnnnnnnnnnnnnnnnnnnnnnnnnnnnnnnngggnggggtagttattntttggnttgtgggaaaaggggtgggggagagaattttggttggaataaaaataagtttgattgtg

SEQ ID NO: 253033 - DNA, 764 bp, Homo Sapiens
  misc_feature (130)..(184): n is a, c, g, or t
  misc_feature (420)..(471): n is a, c, g, or t
ggcacccgaagcgcttctgcaccaactcacctggccgctaagttgctgatgggtagtacctgtactaaaccacctcagaaaggattttacagaaacgtgttaaaggttttctctaacttctcaagtcccnnnnnnnnnnnnnnnnnnnnnnnnnnnnnnnnnnnnnnnnnnnnnnnnnnnnnnncttgccaggtagataaaactgacatagagaaaaggctggagagagattctgttgcatagactagtcctatggaaaaaaccaagcttcgttagaatgtctgccttactggtttccccagggaaggaaaaatacacttccacccttttttctaagtgttcgtctttagttttgattttggaaagatgttaagcatttatttttagttaaaaataaaaactaatttcatactatttagnnnnnnnnnnnnnnnnnnnnnnnnnnnnnnnnnnnnnnnnnnnnnnnnnnnngcctcttgtggtgaagggtgtgggaagaccaaaggaaggaacgctaacaatttctcatacttagaaacaaaaagagctttccttctccaggaatactgaacatgggagctcttgaaatatgtagtattaaaaggtgcatttgaaattcttgactttcttatgggcacttttgtcttccaaattaaaactctaccacaaatatacttaccccaagggctaatagtaatactcgattaaaaatgcacatgccttctggtactcaggcactcaaagagaattaaagaaatttgtgt

SEQ ID NO: 253034 - DNA, 848 bp, Homo Sapiens
  misc_feature (422)..(422): n is a, c, g, or t
  misc_feature (450)..(504): n is a, c, g, or t
  misc_feature (745)..(749): n is a, c, g, or t
  misc_feature (753)..(754): n is a, c, g, or t
  misc_feature (797)..(797): n is a, c, g, or t
  misc_feature (821)..(821): n is a, c, g, or t
  misc_feature (824)..(824): n is a, c, g, or t
gggcccttggaaacatgtatgaactgaagcacgcttcacatatcagcaagttacccaagggcaagcacagtgtcaaaggtttgggcaaaactacccctgatccttcagctaacattagtctggatggtgtagacgttcctcttgggaccgggatttcatctggtgtgaatgacacctctctactatataacgagtacattgtctatgatattgctcaggtaaatctgaagtatctgctgaaactgaaatttcaattttaagacctccctgtggtaattgggagaggtagccgagtcacacccggtggctctggtatgaattcacccgaagcgcttctgcaccaactcacctggccgctaagttgctgatgggtagtacctgtactaaaccacctcagaaaggattttacagaaacgtgttanaggttttctctaacttctcaagtccctnnnnnnnnnnnnnnnnnnnnnnnnnnnnnnnnnnnnnnnnnnnnnnnnnnnnnnncttgccaggtagataaaactgacatagagaaaaggctggagagagattctgttgcatagactagtcctatggaaaaaccaagcttcgttagaatgtctgccttactggtttccccagggaaggaaaaatacacttccacccctttttttctaagggttcgtcctttagttttgaatttgggaaaagatggtaaagcatttaattttttagtttaaaaataaaaacctaattttcctacttnnnnncggnnggaaaactcacaacaccaaggaatcgagggtcgccccccctcncccgccaacatgaaacgtaatatnttnttcccctggcacgcgcccgcccct

SEQ ID NO: 253035 - DNA, 379 bp, Homo Sapiens
acccacccctcgaaccctgatccccaaactctgctgaaaccagctggggaagtaactgcgctaagtgtgttcccagagctggaatcctgaaagaagctggatttggggttcacagctggaattctagctgagtcaccttatcttggaaaagtagcgttaaacgcaagactgtgggtaccacgtctgcttgaatggtccatgataactcagagagaagacaatgtggtctcaaggagaagaagaggggcccttacctggctgagcaagcccttggggaatgaagtgtggctgctatgagcagcaggcacagaagggcgcacagagactttcatgctggaggcgagagtgcgagcctcagtttgagaagtgtatgtctgcg

SEQ ID NO: 253036 - DNA, 830 bp, Homo Sapiens; identical to SEQ ID NO: 4124
  misc_feature (747)..(747): n is a, c, g, or t
  misc_feature (749)..(749): n is a, c, g, or t
  misc_feature (752)..(752): n is a, c, g, or t
  misc_feature (754)..(754): n is a, c, g, or t
  misc_feature (761)..(765): n is a, c, g, or t
  misc_feature (768)..(772): n is a, c, g, or t

SEQ ID NO: 253037 - DNA, 855 bp, Homo Sapiens
ctccctgtgttggtggaggatgtctgcagcagcatttaaattctgggagggcttggttgtcagcagcagcaggaggaggcagagcacagcatcgtcgggaccagactcgtctcaggccagttgcagccttctcagccaaacgccgaccaaggaaaactcactaccatgagaattgcagtgatttgcttttgcctcctaggcatcacctgtgccataccagttaaacaggctgattctggaagttctgaggaaaagcagctttacaacaaatacccagatgctgtggccacatggctaaaccctgacccatctcagaagcagaatctcctagccccacagaatgctgtgtcctctgaagaaaccaatgactttaaacaagagacccttccaagtaagtccaacgaaagccatgaccacatggatgatatggatgatgaagatgatgacgaccatgtggacagccaggactccattgactcgaacgactctgatgatgtagatgacactgatgattctcaccagtctgatgagtctcaccattctgatgaatctgatgaactggtcactgattttcccacggacctgccagcaaccgaagttttcactccagttgtccccacagtagacacatatgatggccgaagtgatagtgtggtttatggactgaggtcaaaatctaagaagtttcgcagacctgacatccagtaccctgatgctacagacgaggacatcacctcacacatggaaagcgaggagttggatggtgcatacaaggccatcccccgtggccccaggacctgaacggcgccttctgattggggaccgccggtggggaaaggacagtttattgaaacc

SEQ ID NO: 253038 - DNA, 1523 bp, Homo Sapiens
agcagcagcaggaggaggcagagcacagcatcgtcgggaccagactcgtctcaggccagttgcagccttctcagccaaacgccgaccaaggaaaactcactaccatgagaattgcagtgatttgcttttgcctcctaggcatcacctgtgccataccagttaaacaggctgattctggaagttctgaggaaaagcagctttacaacaaatacccagatgctgtggccacatggctaaaccctgacccatctcagaagcagaatctcctagccccacagacccttccaagtaagtccaacgaaagccatgaccacatggatgatatggatgatgaagatgatgatgaccatgtggacagccaggactccattgactcgaacgactctgatgatgtagatgacactgatgattctcaccagtctgatgagtctcaccattctgatgaatctgatgaactggtcactgattttcccacggacctgccagcaaccgaagttttcactccagttgtccccacagtagacacatatgatggccgaggtgatagtgtggtttatggactgaggtcaaaatctaagaagtttcgcagacctgacatccagtaccctgatgctacagacgaggacatcacctcacacatggaaagcgaggagttgaatggtgcatacaaggccatccccgttgcccaggacctgaacgcgccttctgattgggacagccgtgggaaggacagttatgaaacgagtcagctggatgaccagagtgctgaaacccacagccacaagcagtccagattatataagcggaaagccaatgatgagagcaatgagcattccgatgtgattgatagtcaggaactttccaaagtcagccgtgaattccacagccatgaatttcacagccatgaagatatgctggttgtagaccccaaaagtaaggaagaagataaacacctgaaatttcgtatttctcatgaattagatagtgcatcttctgaggtcaattaaaaggagaaaaaatacaatttctcactttgcatttagtcaaaagaaaaaatgctttatagcaaaatgaaagagaacatgaaatgcttctttctcagtttattggttgaatgtgtatctatttgagtctggaaataactaatgtgtttgataattagtttagtttgtggcttcatggaaactccctgtaaactaaaagcttcagggttatgtctatgttcattctatagaagaaatgcaaactatcactgtattttaatatttgttattctctcatgaatagaaatttatgtagaagcaaacaaaatacttttacccacttaaaaagagaatataacattttatgtcactataatcttttgttttttaagttagtgtatattttgttgtgattatctttttgtggtgtgaataaatcttttatcttgaatgtaataagaatttggtggtgtcaattgcttatttgttttcccacggttgtccagcaattaataaaacataacccttttttactgccga

SEQ ID NO: 253039 - DNA, 581 bp, Homo Sapiens
  misc_feature (20)..(20): n is a, c, g, or t
  misc_feature (72)..(72): n is a, c, g, or t
  misc_feature (102)..(102): n is a, c, g, or t
  misc_feature (128)..(128): n is a, c, g, or t
  misc_feature (136)..(136): n is a, c, g, or t
  misc_feature (149)..(149): n is a, c, g, or t
  misc_feature (169)..(169): n is a, c, g, or t
  misc_feature (199)..(199): n is a, c, g, or t
  misc_feature (221)..(221): n is a, c, g, or t
gtgtccctacctgtgggggnaaacaaactggaaagtgaaaaaaaactcggggttgcctgggcaagggtcccngtggggaaaaaaatcaagtgaacccaagtnccatccaagaattccaatccaagaangggtgaanaacctccatccanaactgggtgaagaaatccanccagtgtccatccctaacatccatccagantccgttccgaagtcaaatggantccctggctgtccccaaatggtccatcatcaaccttccatccatcccatatcatcccatgtggtccatggcctttccgttggaccttacttggaagggtctgtggggcctaggagattctgcttctgagatgggtcagggtttagccatgtggccacagcatctgggtatttgttgtaaagctgcttttcctcagaacttccagaatcagcctgtttaactggtatggcacaggtgatgcctaggaggcaaaagcaaatcactgcaattctcatggtagtgagttttccttggtcggcgtttggctgagaaggctgcaactggcctgagacgagtctggtcccgacgatgctgtctctgc

SEQ ID NO: 253040 - DNA, 553 bp, Homo Sapiens
  misc_feature (108)..(227): n is a, c, g, or t
tcactcgggttgcctcggctggagtgcaggacacgatcacggctcactgcagcctggacttcctgggctcaaactcccgagcagttgagaccacaggcgttcaccacnnnnnnnnnnnnnnnnnnnnnnnnnnnnnnnnnnnnnnnnnnnnnnnnnnnnnnnnnnnnnnnnnnnnnnnnnnnnnnnnnnnnnnnnnnnnnnnnnnnnnnnnnnnnnnnnnnnnnnnnttacaggcgtgagccaccgcgcccggcctcaggttctatttctttttagaaataataagactagaaaaattaagggataaataagtctccaattattctgaacccacagcccagaatggctgcccccaagtgaccagagaacagacggacaggaaatgagattagaaacaactagtagctgtgtcgcaaaattgataagagtcctggttctagaaccgcgctgcttggccgcaattcctggctgcaccaatttggtagctgcatgaccttagaaaagatatttaacctctatgcttgtttcctcatctgtaaaaatggcctcgtgc

SEQ ID NO: 253041 - DNA, 463 bp, Homo Sapiens
  misc_feature (244)..(382): n is a, c, g, or t
  misc_feature (420)..(420): n is a, c, g, or t
ataagccactgtgcccggcctcaaggtaaaagctctttatccagactgtaaaccttttggcttccaggtctaaccactctcctagccctttggaacttccgtccctggatgtgctgtgctcttatgcgcttgataaataattactgagcacctggcacacagtattgtgcggggtgctggagacagtgaaggagaccagttggttgccggatgaaaaacacaccatctcatcagccctcgtgcnnnnnnnnnnnnnnnnnnnnnnnnnnnnnnnnnnnnnnnnnnnnnnnnnnnnnnnnnnnnnnnnnnnnnnnnnnnnnnnnnnnnnnnnnnnnnnnnnnnnnnnnnnnnnnnnnnnnnnnnnnnnnnnnnnnnnnnnnnngtattcggttacaatttcaccacaacatatcgaccggnaagcataaagtgtgaaaggctggggtggctaatgagagagcat

SEQ ID NO: 253042 - DNA, 651 bp, Homo Sapiens
gcccattggccaatcaaggacattaagaaaacggttcccaccactagaaattcatctacattgacatccacctaaatatccagaaggtcatccccactttcgtcgctctccacagtcagctgccgggtccagcacacgacagatttcatggttgtccttcctccaaaccgtaagttgactgaggacactgaatggcttattggggggctgagggcagacgccactgcccaaatttcctctggggtttccctgcgtcggctgcatcttgccgacttcctcctcgatccgacagcgtggggctcaggagctgctgctggctgcttgtctcaggttgcatgctgttgtcctgactgttggcattcgtgtcctcactgggctgggtggtctcgatgctgggcgggttcagaaaccggctcagctcttgctgctgactctctctcaggctgtggatgatactgcacgactgctgctgtttagctctgatgcgcttcaggcacttcttgagccacatgcggatggtctgcttggccacctcctcctctatggtgtactccagctgctccctcgccaggagttcctccagctgcaagctcttccggatgtccacggaccggtatgaaagcatgctggtgctcgtgccgaattcctcag

SEQ ID NO: 253043 - DNA, 763 bp, Homo Sapiens
  misc_feature (260)..(260): n is a, c, g, or t
  misc_feature (593)..(593): n is a, c, g, or t
  misc_feature (658)..(658): n is a, c, g, or t
  misc_feature (690)..(690): n is a, c, g, or t
aactagtggatcccccgggctgcaggtttaaatccagataccagtaagatctgtatgttgtgattgattgaaatgttttaggaggttttcccttccatctgttttcctcttactattttatttgttgaagcaacttgcttatcccatagagcaagggttggcagtttattggattttttgtaaattgttaaggtggttgtagcatctagaggcttgctctcagattcagcgttaacaccccactccagcacacacacagncacctcataggtgtagtactgtattcttctatttggatgcacataatatctgggtgtctttttgtgatggtaccagtcattgatgattcatacccaattaggggttgcagagggatgctattctaattctatcattcttctttattgggtggactgtttctagaaagagaaactttcccttatttactatttggttacccagtggtatcatttacacaggaaagccaggatatatgtttgaatctttcctttttatttaccaaatttcaaaatattgagctgcttcactggcatctctgacagtggccacgtagttcttaatttttccttttnttccccttagattcattttggactcatggatttgatatatggaatgtattttggcccatcgcagntattaatccttaatgctttttgtccatacagngagagcctcatcaggttgctctttgagtctcctcatgatccctagagactttgatggatccttgctgcgtggg

SEQ ID NO: 253044 - DNA, 723 bp, Homo Sapiens
  misc_feature (90)..(90): n is a, c, g, or t
  misc_feature (188)..(188): n is a, c, g, or t
agagaggctctcactgtatggacaaaagcatgaaggataatacgtgcgatggaccagaaatacaacatatattcaaatgcatgagttcanaatgaatctaaagggaaaaaaaggaagaattaagaactaactggccactgtcagagatgccagtgaagcagctcaatattctgaaaattggtaaatanaaaggaaagaatcaaacatatatcctggctttcctgtgtaaatgataccactgggtaaccaaatagtaaataagggaaagtttctctttctagaaacagtccacccaataaagaagaatgatagaattagaatagcatccctctgcaacccctaattgggtatgaatcatcaatgactggtaccatcacaaaaagacaaccagatattatgtgcatccaaatagaagaatacagtactacacctatgaggtggctgtgtgtgtgctggagtggggtgttaacgctgaatctgagagcaagcctctagatgctacaaccaccttaacaatttacaaaaaatacaataaacaaaggaatatgttgaacaccaccacaggaatgtaatcagcaaaatcctgccaacccttgctctatgggataagcaagttgcttcaacaaataaaatagtaagaggaaaacagatggaagccaaaacctcctaaaacatttcaatcaatcacaacatacagatcttactggtatctggatttaaacc

SEQ ID NO: 253045 - DNA, 408 bp, Homo Sapiens
aaaatcgctatccttctggtctcccttagggtgtcttgaataattggtgccagccgttagggacccacacgtgccttggcaacaaggtagggagaagataaatgatgccgggatacaaatggtgggtaccagataatgcaggattagctagaatcttcgcatgtggcgaaattctgctctctgggtattagctgtgcagcctcggggtggttacaatctccctttcctcatcggtaaaatggggataattaagaacaacaatataaatgaagatgaggggcgtgaaatgcaaaacagctcagcacctggaatgtgaaaagcactcaattattatttattacttattaccacttatttattactattaaatgttatctgtcaaaagctcgtgccgaatcctgcagcccg

SEQ ID NO: 253046 - DNA, 655 bp, Homo Sapiens
ccaaaggagaagaggcatgcctgcgttgcatgggcaacacagggcgtacacggcgtccttctatactcatcggatctgcgctgaaattctagagtcattgactaattgctggacaaaagcagcctcttcaaagacctccctgttctgatggagaatgagtctaaaatgcttaaattttctgtgcctgcatttcttaaatatcgctttccttctggtctcccttagggtgtcttgaataattggtgtttccagccgttagggacccacacgtgccttggcaacaaggtagggagaagataaatgatgccgggatacaaatggtgggtaccagataatgccgtgctgcacgacaagccggaagggccggcgtcgtctggtgaaaaacagattttaggattagctagaatcttcgcatgtggcgaaattctgctctctgggtattagctgtgcagcctcggggtggttacaatctccctttcctcatcggtaaaatggggataattaagaacaacaatataaatgaagatgaggggcgtgaaatgcaaaacagctcagcacctggaatgtgaaaagcactcaattagtatataccacttattaccacttattcaggactatttaatgatatctgtcaaaagctggtgccgaatcctgc

SEQ ID NO: 253047 - DNA, 412 bp, Homo Sapiens
  misc_feature (155)..(219): n is a, c, g, or t
  misc_feature (231)..(264): n is a, c, g, or t
ccgaagacagggtatcacccaagctcaggggcaagcacagcctggccaacattatgaaactcggtctacactgaaaatccaaaaagccaagcatggtggcacatgcctgtaattccagctaataggaagcctaagccaaagaaatccctcaaacnnnnnnnnnnnnnnnnnnnnnnnnnnnnnnnnnnnnnnnnnnnnnnnnnnnnnnnnnnnnnnnnnagactcggtcannnnnnnnnnnnnnnnnnnnnnnnnnnnnnnnnntacctattaggtactatgcttattactgggtggtgaaataatctgtacaccaaaccccaaacccccaagacacacaaacctatataacaaacctgcacatgtacccttgaacctgaaataagagttaaaaaaatataactcgcgtgcc

SEQ ID NO: 253048 - DNA, 470 bp, Homo Sapiens
ccctttaggtccggctggtttgtgtgtgaattgtgagggataccatttcccccaggaccagcttttcccctttttccgccagctcgaattaaccccccttaaaggaccacaacttggagctcccccccggtgcgggccgctctaaacctagtggatccccggggttccagaaattcggcccacgcctgtgtggagcaaggagtccgttaggcaggatatgtcgtagtcactctgaatgatgttattgaaactgcacccatctctccaggcacaagcactcaactaactgaactgatagctcttacaagagcactcaaattaagcaagggaaaagtaactaacattggcactgactccaagtatgctttcttagtccttcatgctcatgctgccatctggaaggaaaggcacttctttacagctaatgggctctctataaaataccatcaggggccgggcgcggtggctca

SEQ ID NO: 253049 - DNA, 627 bp, Homo Sapiens
  misc_feature (22)..(22): n is a, c, g, or t
  misc_feature (71)..(71): n is a, c, g, or t
caccaaaatgtatagatgtaancagagcccttgacaaggtgaaatgtagaactgctggccagaatgaaacnaagtactagccagaaaaaagatcatgcttaaagactccattgaaaaaccacagacaggtccttcatgacataggtaattccttcaacctaaagacatttgctgaaactcaaagttaccctattgcatagtaaatcttcaaaaccattaagtcaggttctgggtcaatgtttcctatgctttggttggatgatttaataaagtatataatgagatttaaccatggaattcaatgaacaaaatagataaaatattagaatcttcattgaaaaatggcatgtttctccatctttttcatgcaataagaaagtccatcttaaatctgattttttaaataaataattgctgtatttcccactgaagcttgttattctgataagccaaattcaaatgctttcatatagttgaggattaaaaaacattttgaggattattcatcattatcttcttggtaggctccatctgccatgactaaatgaagaatcttggcataaagatgctgatgttcatttcccaaaatattttgaactatttttgaacaaatttcaatattttcat

SEQ ID NO: 253050 - DNA, 599 bp, Homo Sapiens
  misc_feature (45)..(45): n is a, c, g, or t
agaaaaaacaagcctaaaatcatcttcaaaatgtatagatgtaancagaggcccttgacaaggtgatttaatgtagaactgctgggccagaatgaaaccaagtactagccagaaaaaagatcatgcttaaagactccattgaaaaaccacagacagggtccttcatgacataggtaattccttcaacctaaagacatttgctgaaactcaaagttaccctattgcatagtaaatcttcaaaaccattaagtcaggttatgagaaaccatggaattcaatgaacaaaatagataaaatattagaatcttcattgaaaaatggcatgtttctccatctcatgcaataagaaagtccatcttaaatctgattttttaaataaataattgctgtatttcccactgaagcttgttattctgataagccaaattcaaatgctttcatatagttgaggattaaaaaacattttgaggattattcatcattatcttcttggtaggctccatctgccatgactaaatgaagaatcttggcataaagatgctgatgttcatttcccaaaatattttgaactatttttgaacaaatttcaatattttcat

SEQ ID NO: 253051 - DNA, 319 bp, Homo Sapiens
  misc_feature (156)..(156): n is a, c, g, or t
  misc_feature (228)..(228): n is a, c, g, or t
  misc_feature (304)..(304): n is a, c, g, or t
gtcacttttatttccaagggaagccgagtttgagctccctcaagagatcttcctgcaatatttgggacgtgtctgtgtgtgcgtggacagggccgtctgcaggcggaccagcatgcggcgctggcaggcacctcctgtgtcacccttcaggcatcncagggaaggaagcagatcttcccagctgttccgtgttcaggcctggctttcgagaggcttcaggccggaagngggaaggtggctgaagctggtcctcggtctcttcgagcccctcaaagaactctctgggtgcattagccatccttgngctgctggcgcgtgc

SEQ ID NO: 253052 - DNA, 784 bp, Homo Sapiens
tctagaactagtggatcccccgggctgaggaattcggcacgagcaaagaagggctggagtgcctacgcctgctcaatgagatcattgccgacttcgacgagctcctactgaagcccaagttcagcggcgtggagaagatcaagaccatcggcagcacgtacatggcagctgcagggctcagcgtcgcctcagggcacgagaaccaggagctggagcggcagcatgcccacattggtgtcatggtggagttcagcatcgccctgatgagtaagctggacggcatcaacaggcactccttcaactccttccgcctccgcgtcggcataaaccatgggcctgtgattgctggagtgattggggcccgcctcagtatgacatctggggaaacactgtcaatgtggccagccgaatggaaagcactgggagaactttgggaaaatccaggttaccgaggagacctgcaccatcctccagggcctcgggtactcttgtgaatgccgtggcctgatcaacgtcaaaggcaaaggcgagctgaggacttactttgtctgtacggacactgccaagtttcaggggctggggctgaactgagggctcctgctggattccgaaaaggccgggaagccagtctccttccctgaagcaagcccaggagaagactctccgccccacgccaatcccaaaggcatgcagatggctgtgcatgttggcttctttggacctgcactggaggatttctcagacacatgcaccagattctggctcgaagcagccactgagccat

SEQ ID NO: 253053 - DNA, 660 bp, Homo Sapiens
tgtgtaccgaagtgggagtatactggaattatcaatcaactcaggccaatccaagatcttgcagacggtggcaactgctgggttacctgctccaactacaatatagccatcctgggtttaaaaagcctggtaaggaacgatactgccatgagctgtaccccacgttttgcttccttttgaccaataagataatttgcagctatgtgagacaaacacgccacctgggatgacagtaggttacaatcaatgaacagtcctttcccagttttgtatttttgtatcaatccagccataatagctccatatgcatataggccagtggcaagatcagtcatagctactcctgggcgaactggatctccattctcaggccctgtgatgtgcatcagaccagaaacagccgaggcaacagcatcataaccagctcgctgagaaattggacctgtctgaccataccctgtgatggaacaatagatgatgtgaggagcaatctcgtctatatcttcatatcccaggcccattgcagacagtttgccagggacatagttttccacaaacacatcacaaacagctgcaagctctttgatgattttcaccccttttggatccttgatattaacagcaatactttttttatttcggttaacactgagataatat

SEQ ID NO: 253054 - DNA, 863 bp, Homo Sapiens; identical to SEQ ID NO: 89536
  misc_feature (508)..(510): n is a, c, g, or t
  misc_feature (617)..(657): n is a, c, g, or t
  misc_feature (736)..(736): n is a, c, g, or t
  misc_feature (812)..(812): n is a, c, g, or t

SEQ ID NO: 253055 - DNA, 283 bp, Homo Sapiens
cggcaaaaaagaattatacacccacagcaagtgggatctcttcctggaatgcaaggatagttcaacatatgaaatcaatcaatgtaacacagcacattaacagaatgaaggggaaaaaaacacataaaacacgtatcatctcaactgacacagaaaaagcatctgacaaaattcagcaccccatgacaaaaacactcaagaagctaggcgtggtggctcatgcctgtaaccctagcactttggaagcccaaggtggtgtggatcacgagatcagagagatcga

SEQ ID NO: 253056 - DNA, 1055 bp, Homo Sapiens
  misc_feature (852)..(951): n is a, c, g, or t
  misc_feature (970)..(970): n is a, c, g, or t
  misc_feature (984)..(984): n is a, c, g, or t
  misc_feature (993)..(993): n is a, c, g, or t
  misc_feature (995)..(995): n is a, c, g, or t
  misc_feature (1004)..(1004): n is a, c, g, or t
  misc_feature (1014)..(1014): n is a, c, g, or t
  misc_feature (1021)..(1021): n is a, c, g, or t
  misc_feature (1024)..(1025): n is a, c, g, or t
  misc_feature (1027)..(1027): n is a, c, g, or t
  misc_feature (1041)..(1041): n is a, c, g, or t
  misc_feature (1045)..(1045): n is a, c, g, or t
gggtaccggtcccggaagtccttgggatatcgtcgacccacgcgtccggtcaagatggcggcgtctgtattaaacaccgtgctgaggcggcttcctatgctatctctcttccgaggttctcacagagttcaggttcccctccagactctttgcaccaaagctccctctgaggaagattctttgtcctcagttcccatttctccttataaggatgagccctggaaatatctggaatcagaagaataccaggagcgatatggttctcgccccgtctgggctgactaccgccgcaaccacaagggtggtgtacccccacagcggactcggaagacatgtattcgtcggaataaagttgttgggaatccctgccccatctgtcgagatcacaagttgcatgttgactttaggaacgtgaagctcttggagcaatttgtctgcgcccacacgggtatcatcttctatgctccatacacaggagtctgtgtgaagcagcacaagcggttgacccaggccatccagaaagccagggatcatggtctcctcatttaccacatcccccaggttgaaccacgggaccttgacttcagtacctctcatggggctgtgagtgctactccgccagcccccaccctggtctcaggtgacccctggtacccatggtacaactggaaacagccaccggagagagaactgtctcgccttcgccggctttaccagggtcatctccaagaagagagtggccccccacctgagtcaatgcccaagatgccccctagaacaccagcggaagcctcctccactgggcagacaggccctcagagtgctctgtaggagctgtagactgggaagagnnnnnnnnnnnnnnnnnnnnnnnnnnnnnnnnnnnnnnnnnnnnnnnnnnnnnnnnnnnnnnnnnnnnnnnnnnnnnnnnnnnnnnnnnnnnnnnnnnnnactcgtctttacaaaaaanacaaaatagctggngtgtggtgnanctgtagttnactattgggngctaggnggnnantgatccagaggcgngttnagtagtgagt

SEQ ID NO: 253057 - DNA, 644 bp, Homo Sapiens
  misc_feature (282)..(296): n is a, c, g, or t
  misc_feature (317)..(368): n is a, c, g, or t
  misc_feature (467)..(556): n is a, c, g, or t
  misc_feature (620)..(620): n is a, c, g, or t
aaccagagacagtagagctttattgtgtaaaagctgagttggtagaagtatgaaacggcaacaatgtttagcccagcccatctatttacaatatataggggttggggtttcccatacacatctgtaccacccgccctcagcctcaagatttatccctatcagcaacattcatttcctggatttgtcactggccacaaaagacacaactcttcagggtgatatcccatcacataaacctacatacacattatctcctagtccctctagctctcttcccagtcnnnnnnnnnnnnnnngagacagggtctagctgtcannnnnnnnnnnnnnnnnnnnnnnnnnnnnnnnnnnnnnnnnnnnnnnnnnnntgggatcaagtgatcctaccttagcctccccaatagttgagactacaggtgtgcaccaccacacccagctaatttttgtattttttgggtaaagacgannnnnnnnnnnnnnnnnnnnnnnnnnnnnnnnnnnnnnnnnnnnnnnnnnnnnnnnnnnnnnnnnnnnnnnnnnnnnnnnnnnnnnnnnngagtgagccaccacggctgggggctctctttcccagtctacagcttcctacagaggcacttttnagggggctgttttgcccagttgga

SEQ ID NO: 253058 - DNA, 878 bp, Homo Sapiens
gggattcctgtcctgggcgtacgtcaagatggcggcgtctgtattaaacaccgtgctgaggcggcttcctatgctatctctcttccgaggttctcacagagttcaggttcccctccagactctttgcaccaaagctccctctgaggaagattctttgtcctcagttcccatttctccttataaggatgagccctggaaatatctggaatcagaagaataccaggagcgatatggttctcgccccgtctgggctgactaccgccgcaaccacaagggtggtgtacccccacagcggactcggaagacatgtattcgtcggaataaagttgttgggaatccctgccccatctgtcgagatcacaagttgcatgttgactttaggaacgtgaagctcttggagcaatttgtctgcgcccacacgggtatcatcttctatgctccatacacaggagtctgtgtgaagcagcacaagcggttgacccaggccatccagaaagccagggatcatggtctcctcatttaccacatcccccaggttgaaccacgggaccttgacttcagtacctctcatggggctgtgagtgctactccgccagcccccaccctggtctccaggtgacccccgggtacccatgggaacaactggaaaacagccacccgggagaaaagaactggcctcggcctttcgccgggcttttaccaagggccatctcccaaagaagaagagtgggcccccccaccttgagttccaagggcccaagaaggctcccctaaaacaccaagcggaaaaccctccttcccctggggcaagacagggcccctccaaaagtgcttcttgtaggaaactgtgaaaccggggcaaaaaatagacccgtcgg

SEQ ID NO: 253059 - DNA, 532 bp, Homo Sapiens
ttcggacttccgcagcgagccagccctgtatttctgagcccagcactgccaggaccaaggctgagcccagctgtgggagtcccggaagctgggcagtagccagggactactgcacccgcttctgccttgtttggcctcactgtatcccacccacccctcctggccctggaagcagctagggtgcctcctgccatcggggccaggtctgggtctcactccccggccctgatttgggagggtccaagggggaagtggggtggggaactgcctgtgggtgagtgccaggggcctgctgggtggtggccatctgcgacccggcagggggctgtgcagattctgcacctggccattccctgtcctgtctcctcagcctgcctcacagtggccatggggtgtcggggtgaagggctgtcccagctacttgtcctctgcaggaccctaagcccctgcccgcagcccacatgccctctgtgatgagtggcgtctttcctgcctctgatgatggactcaataaacagcactggacaaggaa

SEQ ID NO: 253060 - DNA, 1183 bp, Homo Sapiens
  misc_feature (78)..(78): n is a, c, g, or t
taacacgacggcgaatgtcccccacgtcacctgtacggagatacagggggtgtgtccgcacacactgtgtggaacggncactagctttagtgccttactgggccgcaccctacagagtgctgcagtagctctatccacaggattgtccgccattccacaaacatagggggactggatgttggtaggttccctcaccgtggaggctggtgtcattagaggggttcgtttttccaccccaaggggcttcgagctcgcccggttccgtttggggcttgctcttggagggggtaagagcaacgcttcctgccaagccataggaaaccctccaggtctagaggggacgcaagttgctttgggtccagggaacccgttaggccgggtttttgaaattggagtttgaggtgccctccaggtggttctggcaaggtgtaagtgaagcgggaccacgtctactacatcaacaatccctttaactctgctgacacctgcatgggcaccacctgccaagctctgtgctgacttctcataccacaaccccaatctcatcctcgcaccagcctggcaaggtaagtattaatgtttccatttcactgtgcaaacaaacggacgctgaagggggttaagaaattggccacaatcacaatgccagtgagtggccaagctgggagtcccatccaagtcatctgactcaagcccatactctccatcacaacccactgggtacttgtctcccccacagtaggtagctgtccttctagaagagtgattcacagtggggtgcttgctaaaaaggcagattcctaggcctaggttctacagcagctctgaatcagtttccatactgggttagcaaagtgggacatactggggctaaataaacagcgaatatttttgttattgtcagtaaaactattaatcaaattatacctttaatttaaggtataaggggtttaaggagacaggaggtgagagagcccaagctgggcaggggatatgccacagtgttatggtaggagggctagatttttcccgtgagttgggtgttgaaggatgaataggagctcactgggctgaggaaaaggaaaaggaactccctacagaaggaacaacatgggcaaaggtacagaggcataggtgtgctacagctgaaaaaagctgactgtgcctcgtccgaattgccacc

SEQ ID NO: 253061 - DNA, 1890 bp, Homo Sapiens
  misc_feature (83)..(83): n is a, c, g, or t
  misc_feature (759)..(759): n is a, c, g, or t
  misc_feature (1574)..(1625): n is a, c, g, or t
gatatctatcagcctagtcatgttctagctggctcagcgggtagccaggccctgagaaccatatgaaagggctctccagatanaatcagagtgctaatgccagaatgctgcagtagcctccgtttgtccacaggctcactgtctgagcccaggatatttttatgagtgaaactgtaagatctttacactggacttcctaaagataaaacaattatggaaatacagaactttacagatgaagctgtctagccctatacatgtgaaaattaagatccaactacttcctgtaatggtagccttcccctatgcctctaacccttttttaaatcctgatttcaatcacaggcattgtgattctccaaagctctaactcttccttaggtctgaaagccacatgctatcaatcattgaaatcaagagagaaggcatccgtagacgggcgcagcccagtctgttccacatagcccagttcctccccagccactccccatgggaatgacctctgcagctgacctaagcttatcctctccttcttcctaagagtgcaacttagaagtcagagccaaatcctagaatgtatccctaaatgccatttctattttttataaacatgaaaaggttgtgctttggaaattcagtctgtttgagaactggcagtctggctggcactgtttaaaaatgtttatttgccctgcatttaaaaactgaaggtttcctatgtattaaaagccatatttccaccttcttaagggaaaaaanaatcggacgtcataacactgggtggatgtttttatggtaacagtggtctgaggcccttggcggatctcaccgagccactgtcactatcctgcctgcctttatctgccttgccctgcgattatttggctttgtaagcataagctacgtaagacataccacacctaagaaactaaacagcaatgaaaacccatacttctgaaaagggtgtcttttaaaaattaagtttgatcttttgggaaataaagcacatagttttcaaaatgatttaccaagatctatgctctttcaaatggagactgggatattgttgttttgagaaccactgttttcctgtttcctcccaaatgttagtcacatatatgattacccttaagttggtcactatctatctatctgtcaataatttaggattaaagtttgaagtgtaattacatttgacttttacaggcatctcagggtggacttcttatgaatacactgaacctatacaaatgatcttagaaaacgtttaatatcagatttctttattttttccaacacaactgaatcagttttcttaaataaaagtttattgtctactgtttacactcatgttgctgctgtgagtacaacaacagacacaaattcctagcatgaatatattcattgttcacccccactgaactacagacattgcttgagaattagatctttgctttagggatttaaacagaaaagaatcggggcccagaatcttgaaagaatattctcaagtgactggttggagttagaaggcatagccaatacaggcaaacagcacgatgatgctgtcactnnnnnnnnnnnnnnnnnnnnnnnnnnnnnnnnnnnnnnnnnnnnnnnnnnnngaaggaggaggccttagaagcagttgtggcagaaataactggagacttgattctccccatgtgggctaagtggctgctttgagaagggacaaataaaaatgaggtgggggtggggagtggggataccatgagttaaaaaagtataaaaagtaattatctaaaatatagattagatataaatgttccagaactcattaaataagctcaaaaatactggaaagtggcaatttgaactacatttatttttcaacaagtgggggcaata

SEQ ID NO: 253062 - DNA, 418 bp, Homo Sapiens
  misc_feature (77)..(77): n is a, c, g, or t
  misc_feature (100)..(100): n is a, c, g, or t
  misc_feature (102)..(154): n is a, c, g, or t
atttttattggtcccttctcaaagcagccactttagccacatgggcgaaaaccaagtctccagttatttctgcccanaactgcttctaaggcctcctccntnnnnnnnnnnnnnnnnnnnnnnnnnnnnnnnnnnnnnnnnnnnnnnnnnnnnncagtgacagcatcaccgtgctgttggcctgaatggctatgcctccaaactccaaccagtcacttgagaatattctttcaagattcggggccccgattcttttctgtttaaatccctaaagcaaagatctaattctcaagcaatgtctgtagttcagtgggggtgaacaatgaatatatttcatgctaggaatttgtgtctgttgttgtactcacagcagcaacatgagtgtaaacagtagacaataaacttttatttaagaaaa

SEQ ID NO: 253063 - DNA, 384 bp, Homo Sapiens
  misc_feature (53)..(53): n is a, c, g, or t
  misc_feature (92)..(92): n is a, c, g, or t
  misc_feature (329)..(329): n is a, c, g, or t
ggcctatcaaatcaattggaaattcaaaggaggaggaagggcatcccggaagnaggggcgaagcccaggtctttcccacatagccccaggtncctcccccagcccactcccccatgggaatgacctctgcagctgacctaagcttatcctctccttcttcctaagagtgcaacttagaagtcagagccaaatcctagaatgtatccctaaatgccatttctattttttataaacatgaaaaggttgtgctttggaaattcagtctgtttgagaactggcagtctggctggcactgtttaaaaatgtttatttccctgcatttaaaaacntgaaggtttcctatgtattaaaagccaatatttccaccttctttaagggaaaaaa

SEQ ID NO: 253064 - DNA, 2847 bp, Homo Sapiens
  misc_feature (1779)..(1797): n is a, c, g, or t
  misc_feature (2200)..(2210): n is a, c, g, or t
  misc_feature (2717)..(2717): n is a, c, g, or t
cttctcgcgcatgcgttctccgaacggtcttcttccgacagcttgctgccctagaccagagttggtggctggacctcctgcgacttccgagttgcgatgctgtacttctctttgttttgggcggctcggcctctgcagagatgtgggcagctggtcaggatggccattcgggctcagcacagcaacgcagcccagactcagactggggaagcaaacaggggctggacaggccaggagagcctgtcggacagtgatcctgagatgtgggagttgctgcagagggagaaggacaggcagtgtcgtggcctggagctcattgcctcagagaacttctgcagccgagctgcgctggaggccctggggtcctgtctgaacaacaagtactcggagggttatcctggcaagagatactatgggggagcagaggtggtggatgaaattgagctgctgtgccagcgccgggccttggaagcctttgacctggatcctgcacagtggggagtcaatgtccagccctactccgggtccccagccaacctggccgtctacacagcccttctgcaacctcacgaccggatcatggggctggacctgcccgatgggggccatctcacccacggctacatgtctgacgtcaagcggatatcagccacgtccatcttcttcgagtctatgccctataagctcaaccccaaaactggcctcattgactacaaccagctggcactgactgctcgacttttccggccacggctcatcatagctggcaccagcgcctatgctcgcctcattgactacgcccgcatgagagaggtgtgtgatgaagtcaaagcacacctgctggcagacatggcccacatcagtggcctggtggctgccaaggtgattccctcgcctttcaagcacgcggacatcgtcaccaccactactcacaagactcttcgaggggccaggtcagggctcatcttctaccggaaaggggtgaaggctgtggaccccaagactggccgggagatcccttacacatttgaggaccgaatcaactttgccgtgttcccatcccttcaggggggcccccacaatcatgccattgctgcagtagctgtggccctaaagcaggcctgcacccccatgttccgggagtactccctgcaggttctgaagaatgctcgggccatggcagatgccctgctagagcgaggctactcactggtatcaggtggtactgacaaccacctggtgctggtggacctgcggcccaagggcctggatggagctcgggctgagcgggtgctagagcttgtatccatcactgccaacaagaacacctgtcctggagaccgaagtgccatcacaccgggcggcctgcggcttggggccccagccttaacttctcgacagttccgtgaggatgacttccggagagttgtggactttatagatgaaggggtcaacattggcttagaggtgaagagcaagactgccaagctccaggatttcaaatccttcctgcttaaggactcagaaacaagtcagcgtctggccaacctcaggcaacgggtggagcagtttgccagggccttccccatgcctggttttgatgagcattgaaggcacctgggaaatgaggcccacagactcaaagttactctccttccccctacctgggccagtgaaatagaaagcctttctattttttggtgcgggagggaagacctctcacttagggcaagagccaggtatagtctcccttcccagaatttgtaactgagaagatcnnnnnnnnnnnnnnnnnnnggtaacaagacttagaaggagggcccaggcactttctgtttgaacccctgtcatgatcacagtgtcagagacgcgtcctctttcttggggaagttgaggagtgcccttcagagccagtagcaggcaggggtgggtaggcaccctccttcctgtttttatctaataaaatgctaacctgccctgagtttccattactgtgggtggggctcccctgggccaaacagtgatttgtctccctcaatgtgtacaccgctccgctcccaccaccgctaccacaaggacccccggggctgcaccctcctctttctgtctctgatcagagccgacacccgacgtgattagcccgcgcagctaattcaatttgttaaatgaaattgtattttgccccctctcttcccttaannnnnnnnnnnacgccttccatgcccggccgcgcttcggcccttaagcaacttttctatcccacttccttgtggacctgcgggcccccccatggtaaggggaaaactgcgtcataccccgccttcctagggaaacccttgggttacgggactatgcgcctgggtaactcttcccccactaataaaccgtccgggcggcacatcggcctcccccctgaaacaccatgcctcagcggtaccaccttcagggtctctaccctgggcgtcccctcaccctgcgcatttctgtgccgacgtgtccaacttttatacctaccgccccttccgccggacacttcttctcataggcacccggctgtgtcgttctgctttatatctctcgtgccccgatattgcccacaccggcttatttctccgcgtgagtgcgctggatctccggccgtcgcccctgcaccccttctgtttgatatccgtaagtactcagccggccaactaagcgttaacctcacaatagacccncaccacccccaggtcttgatgattatttatctccccaaccgtgttcgccacccatctcgcatattattctatccctccttctaacgtgtgtgtcaccggacctgtttgtcagtggcgccgcattccgccc

SEQ ID NO: 253065 - DNA, 754 bp, Homo Sapiens
  misc_feature (458)..(458): n is a, c, g, or t
  misc_feature (600)..(600): n is a, c, g, or t
cccggctgcgatagagccgggtgagagagcgagcgcccgtcggcgggtgtcgagggcgggttgcctcgcgcctgacccttcccgccctccttctcgtcacacaccaggtccccgcggaagccgcggtgtcggcgccatggcggagctgacggctcttgagagtctcatcgagatgggcttccccaggggacgcgcggagaaggctctggccctcacagggaaccagggcatcgaggcttgcgatggactggctgatggagcacgaagacgaccccgatgtggacgagcctttagagactccccttggacatatcctgggacgggagcccacttcctcagagcaaggcggccttgaaggatctggttctgctgccggagaaggcaaacccgctttgagtgaagaggaaagacaggaacaaactaagaggatgttggagctggtggcccagaagcagcgnggagcgtgaagaaagagaggaacgggaggcattggaacgggaacggcagcgcaggagacaagggcaagagttgtcagcagcacgacagcggctacaggaagatgagatgcgccgggctgctgaggagaggcggagggggccnaggagttagcagccagacgagttagaggctctcaggcacccccaatggcaccagagcccaggtcctgttccctcttcttccagccaggagcctccaccaagcgggaggttgaccagtggcggctacaaggcgctgcccatggggacctcctgcc

SEQ ID NO: 253066 - DNA, 1056 bp, Homo Sapiens
  misc_feature (765)..(765): n is a, c, g, or t
  misc_feature (909)..(917): n is a, c, g, or t
cttctcgtcggtgttcccggctgctatagagccgggtgagagagcgagcgcccgtcggcgggtgtcgagggcgggttgcctcgcgctgacccttcccgccctccttctcgtcacacaccaggtccccgcggaagccgcggtgtcggcgccatggcggagctgacggctcttgagagtctcatcgagatgggcttccccaggggacgcgcggagaaggctctggccctcacagggaaccagggcatcgaggctgcgatggactggctgatggagcacgaagacgaccccgatgtggacgagcctttagagactccccttggacatatcctgggacgggagcccacttcctcagagcaaggcggccttgaaggatctggttctgctgccggagaaggcaaacccgctttgagtgaagaggaaagacaggaacaaactaagaggatgttggagctggtggcccagaagcagcgggagcgtgaagaaagagaggaacgggaggcattggaacgggaacggcagcgcaggagacaagggcaagagttgtcagcagcacgacagcggctacaggaagatgagatgcgccgggctgctgaggagaggcggagggaaaaggccgaggagttagcagccagacaaagagttagagaaaagatcgagagggacaaagcagagagagccaagaagtatggtggcagtgtgggctctcagccacccccagtgggcaccagagccaggtcctggttccctcttctcccagccaggaancctcccaccaagcggggagtatgaccagtggtcgcatacaggtcaggctgccagatggggactcactgacccagacgttccgggcccgggaacaactggcagctgggaagctctatggggagctccaccctgggggaggaatannnnnnnnncaggaccccgggcaattgctcagtggctccccagacggggcctcttcaaaactgacatggagcggcctctgccaggagctgggactcctgccctctggtgggcccatggggggccaaaaaaggtcccaacgtgggggcc

SEQ ID NO: 253067 - DNA, 477 bp, Homo Sapiens
ccttgataaggtatcattctatacacagtgttcacatggggtagagcctcagggactagtcctaatattttttcaagagcaaagacaggaatttattttatggacatttttggagatggggcgctggcagaaaacatcgtgttcagaaatttctgaagaatgcaaagttgagtgctattgcatgagtcatcctgcagttggttgtttgttatatttttagcaataaagacattccgagctgaagtcgtcctacccagttttcaaagtgctacagcatatggtggcgagattagcccttggggtctcttctccccacactgtgcgagggatttacaccagtcactttaattaatctaatcataaaaataagaatcatgtcattcagaatgtgtggcctcccttttgccaggcatcagtattaatgattctactggcataaattttttgcacatcagtgagagattccaactattagtt

SEQ ID NO: 253068 - DNA, 1182 bp, Homo Sapiens
aatgaaaagaggggtaatgggtacaaaaatacagttaggcagaaggaataagttctagaaaatagctggaagagaagaggaatgttccaaacccaaagaaataataaatatttggagtgaatacccataatcatcctgatgtgatcattacacattatatgcatatataaaaaatcacagataccccacagatctatacaattattgtgtgtaaatataaaagatcataacaacaaaaccaaaatcaccttcaggtgattcagatccacactggagcttgggaagcaccatccttgatgataaactcagcttcccttcttctgtgtggatgtccctgatgacctgcgctttcacaatccctccatcatgtaagctaggtctcctcagtccatcagccacacagcagcactgctgcaccctgctttccacagtcaaggtaaagcactactttgaaaatctgatacctctcttatgcctgtgagatgatgatttagcttccctggggccttccttccctttagggcctcatcaccacacttctgactactcttgattccttgcctagcttcctctatggtcagcaagctaacagaggctatcggtaaaatttgtcactcttctaccttcctattaaactttcactcttctaccccgctattttgcgttctgaatcttcctgcatgctttagactgctgttaggaaaactcaggaatgaagctaccacacactcactcttatttcagctgcacattacctgatgcttggctatgtctggccataacgtccgatcaatttcctagcaagttcctttaactgcttttctacgctttccgactgtcagtattgaaatttccatttcttcatcattctcagcagataccctcaactgtaatcagtcatcaactgctacatctcttgacttatatagagctgattccaactgtattctcttttctgcctcttccctcctttttgtcttacaccagctgtgccacctatgcttaatattgagtctcatgcagtcctgctcctctaagttcttctccactcaattatccccactctcctcatctttactgtctcctctggctcctctttctttacatttaaacatgccaagctctctcctatttggctaaactccaagcttcctggaggacatggctatgtctcatttgttc

SEQ ID NO: 253069 - DNA, 1115 bp, Homo Sapiens
  misc_feature (8)..(9): n is a, c, g, or t
  misc_feature (16)..(16): n is a, c, g, or t
  misc_feature (25)..(25): n is a, c, g, or t
  misc_feature (30)..(30): n is a, c, g, or t
  misc_feature (33)..(33): n is a, c, g, or t
  misc_feature (35)..(35): n is a, c, g, or t
  misc_feature (39)..(39): n is a, c, g, or t
  misc_feature (53)..(53): n is a, c, g, or t
  misc_feature (61)..(61): n is a, c, g, or t
  misc_feature (67)..(67): n is a, c, g, or t
  misc_feature (74)..(74): n is a, c, g, or t
  misc_feature (93)..(93): n is a, c, g, or t
  misc_feature (153)..(153): n is a, c, g, or t
  misc_feature (157)..(157): n is a, c, g, or t
  misc_feature (409)..(409): n is a, c, g, or t
cccccccnngcctccnaagtgcggnttacngcngngccnccggcccgcctacntcacttcnaagtcnatgtaanggggtcatttttccctttntagaatccattaaatggtggatttgggaggaaaacttattctgaatattaacggtggtgnaaanggggacagtttttaccctaaagtgcaaaagtgaaacatacaaaataagactaattcttaagagtaactcagtaatttcaaaatacagatttgaatagcagcattagtggtttgagtgtctagcaaaggaaaaattgatgaataaaatgaaggtctggtgtatatgttttaaaatactctcatatagtcacactttaaattaagccttatattaggcccctctattttcaggatataattcttaactatcatnatttacctgatcttaatcatcagattcgaaattctgtgccatggcatatatgttcaaattcaaaccatttttaaaatgtgacagatggacttcatgcaagttggcagtggttctggtactaaaaattgtggttgttttttctgtttacgtaacctgcttagtattgacactctctaccaagagggtcttcctaagaagagtgctgtcattatttcctcttatcaacaacttgtgacatgagattttttaagggctttatgtgaactatgatattgtaatttttctaagcatattcaaaagggtgacaaaattacgtttatgtactaaatctaatcaggaaagtaaggcaggaaaagttgatggtattcattaggttttaactgaatggagcagttccttatataataacaattgtatagtagggataaaacactaacttaatgtgtattcattttaaattgttctgtatttttaaattgccaagaaaaacaactttgtaaatttggagatattttccaacagcttttcgtcttcagtgtcttaatgtggaagttaacccttaccaaaaaaggaagttggcaaaaacagccttctagcacacttttttaaatgaataatggtagcctaaacttaatatttttataaagtattgtaatattgttttgtggataattgaaataaaaagttctcattgaatgcaaaaaaa

SEQ ID NO: 253070 - DNA, 715 bp, Homo Sapiens
  misc_feature (182)..(213): n is a, c, g, or t
cggatccacctacctctcccataccacccatatgtcagctcctcaatgtaggaaaatgcaggtccctgcttccacactttaaagatatggggggagtggaggaaaggaaagtaggaggaatgtgctgatttctatttgcatagaaatagcccccacctcctcctaaagtggggaaactcagnnnnnnnnnnnnnnnnnnnnnnnnnnnnnnnntaagaagaggaactagatgagctagacatatagacaaacagccagagcgtgcgcacacgcacacacacgcgcacagtaagggggttaggaccaggttagtaagtgggtagatggtgggttgcccttgccccctctcctggaggatgggggaagggagtggtctgatgaaggtccaaccttcctcctcttcctcccccttgctcaggccttcttcggtgggggagccaatttgatgatctcttcctcagagggctgccggataatgtctttgtacttcttggcactggggatacgggttagcttggtgtccagctcatcctcctcagagatcttcagcacacgggttctgtagtcaaccaccatagtgagtaggtcaggacggcgggagatctcaaagatgtgctcaatgtaggagaggttgtctttgtccagcttgttgtggctctccaggaagctaaaccaggcactgccagtagtgatctcctcactcttttcgctgggg

SEQ ID NO: 253071 - DNA, 511 bp, Homo Sapiens
agatggtcgctgaaggtccctctagagcagagacctgaatcatgtgagggagcaagccatggacagatctgcagcaagggtgttcttgcaatggaaacagcaaatgcaaagaaactggcttgatgggcggaaggaacagcaagcagactgctgtggctagaaatactgtgggcaaggaggaatctgcctttttagttccagaggagctgagattctattctcatctattctgatgatgggaagctcttggagggatgagagctgggtcatgcccccatctgctttgtttttagcgggatccacttcagcccctgtgtagagagtggactatagagtatacgtcagttaacaaccagtcagcaaaacagaaattaccctaggtatttcagacaagggaaatttgatacagggaaagaattgaatgaccaaatgggggatgatgaggcaatccaaagatgagcaacagccggaagtcactactactcttaagactggagagataaaggaagtg

SEQ ID NO: 253072 - DNA, 2650 bp, Homo Sapiens
  misc_feature (2535)..(2535): n is a, c, g, or t
  misc_feature (2542)..(2542): n is a, c, g, or t
gggaagatggcggccgtgcaggcggccgaggtgaaagtggatggcagcgagccgaaactgagcaagaatgagctgaagagacgcctgaaagctgagaagaaagtagcagagaaggaggccaaacagaaagagctcagtgagaaacagctaagccaagccactgctgctgccaccaaccacaccactgataatggtgtgggtcctgaggaagagagcgtggacccaaatcaatactacaaaatccgcagtcaagcaattcatcagctgaaggtcaatggggaagacccatacccacacaagttccatgtagacatctcactcactgacttcatccaaaaatatagtcacctgcagcctggggatcacctgactgacatcaccttaaaggtggcaggtaggatccatgccaaaagagcttctgggggaaagctcatcttctatgatcttcgaggagagggggtgaagttgcaagtcatggccaattccagaaattataaatcagaagaagaatttattcatattaataacaaactgcgtcggggagacataattggagttcaggggaatcctggtaaaaccaagaagggtgagctgagcatcattccgtatgagatcacactgctgtctccctgtttgcatatgttacctcatcttcactttggcctcaaagacaaggaaacaaggtatcgccagagatacttggacttgatcctgaatgactttgtgaggcagaaatttatcatccgctctaagatcatcacatatataagaagtttcttagatgagctgggattcctagagattgaaactcccatgatgaacatcatcccagggggagccgtggccaagcctttcatcacttatcacaacgagctggacatgaacttatatatgagaattgctccagaactctatcataagatgcttgtggttggtggcatcgaccgggtttatgaaattggacgccagttccggaatgaggggattgatttgacgcacaatcctgagttcaccacctgtgagttctacatggcctatgcagactatcacgatctcatggaaatcacggagaagatggtttcagggatggtgaagcatattacaggcagttacaaggtcacctaccacccagatggcccagagggccaagcctacgatgttgacttcaccccacccttccggcgaatcaacatggtagaagagcttgagaaagccctggggatgaagctgccagaaacgaacctctttgaaactgaagaaactcgcaaaattcttgatgatatctgtgtggcaaaagctgttgaatgccctccacctcggaccacagccaggctccttgacaagcttgttggggagttcctggaagtgacttgcatcaatcctacattcatctgtgatcacccacagataatgagccctttggctaaatggcaccgctctaaagagggtctgactgagcgctttgagctgtttgtcatgaagaaagagatatgcaatgcgtatactgagctgaatgatcccatgcggcagcggcagctttttgaagaacaggccaaggccaaggctgcaggtgatgatgaggccatgttcatagatgaaaacttctgtactgccctggaatatgggctgccccccacagctggctggggcatgggcattgatcgagtcgccatgtttctcacggactccaacaacatcaaggaagtacttctgtttcctgccatgaaacccgaagacaagaaggagaatgtagcaaccactgatacactggaaagcacaacagttggcacttctgtctagaaaataataattgcaagttgtataactcaggcgtctttgcatttctgcgaaagatcaaagtctgcaagggaattcttgtgtgctgctttccatttgacaccgcagttctgttcagccatcagaagagagacaaggaattaaaaatttctttttaatcctgttaccggccaaaggaagacacaggaggagagcaccacacaatggtcggccgcccccggcccctccgagaagcttttcctaaacccatccctttttgggccccgcggggccccggggcaggtgagggtggacacctcgggccgccaggcttgtgttcgccgacgaaacatccccggggcgccatggaaatcaaggggggttcggggcatttccttccaccccaatatccaaagagaaagcgccctctcggttcgcggcgccaactcccattcagacaggcactcgtcgcgaaaccgacacacccacccgaatgatggcggtgtcctccgtcgagacggcgtcatattcagcgtgtggggtactcccatgggccgccaggcgtgccacccctgcctcgcgtgggaaatgtgtcaacgatttcagcaaagactggttagcgtcgctcaggggcggcctgggcgaaagaccaaatctgggaagcccccggtgcttcggggaacatcttaggttttgaggagggacatgtgcgccaccgggcctgctttatagaatggcctcccgtacggagagcgggtnggagtcngacgcgacccgaccgtcgagaccgccgcgacgcccacggtcttccctctacgccctctgtgtggacgtgttgaccgcgcatccacatcttgtatgcgcactgtgtaga

SEQ ID NO: 253073 - DNA, 593 bp, Homo Sapiens
  misc_feature (549)..(549): n is a, c, g, or t
  misc_feature (582)..(582): n is a, c, g, or t
tcccccgggctgcaggaattcggcacggtattaataacaaactgcgtcggggagacataattggagttcaggggaatcctggtccctgtttgcatatgttacctcatcttcactttggcctcaaagacaaggaaacaaggtatcgccagagatacttggacttgatcctgaatgactttgtgaggcagaaatttatcatccgctctaagatcatcacatatataagaagtttcttagatgagctgggattcctagagattgctcccatgatgaacatcatcccagggggagccgtggccaagcctttcatcacttatcacaacgagctggacatgaacttatatatgagaattgctccagaactctatcataagatgcttgtgggttgggtgggcatcgaccgggtttatggaaattgggacgccagtcccggaatgagggggattgattttgacggcacaatcctggagttttcaccacctgtggagtttctacatgggcctatggcaggactattcacgattcttcaggggaaatcacgggagaagntgggttttcaggggttgggtgaagccttttttnccgggccgttt

SEQ ID NO: 253074 - DNA, 552 bp, Homo Sapiens
gcacaaataaccaccaaaaaattatagtggctaagttaattccagctagccacagttcatccaagtgatgtcaagacatatgtgccattcagttttggtgataaaaagcgacaaagagaatatgtttctgtattgttaggacaggtttaataatgtttcacctaagtaaaactcatcttgttttgtgtgtgaccatcactgaagtatgaacaacaggcatgcaacccacagtgtaatccacattttcatcatgatgcagcattcacaaatcttattagaaaagttaaatcacatgactacatttatacaggggaaattcaagcatttgtgtgtgaattaaatgcttcgttaataggataagcaggtgattcatttggaacttatgggatgcagcataaccaggtgaaatctaatggtgatttatttccaaagaccaccaggtttgttcaagtgcattgctagtctgtgtttgtgtttaacccatgcaacaatcctcatgacagtaacaaggattatgaccaataatgtggttctaaagaaaagttgtaaggc

SEQ ID NO: 253075 - DNA, 1787 bp, Homo Sapiens
  misc_feature (1680)..(1680): n is a, c, g, or t
  misc_feature (1741)..(1741): n is a, c, g, or t
gtcttggaattggagaacagcaagggccccagcctggcctctttagagggggaagaagataaggggaagagcagctcatcccaggtggtggggccagtgcaggaggaagagtatgtagcagagaagttgccaagtaggttcatcgagtcggctcacacagagctggcaaaggacgatgcggcgccagcacccccagtcgcagacgccaaagcccaggacagaggtgtcgagggagaactgggcaatgaggagagcttggatagaaatgaggagggcttggatagaaatgaggagggcttggatagaaatgaggagagcttggatagaaatgaggagggcttggatagaaatgaggagattaagcgggctgccttccagataatctcccaagtgatctcagaagcaaccgaacaggtgctggccaccacggttggcaaggttgcaggtcgtgtgtgtcaggccagtcagctccaatggcagaaggaagagagctgtgtcccagttcaccagaaaactgtcttgggcccagacactgcggagcctgccacagcagaggcagctgttgccccgccggatgctggcctccccttgccaggcctaccagcagagggctcaccaccaccaaagacctacgtgagctgcctgaagagccttctgtccagccccaccaaggacagtaagccaaatatctctgcacaccacatctccctggcctcctgcctggcactgaccacccccagtgaagagttgccggaccgggcaggcatcctggtggaagatgccacctgtgtcacctgcatgtcagacagcagccaaagtgtccctttggtggcttctccaggacactgctcagattctttcagcacttcagggcttgaagactcttgcacagagaccagctcgagccccagggacaaggccatcaccccgccactgccagaaagtactgtgcccttcagcaatggggtgctgaagggggagttgtcagacttgggggctgaggatggatggaccatggatgcggaagcagatcattcaggaggttctgacaggaacagcatggattccgtggatagctgttgcagtctcaagaagactgagagcttccaaaatgcccaggcaggctccaaccctaagaaggtcgacctcatcatctgggagatcgaggtgccaaagcacttagtcggtcggctaattggcaagcaggggcgctatgtgagttttctgaagcaaacatctggtgccaagatctacatttcaaccctgccttacacccagagcgtccagatctgccacatagaaggctctcaacatcatgtagacaaagcgctgaacttgattgggaagaagttcaaagagctgaacctcaccaatatctacgctcccccattgccttcactggcactgccttctctgccgatgacatcctggctcatgctgcctgatggcatcaccgtggaggtcattgtggtcaaccaggtcaatgccgggcacctgttcgtgcagcagcacacacaccctaccttccacgcgctgcgcagccccgaccatgcagatgtacctctgttactctcagcctggaatccccaccttgcccaccccagtggaaataacggtcatctgtgccgcccctggtgcggacggggcctggtggcgagcccaagtggttgcctcctacgnagagaccaacgaagtggagattcgatacgtggactacggcgggatataaagagggttgaanagtagaaccgtgctccgggcaaaatcaaggtctgaactttggtcac

SEQ ID NO: 253076 - DNA, 379 bp, Homo Sapiens
ctttctagctcttctctctgactttcactgtgttgacctaatgttaagatgagtgcctttgtagacacgagatgacggctcacagtaatggaggcagcatacttaaatcaacaggagattggcttgtctttcccagaagcatctccttatctctctttagtccaaagatgacttttccctgtgtgtccctgagtcagtcactgggagaggggatgaacgtgccgagattttcatagaatgatcatgtgtgagtagaaaggatgctgagaagccactcagtattcaccacgatatcgctattaccagaggcgaagaattacacggatacttggcaggacatttgccttataggctaatcaccggacaatagaggcctatt

SEQ ID NO: 253077 - DNA, 431 bp, Homo Sapiens
  misc_feature (42)..(51): n is a, c, g, or t
gtgagagccaccgcacctggctgaaaataacttaggctttannnnnnnnnnggtgattagctcatcttagggatgggaataaattgtaaaaagaagtctaattggaaacttttgcctttaagggaaatgtcctgccaagcattactgtaattcttccccactggtaaaagagaaatcgcggcggatactggggggcttcccagcatccattctactcacacaagaacaatctatgaaaatcaccgcacgttcatccgctctaccagtgactgactcagggacacacagggaaaagacaaagtggactaaagagagataacgagatgcttctggcaaagaaaagcaatcctctgttgatatagtatgctggctccatacttggagccgtcatctatgactacaaggcaatcatcttaaaataggcccatgca

SEQ ID NO: 253078 - DNA, 1947 bp, Homo Sapiens
  misc_feature (165)..(211): n is a, c, g, or t
  misc_feature (302)..(302): n is a, c, g, or t
  misc_feature (336)..(337): n is a, c, g, or t
  misc_feature (367)..(367): n is a, c, g, or t
  misc_feature (382)..(382): n is a, c, g, or t
  misc_feature (392)..(392): n is a, c, g, or t
  misc_feature (400)..(400): n is a, c, g, or t
  misc_feature (443)..(443): n is a, c, g, or t
  misc_feature (445)..(445): n is a, c, g, or t
  misc_feature (447)..(447): n is a, c, g, or t
  misc_feature (499)..(499): n is a, c, g, or t
  misc_feature (503)..(503): n is a, c, g, or t
  misc_feature (555)..(555): n is a, c, g, or t
  misc_feature (577)..(577): n is a, c, g, or t
  misc_feature (1466)..(1467): n is a, c, g, or t
  misc_feature (1479)..(1479): n is a, c, g, or t
  misc_feature (1535)..(1535): n is a, c, g, or t
  misc_feature (1540)..(1540): n is a, c, g, or t
  misc_feature (1552)..(1552): n is a, c, g, or t
  misc_feature (1557)..(1557): n is a, c, g, or t
  misc_feature (1561)..(1562): n is a, c, g, or t
  misc_feature (1570)..(1571): n is a, c, g, or t
  misc_feature (1573)..(1573): n is a, c, g, or t
ggctggtaccggtccggaattcccgggatcggccggctgtgcagagacgccatgtaccggctcctgtcagcagtgactgcccgggctgccgcccccgggggcttggcctcaagctgcggacgacgcggggtccatcagcgcgccgggctgccgcctctcggccannnnnnnnnnnnnnnnnnnnnnnnnnnnnnnnnnnnnnnnnnnnnnntgaagcaggcaggtgggctgaggggcgcggccccgggcgcagtcccccgcggcccccgaccctgaggcgtcgcctctggccgagccgccanaggagcagtccctcgccccgtggtctccgcagannccggcgccgccctgctccaggtgcttcgcnagagccatcgagagnagccgcgacntgctgcanaggataaaggatgaggtgggcgcaccgggcatagtggttggantntntgtagatggaaaaaaagtctggtcagaaggtttaggttatgctgatgttganaaangtgtacaatgtaaaaaagagaaagttatgcgaattgctagcatcagcaaaantctcaacatggttgctcttgcnaaattgtgggaagcagggaaactggatcttgatattccagtacaacattatgttcccgaattcccagaaaaagaatatgaaggtgaaaaggtttctgtcacaacaagattactgatttcccatttaagtggaattcgtcattatgaaaaggacataaaaaaggtgaaagaagagaaagcttataaagccttgaagatgatgaaagagaatgttgcatttgagcaagaaaaagaaggcaaaagtaatgaaaagaatgattttactaaatttaaaacagagcaggagaatgaagccaaatgccggaattcaaaacctggcaagaaaaagaatgattttgaacaaggcgaattatatttgagagaaaagtttgaaaattcaattgaatccctaagattatttaaaaatgatcctttgttcttcaaacctggtagtcagtttttgtattcaacttttggctataccctactggcagccatagtagagagagcttcaggatgtaaatatttggactatatgcagaaaatattccatgacttggatatgctgacgactgtgcaggaagaaaacgagccagtgatttacaatagagcaagattttatgtttacaataaaaagaaacgtcttgtcaacacaccttacgtggataactcctataaatgggctggtggtggatttctgtctacagtgggtgaccttctgaaatttgggaatgcaatgctttatggttaccaagttgggctgtttaagaactcaaatgaaaatcttttacctggatacctcaaaccagaaacaatggttatgatgtggaccccagtccctaacacagagatgtcttgggataaagagggtaaatatgcaatggcgtggggtgttgtggaaaagaaacaannttttttttcgtntagaaagcaacggcattatgcttcacatactggaggggcagtgggtcccagtagtnccccnctgccccccccngaagnaccnnacacaganncnataaataacaaggtccccccaagaggaatcattgtctctatcatatgtaacatgcaatctgttggcctcaatagcaccgctttgaagattgcccttgaatttgataaagacagatcagactgataaccttaacaccataggtgcaaaatgagttgttctgaggtttttttgaaacattaaagttccaaaacatgacatttttaagaataaattgtaaaatagagtataattgaatgcagagaattatgtacctctaattgcttaattttgtaatggtcttttattgtagaattggttctttatactcagggaagtaattatattgtttctactttttgaaaaaagtgttaactcttgaaataaaatattctgat

SEQ ID NO: 253079 - DNA, 871 bp, Homo Sapiens
  misc_feature (735)..(775): n is a, c, g, or t
attagtctgggtggcgaattcggcacgaggcgctgggctttttcagcaggcccgtaactgtcggttctttccccttcggtcttaggatgaggtgggcgcaccgggcatagtggttggagtttctgtagatggaaaagaagtctggtcagaaggtttaggttatgctgatgttgagaaccgtgtaccatgtaaaccagagacagttatgcgaattgctagcatcagcaaaagtctcaccatggttgctcttgccaaattgtgggaagcagggaaactggatcttgatattccagtacaacattatgttcccgaattcccagaaaaagaatatgaaggtgaaaaggtttctgtcacaacaagattactgatttcccatttaagtggaattcgtcattatgaaaaggacataaaaaaggtgaaagaagagaaagcttataaagccttgaagatgatgaaagagaatgttgcatttgagcaagaaaaagaaggcaaaagtaatgaaaagaatgattttactaaatttaaaacagagcagggagaatgaagccaaatgccgggaatttcaaaacctgggcaagaaaaaagaaatgatttttgaacaagggcgaaattatatttttgagaagaaaaaggtttggaaaaatttcaaatttgaaatccccctaaagaaattattttaaaaaaatggaatccccttttggtccctttcaaaaacccttgggaaaggccccgagnnnnnnnnnnnnnnnnnnnnnnnnnnnnnnnnnnnnnnnnnaccccttaaatgggggcaagcccctttagttaaagaaaaagaaagcttttccggggaatgggtaaaaattattttttgggaaccttattattgcgc

SEQ ID NO: 253080 - DNA, 994 bp, Homo Sapiens
  misc_feature (167)..(175): n is a, c, g, or t
  misc_feature (257)..(300): n is a, c, g, or t
aaaaacagtaatagacgagagggcgtgttagtgagtgtcaatgtttggaaagcgccattgtgtgtagctgtgtgttgcacgctgtttttccctaaggcatttccacgtataggcaattgtgataaaaacccccgttaaagattccctcacttcgctgttggttaagnnnnnnnnnacctggctattttgcattttatagagagaggtgattaacacatgcggcctgtctggactctgactcagtgatcacccactcnnnnnnnnnnnnnnnnnnnnnnnnnnnnnnnnnnnnnnnnnnnnctgaatgtccttgtttttagaaaatacacatgtaaatatttataggtaaaggggtatcacgtctacaacttatttccaaatggttcagaaacaaacacatatgtagacagaaaggtaaggcaaatgcggtaaactaacattaagggaatccgagtaaagaggatatgtgaatcccttgtacctacctcctgccaaccttttcctataagtataaaattatttcaaaacagtatgaaaacaattaaaaactaataacacgtaaacaaagtattagttaaaacctaaaaaaggaatggttaaagagcaaattacagatgcctcatggtgggtgcaattttggtttagttattcatgtttgaattattaatattattgctatctttcatcaaagggtcttagtgtactttataaacatgttttacttccttcactttacagatgagaaaacagacatgtagaaaagctcccaaatgtggcaggttgattttggaatggaaacaagaaaatttgacttttaattaataaaatagtgttaagatgcgatatagctagacacagcagaaggtattcatttaccttgctctattgtaaatcactggctcgttttcttcctgcacagtcgtcagcatatccaagtcatggaatattttccgacgcgtgggtcgacgatatcccgggaattccggagccgtac

SEQ ID NO: 253081 - DNA, 1482 bp, Homo Sapiens
ggagaagccggtggccgcgcaggaggacggagccctaaccgcaacccgcgccgcgccgcgccgatttgatttgtatccactgtcaccagcactgctcacttaggactttctggatccggacccaggcagcgcacactggactcttgaggaagaaggagactctaattttggattccttggtggaggaaaataaaacactctggtcttgccgccaacgatgcaagtgtgactgctggcgtcttcatgagctccagaggtcacagcacgctaccaaggactctcatggcccctcggatgatttccgagggagacataggaggcattgctcaaatcacctcctctctattcctgggcagaggcagtgtggcctccaatcggcacctcctccaggctcgtggcatcacctgcattgttaatgctaccattgagatccctaatttcaactggccccaatttgagtatgttaaagtgcctctggctgacatgccgcatgcccccattggactgtactttgacaccgtggctgacaagatccacagtgtgagcaggaagcacggggccaccttggtgcactgtgctgcaggggtgagccgctcagccacgctgtgtatcgcgtacctgatgaaattccacaacgtgtgcctgctggaggcgtacaactgggtgaaagcccggcgacctgtcatcaggcccaacgtaggcttctggaggcaactgatagactacgagcgccagctctttgggaagtcgacagttaaaatggtacagacaccttatggcatagttcccgacgtctatgagaaggagtcccgacacctgatgccttactgggggatttagtgccactgaagcctgcgtcagcagcccgagcggggccggcatctgctccccgccgtctgctccctctccactctcttctcaaatggctgacttctggttctccctcaagtgttttttacactgggtgttcaaatttattttaagagatagggagggaggggacataaagggaatgcatacattgctagtcacatttttaaaattaacattttggaatagtgtttatggaaatctttagcttttaatcatttttaccaatttgaacagtttaataaactggttctgctctcttctgaatctcatgcctttggcaccttggtaggtgcaggaggagctcagtgcaaaaatcactttggggcctcattaaccctttagagacaagctttgccccaggctgcggaccagacagatgcttagggaaggttgataccagcttcagtctctactggattagccctactctttcctttccccgccattatttagtgactctgtaagtaagttaaatacacccttattatttagctgttaagtaactataatgaaatctgctgcaaaatctctcttggaatccatgtgcccaggattatattagcattatttttaataaatctatatgcttaacatattagaatttttact

SEQ ID NO: 253082 - DNA, 711 bp, Homo Sapiens
  misc_feature (269)..(325): n is a, c, g, or t
  misc_feature (542)..(553): n is a, c, g, or t
acgatatgccgcatatgctgccctctctgcaacacccttccttgccttgcctttgaaacctcctctgacccttgggtgaatggtggttctccatccgatttcctgatgcattcacacctctgtcgtagcacttggcgcctgcttgaattgttagtttaagagtctgttgtttccagtggcatgtgagcccccgggggcagggacaatgttttatctcatctttgtattcccgatgctccgcacagggcctgggatggtgcagctatttnnnnnnnnnnnnnnnnnnnnnnnnnnnnnnnnnnnnnnnnnnnnnnnnnnnnnnnnnccttgcagagagtgggaggcatacatcaccacttggctgggagtgcaggtgaccttaaacctggcagaactcctgattaagaacgacggattagcactgactgcaggaatgcaaaatgaacaagaattcacgaatttgtatatgttaaacttgtcattgcctttcattcttcaacaaaaataggtcgatgaccaagtctgcggaagagtggaagctnnnnnnnnnnnncccttactttgagatctttggacgatttgttattaaaagagcaaagtgctgaatcaggaaccttgatatgcctatttccaaaatagtcaaccaaggcaccaggagatgaagaggcttcctttggacagataatacaagccaggctttctcagactccc

SEQ ID NO: 253083 - DNA, 2520 bp, Homo Sapiens
  misc_feature (543)..(543): n is a, c, g, or t
  misc_feature (881)..(892): n is a, c, g, or t
cctggggatccccctaaactgtgaattctgccctggacagggctttgcccttggaggatccccaggtggccttacccgtgattcttactcggcatcctccattccccaaactccctcctccctgttaaatgtcaacctagacctggacctgggtgggaggaaactgtagcctgagtgtccacagggacacacgtgagccacagggctagaagcacaggcccgtcaccccaggaggaaaagcccagggtctggggcagcagagccatcgcatcatgtttcccagggcaacttgaggtctgacttttggctccctcgccctaagaggctcttcctctcttttgctcatccaccttcacaccacttgtgagctgacccccaggaacagcttggctgttccaccagagcagagggaatcattgctggactggatttcttctggagggaagcaccatgaattaaaggtgccagagctccatgcatggaaaagtggcctgttggttcaacgtggtttccttgtacttgatcctcctgaaatgagagatnttcctgagatgactgagtatggagattaccaggcagatgataccgaaatgcttaaaggggctgtggctgaggctgtagcatctctgctggaggtgagacactctgggaactgatttgacctcgaatgctcctaaaagagaacttgatagcctgacagcagagaagtattatttggtgggggagtctgaaaaagcctggcttgtattatctgtccaaaaggaagcctcttcatctcccggtgccttgggtgactattttggaaataggcatatcaaggttcctgattcagcactttgctcttttaataacaaatcgtccaaagatctcaaagtaagggnnnnnnnnnnnnagcttccactcttccgcagacttggtcatcgacctatttttgttgaagaatgaaaggcaatgacaagtttaacataaacaaattcgtgaattcttgttcattttgcattcctgcagtcagtgctaatccgtcgttcttaatcaggagttctgccaggtttaaggtcacctgcactcccagccaagtggtgatgtatgcctcccactctctgcaaggttttcctcatttttatattcatttattcatcattcattcattcacctaactttcattaaatagctgcaccatcccaggccctgtgcggagcatcgggaatacaaagatgagataaaacattgtccctgcccccgggggctcacatgccactggaaacaacagactcttaaactaacaattcaagcaggcgccaagtgctacgacagaggtgtgaataaaagcatcaggaaatcggatggagaaccaccattcacccaagggtcagaggaggtttcaaagaaaaggtgtcattggagcagtgttttgcagaatgagccagagttcaccaagcaggcaaggcaaggaagggtgttgcagagagggaacagcatatgcaaaggcatatcagttcatggcatcacatctttcactggggaagccagtttccacaggcagcatcccaaggttcaataaggccttatttaacaagcaagcaaaatgcaaaccaaaccattattcatttattggcttaagtatgctttctcctgaaaactttagcattgggtgcaaatattcagtatggttctcggagaccaaagggttttaagccagggcacaaccagaaaagtggctctctttggtagggagaggggctccaatatttcgttctctccccatggggcactgacagagaaatgaaatagttttatctggaaaattccagagctattatttactccttaccaagggaagttacttcttgtaaaaacttttaagccatttatcaacaagttcttgttgactcagggcataatgagttcctgagacatgctcttttgggggctggggctttaggtagaagaatttcaaggaaaagaattctcagcagagctcaagattgtagaaactcagcagaagctggtaaaaacatggggagcccggaggacaggctgctgtccagggcagaggccatgaagaagtgcttccgtggccgacagtctggaaatgaatccatcatacattagtgccatagagtttagtaaccgtccagcaagtgtcatcacttttacagaaaacaaggtccagtaatagcaagtcttagtacatcctcacttttattataaatgggtgttttttcataatttttactgacgctcagtaaccatgcaaaattgtgtatagcattaatgtatctacatacctacacctatctatatataagctcatggtagaaaaccatagctaagtagcatcgcagacttaagcgtacaaagtgatcttgttcacaagtaatctgttgacagtgccaataaatgataaaaaaaaaattaacatgtcacaatgtaacggatgaccatatgcacaattccatgaattaaatctgtttcctgtgttagtcagtattcttaaataaaatttataattgaaacatg

SEQ ID NO: 253084 - DNA, 650 bp, Homo Sapiens
  misc_feature (85)..(85): n is a, c, g, or t
  misc_feature (179)..(179): n is a, c, g, or t
  misc_feature (524)..(531): n is a, c, g, or t
ggcataatgagttcctgagacatgctcttttcgggggctggggctttaggtagaagaatttcaaggaaaagaattctcagcagantcaagattgtagaaactcagcagaagctggtaaaaacatggggagccggagacaaggctgctgtcagggcagaggccatgaagaagtgcttccngtggcccgcagtctggaaatgaatccatcatacattagtgccatagagtttaggtaacccgtcccagcaagtgtcatccacctttaacagaaaacaaggtcccagtaatagcaagtcctagtacatccctcacttttattataaatggggtgttttttccataatttttactgacgccccagtaacccatgcaaaattgtgtatagcattaatgtatctacatacctacaccttatcctatatataagctcatggtagaaaaccatagctaagtagcatcgcagacttaagcgtacaaagtgatcttgttcacaagtaatctgttgacagtgccaataaatgatnnnnnnnnaattaacatgtcacaatgtaacggatgaccatatgcacaattccatgaattaaatctgtttcctgtgttagtcagtattcttaaataaaatttataattgaaacatgaaaataaaaaaa

SEQ ID NO: 253085 - DNA, 513 bp, Homo Sapiens
  misc_feature (200)..(211): n is a, c, g, or t
gtgaactaaaggagaactctagatgaatcaaatgagcaggcatgtcttggaaagaaagggaagctggatagaataaaggaattagggaccaaacaagaaggcaatagggactataactacattctaaatgagaaataaggtcaaaatctatatacattctttataaatggatgtccaaagtaatcctagggaggagagcnnnnnnnnnnnncatttccattttcatttaaaaatggatacttgattattggaaaacttacaattgtgtttggaacaacttgggtatttgaatctaattttccaattgcaaattttatgatacctaaatacagataaagtatttccaatgaaaatttagtgtccaaatgagtggggctataaatgtaaaatacactggattttaaagacatggtagaaaaagaacagaaaatattttttgtattgattacatgttgaaacaatattttggctataatgggttaaatatactattaaagttgattttatctgtaa

SEQ ID NO: 253086 - DNA, 604 bp, Homo Sapiens
  misc_feature (84)..(123): n is a, c, g, or t
  misc_feature (151)..(151): n is a, c, g, or t
  misc_feature (482)..(496): n is a, c, g, or t
gaaaggtcaatcagatcatgctagccagtaaataaaattggactgaaaaaaccaaataaaaatcataaaagaatgtgcattatnnnnnnnnnnnnnnnnnnnnnnnnnnnnnnnnnnnnnnnnccaaactccattattcccacccgaaaanaaagtcatacgaaatgttgaaaagcagaggaatcgtggcaactcttagaaagtagaaacaaatgaacaaagcttcatcaaaatagcccaattatttatcatatcacaataactggtgactacctgtacagttgcactatgttcttcatacttacactatacaaaatttacattcaagctgggtctttactactgaaaataaataccataagtaaattgccattagtgttagaaatatgccaggattcttttgttcaattattgcctaaacgttttatctattaaatgcaatcctgtctttcacttcctttactgatacttataattattcnnnnnnnnnnnnnnngttctgtgacattgttcatgtacattatgaaaatagcagccctgtaataaataaaacacaaataaatgaaaacttatgtaggcaaatgttactgaatcagaaagaaaa

SEQ ID NO: 253087 - DNA, 1713 bp, Homo Sapiens
  misc_feature (1197)..(1197): n is a, c, g, or t
aaagtgttacagtctctgattttaatgagtcaatctcaaggcaaagctataaccttttccatgtgaaccttaaaacggaaatcctacgtgtttggctcagctaccatagacatctcttgccccagagttccagtgtatttttcacctttagtttcttggctcctctccgcctctacaccagcctcatatccacacgggatgctctctgctgagtattgtcttgagttagttctccctctcatgttctggctgatgctactcatggtcatagtatcacctgagggggaaggagtatgctatgaaggtgaaaaatgctaccatagcattttgtttgtttataaaatgtcaggccctggttccatttttcccccctcttatatctaaattttgaaaccactggcctctaacagtctgtagtaggcttaagttcaaggtgccatttgcttctctggtgcctgtttgtgagccaaatagaggaagagtatgctagagagagcgctgaccaggaagatcacatcaaaccaacggtgatagaagttgaactgcagttctccaaggacttcagtgattatggtgcggtattctaaaggcatactcattcggatcagcagcacagaggagacaaagtacatgcccattatctgtgctaatagcaggacaatgacattggaggacttactgctagagatggcataaaagaacttggtaagagtgatcagcaatcctctgatggatgtgacgatgattattccaacaagaatgaaggaaatgtgttgggaccaaaacttcacatcaaattggattcccagataattcacagtgatctcaatgcctcttgtgacaggatccgttttcccaactcgatcaaaaacaatattgatggtagccatgaaaattttccaaacacagtaaatagagaaaaagtaaccaagaaaattaaaatatttccccttgaaggttttggagtattctattctctccttggtagcatatagatcagctgtttccagaaaaagctgcctgcttaattcttccaaagcatccacttcctgttgaataagagtaagatcttatttcttttcaaacattatcttcttttatatcttatcttcatgggattgtcttatgccatggtgttatccattttgcacataaggaaagtgaagttcacttcctgatgctgaagtggtaacactntttatcattccccagaaacctgatggtttgttatgcacttcccccttctggaacattgttctccgtgccattgccatccttttctttttgcttatgatcatatccatggtttgcagcagtcgccgttccagggctagaatatccgtgtcagtcacattcctgaggaagtaagacatgtaagtgtatgggcagttgacagcaccaaatccagaaagaagagccatgagagtcactccaatcacaccaacccggctgatgagctgttctatggataagatcccatgttttgggctgagaatgggaaagggatctcctagtttccagaagaaatacataaaggtcagccataagagacaggaaaaaagcagtcgttgtttatgcagtagtcggatattgctcacaataaaatagccaatgtaaaaaggcaccatgaaaaccaggatcagcagaattacacacaggttcattttccagtgaaaataacgggagctgctattcaatactcctaagatttca

SEQ ID NO: 253088 - DNA, 888 bp, Homo Sapiens
  misc_feature (799)..(799): n is a, c, g, or t
gggcctgtggccccagcgtgctgtggcctcggggagtgggaagtggaggcaggagccttccttacacttcgccatgagtttcctcatcgactccagcatcatgattacctcccagatactattttttggatttgggtggcttttcttcatgcgccaattgtttaaagactatgagatacgtcagtatgttgtacaggtgatcttctccgtgacgtttgcattttcttgcaccatgtttgagctcatcatctttgaaatcttaggagtattgaatagcagctcccgttattttcactggaaaatgaacctgtgtgtaattctgctgatcctggttttcatggtgcctttttacattggctattttattgtgagcaatatccgactactgcataaacaacgactgcttttttcctgtctcttatggctgacctttatgtatttcttctggaaactaggagatccctttcccattctcagcccaaaacatgggatcttatccatagaacagctcatcagccgggttggtgtgattggagtgactctcatggctcttctttctggatttggtgctgtcaactgcccatacacttacatgtcttacttcctcaggaatgtgactgacacggatattctagccctggaacggcgactgctgcaaaccatggatatgatcataagcaaaaagaaaaggatggcaatggcacggagaacaatgttccaaaagggggaagtgcataacaaaccatcaggtttctggggaatgataaaaagtgttaccacttcagcatcaggaagtganaatcttactcttattcaacaggaaagtggatgcttttggaagaaattagccaggcagcttttttctgggaaacaggctgaatcttatat

SEQ ID NO: 253089 - DNA, 759 bp, Homo Sapiens
  misc_feature (20)..(20): n is a, c, g, or t
  misc_feature (26)..(26): n is a, c, g, or t
  misc_feature (614)..(627): n is a, c, g, or t
tttcccaggtcaatgccccncagggncagaggaagagaagaataaaaagccagtgtcatagatctaatatataatcttaaagatggtggcataatatgacatatgtattcaagaagtaatggggcaaaaaagaaaggatgcaaagcgctctgttacctgaggaagtaagacatgtaagtgtatgggcagttgacagcaccaaatccagaaagaagagccatgagagtcactccaatcacaccaacccggctgatgagctgttctatggataagatccctaaaaacatcaaggcacattaatgccaggtaatatagacaaaatggctctcatctgtactgcaaaaggaaacattatttaaaacattaaccattacacataactaactcatacaagccaacttttaattattaatgtgtagattatttataataaatatactaaaagtttactgattttcctcctgccccatatgccttcagagtgatctcttttattgggtgatagcagtaaaataataacaacaataattataaataacaatcattgactgtttactcttggtagcatgaatgctaacaaagcaaagtacttttagtaaaagcatcggccaaannnnnnnnnnnnnnctaagaaagtaaatctgctggaaaagtataaatagcaggaactactttgtgctaattatctttgatatatatgtatttcccctaaggtgatactcttttgcttttgtcttattcttttttgcatccaataaa

SEQ ID NO: 253090 - DNA, 679 bp, Homo Sapiens
  misc_feature (583)..(583): n is a, c, g, or t
ctgcagcccgccgaatacctcaacagcgtggtagtggaccaggacgtgagcctgcacagccggcggctccactgggagaccccactgcacttcgataactccacctacatcagcacccactacagccaggtgctgtgggactaccttcaggggaagctgccagtcagcgccaaggcagacgcgcagctcgccaggctggccgccctgcagcacctcagcaaggccaacaggaataccccctcagggacctgctagcttacgtgccaaagcagctgcaacggcaggtgaacacggcctccatcaagaacctgatgggtcaggagctgagacggctggaaggacacagcccccaggaagcacagatcagcttcattgaggccatgagcaagctgcccctcttcggctacaccgtctatggggtgctgcgagtgagcatgcaggccctgtccggacccactctcctggggctcaaccgccagcatctcatactcatggacccctagctcccaaagcctgtactgccgcaatgccctgaagagcctgcaacggctccacctgctaagccctctggaggagaaagggnccccctggcctgtaagtctatggctcagctgacaaccctcagaccatctggtttgagcttgcacaggcccaggagctggtatacccttgctttctg

SEQ ID NO: 253091 - DNA, 927 bp, Homo Sapiens
gcgtgtccggggtcagcccgagcccgtgcgggccctttagggccgggggcgtgtagcgggcccgccccctccccgcggcgcccgcagtccgttaagtgcgagccccggcgcaggggccggatctggccgggggccggcggcggtgtgggagcggcgcgtcatgtacaccatcaccaaggggcccagcaagctggtcgcgcagcgccgcacaggtcccacgcagcagcaggtggagggccggctcggcgagctcctgaaatgccggcagcccgcgccgccgacctcgcagcccccgcgggcgcagccctttgcgcagccgccgggaccctggcccctgtcgagtccagggccaaggcttgtgttcaatcgtgtgaatggccggcgggccccctccacgtccccatccttcgaggggacccaggagacctacacagtggcccacgaggagaatgtccgctttgtgtccgaagcctggcagcaggtgcaacagcagctggatggtggcccagccggtgagggcgggccaaggcctgtgcagtacgtggagaggacccccaatccccggctgcagaactttgtgaccattgacctagacgagtggtgggagaagcagttcctggcgagaatcaccagctgttcctagtggctgctgggagggggcgctgctacacggccgacctgtcgccaggagagaagcatggcgccctgcccacccactgcgcctggctgggtgccggccacacctgaagtgccagcatttggacttttgcacctttttttcccttggcccggctgtcccaaccaagctgccatggccaagggccgaacccgtctgacctcagccctgctcactgtgcccagggaccagcgaccagcccctggggctggcagggaggagctccaggctaataaagtggagaaactgtc

SEQ ID NO: 253092 - DNA, 746 bp, Homo Sapiens
ggtcagaaaatccagtgcacattgcaggacgtcggctcggccctggcgacaccatgctcctcggcccgggaggctcacttaaagtataccacgttcaaggcggggcccatcctggagctggagcagtggatcgacaagtacaccagccagctcccaccactcacggccttcatcctgccttcgggaggcaagatcagctcggcgctgcatttctgccgggccgtgtgccgccgggccgagagacgtgtggtgcctcttgtccagatgggagagaccgatgcgaacgtggccaagttcttaaacagactcagtgactatctcttcacgctagccagatatgcagccatgaaggaggggaatcaagagaaaatatacaagaaaaatgacccatcggccgagtctgagggactctgaaatcacagaaagtgggagcttggaggatccctccatggcgatggccgtggagagaggagcttgcccttctggggtcctggttcctgaagagctcacccagagaggctcaaagcagccttttgtcccagctcagctttgatctacacctcttgccaccttcctcaagggactgtgaccctttggggattctgcccctgaccctgcttccccaagctctcctgggtcttggagggatgtgggaatgaattggcattgcaggaaagacaggtaaagtgattgctgcaatgagaaggagctgtgcggaaaaggaataaaagttggaaaggctggaa

SEQ ID NO: 253093 - DNA, 513 bp, Homo Sapiens
  misc_feature (81)..(81): n is a, c, g, or t
acacggcccggcaaaaaatgcagcgccgagctgatcttgcctcccgacgggaacgctgctccagaagtgggcagggctggnagggaccggtgaggacctggagggacttggggaactggaggacagcgtctgtcaaggcaggatgaaggccgtgagtggtgggagctggctggtgtaacttgtcgatcccactgctcccagctcccaggatgggccccgccttgaaacgtggtatactttaaagtgaagctcccgggccgaggagcatggtgtcgccagggccgagccgacgtcctgcaatgtgcactggattttctgaagctcttcggcaaatgtatggcccttttctgtgactaattccagagcaaacccaatagctgaacttaattcatctgtagttcccacggcttcaaacacttggtcatctttgggtctcctttctcctgtgaaggtactagaaaaccctttgtctcccgttttggtgtaaatcttggggatcctgggtgtcttcga

SEQ ID NO: 253094 - DNA, 420 bp, Homo Sapiens
  misc_feature (83)..(131): n is a, c, g, or t
caggatgtcaagtcagtttcctaaggtgttgaaatggaaattcttccatttcactaattagcattcctttttggatgtttcgnnnnnnnnnnnnnnnnnnnnnnnnnnnnnnnnnnnnnnnnnnnnnnnnnggcttgacagaaaaataacatgttacttttaccagatctaacatgaacatcttctaaggtaaattcgttttcagaatttgtctaaactattcttaggctattcatctaccccgcaacaggacaatgtctgctctgttttagctttctcaatagattgtaagcaaatctctttgcggcacatatttaaaacagaaagacaacatttgatcttatctgatgccagagccttcttgatcttacggaagatgtgaacgagttttcctggaactgtaacacactgccatctggc

SEQ ID NO: 253095 - DNA, 1756 bp, Homo Sapiens
  misc_feature (1554)..(1567): n is a, c, g, or t
gggagcgcgcggggcgagccagcgagagggcgcgagcggcggcgctgcctgcagcctgcagcctgcagcctccggccggccggcgagccagtgcgcgtgcgcggcggcggcctccgcagcgaccggggagcggactgaccggcgggagggctagcgagccagcggtgtgaggcgcgaggcgaggccgagccgcgagcgacatgggggaccgggagcagctgctgcagcgggcgcggctggccgagcaggcggagcgctacgacgacatggcctccgctatgaaggcggtgacagagctgaatgaacctctctccaatgaagatcgaaatctcctctctgtggcctacaagaatgtggttggtgccaggcgatcttcctggagggtcattagcagcattgagcagaaaaccatggctgatggaaacgaaaagaaattggagaaagttaaagcttaccgggagaagattgagaaggagctggagacagtttgcaatgatgtcctgtctctgcttgacaagttcctgatcaagaactgcaatgatttccagtatgagagcaaggtgttttacctgaaaatgaagggtgattactaccgctacttagcagaggtcgcttctggggagaagaaaaacagtgtggtcgaagcttctgaagctgcctacaaggaagcctttgaaatcagcaaagagcagatgcaacccacgcatcccatccggctgggcctggccctcaacttctccgtgttctactatgagatccagaatgcacctgagcaagcctgcctcttagccaaacaagccttcgatgatgccatagctgagctggacacactaaacgaggattcctataaggactccacgctgatcatgcagttgctgcgagacaacctcaccctctggacgagcgaccagcaggatgaagaagcaggagaaggcaactgaagatccttcaggtcccctggcccttccttcacccaccacccccatcatcaccgattcttccttgccacaatcactaaatatctagtgctaaacctatctgtattggcagcacagctactcagatctgcactcctgtctcttgggaagcagtttcagataaatcatgggcattgctggactgatggttgctttgagcccacaggagctccctttttgaattgtgtggagaagtgtgttctgatgaggcattttactatgcctgttgatctatgggaaatctaggcgaaagtaatggggaagattagaaagaattagccaaccaggctacagttgatatttaaaagatccatttaaaacaagctgatagtgtttcgttaagcagtacatcttgtgcatgcaaaaatgaattcacccctcccacctctttcttcaattaatggaaaactgttaagggaagctgatacagagagacaacttgctcctttccatcagctttataataaactgtttaacgtgaggtttcagtagctccttggttttgcctctttaaattatgacgtgcacaaaccttcttttcaatgcaatgcatctgaaagttttgatacttgtaacnnnnnnnnnnnnnnggttgcaattgtttaagaatcatggatttattttttgtaactctttggctattgtccttgtgtatcctgacagcgccatgtgtgtcagcccatgtcaatcaagatgggtgattatgaaatgccagacttctaaaataaatgttttggaattcaatgggtaaataaatgctgctttggggataaaggagg

SEQ ID NO: 253096 - DNA, 495 bp, Homo Sapiens
  misc_feature (95)..(95): n is a, c, g, or t
  misc_feature (103)..(103): n is a, c, g, or t
  misc_feature (168)..(168): n is a, c, g, or t
  misc_feature (312)..(312): n is a, c, g, or t
atgaatgtggccaaagaaaaaaacggtgaagaagggggtggtgggtgaaaggaaaggcccaagggaacctgaaaggaacctttcaattgcccttnctccctgncttccttccatccctgctggtcgcctccgtcccaaagggtgaaggttgtcctccgcagcaactgncatgaatcagcgtggagtccttaataggaatcctcgtttagtgtgtcccagctccagctatggcatcatcgaaggcttgtttggctaagaggcaggcttgctcaggtgcattctggatctcatagtagaacacggagaagttgnaggccaggcccagccggatgggatgcgtgggttgcatctgctctttgctgatttcaaaggcttccttgtaggcagcttcagaagcttcgaccacactgtttttcttctccccagaagcgacctctgctaagtagcggtagtaatcacccttcattttcaggtaaaacaccttctgtgccgaat

SEQ ID NO: 253097 - DNA, 408 bp, Homo Sapiens
cctccaacagggtcacagccctcgccgcctggattatgttgctgaacacagatctgcagctcctcaggcagaatgctcaggaactgctccagtaccagcagttctaagatctgctcctttgtgtgcaactctggcattagccactgatagcaaagttccctgaattgctgacgaaacaattcttggcaggattgagtactcccattctgcttaaatttctcatcccaggaaaagttatcttctactttcactagtattagttcttgttccggaggatcctgaggtatcagggttgaaatcactccagattccacagccattcttggctgaaacagcttagcaaaaagctcagtacaactggttctgtgcttgagaaggagtgtgagtaatctcttctttccgcgaagc

SEQ ID NO: 253098 - DNA, 1059 bp, Homo Sapiens
  misc_feature (769)..(769): n is a, c, g, or t
gcttcgcggaaagaagagattactcacactccttctcaagcacagaaccagttgtactgagctttttgctaagctgtttcagccaagaatggctgtggaatctggagtgatttcaaccctgatacctcaggatcctccggaacaagaactaatactagtgaaagtagaagataacttttcctgggatgagaaatttaagcagaatgggagtactcaatcctgccaagaattgtttcgtcagcaattcagaaaattttgctaccaggagacacctgggccccgggaggctctgagccgactccaggaactttgctatcagtggctaatgccagagttgcacacaaaggagcagatcttagaactgctggtactggagcagttcctgagcattctgcctgaggagctgcagatctgggttcagcaacataatccagaaagcggcgaggaagctgtgaccctgttggaggatttagagagggagtttgatgacccagggcagcaggtcccagctagtccacagggaccagcagtgccatggaaggatttaacatgtctcagagcatcccaagagtcaacagacatccacctccagcccttaaagacacagctgaaatcctggaaaccatgcctttcccctaaaagtgattgtgagaacagtgaaacagcaacaaaagagggcatctcagaagaaaaatcacagggactccctcaggaaccttcatttcgaggaattagtgagcatgaaagcaatttagtgtggaagcaaggnaagtgctacaggggagaaactaagatctccttaccaagggggcagttttagtcaagtgatcttcacaaacaaatctctaggaaagagagacctttatgatgaggctgaaagatgcttgattctaactacagactctataatgtgtcagaaagttcctccagaagagagacctttatagatgtgatgtaagtgggcacagcttcaagcagcattcctctctaacacaacatcagagaacccatactggagaaaagcccttataaatgtaaccagtgtgggaaggcctttta

SEQ ID NO: 253099 - DNA, 740 bp, Homo Sapiens
  misc_feature (345)..(345): n is a, c, g, or t
  misc_feature (366)..(366): n is a, c, g, or t
  misc_feature (408)..(408): n is a, c, g, or t
  misc_feature (444)..(503): n is a, c, g, or t
  misc_feature (558)..(559): n is a, c, g, or t
  misc_feature (569)..(569): n is a, c, g, or t
  misc_feature (585)..(585): n is a, c, g, or t
cggagatattccaggagtgtgggtgacggccttgtgactatctagacattacgggaggcccgagatgggctcaggggcccgaacctctgcggcggcctgcagggaggtcccagaatctagggcaagagctggccctggggtgcggacagtctgatcttgggcccttagcagcctcctctgccagcaccttgctccccactgcccagggctctccaaggccccctctactgaggcagggctgagttgagaacccccagacctacataaggggaaccgctgtttctcagcccagaggtgctaagaggactgaggtagaggagaaccttggtttacccattgtctttntaaattttttatcattatttntattcttgtgaccctcccagaacacaatactcattggctttntatttatttatttatttatttctgagacagcttccnnnnnnnnnnnnnnnnnnnnnnnnnnnnnnnnnnnnnnnnnnnnnnnnnnnnnnnnnnnngcagtgctcaaggaatcctctcccatcagccttcctatctgagactacaggcggnncacactacgngcccagctaatttaanatttacatagagatgaggtctcacttgtgtccaggctggtctcagcgtgagctacaccatgcctgccttcaatggccttgggtgtgtgtttgcgtgaaggggctttgttcttggtgcccaagttggagggcataaccgcacctgtctatggcccg

SEQ ID NO: 253100 - DNA, 590 bp, Homo Sapiens
  misc_feature (12)..(12): n is a, c, g, or t
  misc_feature (84)..(84): n is a, c, g, or t
  misc_feature (181)..(181): n is a, c, g, or t
  misc_feature (487)..(542): n is a, c, g, or t
aggggtgaaatntggtatcctctcaggttgttaacggcatcctggtattgctggtaggctgggtcactctcccccttaaagccnccgatgatgatgacatcgtctccatcttcaaggaactcctggacctgctcaagggtcagaatctctcgtgggccgttgtagtcataaggccttcctntgcggaaaacagggtgggatagccagagacatcaaacctcttggccaggtctgctgcggtggcgtcgacctttgccaggggaattggaggagaacgcttgctgagctccttggcggccttctcatactcgggggcaagtttcttgcagtgtccacaccatggggcataaaactccaccagaatgatatctgcatcattcacaacttcatcaaagttctctttggtcaacacaagcgtgacttctggtggaggcgtccagtcgggctgggagacttctctgaccttggcaacaatttctgaaccccnnnnnnnnnnnnnnnnnnnnnnnnnnnnnnnnnnnnnnnnnnnnnnnnnnnnnnnnagacagaggaagactccatcttcctgggttctggagccctcgtagtct

SEQ ID NO: 253101 - DNA, 346 bp, Homo Sapiens
ccccactgggggcgaagtagatggtggggaagccctccaccatagcggtggcccttgtacttcttggccaggctgttgtacacgggctctagctgcttgcagtgcccgcaccatggcgcgtagaactcgatgaggacgtccttcttggggtccatcacaatggagtcaaaggtccccaccacgaccttgacgggtcccttgttgttcttgggcactggctgggatttgatgactggcttcagccttttttgaaagcagtgacaaactcgcggagggtgtcagagtcaaactcctctggctccatggcgaacttcttcccactctcgtccaggatggcggcattgac

SEQ ID NO: 253102 - DNA, 2478 bp, Homo Sapiens
  misc_feature (1841)..(1862): n is a, c, g, or t
  misc_feature (1981)..(1989): n is a, c, g, or t
gctgggtggcgaattcggcacgaggctgacaaagacacagtgctgctggagttttatgctccatggtgtggacattgcaagcagtttgctccggaatatgaaaaaattgccaacatattaaaggataaagatcctcccattcctgttgccaagatcgatgcaacctcagcgtctgtgctggccagcaggtttgatgtgagtggctaccccaccatcaagatccttaagaaggggcaggctgtagactacgagggctccagaacccaggaagaaattgttgccaaggtcagagaagtctcccagcccgactggacgcctccaccagaagtcacgcttgtgttgaccaaagagaactttgatgaagttgtgaatgatgcagatatcattctggtggagttttatgccccatggtgtggacactgcaagaaacttgcccccgagtatgagaaggccgccaaggagctcagcaagcgttctcctccaattcccctggcaaaggtcgacgccaccgcagaaacagacctggccaagaggtttgatgtctctggctatcccaccctgaaaattttccgcaaaggaaggccttatgactacaacggcccacgagaaaaatatggaatcgttgattacatgatcgagcagtccgggcctccctccaaggagattctgaccctgaagcaggtccaggagttcctgaaggatggagacgatgtcatcatcatcggggtctttaagggggagagtgacccagcctaccagcaataccaggatgccgctaacaacctgagagaagattacaaatttcaccacactttcagcacagaaatagcaaagttcttgaaagtctcccaaggggcagttggttgtaatgcagcctgagaaattccagtccaagtatgagccccggagccacatgatggacgtccagggctccacccaggactcggccatcaaggacttcgtgctgaagtacgccctgcccctggttggccaccgcaaggtgtcaaacgatgctaagcgctacaccaggcgccccctggtggtcgtctactacagtgtggacttcagctttgattacagagctgcaactcagttttggcggagcaaagtcctagaggtggccaaggacttccctgagtacacctttgccattgcggacgaagaggactatgctggggaggtgaaggacctggggctcagcgagagtggggaggatgtcaatgccgccatcctggacgagagtgggaagaagttcgccatggagccagaggagtttgactctgacaccctccgcgagtttgtcactgctttcaaaaaaggaaaactgaagccagtcatcaaatcccagccagtgcccaagaacaacaagggacccgtcaaggtcgtggtgggaaagacctttgactccattgtgatggaccccaagaaggacgtcctcatcgagttctacgcgccatggtgcgggcactgcaagcagctagagcccgtgtacaacagcctggccaagaagtacaagggccaaaagggcctggtcatcgccaagatggacgccactgccaacgacgtccccagcgaccgctataaggtggagggcttccccaccatctacttcgcccccagtggggacaaaaagaacccagttaaatttgagggtggagacagagatctggagcatttgagcaagtttatagaagaacatgccacaaaactgagcaggaccaaggaagagctttgaaggcctgaggtctgcggaaggtgggaggaggcagacgccctgcgtggcccatggtcggggcgtccacgccgaggccggcaacaaacgacagtatctcggattcccnnnnnnnnnnnnnnnnnnnnnnatactttggtgtttcacttcatgctctgaatactgaataaccatgaatgactgaatagtttagtccagatttttacagaggatacatctatttttatcattatttggggtttgaaaaannnnnnnnnacaccttctaatttctttatttctcaaagcagataattcttctgtgtgaaaatgttttctttttttaatttaaggtttaaaattccttttccaaatcatgttgattttgctctttgctttttcgttgtctgagaaattgttggcgtagatttggcttctggtatgtgtttctgattgcttcctgttgagcacaaagtgagagctgccactgagcagccctgcccaggggtgctgtttcaggctgggcatcgccaggcggcctccctgcaaaccaagggctgggggcaaaggggcatgatccagggtcccccagggtgggctcagctccagggagaggccacccacgtggcagccccacctcttgagagcccccagtgccggagcagaaaggaccctggacccagaggcagatactgcggggtggtagaaaaggtagagtaggctgtggcaatggaataaaacacgattaaaaacgttaagaactgcgtt

SEQ ID NO: 253103 - DNA, 616 bp, Homo Sapiens
  misc_feature (15)..(15): n is a, c, g, or t
cactatatatcctcntgcactgaccaatgtaaatgaatgaagaattcaaaaataaattaataaaagagctctgccataaccaatggtgattcaaaatgcttaaggctacccaggaaatgttcctaaactattccaagaaaagtagtagtgaaaacacgacaaatctaagtctatgggaaaaggtacaagaaaaagctctaagacttcaactgccactaaaggtagtaaacatataaacaacagatacaagctgcttgtgggcacatccagaatcagcagttctatgatataaaaatactcaaaatacaaagaaagagtacatcaaaatggcatcagcgacagaagacagtgggctattacctaggtccacaggctcacgatggcctcaggaaacacctacctcatcaggggtatcctttgcatcaggttgtgtggcggctgcccggcgagcaagatttccagcacgaatgttgctgaggttgatctgccgctcaggaggaggcccaccacgaggctgacctcggacaatgatggcgcaccctgagaggacctacgtagggggaagaaagagaaaatgaatggtccagaggccgtatcaccataatgcaggttgtgt

SEQ ID NO: 253104 - DNA, 697 bp, Homo Sapiens
  misc_feature (28)..(29): n is a, c, g, or t
  misc_feature (61)..(61): n is a, c, g, or t
  misc_feature (103)..(103): n is a, c, g, or t
  misc_feature (131)..(132): n is a, c, g, or t
  misc_feature (199)..(199): n is a, c, g, or t
  misc_feature (239)..(239): n is a, c, g, or t
  misc_feature (368)..(368): n is a, c, g, or t
cgacagaaatagctggacattccaaatnntgcttcagttgcatccaaaatgtacaaaaggngaacgaagtccatgaacctctgtttcctcctcatttcccacntgagtttcatcagattgatcttgatcgnncagtactgtgagacaatgtggtcttaacttgcagtctcactacactgtccagcctcggtacccactnggtgttgacagctctgccccatctcccgcagagtaagggnggagtctgtgcataataaaatccttcttcatgtctgaggaaaagcaattctttggtgccctccagccggtctgcaagtgtcctcaggaagccacttaatcgtcttgtagcaacagttgtggattccacntgcaggagcagctgccggggtatgccggtccgtaactccacgtcttcctttgcagtatcaaatacaagccccgagatggtatccaaaaggaaatctccccatgaattgttctggtaggtgctgatggtcacgtgagtcgagtgggccagccccgcaggagtgtccgcttgatgaatggttcctctgggaaagtacaacaaatcacccggcttcagcataaactcatgcaccggcctgccgatcctttcctcggcctccacgctgtactctcgtgccaggggcacagtggggtggtagaggcgccagtgtttctctccctccagctgccc

SEQ ID NO: 253105 - DNA, 3465 bp, Homo Sapiens
  misc_feature (3204)..(3205): n is a, c, g, or t
ctgtctggtggttttggtaatgggggatacctactacctggagtcgttcctgggcccgcgtatgtgcacagaggacctgcccttccaccagccgcgtcgtgtgactccttcaagaaccagctggtcacccgggaagggaatgagctctatcactgtgtcatctacctggcccctggggactaccactgcttccactcccccaccgactggactgtgtcccaccggcgccacttcccaggctccctgatgtcagtgaaccctggcatggctcgctggatcaaagagctcttctgccataacgagcgggtggtcctgacgggggactggaaacatggcttcttctcactgacagctgtgggggccaccaacgtgggctccattcgcatctactttgaccgggacctgcacacaaacagcccaaggcacagcaagggctcctacaatgacttcagcttcgtgacgcacaccaatagagagggcgtccccatgcgtaagggcgagcacctgggcgagttcaacctgggctccaccatcgtgctcatcttcgaggcccccaaggacttcaatttccagctgaaaacaggacagaaaatccgctttggggaagccctgggctcgctctagagtctctttcctgattatggctgctaagggatcttttccaaacagagtgagggtcttttcaagagggaggcccatgaggcaatccaggtaagggcctgcctcagcgtggttgggagtctgaccaggtaggacttgaatgattcggctcccacctgttccagaggtgcagacaagaggtggcgagaccccgtcatgcccctcaacctatcccgttccttctgcctacaaataaaaagtgcaggctggaatgatctcagtcacatttggatctttttaaacactgtatagacggaagagcctgcattcctgaccgaaccttcagttggtctcggttgtcgttttttcttgctgctcctccccccatcacctgagctgttttctgttggccccttttgttttttggccttaacgctcctgctgcacagggtgaggtacctccttggcacagactgtggatgcctctcccccagcagagccacacagccttcgtgacaactgctttccgttcccacattcacctcatcctgctctttagaaaaagcagtctttgtgcttgtggctgaacgcatcaccctggactctgctagtgtcttctgaggacactgatgacactgattaatgatacagacctttgcaggacctgatgagtgacccttctggagctggccaggtcctctgcagcaggcaagaccaatcaatcactgaacctgcctcatggcaccagagtgaacagggcaggcaggtagtaggcccagctggggaaatgggagagttcctgtccccctccacatatccctacatgaaatatgggaaagttgctgctattgattcagggtctgtcttggaggcagaggacccttggtggatagttggtcagtgcctggaaaacctgtcccagtttatcaggaacgcaggcctggggagcccccagtggcggggacagggccagatttcatgttgaccctggggatgctgtgaatttctcctgcaggagagacatcattgaattttttcaactgtatcagtagcacagtatttttgtatgaaaagtgggagacttctgaacagtaattcatttaattgcaaagcattttgaaataaaaaaaatcaaacttaaaactgtgttctgttcctggaggtggcctgaggcctccccgacagcccagcacctgcgttcctggtgcgaacacgctagcacagggcctgccgcagggcctggatgcgggcaacgcaggcgccaatgggctggcgctgagcctggagctcctctgccagcagctggatctgcatttccacctgttccagctctttctgcacctgctgctctacttcctggtcctcaggccccggctcctctctgttcagctccagccacctgcgcaggctgctcgcttgccgccgacaggaccagaggttctgcttggtggtctggtagggcagtagttgctgctggatctcctcaagttcagcctcaaggtccaggctgcctgcagttgaaagtccaggcccagccctggtggctgagaagtccccaggaaggagtaaatgggggtcaaggacactggccagggatgaggggaccgggggcttatccctaggagaagcccgctgtgctgacaccctggctggtgcagccgccccgcagcatgaaggaggaaagaggcagcagcagcagctccgggcctgtgcttgccgtcgggggctgcttcgggccaggggcgcttgacagggccccaggcagggggctgtgtgggaccagtgctgtcggggcctctgccaggaagggccgcgtcagggagggggctgctggctgagccatgcctaggccatgttcctgtggcttctgaggcctctggctctgcgcaggctccaacaggaagtgtgggcgtcgcggctgcttccctcgctgagtgggcagtgttgagctccagggcgtggggctcctcagcagccaggcggcccagagctcccagaggccgagaagcctgtggcctcttggtctcaagggtgccatccccagccccagcagcaatgcggttgagaaggggaccctcaaacgtcactttcctgctgggtgcgatggctgccaggggctgaggcttcccgccccggcccagcactttctgtttccagagcgtggcacagcggcggacggcacgatggagactgtgagccgcctggacctgctgctgggcctgcagctgctgccgggaggccttaatgctggctgcaaagcgcaggagccgcgtggcaccctcctggaggagctgcccctggtaggcctggagcgcccactgcagccgcgccttctttctcctcctttccagtacaaaggccagccacgtggcccacacctttgcctgcagcgagaaggcccagaaccacagggcccgcactgtcgcccgctgctcctgcctcctggctgccagctgttgtctccactggcggaagcaggtccggctgagtctctgtgccagcagttgggtgctctgcctgtgcaggagccctcttcctgacacactgcagatggtgcgttttccaccgggccagcccctccagcagcagctgccggtggtggtnngttgcactgccctctccagctgcagactctgctgggctgacctccggctgcaggcccaccagcgctgaaaccagttcgaaaacagcccttgtccagcaccctttgggcctcccagatgcacaatcctcctgctgggcggaatcatttgccctgaccaagtttcccgcaccttaccaggaccttggaacatagggccctctgaaagagaacttgcttgaaaggttttttgggcttattcctccggcccagggggttctttt

SEQ ID NO: 253106 - DNA, 369 bp, Homo Sapiens
  misc_feature (193)..(201): n is a, c, g, or t
ggcagacagcctcgcctcaataccaatatgaataactgattcccaacatttaagaagaacttgatgctgaactaagtaacctaagctggattcagggccattggcaggcaggcaggcaagcaggaatttttcgtattgcagacagcccctggtggtcatcatctatacatcggatctctaaggacgtgccggnnnnnnnnntctgtgaacacaatcttcccatgctgtattcacatgctctattcacatctttagtttacccaggttgttagagccttgggtaagatgattaaaggcttcacgatggaaatttctgaggcagtcatatacctgctttctcattaaaccaaagtagtccttccagcagac

SEQ ID NO: 253107 - DNA, 926 bp, Homo Sapiens
aaatgcgtttccggtggggtgggcggggcttcgcgtctccttctacggatatctgtggaccttatggaagcaaagactcttggaactgtaacgcccagaaaacctgtcttatctgtcagtgcaagaaaaattaaggacaatgcggctgattggcacaatttaatcctgaagtgggaaaccctcaatgatgcaggttttaccactgcaaataatattgccaacttgaaaatcagtttattgaataaagacaagatagaactagacagcagcagcccagcctcgaaggaaaatgaagaaaaggtgtgtctggaatataacgaggaactggagaagctgtgtgaggaactgcaggccaccttggatgggttgaccaaaatacaggtgaaaatggaaaagctgtcttcaactaccaagggaatttgtgaactagaaaactaccattatggggaggagagtaaacgaccccctctgttccacacgtggcctacaacccatttctatgaggtttcgcataagctcttggagatgtacaggaaggagctgctcctgaagcgcacggtggccaaggagcttgcccacaccggggatcccgacctcaccctgagctacctgtccatgtggctgcaccagccctatgtggagagcgacagcaggctgcatctggagagcatgctgctggagacaggccaccgagctctctgacgtcctgagacggctgtggacactggctccttccacgtctcaccaggcagacagtctgcctaggacccagtgccgcaggcctggatcagaccccaggatcagaccttcttggggtcttctggccagagcttgtcaccagccccatggcctctccaggcgtgctcatgcccctcctgggaatctgtcattcgtgggtgcttcagagtaaaatcaatgagtttctg

SEQ ID NO: 253108 - DNA, 541 bp, Homo Sapiens
  misc_feature (487)..(487): n is a, c, g, or t
gtggaccttatggaagcaaagactcttggaactgtaacgcccagaaaacctgtcttatctgtcagtgcaagaaaaattaaggacaatgcggctgattggcacaaattttaaccctgaaatgggaaaccctcaaatgatgcaggttttaccactgcaaataatattgccaacttgaaaatcagtttattgaataaagacaagatagaactagacagcaggctgcatctggaaagcatgctgctggagacaggccaccgagctctctgacgtcctgagacggctgtggacactggctccttccacgtcttcaccagggcagacagtctgcctaggacccagtccgcaggcctggatcagaccccaggatcagaccttcttggggtcttctggccagagcttgtcaccagccccatggcctctccaggcgtgctcatgcccacaacccgcggccagccccacgtggtgccgctcagccttctctgccccncctgggaatctgtcattcgtgggtgcttcagagtaaaatcaatgagtttctgag

SEQ ID NO: 253109 - DNA, 1166 bp, Homo Sapiens
cgcagatactccctgatagtcgcatcctctgatgacttcaggagcttttgtttcactgtctccttctggtggttgcactgagctctgtgggacgaaagattcctcctgaccctcagatttgcaatggctcccaattcctctagaacttgatgctatactgctccattcatctgtaaagttcagttttattgtgcttgtagttgttccttctgtgctgtagtgcaaacttaaaactggttcacctgtccctggtttggggctcagcttttcattattgttatcagactgatgatgtgtgtggtgtccagatgcctcaacagactgcctttgttcactgtctggagaagatagcaaaggagtagaatgagggctttctgtgggagatgatgtcgaatgagcctgagctgacattgtagaggatgtagaaggctgaagaaattgttcagctggagtatctacgtccattgcagtttcactcacttccaaatcaggacttgatgggaccgtaggaagagttgaaatatctgattgacttgttccacctctgggtcgagatcttcctcgtcctctattgctttgtgcaacctcacttgcttcttcaaaccatcttgataacatatcagacattctctgcatcaatgacacattgggactctgctctccatctcgttctcgttcactctccggccttgctctgggtccagtatctgaccaatcaccacgaagtctcaaacgcttaactggtggttgtcgcaactcttctcttctctcttccgcagaaggagttttaagttctcgtgctgtatcatctttcgggtcaaaaagatatatgtaatctgaagagtaactaacgagaatctcttgaccatcttcactgtaacacagagatgtcactctgcaggacttattattaagatgggaaggaataaaacgggcaaccattccagtagtccctcgacctgcataattccctgtagctcttgtgcccagcattcgccgatcatatattcgtactgagctgtcagaacaaccaacagcaaggtaatatggtattggtgggcaaatagcaacagacgtggcagcacgtcgacagttaattaaaatatcatctttacaatcttccggacgcgtgggtcgacgatatcccgggattccgggccgtacca

SEQ ID NO: 253110 - DNA, 1553 bp, Homo Sapiens
  misc_feature (65)..(65): n is a, c, g, or t
  misc_feature (244)..(244): n is a, c, g, or t
  misc_feature (1488)..(1502): n is a, c, g, or t
cgggttcagaccgtgaagcagattctcgaggtggccatggaagtggcccctcattcgtggaagancgctaggcctcatgggcttcggttgcatgaggcaggcggttgcagtttgagccaaggcctttggattcagcgtcgtattttatgacccctacttgtaggacaagatagagaggtcccagggcatgcagaggggaccctgatacaccctgcagggtttgctgtatcagagtgactgtgtncatcgttgcactgcaatctcaacgaacataaccaccacctcatcaatgactttaccataaagcagatgaggcagggagcattccttgtgaacgcagcccgtggcggcctggtggacgagaaagccttagcacaagccctcaaggaggacaggatacgaggggcagccctcgacgtgcatgagtcagagcccttcagctttgctcagggtccgttgaaagatgccccgaatctcatctgcactcctcacactgcctgggtacagtgagcaggcgtcactggagatgagggaggcagctgccaccgagatccgccgagccatcacaggtcgcatcccagaaagcttaagaaattgtgggaacaaggaattctttgtcacatcagcgccttggtcagtaatagaccagcaagcaattcatcctgagctcaatggtgccacatacagatatccgccaggcatcgtgggtgtggctccaggaggacttcctgcagccatggaagggatcatccctggaggcatcccagtgactcacaacctcccgacagtggcacatccttcccaagcgccctctcccaaccagcccacaaaacacggggacaatcgagagcaccccaacgagcaatagcagagaatgccagaaggtaatcactcagatacacttgggaccaagagacagtgaaaaatagatgaactaagagaaaaagaatcggatggtctttgtaactgattctggacatatgcatcattgatgttgcagtgttgaaactacaagagctagaaaactgaagatgtcgtctgcttacggaagcgctgaaagactaggatgtgatttattaacgaccaacttctgttattgtgtgttaagtttttcatctgtgcatcaaatcacaaaaagaataaatagagctttttcctttatcagtcccttgggcacagcaggtcctgaacaccctgctctacaatgttgcatcaagagttcaaacaacaaaataaaaaatattaagaggaaatccccatcctgtgacttgagtcccttaagtctacaggggctggtgacctctttttgctaataggaaaatcacattactacaaaatggggagaaaactgtttgcctgtggtagacacctgcacgcataggattgaagacagtacaggctgctgtacagagaagcgcctctcacatctgaactgcatactgagcgggcaagtcggttgtaagttcagtaaaaccctctgatgatgcnnnnnnnnnnnnnnngtattaagtttcacaagctgtttgtactcaaatatattttctcagtttcag

SEQ ID NO: 253111 - DNA, 1282 bp, Homo Sapiens
agaagcctcatgctccattacgagttccttcagagagttaagcggctgcccctggagtacagctacggggaatacagagatctcttccgtgattttgggacccactacatcacagaggctgtgcttgggggcatttatgaatacaccctcgttatgaacaaagaggccatggagagaggagattatactcttaacaacgtccatgcctgtgccaaaaatgattttaaaattggtggtgccattgaagaggtctacgtcagtctgggtgtgtctgtaggcaaatgcagaggtattctgaatgaaataaaagacagaaacaagagggacaccatggtggaggacttggtggtcctggtacgaggaggggcaagtgagcacatcaccaccctggcataccaggagctgccgacggcggacctgatgcaggagtggggagacgctgtgcagtacaacccagccatcatcaaagttaaggtggagcctctgtatgaactagtgacagccacagattttgcctattccagcacagtgaggcagaacatgaagcaggcactggaggagttccagaaggaagttagttcctgccactgtgctccctgccaaggaaatggagtccctgtcctgaaaggatcacgctgtgactgcatctgtcctgttggatcccaaggcctagcctgtgaggtctcctatcggaagaatacccccattgatgggaagtggaattgctggtcaaattggtcttcatgctctggaagacgtaagacaagacaaaggcagtgtaacaatccacctcctcaaaatgggggtagcccctgttcaggccctgcttcagaaacacttgactgctcctagcagatgatacagcagtgggctacatacaatgagagccctgagccctcaagaactcacgccagctcagccctacaccagtttccacctggagttcatgcaagggcaaaaggcagtgccatgcaagctgtttaaaataaagatgttaccttgtaaaatgcaagttgatttaaataaatactgagttaaaggcttaagcatctttgtaatcctcaccttactcactctacaattttatttcactcatattgactaccagccaggaattgtgttggaagttgttcacatttcagttccactctctagccgtgactggtataaataggtgcttaataatgaatcaatgaataaatattaatgcattctttccttgatgagtacaaggtcttgttcaataataatggtagctactggttattggatgactactatg

SEQ ID NO: 253112 - DNA, 715 bp, Homo Sapiens
  misc_feature (542)..(542): n is a, c, g, or t
  misc_feature (592)..(635): n is a, c, g, or t
aaacccctgtcgcagccaaaatagaaaagaggctggtgcaggggctccccttcctctgttatctgggagggccagcctctagtcttacatcagcccaaactttgaggataaggagggtaaggatagggtaagtggccacactggacaagaagctttgcttgggaggggaggctgctggatgacaccatcagctcagtattcctttgcaatcaggagggctgatgttccaaagaagagttcagaaaaagcatggtatcctgtgaaggaaagccgtgacataggcccaaggagatggagccaaggcctgtcaaggaagaaaaggacttttcccaccaagagttggagaaagaagacaccaggactacttcttcctcttcccagtgggtggcagcacggatctctaagagctggccaggtgctccacctggatggtgctggtggtgacagtgaggcagatgtccttatgatgctccaccgtcttatacggggtcaggtcaaaggaacactggggtgcagggttgggattgctgtccccaccaccncccaccctggggggctgccccaggagactggaagtgtggtggtggctgtnnnnnnnnnnnnnnnnnnnnnnnnnnnnnnnnnnnnnnnnnnnntgatgcctgggaggcctgggcctgggcctgggcttgagcctgagcctgagcctgggcttgagcttgagcctccgcctggg

SEQ ID NO: 253113 - DNA, 970 bp, Homo Sapiens
  misc_feature (71)..(103): n is a, c, g, or t
  misc_feature (555)..(555): n is a, c, g, or t
  misc_feature (897)..(929): n is a, c, g, or t
gaaaattctcagagataatgcatttataaacacagaaatggttacaacaaagatggccgtgatgagtgggnnnnnnnnnnnnnnnnnnnnnnnnnnnnnnnnnaatccgtgtccggcatctgactgtggcacctagggagctaagtccagtccttgcgtttgccttgaactctcccttctccgcaacacccctgttttggagtttcacagataacacaaagcctcccacagctccttgggggtgggttggggagactgagagtatagggtctttgtaggcagagaaggagagaggcttcaaggaaatccgtaaaaccataacacacacttctaagccacctgtgaccaacttgggaatttctggccccttgggaccacatctcagcccttgcccccttcaaataaaaggaggtctagcccctaccccaaatctccttctaccagcagtcaataggaagcaaagtgagacgatgtaggggaagaaatggctctcagggactaaggcattttgagaaacctctgttcttttgcaggcaagaatagaacaagaggctnggttgcatttggggctcccttttctctgttatctgggagggccagcctctagtcttacactcagccccaactttgaggataaggagggtaaggataagggtaaagtgggccacactggacaaggttctatgaggtcatagcaaatccttcccttgagcaccgacccccagttttagaagctttgcttgggaggggaggctgctggatgacaccatcagctcacgtattcctttgcaatcaggagggctgatgttccttttgaagaagagttcagaaaaaggatggtatcccccgcgccgtaatggccgaattcccgggcatatgtccggtaccgtcgactgnnnnnnnnnnnnnnnnnnnnnnnnnnnnnnnnnctgcggccgcttcctcgctaatctactccgctgcgctcgtc

SEQ ID NO: 253114 - DNA, 1270 bp, Homo Sapiens
  misc_feature (75)..(75): n is a, c, g, or t
  misc_feature (831)..(871): n is a, c, g, or t
  misc_feature (888)..(950): n is a, c, g, or t
  misc_feature (955)..(991): n is a, c, g, or t
taccccaacaattcctcagcccccttgcccccctttcaaaattaaaaaaggaaggtcctagcccccttacccccnaaaatctcctttctaccagcaagtcaatagggaagcaaaagtgagaacgatgtaggggaaagaaatggctcctcagggactgaggcatttgaggaaacctcttgttctttttgcaggccaagaatagaacaagaggctggttgcatttggggctcccttttctctgttatctgggagggccagcctctagtcttacatcagcccaaactttgaggataaggagggtaaggatagggtaagtggccacactggacaaggttctatgaggtcatagcaaatccttcccttgagcaccgacccccagttttagaagctttgcttgggaggggaggctgctggatgacaccatcagctcagtattcctttgcaatcaggagggctgatgttccttttgaagaagagttcagaaaaaggatggtatcctgtgaaggaaagccgtgacagaggcccaaggagatggagccaaggcctgtcaaggaagaaaaggacttttcccaccaagagttggagaaagaagacaccaggactacttcttcctcttcccagtgggtggcagcacggatctctaagagctggccaggtgctccacctggatggtgctggtggtgacagtgaggcagatgtccttatgatgctccgccgtcttatacggggtcaggtcaaaggaacactggggtggagggttgggattgctgtccccaccacccccaccctggggggctgccccaggagactggaagtgtggtggtggctgtnnnnnnnnnnnnnnnnnnnnnnnnnnnnnnnnnnnnnnnnntgatgcctgggaggccnnnnnnnnnnnnnnnnnnnnnnnnnnnnnnnnnnnnnnnnnnnnnnnnnnnnnnnnnnnnnnngccannnnnnnnnnnnnnnnnnnnnnnnnnnnnnnnnnnnnaagatcaggcgggttgtgtttgcgcatatgtttcataaggtatgtttctgatgtgtatgcccgactgcagatagtgcaggtgtacaccttggcatgcttcactgtgtgcgtagacaggtgcacctctagtgaggctgcatccgtgtacgcccgatgacagttgtggcacttgaagggtttatctttgttgtgttgccgtctgtgcggacgcgtgggtcgacgatatccagggattccggaccggaccagcctgcttatatagccgaccccacgtgttca

SEQ ID NO: 253115 - DNA, 785 bp, Homo Sapiens
  misc_feature (51)..(51): n is a, c, g, or t
acaccagtcatggggggatgaaaccgggcaaagaacaaatggtgtcacagnctgtgtgtgcctgcatgtgtggaatgcgtgtagcctgtgccgggggtggagatgagggataggacagaaaatggcccatccaaccccacatcctggccgggcgtgtccaggtccctgtggggcgagggggctgccccagacgtgacagggacttggctctgagggtcaggacctggctgggaacacacccattgaagagggaacagaaaccaggccctgggacgctagagaccccaagagctacctggctgggtctatggtcagggctgtagtggaggaaggtgtcaggatggccattgtctcaactcctgtgggcggcacagccccaggctgggcctctgggaggagggtgggatggatgggagatcagagcccctggcgcctgggacaagggttggcctggatgtggggccccaggtgggcagggcctgggagccgccacagtatgtgacaacagaccccaccctggacccccgtgctgggggctgggtcccaccgctctcctctccacgtctctcttggcgatgcccagcttgggctgggcgcagggaagggcaaacgttgctgagccgccgaggggctgggtcttcgcctttatttctggtgcacgtctagaggggcccgggcagaggccacccacggtccctgaagtagggcctcagctcctccaggctgagcggagggaagtaggctccgatcctcttccgcacccaccacttgccctcgtgccgaat

SEQ ID NO: 253116 - DNA, 637 bp, Homo Sapiens
gggggggcgggtccacgccagcccggaagagacgcagcaccgcgcatgctccttcttttccagccccggtaccggaccctgcagccgcagagatgttgatgcctaagaagaaccggattgccatttatgaactcctttttaaggagggagtcatggtggccaagaaggatgtccacatgcctaagcacccggagctggcagacaagaatgtgcccaaccttcatgtcatgaaggccatgcagtctctcaagtcccgaggctacgtgaaggaacagtttgcctggagacatttctactggtaccttaccaatgagggtatccagtatctccgtgattaccttcatctgcccccggagattgtgcctgccaccctacgccgtagccgtccagagactggcaggcctcggcctaaaggtctggagggtgagcgacctgcgagactcacaagaggggaagctgacagagatacctacagacggagtgctgtgccacctggtgccgacaagaaagccgaggctggggctgggtcagcaaccgaattccagtttagaggcggatttggtcgtggacgtggtcagccacctcagtaaaattggagaggattcttttgcattgaataaacttacagccaaaaaaa

SEQ ID NO: 253117 - DNA, 894 bp, Homo Sapiens
  misc_feature (24)..(24): n is a, c, g, or t
  misc_feature (715)..(717): n is a, c, g, or t
  misc_feature (719)..(734): n is a, c, g, or t
  misc_feature (736)..(738): n is a, c, g, or t
  misc_feature (740)..(748): n is a, c, g, or t
  misc_feature (750)..(752): n is a, c, g, or t
  misc_feature (754)..(756): n is a, c, g, or t
  misc_feature (758)..(758): n is a, c, g, or t
  misc_feature (760)..(760): n is a, c, g, or t
  misc_feature (762)..(764): n is a, c, g, or t
  misc_feature (769)..(769): n is a, c, g, or t
  misc_feature (772)..(772): n is a, c, g, or t
  misc_feature (774)..(774): n is a, c, g, or t
  misc_feature (783)..(785): n is a, c, g, or t
  misc_feature (793)..(794): n is a, c, g, or t
  misc_feature (798)..(798): n is a, c, g, or t
  misc_feature (802)..(803): n is a, c, g, or t
  misc_feature (806)..(809): n is a, c, g, or t
gcaaagaccgcttcccacagcgcntggtccacctgatcgtcggtgagcacgacaggcttgtaccatgaaagagccgctcgttggtctcgaagccagctgctggggcccgaaccacccgcaaatgcgccggcctcgtgccgaattcggcacgagggaccctgcagccgcagagatgttgatgcctaagaagaaccggattgccatttatgaactcctttttaaggagggagtcatggtggccaagaaggatgtccacatgcctaagcacccggagctggcagacaagaatgtgcccaaccttcatgtcatgaaggccatgcagtctctcaagtcccgaggctacgtgaaggaacagtttgcctggagacatttctactggtaccttaccaatgagggtatccagtatctccgtgattaccttcatctgcccccggagattgtgcctgccaccctacgccgtagccgtccagagactggcaggcctcggcctaaaggtctggagggtgagcgacctgcgagactcacaagaggggaagctgacagagatacctacagacggagtgctgtgccacctggtgccgacaagaaagccgaggctggggctgggtcagcaaccgaattccagtttagaggcggatttggtcgtggacgtggtcagccacctcagtaaaattggagaggattcttttgcattgaataaacttacagccaaaannnannnnnnnnnnnnnnnnannnannnnnnnnnannnannnananannnaaaanaananacccttttnnnaaaaaaannaaanaaannaannnnaaaatggtgggcggcccttcggcccctcaaaaaatctttcctaaaaccatttccttttggggcccgccgggccccaaataaggaa

SEQ ID NO: 253118 - DNA, 1188 bp, Homo Sapiens
  misc_feature (858)..(886): n is a, c, g, or t
  misc_feature (918)..(918): n is a, c, g, or t
  misc_feature (932)..(948): n is a, c, g, or t
ggggcagaggtgagtttctgtggcgttcgagttccatcggctcccatccgggctatcctgccgccttagcggctgcttctccccaggatgcgggcagggggcctctctcccactccccacacaccgatttctgagtagcgataggggctggaggcttattttatggggtagggggccgctggtaggcgaagattgtccgagggagagggggaggatgaagccagtgcgtggcggagacttgccagatgttgatgcctaagaagaaccggattgccatttatgaactcctttttaaggagggagtcatggtggccaagaaggatgtccacatgcctaagcacccggagctggcagacaagaatgtgcccaaccttcatgtcatgaaggccatgcagtctctcaagtcccgaggctacgtgaaggaacagtttgcctggagacatttctactggtaccttaccaatgagggtatccagtatctccgtgattaccttcatctgcccccggagattgtgcctgccaccctacgccgtagccgtccagagactggcaggcctcggcctaaaggtctggagggtgagcgacctgcgagactcacaagaggggaagctgacagagatacctacagacggagtgctgtgccacctggtgccgacaagaaagccgaggctggggctgggtcagcaaccgaattccagtttagaggcggatttggtcgtggacgtggtcagccacctcagtaaaattggagaggattcttttgcattgaataaacttacagcccaaaaaactttgcctgccccgccgtccgagccccgcgctacaagagatcccccgcgccgtcgggcgggcctgaannnnnnnnnnnnnnnnnnnnnnnnnnnnntcacaaacgaccgccccggagggggaaaaagncccttttggcgggnnnnnnnnnnnnnnnnnaacaaaattttttccaaccctttttcggtgtggggggtggggccccccactcacgggacggggcaccccggctcgaacgaccctgcgccgaacacaagaaacccgcggcgcacaccacgccggccgccctggccattctccgcccccatacaaaaacccgcccgtagggtgccccgcctctgcgcggccgcggcgtacacacatcccccggaacagcgccgcgcgcccccgcccttactc

SEQ ID NO: 253119 - DNA, 924 bp, Homo Sapiens
  misc_feature (279)..(313): n is a, c, g, or t
gtcccacaattaaagccgcctcagggaagccccccatttgggaatttgtctcagagaacgctctcggtttttccccccggggcgcttctttttaatttggggaggaaattccaaaacccctttggttcattgaccccggggttttctccttggggaacccagcttattgccccaatgttccccctttcccctacggggggcccggccgcccccaaaaccggaaaggtttttagaaaaccttttttcgagggggcccgagggccggcccgcaccaggcannnnnnnnnnnnnnnnnnnnnnnnnnnnnnnnnnngccttgtaaagttttatttccaatgccaaaaagaatccctctccccaattttactggagggtgggttgacccacgtcccacgaccaaaatcccgcctctaaaacgtggaatttcggttggtgacccagccccagccttcggctttcttgtcggcccccaggtggcacagcactccgtctgtaggtatctctgtcagcttccccctcttgtgagtctcgcaggtcgctcaccctccagacctttaggccgaggcctgccagtctctggacggctacggcgtagggtggcaggcacaatctccgggggcagatgaaggtaatcacggagatactggataccctcattggtaaggtaccagtagaaatgtctccaggcaaactgttccttcacgtagcctcgggacttgagagactgcatggccttcatgacatgaaggttgggcacattcttgtctgccagctccgggtgcttaggcatgtggacatccttcttggccaccatgactccctccttaaaaaggagttcataaatggcaatccggttcttcttaggcatcaacatctctgcggctgcagggtccggtaccggggctggaaaagaaggagcatccc

SEQ ID NO: 253120 - DNA, 584 bp, Homo Sapiens
aacaaacccaccacccagaggacagacaaagaaaagcaccctcccaaaggagcccgcatgataagtggccacggcgaacatcactgtgatcagtcagaaaggcaggcgagattagcttagccctgaacctcctacttaatgtagaaccagtggtgatggttaacagaccctggctgcagtgacaagcctgggacctgctcgaggaaatccaattgaaaagcagccaagaggaacaacaagctagaaacagatgttccagctaccaggatgtgcacgcatttaacctgaacatgtagttggggtggaatggtagcattcgtttctaaatatagtgatttcactgtcaaacagcaatttctttaaaataagaagatgtcagaatgataactgctattaagggaattcagggtgtttggtttatctacccagtcttactaaacacatttcagttaaatcatccactcttaaactccagtctcatagcaattaaaaattatcttttaaaaaattgcccaaatgaaattccaacagttcatgtaattatttgatttaatattaccatgttagtaaaatatctttaagat

SEQ ID NO: 253121 - DNA, 1574 bp, Homo Sapiens
  misc_feature (1509)..(1517): n is a, c, g, or t
tgctgttctcaagtgtggccacctaactgctgatgtacaagtcttccccaggccagaaccttttgttgtagatgaagaaattgatcctatccctaaagtcattaacacagatttggaaatagtgggatttattgatatagctgatatttcaagtcccccagttctgtccagacatctggtcttacctatagcacttaacaaagaaggtgatgaggtgggtactggcatcactgatgacaatgaagatgaaaattcagccaatcagattgcaggcaaaatacccaacttttgtgtcctgctccatggtagcctaaaagtggaaggaatggtagcgattgttcaattaggtcctgaatggcatggaatgctctactcccaagctgacagcaagaagaaatcaaacctcatgatgtctctctttgagcctggcccagaacctctcccatggctagggaaaatggcacagttgggtcctatttcagatgctaaagaaaacccttatggcgaggatgacaataagagtccattccccctgcagcccaaaaacaaacgcagttatgcccagaatgtgactgtctggatcaaacccagcggcctgcagacagatgtacagaagattttaagaaatgcaaggaaactacctgaaaaaacacagacattctataaggagctgaaccgtttgcgaaaggccgctctagcctttggtttcctggacctgctgaaaggggtggctgacatgctggaaagggaatgcacactgctgcctgagacagcccaccctgatgctgcattccagctgacccatgctgcccagcagctcaagctggccagtaccggcacctctgagtatgccgcttatgaccagaacatcacacctttgcacacggacttctctgggagcagcactgaaagaatttgaaactgacttttggagctttccttcttttttcatttcaactgaaaatgctttaggtaaaaacctttccagtatgttcacctctagaatagccacccaaagaccttcctgaggctgcctcagaagcaccacttgctgttttgaatgactctactagtatgagaaggatgtgaaggtggttggctggttgggctttaacttcctgggattcataatttttaagcttggaagatagctgctgttcccatgatgggcacatttcctgagaagcttgaatgactgatgagcatagagcacccctgccttcctcaggaaacctgaccggcaggggctctctggcttcctgaaagcttcacctcttccctcgtttatatctcaactgtaagggcattttcaagcttctgttcatggaatgagcaactcagactgtctggagcttgctgagtacaaacacaccaccactaagtttcagaactttccttagaacttgggcaaaatgtggtggtaactcttaagtgcttttggtatctcttgagattctaacttttaaagagcaaccattaatgtgtaaaatgattcctattattcaaggnnnnnnnnnaatgaaaataaaatatttgattttctagaaaatggtttcactatgaaactaaaggtc

SEQ ID NO: 253122 - DNA, 363 bp, Homo Sapiens
  misc_feature (27)..(27): n is a, c, g, or t
  misc_feature (302)..(302): n is a, c, g, or t
ccagatgtcatttcaagaatgtctttncttataagaagctaaagaaaacccttatggcgaggatgacaataagagtccattccccctgcagcccaaaaacaaacgcagttatgcccagaatgtgactgtctgggatcaaacccagcggcctgcaggtaacattaccatttatgttgctttccactggggacaggagacatttggggtagggcagggcagggcattttatttgattttcttttcctttgatacttaggtaattcatttacttctaatgtttgtcattatttcccaaaaggggntttgaggatgccctacaggtaaaacatgtatataggcaaaatcattttttacaaaatttgg

SEQ ID NO: 253123 - DNA, 1604 bp, Homo Sapiens
aagtctcactcaattttatggaaaagtttaaaactttaaaagttacaaagtagtatcccccctgcccattattaaccattaacaagcattgtactgttagtgcagctaaagtaattatatcagaaaaacatatcaattgtcattttgtccaccggcagtattgtaaggaaatgatgctgcaagaaaagcagacaaatatggacttcccaacatagggacgtgaagcaggtgtattaaaaataaggatgcatataaaactaagacacaaaatgaatccctgagctgagtttgcatccgaaaacatcacgttcacacttcatttgggtgaaaatgaacaaggacacttctcatgggcaaccacggggctttggcttcacacagatgtgatcaataacgacagtagcgggctccaagagtacattaatctcagaaaaaatagtgggtatagtctccacagggatttgcttctcagataagtagaactatggcctgccatgaaattgagagctcatgaatatagatggttgagtgtatcagtcttcaaagcatttaaaacatacttttgtttttgttttatcagtgcaatttgtttttgaagacgccggaaaactatttcatttaacctgagcaattaaaacgtgtcaaatcacagctgtcacagttaggtttgataaaattaattgttagcatccttattactggcacagctgtgatatttctggatttgactatgcacctgctgcaggaaaacatgataaaatgtcatttagatctctaactacaagaccgttagactagagagctctttaaggcaaggacatgaaaactgcgtacttttatacctcgcttaagtcagtgacagatttaccaatgacaacacaattttaaaattccaacacatatattactttgtcctatgaagggcaaaaagtcaatatattttaaattttaaaaacagaatggatataatgacctttttacacatcagtgatatttaaaagacttaaagagacaatactatggttgagacactggcttcctattccagccctaattaaagaaaaaatagctagtatgtttctaattgaaactagagtgaactgggcatcttcaaagttatcattttcttggatataaaaaaaccaaaagacctgggaaagaaaaacaagtgttttacagaaatgaagcaaacacattttcacatgacataatcattgacttggtggtacacagctcaagtccagctttcactgatatttcctcattagattaataattttattataaagcctccaaggggcatccaggccccaaatgaagtcaagatgctcccattccggaatgctctcatggaacaccaagttggtgatctgagtcagtaagatattgacgtcgtagacatctgcaagccagtcgtgacccccgctccagactgcagtcggcacaagcatgtccttcacattgtatgtgggaggataactctggttgtaatgaaaataattcttggcactgcttccccagtcaaggcttgaaacttttggaatttaacagcctggctccagtgtaacatgttttgcacagaagttccagcaggagaatgtgtt

SEQ ID NO: 253124 - DNA, 400 bp, Homo Sapiens
ggtaggtccataccgacagcacctgtgctgctcgactccccccactgggtgggtgcataccgacagcacctgtgctgctcgactccccccactgggtaggtccatactgacagcacctgtgctgctcgactccccccactgggtaggtccataccgacagcacctgtgctgctcgactacccgccgggtaggtccataccgacagcacctgtgcccctcacctccctgccagacggtgcgtgtgccgcttggctccccaccaggtaggtccataccgacagcacctgtgccgctcacctccccaccgggtaggtccataccgacagcacctgtgccgctcacctccctgtcgggtaggtccataccgacggcgcgtgtgccgcttggctcggccctgact

SEQ ID NO: 253125 - DNA, 392 bp, Homo Sapiens
gaactagtggatcccccgggctgaggaattcggcacgaggacacagctgaggctgatcctgagaaagtgaaaaaagagctgctggcttacgatgtggtatgtgaagattatggaggtgatgttcaagcagtgcctgtctccgcacttacgggcgataatctgatggctttggcagaagcaacagttgctcttgcagaaatgttagaattgaaagcagatcccaatggtccagtggaaggaacagtaatagagtctttcacagacaaaggaagaggtcttgttactacagctataattcaaagaggaactttaagaaaaggctctgttctggttgctggaaaatgttgggcagtacgctttgtttgatgtggagccttccttctgcaggagag

SEQ ID NO: 253126 - DNA, 1307 bp, Homo Sapiens
ggcctgggtggcgaattcggcacgaggatttagatgaagtctggatcaaagaagtgataacgaaggcagggatgaagttaaagtggagtaaattaaaacaggacaaagtcagaaaaaataaagatgctgtaagaaggccccaggcagatccagctttattaaccccaaggtccccagttgttactataatgggccatgttgatcacgggaaaacgacattacttgacaaatttcgaaaaactcaagtggcagcagtggaaactggaggcatcactcagcacattggtgcctttcttgttcctattatccttgccgtaaataaatgtgacaaagctgaggctgatcctgagaaagtgaaaaaagagctgctggcttatgatgtggtatgtgaagattatggaggtgatgttcaagcagtgcctgtctccgcacttacgggcgataatctgatggctttggcagaagcaacagttgctcttgcagaaatgttagaattgaaagcagatcccaatggtccagtggaaggaacagtaatagagtctttcacagacaaaggaagaggtcttgttactacagctataattcaaagaggaactttaagaaaaggctctgttctggttgctggaaaatgttgggcaaaagtacgcttaatgtttgatgaaaatggaaaaacaattgatgaggcctatcccagcatgccagtgggaattacaggctggagagaacttccttctgcaggagaagaaattcttgaagtagaatctgagccaagggcacgtgaagttgttgactggaggaaatatgaacaagaacaggagaaaggtcaggaggatctgaaaataatagaagaaaagcgaaaggaacacaaagaagcacatcagaaagcccgtgagaagtatggccatctactgtggaagaagagatcaattctacggtttttagaaagaaaagaacaaatacccttaaagccaaaagagaaaagggaaagagattcaaatgtactttctgtgattattaaaggtgatgttgatggttctgttgaggccattttgaacattatagatacctatgatgcttcacacgagtgtgaactagaattagtacattttggagtgggtgatgtaagtgcaaatgatgttaaccttgctgaaacatttgatggtgttatatatggctttaatgtgaatgcaggcaatgttatccaacagtcagctgcaaaaaaaggagtaaaaattaaacttcacaaaataatttaccgtcttgttgaagatttgcaagaggaactgagcagcagattaccctgtgct

SEQ ID NO: 253127 - DNA, 745 bp, Homo Sapiens
  misc_feature (81)..(81): n is a, c, g, or t
  misc_feature (494)..(507): n is a, c, g, or t
aaggaagcgaggcctgggtggcgaattcggcacgaggcttaaagccaaaagagaaaagggaaagagattcaaatgtacttntctgtgattattaaaggtgatgttgatggttctgttgaggccattttgaacattatagatacctatgatgcttcacacgagtgtgaactagaattagtacattttggagtgggtgatataagtgcaaatgatgttaaccttgctgaaacatttgatggtgttatatatggctttaatgtgaatgcaggcaatgttatccaacagtcagctgcaaaaaaaggagtaaaaattaaacttcacaaaataatttaccgtcttgttgaagatttgcaagaggaactgagcagcagattaccctgtgctgtggaagagcacccagtaggtgaggcatctatactagctaccttctctgtaacagaagggaagaaaaaagttcctgtggctggctgcagagtccaaaagggacagttagnnnnnnnnnnnnnntttaaactaacccgtaatggacatgtaatttggaagggctcattaacctcattgaaacaccataaagatgacatttcaattgtcaaaacgggaaatggattgtggtctcagtttagatgaagacaatatggaatttcaagtgggagacagaattgtttgttatgaagaaaagcaaattcaagccaagactttcttgggatccaggattttaaaattacattaaaaatgcaactaactc

SEQ ID NO: 253128 - DNA, 652 bp, Homo Sapiens
tactgcttccattcccaaaccagtttttaagttttctcatcaaaaaggaaatttctttccaaggagctattttaggcctgatccttgtacttagaacctttccaaatactctgggagtttatttccagtttagaatttcagaatgtcagccttgaacagatttaagcaaatctggtttctttccctattaacaagttagttaggatatttcagaaacacaagttattgatgtgaaattacacatgtgaattcaaaaataaaaattagaaaatcaggaaaacctgcacacatcatcacacaatgaaggcaaaaataaaaattagaacagccatggcctaggctgcctgctaagttaaaaaacaacagcaatcaaggaaaaccagattatgcctaaatcttatgagttataatttctgtcacatgatgtgaaaaaaacacaaccccacaaatgacttggtaataattatctcagaagacaactctgagaacaaaaaccaaaaaaacacatcacacccttccagttaaaaactattatcgtagtgagatactaaattatttaaatacaatcaagaaaacgaagtttgctagcacagtctgttggagagaaatgagaacttcatttagtgagcttcatttaatgattctgtcttac

SEQ ID NO: 253129 - DNA, 391 bp, Homo Sapiens
atcccccgggctgcaggattcggcacggcagcatcttccctgacggtcaccttagggcggctggcgtccgcgtgcagccacagcatcctgagaccttcggggcccggagcagcctccctttggtctgcttctcgaaggttcaattcacagagcacttcatatctaccaggatatgttcctgaggagaccagacaccatgcagaggtcgtgaagaaggtgaatgagatgatcgtcacggggcagtatggcaggctctttgccgtggtgcactttgccagccgccagtggaaggtgacctctgaagacctgatcttaattggtgaactagaccttgcgtgtggagagagaattcgactggagaaggtcctggctggttgggcagacaacttca

SEQ ID NO: 253130 - DNA, 849 bp, Homo Sapiens
  misc_feature (720)..(720): n is a, c, g, or t
  misc_feature (725)..(725): n is a, c, g, or t
  misc_feature (728)..(728): n is a, c, g, or t
  misc_feature (731)..(731): n is a, c, g, or t
  misc_feature (739)..(739): n is a, c, g, or t
  misc_feature (746)..(746): n is a, c, g, or t
  misc_feature (749)..(749): n is a, c, g, or t
  misc_feature (752)..(752): n is a, c, g, or t
acggacgcgaggcctgggtggcgaattcggcacgaggccgaggctgcggccatggcagcatcttccctgacggtcaccttagggcggctggcgtccgcgtgcagccacagcatcctgagaccttcggggcccggagcagcctccctttggtctgcttctcgaaggttcaattcacagagcacttcatatctaccaggatatgttcctaaaacatccctgagttcaccaccttggccagaagttgttctgccagacccagttgaggagaccagacaccatgcagaggtcgtgaagaaggtgaatgagatgatcgtcacggggcagtatggcaggctctttgccgtggtgcactttgccagccgccagtggaaggtgacctctgaagacctgatcttaattggaaatgaactagaccttgcgtgtggagagagaattcgactggagaaggtcctgctggttggggcagacaacttcacgctgcttggcaagccactcctcggaaaggatcttgttcgagtagaagccacagtcattgaaaagacagaatcatggccaagaatcattatgagattcaggaaaaggaaaaacttcaagaagaaaagaatcgtcacgaccccgcagactgtcctccggataaacagcattgagattgctccgtgtttgttgtgattaccgagttaatacttacaaaaggataaaaataaactcctgccttccccngaaanaanaanaaaaaacnacaaaanaanaanaccttgtgcgggccggccttcggccctttcgagaaggctttttctaaaaaccaattcccgtttggggggcgccgggggcccccaaataggggtaaat

SEQ ID NO: 253131 - DNA, 538 bp, Homo Sapiens
  misc_feature (16)..(16): n is a, c, g, or t
  misc_feature (21)..(21): n is a, c, g, or t
  misc_feature (43)..(43): n is a, c, g, or t
  misc_feature (62)..(62): n is a, c, g, or t
  misc_feature (80)..(80): n is a, c, g, or t
  misc_feature (85)..(85): n is a, c, g, or t
  misc_feature (100)..(100): n is a, c, g, or t
  misc_feature (121)..(121): n is a, c, g, or t
  misc_feature (127)..(127): n is a, c, g, or t
  misc_feature (147)..(147): n is a, c, g, or t
  misc_feature (198)..(198): n is a, c, g, or t
  misc_feature (239)..(239): n is a, c, g, or t
aaactcaaaaagaatnctggncccatgaatctgacttttcaangaatgtggccttcctactngaaacaaaaacctttccngaagnaatggcttgccaaanaacgtgaaattgtctgccccnaaccancaggaaccttctcccaatcnaaattctcctctcccacacgccaaggtcctaattcaatttcccaattaaanatcaaggtcttcaaaagtcaccttcccactggcggctggcnaaagtgccaccacggcaaaagagcctgcccatactgccccgtgaacgatcatctcattcaccttcttcacgacctctgcatggtgtctggtctcctcaactgggtctggcagaacaacttctggccaaggtggtgaactcagggatgttttaggaacatatcctggtagatatgaagtgctctgtgaattgaaccttcgagaagcagaccaaagggaggctgctccgggccccgaaggtctcaggatgctgtggctgcaaccgaacgccagccgccctaaggtgaccgtcagggaagaa

SEQ ID NO: 253132 - DNA, 800 bp, Homo Sapiens
  misc_feature (654)..(654): n is a, c, g, or t
  misc_feature (734)..(734): n is a, c, g, or t
  misc_feature (741)..(741): n is a, c, g, or t
ccgggctgcaggaaaaaatgcaaccgctggttcagacagacaagtgataccagcaaagagtaaggtctatgatagccagggtctcctgatttttagtgggatggacctctgtgactgcctggatgaagactgcttaggatgtttctatgcttgtcctgcctgtggttctaccaagtgtggagctgaatgccgctgtgaccgcaagtggctgtatgagcaaattgaaattgaaggaggagaaataattcataataaacatgctggataatctgcggtaccaaactatggagcctttaaaggtctttatttctaaaaatctgttactctaagatacattttaagcttgattatcatatgacaaagattttaaaaccatctcagtgtgccctaatttttcatcttgggtgctttaagattcactatttgatataaattcagataggctatttttcagtagtcagcgttaagcctgtctggatcaatataaacaagtagggtgtaggcagtcctctatttgcatgtttcccatgggcacaaatttcagtgacctagatttagtttaaataccagtttccttaccaggaaggaaagaaaactggtaaggaaactggttgttgttctaggttaaattttagttagcacattggaactgantaattacatgaagtccaaacctctctgctagctcttcagtctacaaatcgctaatgtaacagatatgcttcatgattggngacaggnatggtttttctttcaattcttccagggtttgcccttggcctctgttcagttcacgtcag

SEQ ID NO: 253133 - DNA, 348 bp, Homo Sapiens
cacaggagaaagcagcgggaagctagcgggaagggctgccctcacagaggtgcttccatctgtcttcaatttgcactgaactgctgatcacgtggggctaggacagcgaggatagagaagagccaaggtttgaaaaccagtactgttgctgctcttcatttagcaaactgtgctgggtctagcctacaaatgttaatagtaaatgaaatccactgaattaatccaaaatcaggtaaatctgatccaaggacaagtggattcaatgaaaaagctaaagaccacttcaactctcgtgaagcttgcttacacgacttattagttcattcaaccattacctgatcactcacc

SEQ ID NO: 253134 - DNA, 660 bp, Homo Sapiens
cacgaggagctgccggacaacgccaagcagtgcttccacgaggaggtggagcagggcgtgaagttctccctggattaccaggtcatcactggaggccactacgatgttgactgctatgtagaggacccccaggggaacaccatctacagagaaacgaagaagcagtacgacagcttcacgtaccgggctgaagtcaagggcgtttatcagttttgcttcagtaatgagttttccaccttctctcacaagaccgtctactttgactttcaagtgggcgatgagcctcccattctcccagacatggggaacagggtcacagctctcacccagatggagtccgcctgcgtgaccatccatgaggctctgacggtgattgactcccagacgcattaccggctgcgggaggcccaggaccgggcccgagcggaagaccttaatagccgagtctcttactggtctgttggcgagacgattgccctgttcgtggtcagcttcagtcaggtgctactgttggcttcttcacagagcccctcatgccccaggctggagcagctctcctaggtcacagcctgctgggctgggtcgcgtagcccaaggtggaggcagcgatgctgctgtggtagccctttgcctttcatgcccatgcttgattcttgccct

SEQ ID NO: 253135 - DNA, 2224 bp, Homo Sapiens
  misc_feature (34)..(34): n is a, c, g, or t
  misc_feature (1450)..(1590): n is a, c, g, or t
  misc_feature (1680)..(1681): n is a, c, g, or t
gcactgagccgccgccgcttccggaagcgcagantccgctggtgccacgtttatccccttacatcctcctaggacccggtcggtagtcgtcgccccagcccgccgggggcgcagcgcccgagccgcggccctcgagacgggaccgagagcatcatgggcagcactgtcccgcgctccgcctccgtgctgcttctgctgctgctcctgcgccgggccgagcagccctgcggggccgagctcaccttcgagctgccggacaacgccaagcagtgcttccacgaggaggtggagcagggcgtgaagttctccctggattaccaggtcatcactggaggccactacgatgttgactgctatgtagaggacccccaggggaacaccatctacagagaaacgaagaagcagtacgacagcttcacgtaccgggctgaagtcaagggcgtttatcagttttgcttcagtaatgagttttccaccttctctcacaagaccgtctactttgactttcaagtgggcgatgagcctcccattctcccagacatggggaacagggtcacagctctcacccagatggagtccgcctgcgtgaccatccatgaggctctgaaaacggtgattgactcccagacgcattaccggctgcgggaggcccaggaccgggcccgagcggaagaccttaatagccgagtctcttactggtctgttggcgagacgattgccctgttcgtggtcagcttcagtcaggtgctactgttgaaaagcttcttcacagaaaaacgacccatcagcagggcagtccactcctagccccggcatcctgctctagggcccctcatgccccaggctggagcagctctcctaggtcacagcctgctgggctgggtcgcgtagcccagggtggaggcagaacgatgctgctgtggtagccctttgcctttcatgcccatgcttgattcttgcacctcagcagctgaaggtctcagagaccagtaatcagaaggcatccgactgcattaagtgtgcagcgctgaaaagacatttacaactaggccagggattagccactgtgggagggtggacaggcaatggttcagtggcctggctgttggcaggaactccaagtgcccaggcctcttgggcagcttagggccctgcctctgtttcatgatgcatgggtcatttgtcttgggtgtcctatcccatatggagaagaaaggggctctaagttctggctcttctttctttggggttctctgtacctgaggaaaccaggccctgggtgactttgcagatctgctcaccctcggtgagcaacagtgtcagccatgcaagcaggacagaatggtgactgggtgcccttggtgagctgtgtatttcctaggaggtagaaaactgtgggaaactgtggctaataaaaactaaggtgtggagcgccaaaacgattccgcgnnnnnnnnnnnnnnnnnnnnnnnnnnnnnnnnnnnnnnnnnnnnnnnnnnnnnnnnnnnnnnnnnnnnnnnnnnnnnnnnnnnnnnnnnnnnnnnnnnnnnnnnnnnnnnnnnnnnnnnnnnnnnnnnnnnnnnnnnnnnntttcttatccccctgccccgcggacttttaatttgtcggctgttttccgcctgtacccaccgcacgcgcgttatttattcccccgctaanncgtcccgttgtttcgcgagatcgcgccacccctttatatgccgcgcgctccttatgacgcgaaagaagcgactgtgtttcctatcgacaagcacaacgcgttttccccccgccttggcgggacgacgcccccgcgccctattttctcccccctccctgactccgccgcgcagaggtataatacacaccccccggggcgcactccacccccggtttttgtcctttattatatacccaagacagaattctattgccgtttacccacttccatcaccccccatgtccgctttatatatttgttactccgccccgccccgctaaccaacaaccatctccgcttatcagccacccgccagcgcaataccgccgccccctctttataacacatgctcttgcggcagtgtgtagcccccctcccgcactgataccatacccggcggggggtgcgtactccggatggcgcagaacccggataaacgcccccctttatccccgcagcgagtaacgcgccgtctgtccgtttcaccatcccgcccttgcggtt

SEQ ID NO: 253136 - DNA, 383 bp, Homo Sapiens
aggcacaaagaagctggactacaaggaagcatgagctaacaaatgccagaccggaaggcagcgtaggagaacatgggattcagagtcattcccagctacaacattaaatagtaagactgagaggctgtctgcatgtttccatcatcattcagatcaaaagctgagatgagctttagggaggaggctgcacctgagcgggacactgaaggaaggcaaaggaggtgtttcagacaagcaaagcagtactgaggtagctgtaagcttggagtttggatgggagacgacagacaagtgtcacaaggagcaacggcagagaggtgggtgggtggcaggaagcgccacaacactttccacacaggggtgggtggtgtgcctcacattta

SEQ ID NO: 253137 - DNA, 701 bp, Homo Sapiens
  misc_feature (233)..(233): n is a, c, g, or t
  misc_feature (332)..(332): n is a, c, g, or t
  misc_feature (337)..(337): n is a, c, g, or t
  misc_feature (466)..(466): n is a, c, g, or t
  misc_feature (470)..(470): n is a, c, g, or t
  misc_feature (483)..(483): n is a, c, g, or t
  misc_feature (497)..(497): n is a, c, g, or t
  misc_feature (558)..(558): n is a, c, g, or t
  misc_feature (560)..(560): n is a, c, g, or t
  misc_feature (562)..(562): n is a, c, g, or t
  misc_feature (565)..(565): n is a, c, g, or t
  misc_feature (595)..(595): n is a, c, g, or t
  misc_feature (647)..(647): n is a, c, g, or t
  misc_feature (664)..(664): n is a, c, g, or t
  misc_feature (682)..(682): n is a, c, g, or t
gcacgagtaaatgtgaggcacaccacccacccctgtgtggaaagtgttgtggcgcttcctgccacccacccacctctctgccgttgctccttgtgacacttgtctgtcgtctcccatccaaactccaagcttacagctacctcagtactgctttgcttgtctgaaacacctcctttgccttccttcagtgtcccgctcaggtgcagcctcctccctaaagctcatctcagctnttgatctgaatgatgatggaaacatgcagacagcctctcagtcttactatttaatggtgtagctgggaaaaaacccagagaggttaactgatatactgngttgngactaggatgtgggtttggaactctgaatcccatgttctcaaactacgctgccttccgaagtctgggcattggtagctcatgccttcttgtagtccagcttctctatgtgcctgtatattctccagtangatngtaagcccttaanggcagggacgtctntgatctctagactgtatagtgtctatcctagtatgactagataataatggtggtggcacanananaanaaaaaaactcgaggggggcccgtacccaantcgctatatgagtcgatacaatcactggccgtcgttacacgtctactggaanaggccgaccgtcgcttncacagtgcagctgatgcnatgctgagcgtatttgttc

SEQ ID NO: 253138 - DNA, 1448 bp, Homo Sapiens
gaagcagatcataaagagaaaaaggagacagaataaaggatgaaggaaggaggtcatggggagtgtggcttctgagcagtttagttgctggggagagcagacagtcactgcctacaatacagacagaaccttcctgctcactttctgtcctatctcttcctgaccttatgaaccagtgttagtagatgattaaaacatgacaagcaatggctccttattttcacaggactaagtccgggccttcgtatcactagctgttgccttttacaccctgcttcagccaccctgtccctgtcattggccctggacttcctctctgtgcccgtgtgtcctctgcctgggagccctctcctcccatagtcactttctctctgccaaactcatttcttcttgtgcccaagacctctctcctgagcccctgtggaaacttcaggaaggatgaatccgtctttgtgctccacggctcgtaccttgatcaggctgtgcatcacagtaattccgctctaggtaggcagaggtgatctttggctcatctgccaggctgcgggctcttcaagggcagggaccttgtcatagtcatttttattttcacagtgcttggaacatggtggaaaatgaatgttggaattattggagtaatataatttgtatcaaatgtccttttgaattaagagatttagttatgtttactaagaatgtaaactttgaattggtttgcattttaacaattaggatggtttattgatgtgaattttgaaatgtagaggtataatgttaaattattttatactttatggaaatcaagtgaaatgtttgaaaaaatgccgccattatcctctggtattttctactctctggaattatgtgctgtaaatgatcggctgtaaatgtgaggcacaccacccacccctgtgtggaaagtgttgtggcgcttcctgccacccacccacctctctgccgttgctccttgtgacacttgtctgtcgtctcccatccaaactccaagcttacagctacctcagtactgctttgcttgtctgaaacacctcctttgccttccttcagtgtcccgctcaggtgcagcctcctccctaaagctcatctcagcttttgatctgaatgatgatggaaacatgcagacagcctctcagtcttactatttaatgttgtagctgggaaaaaacccagagaggttaactgatatactgggttgggactaggatgtgggttttgtgactctgaatcccatgttctcaaactacgctgccttccgaagtctggcatttgttagctcatgcttccttgtagtccagcttcttatgtgcctgttatattctccagtaagattgtaagccccttaagggcagggacgtctttgcatctctagcactgctatagtgttctatccttagttatgaactagataaataaatggtggtggcaacaaa

SEQ ID NO: 253139 - DNA, 1037 bp, Homo Sapiens
  misc_feature (926)..(926): n is a, c, g, or t
  misc_feature (974)..(974): n is a, c, g, or t
  misc_feature (992)..(992): n is a, c, g, or t
ggggagctggaagtgctcagccgagtgtgggacgggaatccagcggcgctctgtggtctgccttgggagtggggcagccctcgggccaggccagggggaagcaggagcaggaactgggcagagctgtccaacaggaagccggccccctgacatgcgcgcctgcagcctggggccctgtgagagaacttggcgctggtacacagggccctggggtgagtgctcctccgaatgtggctctggcacacagcgtagagacatcatctgtgtatccaaactggggacggagttcaacgtgacttctccgagcaactgttctcacctccccaggccccctgccctgcagccctgtcaagggcaggcctgccaggaccgatggttttccacgccctggagcccatgttctcgctcctgccaagggggaacgcagacacgggaggtccagtgcctgagcaccaaccagaccctcagcacccgatgccctcctcaactgcggccctccaggaagcgcccctgtaacagccaaccctgcagccagcgccctgatgatcaatgcaaggacagctctccacattgccccctggtggtacaggcccggctctgcgtctacccctactacacagccacctgttgccgctcttgcgcacatgtcctggagcggtctccccaggatccctcctgggggtccggggcaccttcacggttttctgtgccaccatcggtcacccattgatcgggccactctgaaccccctggctctccagactgtcccagtctcagcagggatgtcctccaggtgacagagggtggcaaggtgactgacacaaagtgactttcagggctgtgggtcaggcccatgtgggtgggtgtgatggggtgtgtgcacatatgcctcagggtgtgcttttggggactgcatgggatatgtntgtgctcaaacgtgtatcacttttcaaaaagagggttacacaggactnaggaagggacaagacctntttccttggaggactttcctaggggtgggaaagggtaaaggcaag

SEQ ID NO: 253140 - DNA, 615 bp, Homo Sapiens
  misc_feature (473)..(473): n is a, c, g, or t
  misc_feature (500)..(500): n is a, c, g, or t
  misc_feature (510)..(510): n is a, c, g, or t
  misc_feature (520)..(520): n is a, c, g, or t
gagatcctgggttgggcctccctctgatgaccccagccagatgagcgagtggggctcagcgtggcccatggtgcctgtcactcagcattcccatgcctgatgtttaccaagtgctgtgttggacactggctttctccaaacaggatttgcctcctccacgctccctacacacctgagatgtaaactggcagtcagtgttcactcaggacctaggattagtggcagagttggtgctggatccaccttgcacttctatcaagccctgttctttttcctccagcctgaagtcttcggcatagctcagagggacacggtcttgcctctcagtgcttattttagtgggcagccagccagccacatttccctgtgtctggctagagccaccattagactcagacagaatgcttcaggaatcgttgtcaccccttcaactggagcaggacggaaggttgtctgtacttgggagggagtgnggagtggtgggaaaggagttcttggtncacgaatcangaaactggtnttccttagctgggcttgggtcttcagggacctgaactacatgccggttgtgagctggaataggttttagactggtgcccagaatgggctgggcct

SEQ ID NO: 253141 - DNA, 725 bp, Homo Sapiens
tatcagtccaataggaaacagcactattcattctctgggagctgccccagccctattctgggccacagtctagaactttcttttccagctcacaacctgcatgtagctcaggtccctggagaccccagcccagctgagggagagcagtttcctgattcgtgtgacaagcaactcccttcccaccactccccactccctcccaagtacagacaaccttccgtcctgctccagttgaaggggtgacaacgattcctgaagcattctgtctgagtctaatggtggctctagccagacacagggaaatgtggctggctggctgttgggtgatccagttccttgggagccaatgtttgtacccctggtattagctgtttttcccactaaaataagcactgagaggcaagaccgtgtccctctgagctatttgccgaagacttcaggctggaggaaaaagaacagggcttgatagaagtgcaaggtggatccagcaccaactctgccattttctaatcctaggtcctgagtgaacactgactgccagtttacatctcaggtgtgtagggagcgtggaggaggcaaatcctgtttggagaaagccagtgtccaacacagcacttggtaaacatcaggcatgggaatgctgagtgacaggcaccatgggccacgctgagccccactcgctcatctggctggggtcatcagagggaggcccaacccaggatctc

SEQ ID NO: 253142 - DNA, 467 bp, Homo Sapiens
cagcaccatgcccacctggtgctttctgcctgccccatcccctgaagtctcgtgctgtgatgcctacatggaaacagaagataaagatttcccctcattcaaggcgggacgttagaaccaaaaaccccacatgatgctgggaccctctaagaattggaccctcaggaaggttaaactggaaaagttacctcccagcacagagaaatggccttgaaacctgcctttctcctcttgggctcaagaaagtcttcctgggaattcataattacaggcctgtcctccaacaggcttgaagtttgaatttatacaaacaacatagttcaagaagcacacagcctcaggggtggccaggacacgatgacacctgcctttgcacggacacagtgtgtggctggcagggggcaccccaaccccagtttccagcaggaagctgagaaccatgaagagatcaaagagatcaactagaa

SEQ ID NO: 253143 - DNA, 798 bp, Homo Sapiens
  misc_feature (718)..(718): n is a, c, g, or t
  misc_feature (764)..(764): n is a, c, g, or t
  misc_feature (778)..(778): n is a, c, g, or t
ctgctgtgccagaagccacctgggaagaagaaacaaggtgctgttcatccacatccacccacctgccctatagacgcctcctgggggtcacttacctaccctcccatccgtcccacaaacgtctactgggggtcacctatccatgccacacacacctactgggggtcacccacccaccccccccacatctactaggggtcacccaccctcccatccatcccatacacacctactgggtgtcatccaccctcctatccatcccatacacatctactgggtgtcatccaccctcctatccatcccacacatacctactgggtgtgccctctcccttgtggagctccagatcagtggggaaggcagatgttaacaggcacctgcacattgtaatgcttctgtgacagcagaagctgtgacagccctctttacacggcgggctgggggaggcctcccaaggtatgacttaagagatcgaagatgggaaagaggtcctggggcccaggaacaagcagagaggcagagtggggaaggcagagttccacaggcgggaagcaagaagaattcccgggaaggactaccagccacgcctctgtatttgggaactttttgactctccctggagtttcagcagctggactagcaacagggaagcctgctgccgctgccacagtgcccagaccctgcagagcatgtgggcacccctggccttggccgtgtnttctcccttgaatgccggcttgctttgcactgacccgtcacttctnctggggctctgctncttgaccaggaccttcctcc

SEQ ID NO: 253144 - DNA, 556 bp, Homo Sapiens
  misc_feature (60)..(60): n is a, c, g, or t
gttgcgttccaggatgttggactttccgccacaccaggcgaagatgttctggcctaggtncaggatgaagcagtccccagtgttgaagctgtcccagttcagtgcccgctcggtggcacggatgttcttcttccccttcacctggtacttgaggccccgtgggaagtagctcatgaagaggtcagactcattgccctgcacctcgcggtgctgcacaggccgctctcccagcagcgtgttgaggtgcacagccagcacggcacaggccccctgctcatcccgggatgactgctggcctatccacaggtgcagatgggaaacctcttctgggccattgtgcagcactaggtaggagtcccccgagaagaagacgccctggttctcttgcgccacaggcaccggcttcagcttctccacccgccacacatgcaggcctggatcctgcactgagcctgggaatggagagccactctggggaatggctgtgtacatgctgtcttcagatctctgcttcgtaggttcgtcttccttccagcctgccccacccggcttcccc

SEQ ID NO: 253145 - DNA, 1295 bp, Homo Sapiens
actcaccgggggcggctcctggccgccacctccaggggcggggggcggctgagacagcgcccagggcctcggagcaaggcgttggcagatctgaagacagcatgtacacagccattccccagagtggctctccattcccaggctcagtgcaggatccaggcctgcatgtgtggcgggtggagaagctgaagccggtgcctgtggcgcaagagaaccagggcatcttcttctcgggggactcctacctagtgctgcacaatggcccagaagaggtttcccatctgcacctgtggataggccagcagtcatcccgggatgagcagggggcctgtgccgtgctggctgtgcacctcaacacgctgctgggagagcggcctgtgcagcaccgcgaggtgcagggcaatgagtctgacctcttcatgagctacttcccacggggcctcaagtaccaggaaggtggtgtggagtcagcatttcacaagacctccacaggagccccagctgccatcaagaaactctaccaggtgaaggggaagaagaacatccgtgccaccgagcgggcactgaactgggacagcttcaacactggggactgcttcatcctggacctgggccagaacatcttcgcctggtgtggtggaaagtccaacatcctggaacgcaacaaggcgagggacctggccctggccatccgggacagtgagcgacagggcaaggcccaggtggagattgtcactgatggggaggagcctgctgagatgatccaggtcctgggccccaagcctgctctgaaggagggcaaccctgaggaagacctcacagctgacaaggcaaatgcccaggccgcagctctgtataaggtctctgatgccactggacagatgaacctgaccaaggtggctgactccagcccctttgcccttggaactgctgatatctgatgactgctttgtgctggacaacgggctctgtggcaagatctatatctggaaggggcgaaaagcgaatgagaaggagcggcaggcagccctgcaggtggccgagggcttcatctcgcgcatgcagtacgccccgaacactcaggtggagattctgcctcagggccgtgagagtcccatcttcaagcaatttttcaaggactggaaatgagggtgggcgtcttcctgccccatgctcccctgccccccaccacctgcctgcttgcttctctggctgcctggtcagtgcagaggtgccccctgcagatgttcaataaaggagacaagtgctttcccagctcttttcctgcgaaaaaa

SEQ ID NO: 253146 - DNA, 879 bp, Homo Sapiens
ggccgctgcgggagccacaggaagtgaagagcttccgccgggagaccgcggctgcaggaacggaggcggaaggggccctgcggcgacgacgtcgtcgacgggggtggccgtgggagctgagcacggagaagactccctctctcggaagccggatcccgagccgggcaggatggatcaccaccagccggggactgggcgctaccaggtgcttcttaatgaagaggataactcagaatcatcggctatagagcagccacctacttcaaacccagcaccgcagattgtgcaggctgcgtcttcagcaccagcacttgaaactgactcttcccctccaccatatagtagtattactgtggaagtacctacaacttcagatacagaagtttacggtgagttttatcccgtgccacctccctatagcgttgctacctctcttcctacatacgatgaagctgagaaggctaaagctgctgcaatggcagctgcagcagcagaaacatctcaaagaattcaggaggaagagtgtccaccaagagatgacttcagtgatgcagaccagctcagagtggggaatgatggcattttcatgctggcatttttcatggcatttattttcaactggcttggattttgtttatccttctgtatcaccaataccatagctggaaggtatggtgctatctgcggatttggcctttccttgatcaaatggatccttattgtcaggttttctgattattctactggatatttcaatggacagtattggctttggtggatatttcttgtacttggcctgctccttttcttcagaggatttgttaattatctacaagtcagaaacatgtcttgaaagtatgccagctgctcatagaacaa

SEQ ID NO: 253147 - DNA, 358 bp, Homo Sapiens
  misc_feature (201)..(212): n is a, c, g, or t
cccccgggctcaggaattcggcacgagggaccatcaggttccaactactgcaggaaacaaagcagctcttttagatcaaattagagagggcgctcagctaaaaaaagtggagcagaacagtcggccagtgtcctgctctggacgagatgcactgttagaccagatacgacagggtatccaactaaaatctgtaagtaagcnnnnnnnnnnnncattttagatcctttatcataatggaattttaaagtaatttattgaaagatatttttggagtattcttttttcctcttgctaattcattcttaaccctataaatttatctctatagccatgtcccatatctctatatcctgtgggg

SEQ ID NO: 253148 - DNA, 682 bp, Homo Sapiens
  misc_feature (61)..(61): n is a, c, g, or t
  misc_feature (75)..(75): n is a, c, g, or t
  misc_feature (114)..(114): n is a, c, g, or t
gggtttccctctagtactacatgtgtgcactaagatctgtgacacaagtaaaggcacttcnaccccctttatatntgtaatggctgtcttcagaataatattcttcacctttanagacttctactgaaagattttttgacagtaattgcacttttaatgctttattaactatgaaccttcttctgttcagtaagatgtaagtaggcattaatggcgtttccatattctttatatctgcacaatttttctcaaggataaaagctttcctgtgaaataaggtataagcactaataaaatattttgccacattcttcacacttacaggagttttggcagcatgaattctatcacctacaatcaagtatgacaaccatataaacgctttgtcacatttcatacatttccagggtatcacactagtataatttatttttatgtatacaaaaggtggaggtggtggtaaaagcaatgtcgcatctttcaggtttccagagttcctcttcagcatgaattatcgccatgtctcttaagaattaagaacttgtggctgggcgtcgtggctcatgcctgtcatctcagcactttaggatgccgaggtgggtggaccatctgaggtcaggctgtcatcatcaacgccaggctggaagccagggccaggcaggcctgggtgggtggggcagtc

SEQ ID NO: 253149 - DNA, 373 bp, Homo Sapiens
gatgtattctggggaacataaagtgagtgataagaaacattgcaacagctgatttgcaggtgtcctttggggctttggaaactacagaccctctatggccagccccacttgggggtatagcttcactatagagctaaggaaattatccttcaattgcttgtgaaaactatgcttgcaaaaactagcaaggctcctaaagaaagaccagcgagctctcccagccagtggggccacaaagatttggggtcttgtgctctttgttcaagcgagcttcctggctttcaaggaagtagaaactccttacatccatgatttccatgacctttctcctttctctgccctgtatcttcctaattcccagtaaacaattccc

SEQ ID NO: 253150 - DNA, 775 bp, Homo Sapiens
  misc_feature (461)..(461): n is a, c, g, or t
gagaagccaggggcagggtgggatggggaagaccagcagcagagtagagcctcacagaacacagcgcggctctctgctcatcaccccacccggggctctgcacccagggtaacagccccaggtcatcccaacccctctcagagcctcaagaggggtagctcgcctgccggaagagagggatgcactatacctggcaacacctacacgtagcgtaccccagcacctgccaccgcctttgccatttctttgagctcgaagttaactctcttagagactaactctggttcatttctgcacaggtacactagatgactctatttgtgttgttaaacagctgctgtagagtacctctttttaagtaaatcttacagaggagtatattttttaaagcacaaaattggtgccaagactgggtgagaaatgtacattacccccttattattttgacggttgtttttttncggggcaggggaccttacctgtaagacttttaaagattttcctccctcctgtttcaggtgggtcacattctgatgaatgtttcccttgtacagatcccagcttatggccttgacccagccgtcctcacagatgccgggtgaccctctagctctctctgcatctcccaccccccgacaccctgggaccctcgaccccacccttctttcctaccagcccagagccttgtggcttgtacagttttgaaactcccgttctattttatgatggttgataatagtcagtaacctaataaaggaacgtttgttaaaatatc

SEQ ID NO: 253151 - DNA, 1199 bp, Homo Sapiens
  misc_feature (1100)..(1100): n is a, c, g, or t
ggtacggtccggaatctcgggatatcgtcgacccacgcgtcgctgcccttcctggctgccccttgggttccagccggggtcacgtccagcctccactgggaaaccagtgactgaggcctggacccagaggtggaccaggcatctcctggccacctgtgacctgggaagaagcgagtcagtggcccgttcaacctgctctgcagctggctataaatagcctccctgtttccaagaggaggtaaggaagtgtttatcttctaaaaaccagacgtttcctgatgctctgagcgttactcagtgctacagaggagatgcacacgtccccactatgttctgtcttgagaaggggacaagagaaagaggaaaaggagccactgtactttattttgcacctacagcgtgccttggcactgggctagagaggcaccttcctgcgtgaatcctgtgcggcaggtcttattgccataataagtcacatcaaagacactgctggtcataaaacactgttttacataccatagggaaaaacgctgccaatcttaactaagatgctacaactgtacagttccttccaatcagagatgttcacgtgtgaacaaaaacaactgtgctacttacaatctatgaaagctggtgttatcccacttggcaggtaaggaaactgaggtcctgtgagtgaagtgacctcatgatcacacaacaggagatggcagggctgggattcaaacccggggagtgtctgctgtcacataccacactcccactgtctggctccaagtcccaggaagctcgagactgtgagttttctcccttgaaactcacctggagagagtacgggcacctgtgcctatgtggagggttccagccccagacaggcccctccgctgtccacacactgtgaggagaagcgggctccctttcaggctcatctgctcactgtccgcattctcctggcagagctgaggtctgagagatctggactccaacccaagggccctctcttgttattcaggaggtgtgcacagctagggagggacctggggccttgtgccacacctttctaggacccgtgatcaccacaccctaagcgggggcccggncccctgagcacccctcacgtgacccagcctcggctgtgcaggctactgccatggggtggtttctgggcacaggcagggctcaggcgagacagggacctg

SEQ ID NO: 253152 - DNA, 660 bp, Homo Sapiens
  misc_feature (194)..(259): n is a, c, g, or t
  misc_feature (529)..(572): n is a, c, g, or t
agaaaatggtttcattggctttaaagggattttagaatatcttactttgcatagtttcatgagcactggccaggaggttataaactggcatttaggcctctctgccatttagtagcagtatagtcattaagcaaagcattactctggactttattgtccctgtttctatcaaattggaataacaaaaattgatnnnnnnnnnnnnnnnnnnnnnnnnnnnnnnnnnnnnnnnnnnnnnnnnnnnnnnnnnnnnnnnnnnagcatgtaaagtactagaaacaatgaggtggcttcaattagtgctcattctgagacctaaatttaaagggtcaggcattagaaacaaaagtgtttcttcatatttaggagatttggaaattctgaactaaggtcttataagaacaagaaatgagcaaagtgttcacttgtagatactagggaaaagctttgttgaataacagtaatgatgataatatctgagctttagtaagtacttactacatgctaagagcttcttaagcacgttagnnnnnnnnnnnnnnnnnnnnnnnnnnnnnnnnnnnnnnnnnnnngtttagccataaccagatatggcttgttatttcgtaagttatcatgaaaaggttgatattcactattctttatattcacgtgtagcac

SEQ ID NO: 253153 - DNA, 1244 bp, Homo Sapiens
aacaaaaggaataaaagtctatgccgctcgggccctcttctcactatcaaaggcatctcggttgcctttcccaagctgtgtatctgcagctttgttcttctgtttctgggctgcatgctgagctgccagaactgggtcttcctgtggctgttcttccttccacgggcatctgggttgcctccagctttgttgccattacagcaatgtcacagacattggtgacactgcgcataggtcagcccacacaggtgcacacgtgtctctgggctgccctcccccagatgggccagagagatccttccaaaggagaaacaacccgaggcggctggccctgcaccagaggaaactctcggcaggaaaggacacccacattgagtcctgactggcgttgaatgtatggttcagtgtgcagtgaacagaacacaggccatggtgccaggcgcgggaggcagcccccttctctgcccattctgaacgggagcccttctcactgactgcacagaggcacacgcaggccgcctgctggggggccggggcgtccaggcagcggggccttgggggacgctcggtgactcggagccgggatggagggcttgtgccccatccccagggcactgcgcagcgggagagggcgacatcacagctgtcaggggccgtggacgtctcctcatcccagcagcctcaccctccactgctgggcccagctccctggtgccaccgtgggctcccttctccccgcaggccaccatcagtgccacgactgaggagctgaaggccctccaggcccagtttgaggatgccatcacagcccatcagagggagaccacggccctacgcgagagcctccgggacctagcggctgagcggggcgatgtggagagagaggtgagaggcagggctggggggctcctggggatgcccagaggacaggagaaagcagggcaggtaccaagagaggagcagagtgggggttcccaggaggaaagagaggctgtaccacagagaagggaagagtagtccctgggactaggaagaggcaaacagccataggggcatgggacaaggggccctcacaccacgcactaagccaagcccaggctctcagggcagatgaaatggtgcctggcccaggccattagctaagcgaagctgacaccagttttcaggggaaagaaggcatcatttctaagcctcctgaaggggtgagtttgacttcagggtgaaagtgggcctggctgagtcag

SEQ ID NO: 253154 - DNA, 743 bp, Homo Sapiens
acggtggagtgaggttaggtgattgaagcccacttctctgactgctggaaggttggggctgacatcccgtggctcaaagccccaacccctctaataacgggtccagcagacagtccccatcctgaaattcagtaggaacccaccctgagtcacctcattagcataaactcaggtgtggtcacaggggcccgccaggactaatgcagacgctccacacttctgagaaacccccagggtttagaagcttcctccgaggatccaggacaaagacctgatacatcttctgttatgcaacaccctcctaatacaaaaggaatgaaaagtctatgccggctcctgggctttcctcttctcacttatcaaagcatctcggtggcctttcccagctgtgtatctgcagctttgttcttctgtttctgggctgcatgctgagctgccagaactgggtcttcctgtggctgttcttccttccacgggcatctgggttgcctccagctttgttgccattacagcaatgtcacagacattggtgacactgcgcataggtcagcccacacaggtgcacacgtgtctctgggctgccctcccccagatgggcctgggcatagagagaatatacatgtgtgaatttgacaggcattgattccacagcctggtccacggaacagcgtgccacccttgcagctgagggtgtctcgctcacacgcatctaccacaccatcagggagatggagcattgtcgg

SEQ ID NO: 253155 - DNA, 787 bp, Homo Sapiens
agcttcaaagggtggcactttgctccgtggaccaggcttgtgaaaccaatgcctgtcaaatccacacatgtatattctcttaatgccagggccatctggggaaggccagccaaagacacgtgtgcacctgtgtggcttgacctatgcgcagtgtcaccaatgtctgtgacattgcttgtaatgcaacaaagctggaggcaaacccagatgcccgtggaaggaagaccagccacagaaagacccagttctggcagctcagcatgcagcccagaaccagaagaacaaagctgcagatacacagctgggaaaggccaccgagatgctttgataagtgagaagaggaaagcccaggagccggcatagacttttcattccttttgtattaaaaatgcagtgttggggaggtaacgctgtatatttctgtttgcaagcaatctttggagggtgttgcataacagaagatgtatcaggtctttgtcctggatccttggaggaagcttctaaaccctgggggtttctcagaagtgtggagcgtctgcattagtcctggcgggcccctgggaccacacctgagtttatgctaatgaggtgactcagggtgggttcctactgaatttcaggatggggactgtctgctgaaagacccgttattagagggttggggctttgagccacgggatgtcagcccaacctcccagcagtcagagaagtgggcttcaatcacctaaccaatcactccaccgatcacgttacacagtgaaaccccaataaaactctggacaccaaa

SEQ ID NO: 253156 - DNA, 804 bp, Homo Sapiens
ctccacccaggagagagccccacaggtcccaaaatgcagttttgagcccaccgccaagccaagcaacccctgatgccagtgtccagccttaggtgccatgattctgagtccctttgctttctgtgcccctgagcccggctatggtggttgtgctgctggccctccaggtggtggtggttgtgacagcctgggtgatggtgagtttggtccccttgatggactgcaactcctgcctccctgatctccgggtggtccagctcgactcggcagaaatacacagactggtcctccttccgcaggtttgagatcctgaggaagccgctctcctgaccctcaggctgcagaaatgctggcggctgcagcaggagcagcaggggcagcagcaggggccgacccatggccttgttcttctccaggggacggggagaccagcagagctgtccaggcaggagaggggccctgtggaggggctgcctgagggcctgggtgatggtgaggtgggtccccttgatggactgccacgacagcctccctgatctgtatgtccagctggacttggcagaagtacacagactggtcctccttccgcaggttcgagatcctgaggaagcctcccttgttcttgctttccccttgagatcaggaatgaggcacagatgtctgctctcactgcctcccttcacggtactggagtcctagccagcgcgctatgcccatgctcgtgctctcagtgcctaggagctggtgtgggatggctggagcctaggggcagggcggtgcttctgtcggcacagcagatgaagg

SEQ ID NO: 253157 - DNA, 1233 bp, Homo Sapiens
acctcaccatcacccaggccctcaggcagcccctccacagggcccctctcctgcctggacagctctgctggtctccccgtcccctggagaagaacaaggccatgggtcggcccctgctgctgcccctgctgctcctgctgcagccgccagcatttctgcagcctggtggctccacaggatctggtccaagctacctttatggggtcactcaaccaaaacacctctcagcctccatgggtggctctgtggaaatccccttctccttctattacccctgggagttagccatagttcccaacgtgagaatatcctggagacggggccacttccacgggcagtccttctacagcacaaggccgccttccattcacaaggattatgtgaaccggctctttctgaactggacagagggtcaggagagcggcttcctcaggatctcaaacctgcggaaggaggaccagtctgtgtatttctgccgagtcgagctggacacccggagatcagggaggcagcagttgcagtccatcaaggggaccaaactcaccatcacccaggctgtcacaaccaccaccacctggaggcccagcagcacaaccaccatagccggcctcagggtcacagaaagcgggcactcagaatcatggcacctaagtctggacactgccatcagggttgcattggctgtcgctgtgctcaaaactgtcattttgggactgctgtgcctcctcctcctgtggtggaggagaaggaaaggtagcagggcgccaagcagtgacttctgaccaacagagtgtggggagaagggatgtgtattagccccggaggacgtgatgtgagacccgcttgtgagtcctccacactcgttccccattggcaagatacatggagagcaccctgaggacctttaaaaggcaaagccgcaaggcagaaggaggctgggtccctgaatcaccgactggaggagagttacctacaagagccttcatccaggagcatccacactgcaatgatataggaatgaggtctgaactccactgaattaaaccactggcatttgggggctgtgtattatagcagtgcaaagagttcctttatcctccccaaggatggaaaaatacaatttattttgcttaccatacaccccttttctcctcgtgcacattttccaatctgtatggtggctgtcttctatggcagaaggttttggggaataaatagcgtgaaatgctgctg

SEQ ID NO: 253158 - DNA, 395 bp, Homo Sapiens
aagaagacatgctaaacactgaaagcacatgtcctatgtgttcagaaagattaaacgctgctcagctgaaaaagacagactgtacccagtacctgcgaacggagccacaggaggctgtcctcccctggtggatttaagagacggtcctttctggatacagagaaatgaaacaacggtgacctctccaggtcggcactttccacttctgtacggtggcaaaacgatgacatgtaaccttgctgtttattgtactttgtatattatttcctcttcaaagtctttcttacatactctatcctctgcactgttaatagtaacctatgacataattgtaaatattcagctgctaacttttgtattttgaaaaactttaaaataaaattgttgactagaaa

SEQ ID NO: 253159 - DNA, 1001 bp, Homo Sapiens
  misc_feature (381)..(381): n is a, c, g, or t
attcggcacgagcagagggaaaataccaagctcaccactccagtagcacaggaagagagaagaccgcaagacctacccatgctttctgccgttgaatgtgctatgaactccagttcccaaaggtggcccatgtaacaccctagaacctaaccaatcctaggtactcttcctcctccctgggagtggatcaagggctggtgtgagcttgtaagtatctctctaagcccagagtctgactatgaagtaggtgtgtcatatgtccctggttttccaaatatgctttctctttgccatccccggtacatgaataaaacgggcatttttaaatgacatgattcttcctcacaggagacccgatatatctgaaatagaaaaggccancgacctccatgtccattctccaaatttctcctcccaaagtgtgaactcctctgtcctggatgtaaaaacagtatcccatattgcattccaacaggtcgacacatgttgaaagatgactggacggtgtgtccacattgtgacttccctgctctatactcagaattgaagatcatgctaaacactgaaagcacatgtcctatgtgttcagaaagattaaacgctgctcagctgaaaaagatttcagactgtacccagtacctgcgaacggaggaggaactgtgattggcacgtgcagatacaatgctcctgagaagacagcattttccacaggaggctgtttcctcccctggtggatttaagagacggtcctttctggatacagagaaatgaaacaacggtgacctctcccaggtcggcactttccacttctgtacggtggcaaaacgatgacatgtaaccttgctgtttattgtactttgtatattatttcctcttcaaagtctttcttacatactctatcctctgcactgttaatagtaacctatgacataattgtaaatattcagctttttgctaacttttgtattttgaaaaactttaaaataaaattgttgactaga

SEQ ID NO: 253160 - DNA, 697 bp, Homo Sapiens
  misc_feature (16)..(16): n is a, c, g, or t
  misc_feature (26)..(26): n is a, c, g, or t
  misc_feature (35)..(35): n is a, c, g, or t
  misc_feature (43)..(44): n is a, c, g, or t
  misc_feature (47)..(47): n is a, c, g, or t
  misc_feature (50)..(50): n is a, c, g, or t
  misc_feature (686)..(686): n is a, c, g, or t
acttactcaagccagnagagccatcntggccagcnccggcacnntgnacngtatagtccagcgtcaccatgtggcccgttgttcactatcagcactgatgttgtgacgtccttggtcaagtcactctaatagtagatgttattccctgggggtgcacagcctgtactgaggatgtggtcgcagttcagcgccagccggtgctcactctggtcccctctgcagtctggcaagtgagcgaaactgccaaggcagatgacagcatcaaagccaccctctgctgactggggcacatctttgtccagagtcatccagttggcttcttcgatgacccacttgtcgaaggcgggctcgtgccgccggttccagcgctccttaagtgcatacttcagcatcttgtcactggcatccacactcgtcacactgaagccctcttccaccagcataatggagtccaccccagtgccacaggctacgtcgagcacccgctggcagccgtgctggcgcagcagcccaagcagccatgccttgtactcggcggtgcggctgcgggtgtctccgatatacagctgccacacgcgcgccgcctccccgtccgcgtactggtccgggagcccttcggccgccacccccagggagcgggtccggtacacgctgtccaccatccctcgtgccgaattcctgcagcncggggatccac

SEQ ID NO: 253161 - DNA, 1074 bp, Homo Sapiens
  misc_feature (309)..(309): n is a, c, g, or t
ggatggtggacagcgtgtaccggacccgctccctgggggtggcggccgaagggctcccggaccagtacgcggacggggaggcggcgcgcgtgtggcagctgtatatcggagacacccgcagccgcaccgccgagtacaaggcatggctgcttgggctgctgcgcgcagcacggctgccagcgggtgctcgacgtagcctgtggcactggggtggactccattatgctggtggaagagggcttcagtgtgacgagtgtggatgccagtgacaagatgctgaagtatgcacttaaggagcgctggaaccgngcggcacgagcccgccttcgacaagggggtcatcgaagaagccaactggaggactctggacaaagatgtgccccagtcagcagagggtggctttgatgctgtcatctgccttggaaacagtttcgctcacttgccagactgcaaaggggaccagagtgagcaccggctggcgctgaaaaacattgcgagcatggtgcgggcagggggcctactggtcattgatcatcgcaactacgagccacatcctcagtacaggctgtgcacccccagggaaagaacatctactataagaatgacttgaccaaggacgtcacaacatcagggctgatagtgaacaacaaggcccacatggtgaccctggactatacggtgcaggtgccgggggctggccaggatggctctcctggcttgagtaaagttccggctctcctactacccacactgtctggcatccttcacggagctgctccaagcagccttcggaggtaagtgccagcacagcgtcctgggcgacttcaagccttacaagccaggccaaacctacattccctgctacttcatccacgtgctcaagaggacagactgagtgtggcctcagctcccacaagcctctgcccaggcactgctaggctctgtctggaagatggggaccagcagccccacaccagggccagcctctagagcagactacagctggggtgcagggatgtgggttccacagacggaagggtaaacaatatagtctttttcagttcctgaaaaaaa

SEQ ID NO: 253162 - DNA, 968 bp, Homo Sapiens
gcgacacgccggcgggcggctgaggcgggaatggctgctgtactgcagcgcgtcgagcggctgtccaatcgagtcgtgcgtgtgttgggctgtaacccgggtcccatgaccctccaaggcaccaacacctacctagtggggaccggccccaggagaatcctcattgacactggagaaccagcaattccagaatacatcagctgtttaaagcaggctctaactgaatttaacacagcaatccaggaaattgtagtgactcactggcaccgagatcattctggaggcataggagatatttgtaaaagcatcaataatgacactacctattgcattaaaaaactcccacggaatcctcagagagaagaaattataggaaatggagagcaacaatatgtttatctgaaagatggagatgtgattaagactgagggagccactctaagagttctatatacccctggccacactgatgatcacatggctctactcttagaagaggaaaatgctatcttttctggagattgcatcctaggggaaggaacaacggtatttgaagacctctatgattatatgaactctttaaaagagttattgaaaatcaaagctgatattatatatccagaacacgccccagtaattcataatgctgaagctaaaattcaacaatacatttctcacagaaatattcgagagcagcaaattcttacattatttcgtgagaactttgagaaatcatttacagtaatggagcttgtaaaaattatttacaagaatactcctgagaatttacatgaaatggctaaacataatctcttacttcatttgaaaaaactagaaaaagaaggaaaaatatgtgagtatgcttccttttcttctattaccagcattttatttttacagatgccttagtttcctttgaggaggcgctaggaaggtcagtagcacagggccagtggaccacagctggc

SEQ ID NO: 253163 - DNA, 284 bp, Homo Sapiens
  misc_feature (17)..(17): n is a, c, g, or t
tctaacgggggctttantgtggccgggcgaaaggggcgggcccggggtggcctgacctaccaggacagccgagtggccttctcccccccaaaaccgatccaggccattgagactcggtcttgtcccaaacttcgcccggaactttcccatgcccagacctcactcagcgtgcacgcacgttggggagaagtcggcccttgggatctttctcttgagtcattttatttttatcatggactagtgcgtgctccgtgtccaccccaataaaagggtctttcctactt

SEQ ID NO: 253164 - DNA, 739 bp, Homo Sapiens
  misc_feature (22)..(22): n is a, c, g, or t
  misc_feature (133)..(133): n is a, c, g, or t
  misc_feature (147)..(147): n is a, c, g, or t
  misc_feature (210)..(210): n is a, c, g, or t
acccccgccagagactggtccntatatgagagccagaataatggtaaaggttggaatcagttgaagagtcgtggctatagtgattcaggggcttgaaggagtaacatcactggaatgcacatccacacacacncaacgatacgaganaatgtgaaaatgtgaatctgagcttcagactcccaagaagcattagaggtggagatgggagcnaggatgaagagagacgtgaagaagctttagaacagaattcatttagagattcaaaacaccaggaggaggtggtgtgctgaatgtcttgtggctgtgttgttgcatgggccaatcccaaggagcccatcccaggggctgagggtcccttgctaaggctgagtgctctgtctagaacaggtccaaactgcattaggaaatggatacatggatattctaggtttaaaaaccagcctttggaacttggtgatttccctaggaaatcgtaggctgaactggaatcctatggcctgggctgccagactttccagcgacagccctaaactcatgatactagtatgaggcaggaaagggtggacaagggtgggagtctccaaccacagatatgagggagaagttatggaacaaaataagtaagagaactcagaaattctctccttccagtttatcccaaacccagggaagcagaggcacattgggtaacaaggataggtctggggaaaaaaatgagggtttctacactcaggtagtc

SEQ ID NO: 253165 - DNA, 1084 bp, Homo Sapiens
  misc_feature (48)..(48): n is a, c, g, or t
  misc_feature (95)..(95): n is a, c, g, or t
aggccctcagtcactttggaagtgagaagaacccttcagccaaacctntgggatcccattttgaagtccagagctggagcaggcgggcagtgctngggagaacccgctctggataagacacccaaccccaactccagcagctggactctgggcccacaaggggagggaccccagccagtattccctcagagccggcacgaccctgctgtggggcggcgggcccagtcgtgttcctgcagtgggcaccctaggcgtatgtgtatacacgcacagatatttattcctttcgcttttagtggttgttatttctgtagcagccaagtcctgcggctccctggggctgagatctccctttgtggaactccgagagccgccctgacagtcccagccgccacccaaggagccccatccgcccacccaccctgggacccacgcggccactccagggatcattgttgtccttttgtgaggggctgaggcgactgtcccatggaggcatccaaggctttctgtgccaagaatcccaagtgactggggctggggaccacttctccaggcctctctccccgaccatgagagcccctggccctggccctgcacaccagtaggcccagaataaccgccacccttgccatcctgcaacagctggactcaagtttccaggaagtggagatgtgtttctagaagtttcctgtggaacctggaggctcctgacgcctttgactccaggctgggcgattccgatgctgacccgtcctcctgggctccccacccccgctccccaagtgtcacacaggcactttgtacacatcctggttttctaagaagggaacttgccatcaagattcctgtaccaagcccacggccgtctcggcagagccacctgggccccaggtgcagccggagaccccgccgagcccctcctcccagtattcccatccccgcatgcttctagggagcgcctcttttccgttcttgaggaatttctgttctggggcttgtccttcctttgcagctgttttgaatgtagttttccttttctatttatttgcacattaaagttaataattgaatattgaaaaaa

SEQ ID NO: 253166 - DNA, 348 bp, Homo Sapiens
  misc_feature (22)..(22): n is a, c, g, or t
  misc_feature (73)..(73): n is a, c, g, or t
  misc_feature (147)..(147): n is a, c, g, or t
gaccccccctatcctcatcccngtgaccttagaatgcccttaacctgacccatcctgggaatgcagccccaanagatttcacccctcattttgcccggctcctgtttaagatggagttgcctctggttcacatgccctctaacaaanccttttagtttttcatgcttgtcacatgtttacttctaagggtataatcatgtggtttactatattattaccgattagattattttgaactacttcaattttatttattttacctcatttccattcacattttttgaaaagagcttttttatacaagagtgtaaatattttcacattgaataaatgaattgaaaacagtat

SEQ ID NO: 253167 - DNA, 291 bp, Homo Sapiens
  misc_feature (128)..(246): n is a, c, g, or t
aagcaaattgcaaataaattgagctacagaagtagtccaacaacatctacaagcccatggaaaatattctgggttcatcttctaggataataagggaaagaatgtatttaaaagtaagaggaggctgnnnnnnnnnnnnnnnnnnnnnnnnnnnnnnnnnnnnnnnnnnnnnnnnnnnnnnnnnnnnnnnnnnnnnnnnnnnnnnnnnnnnnnnnnnnnnnnnnnnnnnnnnnnnnnnnnnnnnnnggattttttaaggccaggggctgtggctcacacctgtaatcccaa

SEQ ID NO: 253168 - DNA, 856 bp, Homo Sapiens
  misc_feature (723)..(731): n is a, c, g, or t
aaccaaaagagcaacaattgccattacgccattaaggcttgggaacttatggaaaggcgattcggtggggcctgtattgcacagctgggaaaggggattggctgcaaggcgtttaagttggtaccgcaaggttttccagtcacgccttgtaacgccggcattaatggtatacactcctataggcgaatgggtccgggcacccctcgaaaattcgggacagcaataaaagacgaagcagagagaggaagaaggcagagtaacctacaagaagttttagaaagggaacgaagagaactagaaaaactgtatcaggaaaggaagatgattgaagaatcactgaagattaaaataaaaaaggaattagaaatggaaaatgaattagaaatgagtaatcaagaaataaaagacaaatctgctcacagtgaaaatcctttagagaaatacatgaaaatcatccagcaggagcaagaccaggagtcggcagataagagctcaaaaaagatggtccaagaaggctccctagtggacacgctgcaatctagtgacaaagtcgaaagtttaacaggcttttctcatgaagaactagacgactcttggtaaccatgtttgctgcccagcttctaacttacataccgtgagaagttacgtaacatttactcctttgtaaatgtttccctatcatcagacaaaactcaataaaaatgtgtgtaatccaatgtgggnnnnnnnnnccataattaattttgataccatagtgtgtgaaccaagaataatctagtcacgtgaaacctcttctccagtcatagtatttctcattcattataataaaagtaactggcttttaacctccttaaaa

SEQ ID NO: 253169 - DNA, 401 bp, Homo Sapiens
gaccaagaaaagaaaccaatattcaagagtacgtgttgaatctgaaatgtctatgtaaactgtggcatataaaccttaaaaaagtaccttcaatttttttactcaaacacttacttttaaaaaaatatgcaactttccccaatttttaaaataaaatgccacaatatagtgtcattacttccagcatacatttaaatttcttaatttttaaaagatagactgggtgatatgcatacaaactttcctataaaatcaccatccaggagaggattctgacatgctattaggcaacagactcaaagcagtgttattgctttatcaaggaggagattaactgtgagggaaaaaaaattaaatatccaggtccggtacatgatcaaactgtattacaccttgaaaat

SEQ ID NO: 253170 - DNA, 381 bp, Homo Sapiens
  misc_feature (59)..(141): n is a, c, g, or t
caggcatgtgccaccatgcctggctaatttttgtatttttaatagcgacagggtttcannnnnnnnnnnnnnnnnnnnnnnnnnnnnnnnnnnnnnnnnnnnnnnnnnnnnnnnnnnnnnnnnnnnnnnnnnnnnnnnnnnatgagctaccacgccgtgccaactacatcttattcttggttatttttcactttctctatctaactcagtgcaggatacctagtaaaattggttcttcatcagagcggttgagaattcagagatgcttttttttatgtgaactgatttagacatttagagacattgtacactaagaaaatgactcagaaaatagaacatctatatggctatcttgatgtatcctcattaatatagtggtgt

SEQ ID NO: 253171 - DNA, 972 bp, Homo Sapiens
ctgcaggattcggcacgaggtgccgggcggtgctggcgggcctgcggagcccccggggggccatgcggcctgagcaggaggagctggtgatggtgggcaccaaccacgtggaataccgctatggcaaggccatgccgctcatcttcgtgggtggcgtgcctcgcagtggcaccacgttgatgcgcgccatgctggacgcccaccccgaggtgcgctgcggcgaggagacccgcatcatcccgcgcgtgctggccatgcgccaggcctggtccaagtctggccgtgagaagctgcggctggatgaggcggtggtgacggatgaggtgctggacgccgccatgcaggccttcatcctggaggtgattgccaagcacggagagccggcccgcgtgctctgcaacaaggacccatttacgctcaagtcctcggtctacctgtcgcgcctgtgccccaactccaagttcctgctgatggtgcgggacggccgggcctccgtgcactccatgatcacgcgcaaagtcaccattgcgggctctgacctcagcagctaccgtgactgcctcaccaagtggaacaaggccatcgaggtgatgtacgcccagtgcatggaggtaggcaaggagaagtgcctgcctgtgtactacgagcagatggtgctgcaccccaggcgctcactcaagctcatcctcgacttcctcggcatcgcctggagcgacgctgtcctccaccatgaagacctcattggcaagcccggtggtgtctccctgtccaagatcgagcggtccacggaccaggtcatcaagcctgttaacctggaagcgctctccaagtggactggccacatccctggggatgtggtgcgggacatggcccagatcgcccccatgctggctcagctcggctatgacccttatgcaaacccccccaactatggcaaccctgaccccttcgtcatcaacaacaccaggaaaa

SEQ ID NO: 253172 - DNA, 627 bp, Homo Sapiens
  misc_feature (48)..(49): n is a, c, g, or t
  misc_feature (129)..(129): n is a, c, g, or t
gtcagaatatgcacaggtggaaaaaaaacccaagccccaaagaaaaanncaaagtgcatccaaagcaacctgctaatgtagaaaaggttctaagccagccagcagtaaaaagccaggggtctggagtgnccacctggccatgccctctcccactgccctgtgccaggcttgtcgggccaccagtgccctcttgagacagtctccattggctccaagggttctgtgagccacagaaggttgtgaaaggagaagagcctgaagtgtggcagcaccagggcagcccaaagcagggctgcgttgaaaatatcaaagtatctcaggggtggctctgagggttggtgggattggagggggaaggggcgcctgggaggagtacagtcagcatctattcttgggcaccgggaggagccactctctggaatcttaaattaccaggtaggagtgagaatgctgattagctgtagagctgaaggcacggctgccaggcccctccgggtccttctctagttctccaggcccggtgtatcgaaggcagtggagaggaagggcctgtgggagccagggccagctcagcagcctagccagtcggatttgatgcttccaaacttcacgctcttcagactttgg

SEQ ID NO: 253173 - DNA, 709 bp, Homo Sapiens
  misc_feature (121)..(121): n is a, c, g, or t
  misc_feature (432)..(464): n is a, c, g, or t
gcctttcagctttacaagcctaatcaagcattcctcactcctacctgggtaatttaagattccagagaagtggctcctcccggtgcccagaaatagatgcgggtggtactcctcccagggngcccttcccccctccaatcccaccaaccctcagagccacccctaaagagatacttggatattttcaacgcagccctgctttgggctgccctggtgctgccacacttcaggctcttctcctttcacaaccttctgtggctcacagaacccttggagccaatggagactgtctcaagagggcactggtggcccgacagcctggcacagggcagtgggacagggcatggccaggtggccactccagacccctggcttttcactgctggctgccttagaacctttcttacattagcagtttgctttgtatgcacnnnnnnnnnnnnnnnnnnnnnnnnnnnnnnnnnccacttagaaattgcatttcctgacagaaggactcaggttgtctgaagtcactgcacagtgcatctcagcccacatagtgatggttcccctgttcactctacttagcatgtccctaccgagtctcttctccactggatggaggaaaaccaagccgtggcttcccgctcagccctccctgcccctcccttcaaccattccccatgggaaatgtcaacaagtatgaataaagacacctactgagtga

SEQ ID NO: 253174 - DNA, 642 bp, Homo Sapiens
  misc_feature (593)..(593): n is a, c, g, or t
tatagaaggataatacagagccaagatcaaattaaaagacaataaatggaacagaagggaggcagtgtttagctttgtataaacttttaggtttgctctgtaatctgctaaaccatatacattcttttgtgatatgttattatgtatgtggcacttgaggcactgtatgtaaagtaaggaatgctttactagttctccttggttttatctttgtttaaactagctttaaagtattaaacaataattgaaatgaaaagcttacctattttaaaaagccaaatttaaataaatatagaactttaaaatgtttatcagttgtttccatgaaagaatattagtttccagtaaatttagtgatggctcactcacttttctattttggaattacatagttatgtaagtaaaatttttaaaaatcataaagggagcaccattgtacagtctagcataaacagcaaattttaaagaggacatatttaagttcataatcatatttttcaagaaatattgctcagtgaactggaaaaactttaatagaatgtctgcagtttgtgatttgtaattggttaaccgatttttatattattaagtangtaacattttatattaacttcatatgtgtatccatgctttgagaggctt

SEQ ID NO: 253175 - DNA, 399 bp, Homo Sapiens
catgctgttactgacggggcagggtgtcatgcatgggtgcagaggatggaggctgagaaaggtagacagctacccatgatctagcccagtcgtattttagagctaataaaactgatgttcagaaagtgacatgccttggcctatagtcctaactgggctgggcctctttcctgtggttcacagctgtagtatggagattaatagactggatctttgcagtacaacacctctatgcacttctttctctgtagcacatgttacctttctttgtgaggcaatggagtggtctaggattgagcaaaaagcaatttttgttacatctttatgctaatagatttggaatttttgaaatgaaatgaccttgtttcattttactgaggcggacagatcacgaggtcg

SEQ ID NO: 253176 - DNA, 688 bp, Homo Sapiens
cttcagcaaggagatgttcaagaacaccatggccctcatggacctgggtgaggggtgagaggcaggcagggtggcaggggcctcagggtggcagggctgtggggctgagtctccccactcccctgtccccctagatgtgaagaagatgcccctgggaaagctgagcaagcaacagattgcacggggtttcgaggccttggaggcgctggaggaggccctgaaaggccccacggatggtggccaaagcctggaggagctgtcctcacacttttacaccgtcatcccgcacaacttcggccacagccagcccccgcccatcaattcccctgagcttctgcaggccaagaaggacatgctgctggtgctggcggacatcgagctggcccaggccctgcaggcagtctctgagcaggagaagaccgtggaggaggtgccacaccctctggaccgagactaccagcttctcaagtgccagctgcagctgctagactctggagcacctgagtacaaggtgatacagacctacttagaacagactggcagcaaccacaggtgccctacactttaacacatatggaaagtgaaccaagaaggggaggaagacagattccaggcccactccctgggtaatcgggctgctgtggcatgggacccacatggccgtggtggccgccatactcactgtggg

SEQ ID NO: 253177 - DNA, 403 bp, Homo Sapiens
  misc_feature (267)..(276): n is a, c, g, or t
ggtatcacaaccaaaaaattagcagattttttaggcactgatagttggatatccaaagttacaaattacttctcttattttggtagaatttgctttcatagtttatttgctcattttaatagatgatattagctatttttatttataatgcaatacaaatagtttatagtatatcatatttttaaaactcaaatggaattgtgatacaaataaattttagcaaatatttgctagccaaaaatagtaattaaaatagagtgacatttnnnnnnnnnncttgagagaaattgcactttcataaattttcgatgagattatattttacttaattttccctctaatatgttaacattttatttaagtaattcaaagaatataataagaattcattgtcagaggcaac

SEQ ID NO: 253178 - DNA, 1166 bp, Homo Sapiens
  misc_feature (317)..(317): n is a, c, g, or t
  misc_feature (323)..(323): n is a, c, g, or t
ggtaccggtcccgaatcctagggatatcgtcgacccacgcgtgcggtttggcctgccgcaagctcagcagccccagtggagcctctcacagatgaatcagcagatggctggcatgagtatcagtagtgcaacccctactgcaggttttggcccagccccccagcacaacagcaggatggtctggaagcctcatccaggtcagactctcaggcacacaactgtggaaatgaaaactgcaatacaagtttcatccagaactaccacctgacattccttgctgaaacgcatctagttcccctgtttattcatatgcatantttttntctttttacccatttgttcatattaagaatgatctgattgaccgtgttggtctgtactgattcaatttgatgtggtgaaaagcaggttgataaatcattttatgtcaagggcagctttgctcatatttcccatgatttcatgtactgcattatttgagaagctgctcaacttgcaaaatcagttttcctctcaataaaattatagctctaatgtttgcatataagggaagtagttatcatgttagtaatacctctaatagtataaaccccaccccaaaattagccagtaatcctgtaggaaggtactgtatgatcaaatgtttaatcatataaatagaatgtaaatgtctcactgagcactgttttctagtgtatcaaaatgctcttatttcatcattcacttcactgtgctgttgttatgatgtgcttaacagggaacgtgattagtgaaaggaagataaacgtggatgttactccaaaacttcgtttaatgaatgcttaaaaaattcaaattttatctgcctctcttgtaaatttggatctcttcctaatgtacatagtgctaacatgaaaacctttttctgcactatatgcaaacagggtaaactaactaaaacaaagccacctttcaatctttcatcccttggaagtatatctagggttaatgaaagcaaattgtggtttaccttttttatggtgccctagctattgccaaaaatggttatttccccctacatttaaaccttgaactccccttggaaccgccccacgccccatatcgtcccgccccctctatgattccgacgccccaattttacatcaccatcatcccccacctcccca

SEQ ID NO: 253179 - DNA, 424 bp, Homo Sapiens
cccggcctaatagtccctaaaagggaagggtctgagaccctcctacagtagcctaaaactcagatttcaagtaggaagtgatggcagagtaagtgaaagagctgaataaaatagagtaaggaacttgtaaaccagacactgaattaaaactgagggatcaaaagtaactccatgttgaagttcccctggaagacaagaatgtacactgctctgtgaaataaacctgtaaaaaagcagacatcctgttagctgcaggttgataaacaaacgggagaagtacttaacagcaaagacagcttccatacctgttcagcaagctacactacatccacagcaaaagcatgatgaaatcaaggccttgtgctgtgtcactcaaacaaccactccagaaccctgatgcctttcttggggttactgttaatgc

SEQ ID NO: 253180 - DNA, 400 bp, Homo Sapiens
catggcacaactatctcctgcaaggataagagaataagagcttcataacacaaatagttcacagcgtggtattcgcctctatatagaatcatctcccattgggttcaattaacaatgtacatgtcaaattatgtcacacccattacttgctctaatttggtcaggctgggtcaggcagtccctgaactgatggagctgttaacctcacagcagagagtcacggtggctgtgcctgcactgcccttggccttggctgtgtcagggcagaacactgtactgggaaagtaccagacagtgctgcaggaaaggtcaagttcgtgacgacagtgaccagtcatcaagccctttaccagagctgtgcctctagagatgactatgtgaattgaatcgtggctctgtc

SEQ ID NO: 253181 - DNA, 351 bp, Homo Sapiens
ggcacgaggtgttgccttctccgcgtggtcaaagagtcattccacgaataaccatagaaatgaaagcagaggcagaaaagagaaataaaaagagaattaagaatgaaaatactgaaggaagccctcaagaagatggtgtggaactagaaggcctaaaacaaagattagagaagagacagagcagagaaccaggtacaaagacaaagaaacaaactacattggcatttaagccaatcaacgaaagtaatattgatgtccctccacgagagacagagccacggagagcagcaacacatacacaattcacacatggatatggattcagatggatatctcagattatgatgagtc

SEQ ID NO: 253182 - DNA, 4004 bp, Homo Sapiens
gggaagataatgattatgacagatcaggaccaagatggttcccacatcaaaggcttgctgattaattttatccatcacaactggccctctcttctgcgacatcgttttctggaggaatttatcactcccattgtaaaggtatctaaaaacaagcaagaaatggcattttacagccttcctgaatttgaagagtggaagagttctactccaaatcataaaaaatggaaagtcaaatattacaaaggtttgggcaccagcacatcaaaggaagctaaagaatactttgcagatatgaaaagacatcgtatccagttcaaatattctggtcctgaagatgatgctgctatcagcctggcctttagcaaaaaacagatagatgatcgaaaggaatggttaactaatttcatggaagatagaagacaacgaaagttacttgggcttcctgaagattacttggatggacaaactaccacatatctgacatataatgacttcatcaacaaggaacttatcttgttctcaaattctgataacgagagatctatcccttctatggtggatggtttgaaaccaggtcagagaaaggttttgtttacttgcttcaaacggaatgacaagcgagaagtaaaggttgcccaattagctggatcagtggctgaaatgtcttcttatcatcatggtgaagatgtcactaatgatgaccattatcaatttggctcaaaatttttgtgggtagcaataatctaaacctctttgcagcccattggtcagtttggtaccaggctacatggtggcaaggattctgctagtccacgatacatctttacaatgctcagctctttggctcgattgttatttccaccaaaagatgatcacacgttgaagtttttatatgatgacaaccagcgtgttgagcctgaatggtacattcctattattcccatggtgctgataaatggtgctgaaggaatcggtactgggtggtcctgcaaaatccccaactttgatgtgcgtgaaattgtaaataacatcaggcgtttgatggatggagaagaacctttgccaatgcttccaagttacaaaaacttcaaaggtactattgaagaactggctccaaatcaatatgtgattagtggtgaattagctattcttaattctacaaccattgaaatctcacagcttcccgtcagaacatggacccagacatacaagagaacaagttctagaacccatgttgaatggcaccgagaagacacctcctctcataacagactatagggaataccatacagataccactgtgaaatttgttgtgaagatgactgaagaaaaactggcagaggcagagagagttggactacacaaagtcttcaaactccaaactagtctcacatgcaactctatggtgctttttgaccacgtaggctgtttaaagaaatatgacacggtgttggatattctaagagacttttttgaactcagacttaaatattatggattaagaaaagaatggctcctaggaatgcttggtgctgaatctgctaaactgaataatcaggctcgctttatcttagagaaaatagatggccaaataatcattgaaaataagcctaagaaagaattaattaaagttctgattcagaggggatatgattcggatcctgtgaaggcctggaaagaagcccagcaaaaggttccagatgaagaagaaaatgaagagagtgacaacgaaaaggaaactgaaaagagtgactccgtaacagattctggaccaaccttcaactatcttcttgatatgcccctttggtatttaaccaaggaaaagaaagatgaactctgcaggctaagaaatgaaaaagaacaagagctggacacattaaaaagaaagagtccatcagatttgtggaaagaagacttggctacatttattgaagaattggaggctgttgaagccaaggaaaaacaagatgaacaagtcggacttcctgggaaaggggggaaggccaaggggaaaaaaacacaaatggctgaagttttgccttctccgcgtggtcaaagagtcattccacgaataaccatagaaatgaaagcagaggcagaaaagaaaaataacaaagaacaattaagaatgaaaatactgaaggaagccctcaagaagatggtgtggaactagaaggcctaaaacaaagattagaacaagaaacagaaaagagaaccaggtacaaagacaaagaaacaaactacattggcatttaagccaatcaaaaaaaggaaagaagagaaatccctggtctgattcagaatcagataggagcagtgacgaaagtaattttgatgtccctccacgagaaacagagccacggagagcagcaacataaaacaaaaattcaccaatggatttggattcagatgaagatttctcagattttgatgaaaaaactgatgatgaagattttgtcccatcagatgctagtccacctaagaccaaaacttccccaaaacttagtaacaaagaactgaaaccacagaaaagtgtcgtgtcagaccttgaagctgatgatgttaagggcagtgtaccactgtcttcaagccctcctgctacacatttcccagatgaaactgaaattacaaacccagttcctaaaaagaatgtgacagtgaagaagacagcagcaaaaagtcagtcttccacctccactaccggtgccaaaaaaagggctgccccaaaaggaactaaaagggatccagctttgaattctggtgtctctcaaaagcctgatcctgccaaaaccaagaatcgccgcaaaaggaagccatccacttctgatgattctgactctaattttgagaaaattgtttcgaaagcagtcacaagcaagaaatccaagggggagagtgatgacttccatatggactttgactcagctgtggctcctcgggcaaaatctgtacgggcaaagaaacctataaagtacctggaagagtcagatgaagatgatctgttttaaaatgtgaggcgattattttaagtaattatcttaccaagcccaagactggttttaaagttacctgaagctcttaacttcctcccctctgaatttagtttggggaaggtgtttttagtacaagacatcaaagtgaagtaaagcccaagtgttctttagctttttataatactgtctaaatagtgaccatctcatgggcattgttttcttctctgctttgtctgtgttttgagtctgctttcttttgtctttaaaacctgatttttaagttcttctgaactgtagaaatagctatctgatcacttcagcgtaaagcagtgtgtttattaaccatccactaagctaaaactagagcagtttgatttaaaagtgtcactcttcctccttttctactttcagtagatatgagatagagcataattatctgttttatcttagttttatacataatttaccatcagatagaactttatggttctagtacagatactctactacactcagcctcttatgtgccaagtttttctttaagcaatgagaaattgctcatgttcttcatcttctcaaatcatcagaggccgaagaaaaacactttggctgtgtctataacttgacacagtcaatagaatgaagaaaattagagtagttatgtgattatttcagctcttgacctgtcccctctggctgcctctgagtctgaatctcccaaagagagaaaccaatttctaagaggactggattgcagaagactcggggacaacatttgatccaagatcttaaatgttatattgataaccatgctcagcaatgagctattagattcattttgggaaatctccataatttcaatttgtaaactttgttaagacctgtctacattgttatatgtgtgtgacttgagtaatgttatcaacgtttttgtaaatatttactatgtttttctattagctaaattccaacaattttgtactttaataaaatgttctaaacattggcaga

SEQ ID NO: 253183 - DNA, 484 bp, Homo Sapiens
  misc_feature (368)..(368): n is a, c, g, or t
  misc_feature (399)..(399): n is a, c, g, or t
  misc_feature (470)..(470): n is a, c, g, or t
cagtttcctaaaaagaatgtgacagtgaagaagacagcagcaaaaagtcagtcttccacctccactaccggtgccaaaaaaagggctgccccaaaaggaactaaaagggatccagctttgaattctggtgtctctcaaaagcctgatcctgccaaaaccaagaatcgccgcaaaaggaagccatccacttctgatgattctgactctaattttgagaaaattgtttcgaaagcagtcacaagcaagaaatccaagggggagagtgatgacttccatatggactttgactcagctgtggctcctcgggcaaaatctgtacgggcaaagaaacctataaaagtacctgggaaggagttcagatgaagatngatctggttttaaaaatgtggagggcgattnatttttaaagttaatttattcttaaccaaggccccaaggactgggtttttaaaagtttacctggaaggttnttaacttcctcccc

SEQ ID NO: 253184 - DNA, 1893 bp, Homo Sapiens
  misc_feature (15)..(15): n is a, c, g, or t
  misc_feature (57)..(57): n is a, c, g, or t
  misc_feature (179)..(180): n is a, c, g, or t
  misc_feature (185)..(185): n is a, c, g, or t
  misc_feature (195)..(195): n is a, c, g, or t
  misc_feature (204)..(204): n is a, c, g, or t
  misc_feature (396)..(396): n is a, c, g, or t
aaggtttcagaaagngcctgttctttatggtccctgataccccgtaataaagaaaanttccaaaacccctttctatactaaagaaatcaatcgagttttatatccagtgccaggtatgcgtcacttgaaactctgggtgaattactacattagatgaacccccaggatcaagcacacanngccgnatccagtgangcagcgtancatgagctctttagccttacgcgacgaatacataaagcggcttgaggaactgcagctcgccaactctgccaagctttctgatcccccaacttcaccttccagtccttcgcaaatgatgccccatgtgcaaactcacttctgaggggggacctggccaccgcattagagctcgaaataaaggcgatagctganctttcatttggggcatttgtaaaaagtagattaaaatatttgcctccatgtagaacttgaactaacataatcttaaactcttgaatatgtgccttctaggaatacatatttacaagaaaacttacagggtccacacggcaatcagaagaaaggagctgagatgaggttttggaaaaccctgacacctttaaaaagcagtttttgaaagacaaaatttagatttaatttacgtcttgagaaatactatatatacaatatatattttgtgggcttaattgaaacaacattattttaaaatcaaaggggatatatgtttgtggaatggattttcctgaagctgcttaacagttgctttggattctctaagatgaatccaaatgtgaaagatgcatgttactgccaaaaccaaattgagctcagcttcctaggcattacccaaaagcaaggtgtttaagtaattgccagcttttataccatcatgagtggtgacttaaggagaaatagctgtatagatgagtttttcattatttggaaatttaggggtagaaaatgttttcccctaattttccagagaagcctatttttatatttttaaaaaactgacagggcccagttaaatatgatttgcattttttaaatttgccagttttattttctaaattctttcatgagcttgcctaaaattcggaatggttttcgggttgtggcaaaccccaaagagagcactgtccaaggatgtcgggagcatcctgctgcttaggggaatgttttcgcaaatgttgctctagtcagtccagctcatctgccaaaatgtagggctaccgtcttggatgcatgagctattgctagagcatcatccttagaaatcagtgccccagatgtacatgtgttgagcgtattcttgaaagtattgtgtttatgcatttcaatttcaatggtgttggcttcccctccccaccccacgcgtgcataaaaactggttctacaaatttttacttgaagtaccaggccgtttgctttttcaggttgttttgttttatagtattaagtgaaattttaaatgcacagttctatttgctatctgaactaattcatttattaagtatatttgtaaaagctaaggctcgagttaaaacaatgaagtgttttacaatgatttgtaaaggactatttataactaatatggttttgttttcaatgaattaagaaagattaaatatatctttgtaaattattttatgtcatagtttaattggtctaccaagtaagacatctcaaatacagtagtataatgtatgaattttgtaagtataagaaattttattagacattctcttactttttgtaaatgctgtaaatatttcataaattaacaaagtgtcactccataaaaagaaagctaatactaatagcctaaaagattttgtgaaatttcatgaaaactttttaatggcaataatgactaaagacctgctgtaataaatgtattaactgaat

SEQ ID NO: 253185 - DNA, 445 bp, Homo Sapiens
  misc_feature (15)..(15): n is a, c, g, or t
  misc_feature (27)..(27): n is a, c, g, or t
  misc_feature (35)..(35): n is a, c, g, or t
  misc_feature (78)..(78): n is a, c, g, or t
  misc_feature (92)..(92): n is a, c, g, or t
gcccctaggcaatangccccatgccanccaaagangggtagccccctacattttgggcaagatgaagctggggactgnaccaagagcaacanttggcggaaaaacattcccccctaagccagcagggatgctccccgacatcccttgggacagtgcctctctttggggtttgcccacaacccgaaaacccattcccgaattttaggcaagctcatgaaagaatttagaaaataaaactggcaaatttaaaaaatgcaaatcatatttaactgggccctgtcagttttttaaaaatataaaaataggcttctctggaaaattaggggaaaacattttctacccctaaatttccaaataatgaaaaactcatctatacagctatttctccttaagtcaccactcatgatggtataaaagctggcaattacttaaacaccttgctttc

SEQ ID NO: 253186 - DNA, 732 bp, Homo Sapiens
aagaaactgtgaaccatacgtgattataaagaccttaaggcagaggctggtcgagatgctgctgttatcttctgcctcagacagacagtataagtggtcatgtttctaagattcctaccaccagttactttgggccaagtatccacatcaccttgcgtatgggaggtgggtgaagagtgttggatgcaaagtggttattatgggaagtagctcgatggtaaaaggacaaacacctatctatcttagagcttaagcctgtatgtgcttattcccaagggagatagaggtgaatcacaaggacagcatgagttagaggacactggcatcaacagctgccacagccgtgcacaccagggccagagcagcccactgacatctgtctttggtcttgagatcaaatgcatcccattcttcatacattagaaggtcgacctccttgaagcagaccaagtatagcaagcctctaaaaggactactgagaaacagaatcagaaactctagaactctagttagggcccttcagcagggctgcagagcctccctggatacccaggcctgggaaagcctgtctggtcttgtcaccccaggtgacaaatacaaccatgcctaccctttctaaggaagacatccaacagttcatgtgggctctggcttcgtgttaacatgaggaactaaagacatgtttcaccccgtgagaaacagaaggatcccctgagcagtacctgatttgac

SEQ ID NO: 253187 - DNA, 3342 bp, Homo Sapiens
  misc_feature (98)..(120): n is a, c, g, or t
  misc_feature (129)..(205): n is a, c, g, or t
aaggtagcgaggcctgggtggcgaattcggcacgaggccgcgatgcccgcgcgcccaggacgcctcctcccgctgctggcccggccggcggccctgannnnnnnnnnnnnnnnnnnnnnnggccatggnnnnnnnnnnnnnnnnnnnnnnnnnnnnnnnnnnnnnnnnnnnnnnnnnnnnnnnnnnnnnnnnnnnnnnnnnnnnnaggacggacaggacccgcacagcaagcacctgtacacggccgacatgttcacgcacgggatccagagcgccgcgcacttcgtcatgttcttcgcgccctggtgtggacactgccagcggctgcagccgacttggaatgacctgggagacaaatacaacagcatggaagatgccaaagtctatgtggctaaagtggactgcacggcccactccgacgtgtgctccgcccagggggtgcgaggataccccaccttaaagcttttcaagccaggccaagaagctgtgaagtaccagggtcctcgggacttccagacactggaaaactggatgctgcagacactgaacgaggagccagtgacaccagagccggaagtggaaccgcccagtgcccccgagctcaagcaagggctgtatgagctctcagcaagcaactttgagctgcacgttgcacaaggcgaccactttatcaagttcttcgctccgtggtgtggtcactgcaaagccctggctccaacctggggagcagctggctctgggccttgaacattccgaaactgtcaagattggcaaggttgattgtacacagcactatgaactctgctccggaaaccaggttcgtggctatcccactcttctctggttccgagatgggaacaaaggtggatcagtacaagggaaagcgggatttggagtcactgagggagtacgtggagtcgcagctgcagcgcacagagactggagcgacggagaccgtcacgccctcagaggccccggtgctggcagctgagcccgaggctgacaagggcactgtgttggcactcactgaaaataacttcgatgacaccattgcagaaggaataaccttcatcaagttttatgctccatggtgtggtcattgtaagactctggctcctacttgggaggaactctctaaaaaggaattccctggtctggcgggggtcaagatcgccgaagtagactgcactgctgaacggaatatctgcagcaagtattcggtacgaggctaccccacgttattgcttttccgaggagggaagaaagtcagtgagcacagtggaggcagagaccttgactcgttacaccgctttgtcctgagccaagcgaaagacgaactttaggaacacagttggaggtcacctctcctgcccagctcccgcaccctgcgtttaggagttcagtcccacagaggccactgggttcccagtggtggctgttcagaaagcagaacatactaagcgtgaggtatcttctttgtgtgtgtgttttccaagccaacacactctacagattctttattaagttaagtttctctaagtaaatgtgtaactcatggtcactgtgtaaacattttcagtggcgatatatcccctttgaccttctcttgatgaaatttacatggtttcctttgagactaaaatagcgttgagggaaatgaaattgctggactatttgtggctcctgagttgagtgattttggtgaaagaaagcacatccaaagcatagtttacctgcccacgagttctggaaaggtggccttgtggcagtattgacgttcctctgatcttaaggtcacagttgactcaatactgtgttggtccgtagcatggagcagattgaaatgcaaaaacccacacctctggaagataccttcacggccgctgctggagcttctgttgctgtgaatacttctctcagtgtgagaggttagccgtgatgaaagcagcgttacttctgaccgtgcctgagtaagagaatgctgatgccataactttatgtgtcgatacttgtcaaatcagttactgttcaggggatccttctgtttctcacggggtgaaacatgtctttagttcctcatgttaacacgaagccagagcccacatgaactgttggatgtcttccttagaaagggtaggcatggaaaattccacgaggctcattctcagtatctcattaactcattgaaagattccagttgtatttgtcacctggggtgacaagaccagacaggctttcccaggcctgggtatccagggaggctctgcagccctgctgaagggccctaactagagttctagagtttctgattctgtttctcagtagtccttttagaggcttgctatacttggtctgcttcaaggaggtcgaccttctaatgtatgaagaatgggatgcatttgatctcaagaccaaagacagatgtcagtgggctgctctggccctggtgtgcacggctgtggcagctgttgatgccagtgtcctctaactcatgctgtccttgtgattaaacacctctatctcccttgggaataagcacatacaggcttaagctctaagatagataggtgtttgtccttttaccatcgagctacttcccataataaccactttgcatccaacactcttcacccacctcccatacgcaaggggatgtggatacttggcccaaagtaactggtggtaggaatcttagaaacaagaccacttatactgtctgtctgaggcagaagataacagcagcatctcgaccagcctctgccttaaaggaaatctttattaatcacgtatggttcacagataattctttttttaaaaaaacccaacctcctagagaagcacaactgtcaagagtcttgtacacacaacttcagctttgcatcacgagtcttgtattccaagaaaatcaaagtggtacaatttgtttgtttacactatgatactttctaaataaactctcttttttctctcctagagcaaagggcccgagttttaacgcatcttgtggggcggccttcggcccttcaaagaagtttttcctagcccctctcgttggggtgcgccgggcccgataagggtaagcgcacgatgggcccccagcgtggctatcctcagggacatcccggccgcttaaattagggtctggggatcgctcagcaaaacaaacaaaggcccccttgggccagacccgatcgctctttcaatccaataccgcacacctgtaatgcacccgagcgccccgtagacggcgaattcttttttaccgaaagcacgtttttctaccattaaccaccacaccacgaggtctatctcactctcgactcgtaacggccctggggccca

SEQ ID NO: 253188 - DNA, 1207 bp, Homo Sapiens
  misc_feature (968)..(968): n is a, c, g, or t
gctggtgcgattcaaggatggtgctttcctggcggggaccttcatctccaccgtaggcattgacttccggaacgttctggacgtggatggtgtgaaggtgaagctgcagatgtgggacacagctggtcaggagcggttccgcagtgttacccatgcctactaccgggatgctcatgctctgctgctgctctacgatgtcaccaacaaggcctcctttgacaacatccaggcctggctgaccgagatccacgagtacgcccagcacgacgtggcgctcatgctgctggggaacaaggtggactctgcccatgagcgtgtggtgaagagggaggacggtgagaagctggccaaggtgagtcagggcaggggggtggtgagggggtgcccctggaggctgcgagcctaggctgtccccgccaggccaccacctggctggcagcagctgtttacaggagtatggactgcccttcatggagaccagcgccaagacgggcctcaacgtggacttggccttcacagccatagcaaagtaagtcctgccagtcaccaggactcccccagcccagggcctgaatcctcattagagtccaggccatcgtgtccccttgtacccccactccgcagggagttgaagcagcgctccatgaaggctcccagcgagccgcgcttccggctgcatgattacgttaagagggagggtcgaggggcctcctgctgccgcccttgaacctggctgagctcagtcctctggaggaagccgcccagtccctagaaggctggacagagggtctccaggcccttctgactttgttgcccagtggccaacgcccgagtgtctgttttcaggagccccaggtcaagccttgtcccttcctcctcccagcaacagtcccaacaagcaggcttctgagagcccgtggccgcacactggccgccacggaaaagcagtcttctgcacgggacggggnagcggcaagtggacagacttttgccaaggtgctctgctgccccctcctgggcacgtccaggtgagggagggctggggctggcaccacgcacagtgcctaaccctagaaagccatgtcttcagccgcacatgctcaggcagctaagggaggacgcctgcccacgccctgggacagaaagcttcactgcttatcacatcgtgcatctgggtgtccctgggaactggctgcttcccggccca

SEQ ID NO: 253189 - DNA, 858 bp, Homo Sapiens
  misc_feature (52)..(52): n is a, c, g, or t
tcccccaaaaaaccttgaactgcctggattaaagaaagccacagggccccanttacttaacgaacaaaaatgaacgcaataacttcggaaaaagtaggaaacgggcaagtgcccagcgagcttcctactgacttaaagcagggtgccccggctggatcagcgtgagagagtgctctgctggctcctgtttctgagttgggccccaggcgagctgccagggcagtagaagcttcagtgggagacaggtcaaaggggtacttgttttcagattttaaccaggtgggtgctacgtagcacaccggaagagcaagctcttaagggtagcatctatcaggttttcagatactaaacagaaatgagcacagtctgtacttgtgtgccaattttaaaagctttgccagtatttaaaaatatatggtcaggaggagactttacagtttctctttacaaacggtatataatgggagaaatggccttgtggcagaggacagtcccagacagcagccttgccacagctcaagtagacacagtccttactaagtctccacgaagagcagtagctggggagggcttctgatgctcttatttacaatcccacaatcactgctctccttcaagtctagcagtcccactgtatattgcaacttgatcgtactaaagaccgacagcaaaggatacagccagtctcgcctctgtgaagtgttgcagagaacctggagagtgctaatgaaaagctgttttaccaaaaagttgccacgggcaacctcatatacttaggcttatgtttagaaagagcaagggtgctactggtagacacttgaaattcgaagtgttttttgtgaataaaatgtgtttatg

SEQ ID NO: 253190 - DNA, 1604 bp, Homo Sapiens
ttagaaaaggtggagcgcctatccagtgggccggagcagatcaccctcgaggccagcagcactgagggacacccaggggctcccagccctcagcacaccgaccagaccgaggccttccagaaaggggtcccacacccagaagatgaccactcacaggtagaaggaccggagagcttaagatgagactcattgtgtggtttgagactgtactgagtattgtttcagggaagatgaagttctattggaaatgtgaactgtgccacatactaatataaattactgttgtttgtgcttcactgggattttggcacaaatatgtgcctgaaaggtaggctttctaggaggggagtcagcttgtctaacttcatgtacatgtagaaccacatgtttgctgtcctactacgacttttccctaagttaccataaacacattttattcacaaaaaacacttcgaatttcaagtgtctaccagtagcacccttgctctttctaaacataagcctaagtatatgaggttgcccgtggcaacttttttggtaaaacagcttttcattagcactctccaggttctctgcaacacttcacagaggcgagactggctgtatcctttgctgtcggtctttagtacgatcaagttgcaatatacagtgggactgctagacttgaaggagagcagtgattgtgggattgtaaataagagcatcagaagccctccccagctactgctcttcgtggagacttagtaaggactgtgtctacttgagctgtggcaaggctgctgtctgggactgtcctctgccacaaggccatttctcccattatataccgtttgtaaagagaaactgtaaagtctcctcctgaccatatatttttaaatactggcaaagcttttaaaattggcacacaagtacagactgtgctcatttctgtttagtatctgaaaacctgatagatgctacccttaagagcttgctcttccgtgtgctacgtagcacccacctggttaaaatctgaaaacaagtacccctttgacctgtctcccactgaagcttctactgccctggcagctcgcctgggcccaactcagaaacaggagccagcagagcactctctcacgctgatccagccgggcaccctgcttaagtcagtagaagctcgctggcactgcccgttcctacttttccgaagtactgcgtcactttgtcgtaagtaatggcccctgtgccttcttaatccagcagtcaagcttttgggagacctgaaaatgggaaaattcacactgggtttctggactgtagtattggaagccttagttatagtatattaagcctataattatactctgatttgatgggatttttgacatttacacttgtcaaaatgcagggggttttttttggtgcagatgattaaacagtcttccctatttggtgcaatgaagtatagcagataaaatgggggaggggtaaattatcaccttcaagaaaattacatgtttttatatatatttggaattgttaaattggttttgctgaaacatttcacccttgagatattatttgaatgttggtttcaataaaggttcttgaaattgttaaaaaaa

SEQ ID NO: 253191 - DNA, 1011 bp, Homo Sapiens
  misc_feature (74)..(74): n is a, c, g, or t
ttatactaatccatcattcaatgagttagagcatctcaaagattataaatacaaccaagggaaccagccaactnacctgtgatcttgacataggcaaaccaagtcccacagtgttagtgctcatcatagagaaattcatactctggaaagatgtcatggttgcctgggacgagcccataagatcaaacaggtctaaagaatgtgaggcagccaggaggtgggcctagagctgattgtgagccactaacaagttctaccgctggctgtgaggcactgccaaagaactcgccactggaagcaacagggcctgatggggcttggttgaaggcactccagtcaccaaagtctccattcccacttgttgctgttacttgggaagggaaactgcctgatgcagcagctgagcccaaagtcagcaaatcctccgaataaatcagctgatcctcctgttgactggctggtgccatcaaacagatcaacaaggtcaccagatgacttgctgctaggcactgaagtcttaactgaagactgaggtgtgtgggttgaagcattctgatcggaaggatttgctgtgcgcttgtgtctggttgtggtggtctctgtggcctgtgtgatatgaatatgctttgtcgtcgtagtcgcctctgtggcatctttgaattcacctttgggagatctgcctcttctcgcttttcctcatcgctgtcgctgcatctttctggagagtcttctctatctttcctccggaacttgctgatggtgtcatcaattgtgcttccaattttatcactcagctcacctaatttatcactgaatggaaaagcactcttgtttttatcccactcctcatcccattttgatttgggctcaggatcatatctttcactgtatctgaatcctccaacactgtctgaggaaaccccaacatacttgtctttgttcttctttgctttctttcgctcttcacgaagcctgtcgtcatcctgggcaaattcaaccaattctcgtgcc

SEQ ID NO: 253192 - DNA, 1082 bp, Homo Sapiens
cggggcaggttccgggctgcttaggttggcaccggtccgtggtccccgggggcgcagtcgcagcgctcccgccctccaggcgtcagcgagtgcgcggtccagtgcggccggaacctggcgcaactcctagagcggtccttggggagacgcgggtcccagtcctgcggctcctactggggagtgcgctggtcggaagattgctggactcgctgaagagagactacgcaggaaagccccagccacccatcaaatcagagagaaggaatccaccttcttacgctatggcaggtaagaaagtactcattgtctatgcacaccaggaacccaagtctttcaacggatccttgaagaatgtggctgtagatgaactgagcaggcagggctgcaccgtcacagtgtctgatttgtatgccatgaactttgagccgagggccacagacgatatcactggtactctttctaatcctgaggttttcaattatggagtggaaacccacgaagcctacaagcaaaggtctctggctagcgacatcactgatgagcagaaaaaggttcgggaggctgacctagtgatatttcagttcccgctgtactggttcagcgtgccggccatcctgaagggctggatggatagggtgctgtgccagggctttgcctttgacatcccaggattctacgattccggtttgctccagggtaaactagcgctcctttccgtaaccacgggaggcacggccgagatgtacacgaagacaggagtcaatggagattctcgatacttcctgtggccactccagcatggcacattacacttctgtggatttaaagtccttgcccctcagatcagctttgctcctgaaattgcatccgaagaagaaagaaaggggatggtggctgcgtggtcccagaggctgcagaccatctggaaggaagagcccatcccctgcacagcccactggcacttcgggcaataactctgtggcacgtgggcatcacgtaagcagcacactaggaggcccaggcgcaggcaaagagaagatggtgctgtcatgaaataaaattacaacatagctacctggggt

SEQ ID NO: 253193 - DNA, 392 bp, Homo Sapiens
aatgtttggtccacccagccaccatagggtatctcttgcaaattctctccagagtaatacctgtagaaggtttgcatgtgacgatacttgggcggcacggccatgcagcgtagatccgcctcgttgcgcaccgcctggaagtcgccgcagcacagcaagagtgtcgacaggccccggcccgcgccgctctgccagcgccagcgtctcatagatcttatccagctcgccgtggcagcagccagccacagccacccgcattctgccggcctgaggaggtgagcgctgcctgcaacgccctacaccacagacagcacaggaccgactgatcgctcagctcccgccaactttaataagtatagccaccgcctgggtgtagactcctgcaaaataat

SEQ ID NO: 253194 - DNA, 399 bp, Homo Sapiens
ccctcctcgtctccccctccataaagaaatcagcacctgcgtgtatcagcttctctgtggcaggtaaaacccagacttccaggactggctggaaagtaaacttattaattaagttagattggcagtcaaggtggaaaaatgagagatcatttattggcaaatactctgttgctctcagaaaatgttgaaggtcttttggtgctttaggatgtgtgccagtccagagtggccctaaccttccatagccgtttcagagaggatgtgcctcaggtggcctgaagatacagtagcctaaaatttagcacacagtcactgattgagaagctgaacaggaataaattttgagggcagagatcctgaaggacatgacaggtatttacagggtactgtaagatggag

SEQ ID NO: 253195 - DNA, 611 bp, Homo Sapiens
ggcaggcggcacgcggtgcccatgggggtgggctccagacaggtggtgagtctcaaaacaaacagaaacgcgtggggtaagaattgagttgaaggactggatgggaagctgcgtgtgcgggtggagctgggcttctggaagattctggtgttgccgcctggcacgccctgtgagctgagtgaggccgggactctctacaccttccggacccgggctgctttctcggcccagacgtggggatgggattcgtgccggaaccttcttctggtgggagctcgcattccaaaaaggagcagcggaggggccgcctctgtcctgccttgtcacgtcccggccagccccagctcagtctccagctcagccccctgagggccaggtgtgtctctggccaaatgtgaccaggcagggttccatccacccagaagatgctcttggccacggcaggccaccagccacaccgcaggagagccgggcctctgccacaacagctctcactcccgtggtcatgggcctctcaccgccagaatgaagccacctggctccttcacctctcaataatcctgattccccacaaacacggaaagaacacttttcaaaataccatcattgtg

SEQ ID NO: 253196 - DNA, 287 bp, Homo Sapiens
aaatgtcctaaagctcatgtaagtatgagtgtataaacaactatgggctattgtttttgcacttgtacttcattattttgtgaattgtttaagtgagataattgcagtaagtgtatctcagtctggtttgggaacagacacaacttatgcctggactggtgggagcagagtgcagtgttgcaccacagacaggatcagttcatggcagcggggatagagattaatcattaatctgactaggagttttaaattagccggaagatctgttaagagtttatgggtttttt

SEQ ID NO: 253197 - DNA, 1575 bp, Homo Sapiens
taccggtccggaattcccgggatccaaagcgaggccggggactgaaggtgtgggtgtcgagccctctggcagagggttaacctgggtcaaatgcacggattctcacctcgtacagttacgctctcccgcggcacgtccgcgaggacttgaagtcctgagcgctcaagtttgtccgtaggtcgagagaaggccatggaggtgccgccaccggcaccgcggagctttctctgtagagcattgtgcctatttccccgagtctttgctgccgaagctgtgactgccgattcggaagtccttgaggagcgtcagaagcggcttccctacgtcccagagccctattacccggaatctggatgggaccgcctccgggagctgtttggcaaagatgaacagcagagaatttcaaaggaccttgctaatatctgtaagacggcagctacagcaggcatcattggctgggtgtatgggggaataccagcttttattcatgctaaacaacaatacattgagcagagccaggcagaaatttatcataaccggtttgatgctgtgcaatctgcacatcgtgctgccacacgaggcttcattcgttatggctggcgctggggttggagaactgcagtgtttgtcactatattcaacacagtgaacactagtctgaatgtataccgaaataaagatgccttaagccattttgtaattgcaggagctgtcacgggaagtccttttaggataaacgtaggcctgcgtggcctggtggctggtggcataattggagccttgctgggcactcctgtaggaggcctgctgatggcatttcagaagtactctggtgagactgttcaggaaagaaaacagaaggatcgaaaggcactccatgagctaaaactggaagagtggaaaggcagactacaagttactgagcacctccctgagaaaattgaaagtagtttacaggaagatgaacctgagaatgatgctaagaaaattgaagcactgctaaaccttcctagaaacccttcagtaatagataaacaagacaaggactgaaagtgctctgaacttgaaactcactggagagctgaagggagctgccatgtccgatgaatgccaacagacaggccactctttggtcagcctgctgacaaatttaagtgctggtacctgtggtggcagtggcttgctcttgtctttttcttttctttttaactaagaatggggctgttgtactctcactttacttatccttaaatttaaatacatacttatgtttgtattaatctatcaatatatgcatacatgaatatatccacccacctagattttaagcagtaaataaaacatttcgcaaaagattaaagttgaattttacagttcgtatattcatgtggtcctttgaaagggtattctagaaatcactggaaagaggagaggaaagaaccaggtaggcaaatggtctgtgaaacccttgggtcctggaagcagtgtgagtgtaaatgtgtagtgtttggtttcatctaaataaacaaagatgatttctttgacacttgaaataaaatacaaattcaacaaaaa

SEQ ID NO: 253198 - DNA, 358 bp, Homo Sapiens
  misc_feature (219)..(241): n is a, c, g, or t
ccaaaccaatccttggttgccttaacggatgtagaacccaggaataagttctggtgtcctattgcatagtaggatgaggaactccctacagaaaaatcattatgcaaattaccctgatttgatcattacacattgagtacatgtattaaaacatcacattctaccccatatatatgtacagttattatgtgtccataaaaatttaatgtcaatgtgtgnnnnnnnnnnnnnnnnnnnnnnnttttaaagctgtaattatctccatctggtaggaatatatacaatctgaaataaaaaatatatttgtaattgttaggacaaaatagattatacattaagtctgcaaattataaattat

SEQ ID NO: 253199 - DNA, 346 bp, Homo Sapiens
  misc_feature (14)..(14): n is a, c, g, or t
  misc_feature (25)..(25): n is a, c, g, or t
  misc_feature (51)..(51): n is a, c, g, or t
accaagaaaaaagnccggtaccatngttccagtaccagaccgcaatttttnttccccaatatttcccaatccctgggttggccttaacggatgtagaaccccaggaataagttcgggtgccctattgcatagtaggatgagtatagttaacaataacatattatatatttgaaaatagccagaagagtagattttgaattttctccctacagaaaaatcattatgcaaattaccctgatttgatcattacacattgagtacatgtattaaaacatcacattctaccccatatatatgtacagttattatgtgtccataaaaatttaatgtcaatgtgtgaaataaa

SEQ ID NO: 253200 - DNA, 1555 bp, Homo Sapiens
  misc_feature (1514)..(1514): n is a, c, g, or t
  misc_feature (1537)..(1537): n is a, c, g, or t
gctgggtggcgaattcggcacgaggactatccgtgcggccaggcggagacccggaggaccgaagcttccggacgacgaggaaccgcccaacatggcctcggagagtgggaagctttggggtggccggtttgtgggtgcagtggaccccatcatggagaagttcaacgcgtccattgcctacgaccggcacctttgggaggtggatgttcaaggcagcaaagcctacagcaggggcctggagaaggcagggctcctcaccaaggccgagatggaccagatactccatggcctagacaaggtggctgaggagtgggcccagggcaccttcctgaactccaatgatgaggacatccacacagccaatgagcgccgcctgaaggagctcattggtgcaacggcagggaagctgcacacgggacggagccggaatgaccaggtggtcacagacctcaggctgtggatgcggcagacctgctccacgctctcgggcctcctctgggagctcattaggaccatggtggatcgggcagaggcggaacgtgatgttctcttcccggggtacacccatttgcagagggcccagcccatccgctggagccactggattctgagccacgccgtggcactgacccgagactctgagcggctgctggaggtgcggaagcggatcaatgtcctgcccctggggagtggggccattgcaggcaatcccctgggtgtggaccgagagctgctccgagcagaactcaactttggggccatcactctcaacagcatggatgccactagtgagcgggactttgtggccgagttcctgttctgggcttcgctgtgcatgacccatctcagcaggatggccgaggacctcatcctctactgcaccaaggttcagcttcgtgcagctctcagatgcctacagcacgggaagcagcctgatgccccagaagaggtgtgccgggctcctgatgaccctcaagggacttcccagcacctacaacaaagacttacaggaggacaaggaagctgtgtttgaagtgtcagacactatgagtgccgtgctccaggtggccactggcgtcatctctacgctgcagattcaccaagagaacatgggacaggctctcagccccgacatgctggccactgaccttgcctattacctggtccgcaaagggatgccattccgccaggcccacgaggcctccgggaaagctgtgttcatggccgagaccaagggggtcgccctcaaccagctgtcactgcaggagctgcagaccatcagccccctgttctcgggcgacgtgatctgcgtgtgggactacgggcacagtgtggagcagtatggtgccctgggcggcactgcgcgctccagcgtcgactggcagatccgccaggtgcgggcgctactgcaggcacagcaggcctaggtcctcccacacctgccccctaataaagtgggcgcgagaggaggctgctgtgtgtttcctgccccagcctggctccctcgttgctgngctttcggggctggccagtgggnacagtcagggactggaga

SEQ ID NO: 253201 - DNA, 787 bp, Homo Sapiens
agcctcctgagtagctgggagctgcaaatacagaacaccggctttggaggatttcactcttgataatattctttctcatatttattattttcgctgtcgtgactacacagagttactggcacaagtttatcttcttccagatttcctttcagaacactcaaagccccaaacgtcttaaccggttccatcatcaactctagttataattcatcctgaagtgaaattcccttccagctgtgaacgtttgaaatcaggttcgactagtgatagtggatggtattgcttttccatttcgtcatgacctagatgacctgtctcttcgtactcggttattaaatggcctagcccagcaaatgatcagccttgcaaataatcacagattagctgtaattttaaccaatcagatgacaacaaagattgatagaaatcaggccttgcttgttcctgcattaggggaaagttggggacatgctgctacaatacggctaatctttcattgggaccgaaagcaaaggttggcaacattgtacaagtcacccagccagaaggaatgcacagtactgtttcaaatcaaacctcagggatttagagatactgttgttacttctgcatgttcattgcaaacagaaggttccttgagcacccggaaacggtcacgagacccagaggaagaattataacccagaaacaaatctcaaagtgtacaaatttattgatgttgtgaaatcaatgtgtacaagtggacttgttaccttaaagtataaataaacacactatggcatgaatg

SEQ ID NO: 253202 - DNA, 741 bp, Homo Sapiens
ccctagtaagactgcagatggtatccgcagcgaaaataataaatatgagaaagaatatttatcaagagtgaaatcctccaaaagcttttcggtgtccctctcccttgtgtttttctgctataagctgaaggtgctgaatgcaggcagtagcaaggtctaccactctatcaaccataaaacttccctctgtatcaataaaaactgcttcacctgccactcctccaaaacattctggtatctgcacatctactgccaactgcatacataattgtgtttttccaacacctggtgcaccacaaatttctgttgttttcattaagggcactccacccccaagaatatcatctagtgctgaacagaaggtgattatgaagccctgggtatgctcctgctcaagaagttccagtgctgtacacttcttgtgtgactcagatgtaccagcatatcttggtttatttgtgagacattctcttctgataatttgcagagtttctaaggcttctgctttagatatcccaacttctttgctaagctcggagggtttcacctctaggagttcctcagcagtctggaaccccgcagacaccagcttcacccgcaccgctggagacagcgggaaactcaccaaatcccgctgcatttcaaagcggaacgtcttcccgcgcatcgcaggctcacctgctaaccccggagcagccaaactccgcacgccctcgctggggcgtgcggcgtgacgtcccc

SEQ ID NO: 253203 - DNA, 848 bp, Homo Sapiens; identical to SEQ ID NO: 15346
  misc_feature (597)..(639): n is a, c, g, or t
  misc_feature (665)..(665): n is a, c, g, or t
  misc_feature (782)..(782): n is a, c, g, or t

SEQ ID NO: 253204 - DNA, 1464 bp, Homo Sapiens
ttaaaatattgattgcatctccatctcctacccacatacataaagaaactactagtgccacatcatcaccatatagagatactcaaagtcggacagcctcaccaaacagagcaggaaaaggagtcatagaacagacagaaaaatctcatccaagaagccctaacgtgttatctgtcgctttgagtcaaagaactacagttcctgaggaagaactaaatccaaagatactagctttgcagaatgctcacagaaagcgaaaaatggaacatgatggttcactttttcaagcagtaggaattggaacattattacagcagccagacgatcatgcagctactacatcactttcttggaaacgtgtaaaaggatgcaaatctagtgaacagaatggaatggagcaaaagacaattattttaataccctctgatttagcatgtagactgctggggcaatcaatggatgaaagtggattaccacagctgaccagttatgattgtgaagttaatgctcctatacaaggcagcagaaacctactgcagggtgaagaattactcagagctttggatcaagttaactgagctttttcttaatttcattcctttttttggacactggtggctcactacctaaagcagtctatttatattttctacatctaattttagaagcctggctacaatactgcacaaacttggttagttcaatttttgatcccctttctacttaatttacattaatgctcttttttagtatgttctttaatgctggatcacagacagctcattttctcagttttttggtatttaaaccattgcattgcagtagcatcattttaaaaaatgcacctttttatttatttatttttggctagggagtttatccctttttcgaacttatttttaagaagatgccaatataaatttttgtaagaaggcagtaacctttcatcatgatcataggcagttgaaaaattttacaccttttttttcacattttacataaataataatgctttgccagcagtacgtggtagccacaattgcacaatatattttcttaaaaaataccagcagttactcatggaatatattctgcgtttataaaactagtttttaagaagaaattttttttggcctatgaaaattgttaaacctggaacatgacattgttaatcatataataatgattcttaaatgctgtatggtttattatttaaatgggtaaagccatttacataatatagaaagatatgcatatatctagaaggtatgtggcatttatttggataaaattctcaattcagagaaatcatctgatgtttctatagtcactttgccagctcaaaagaaaacaataccctatgtagttgtggaagtttatgctaatattgtgtaactgatattaaacctaaatgttctgcctaccctgttggtataaagatattttgagcagactgtaaacaag

SEQ ID NO: 253205 - DNA, 945 bp, Homo Sapiens
  misc_feature (592)..(618): n is a, c, g, or t
gggtggtacggtccggaattcccgggatatcgtcgacccacgcgtccgctgatttagcatgtagaactgctggggcaatcaatggatgaaagtggattaccacagctgaccagttatgattgtgaagttaatgctcctatacaaggcagcagaaacctactgcagggtgaagaattactcagagctttggatcaagttaactgagctttttcttaatttcattcctttttttggacactggtggctcactacctaaagcagtctatttatattttctacatctaattttagaagcctggctacaatactgcacaaacttggttagttcaatttttgatcccctttctacttaatttacattaatgctcttttttagtatgttctttaatgctggatcacagacagctcattttctcagtttttggtatttaaaccattgcattgcagtagcatcattttaaaaaatgcacctttttatttatttattttggctagggagtttatccctttttcgaattatttttaagaagatgccaatataattttgtaagaaggcagtaacctttcatcatgatcataggcagttgaaaannnnnnnnnnnnnnnnnnnnnnnnnnnacataaataataatgtttgcagcagtacgtggtagcacaatgcacaatatattttcttaaaaaataccagcagttactcatggaaatatattctgcgtttataaaactagtttttacgaaagaaattttttttggctattgaatgtgtaaacctggacaaatgacttgttatcatattattagtgtcttaaaggatggtatataaatggtaggcttcttattgaagggttggttcttgagggtgggtattggagaattcaagaagtgggggtagctggcaaaaaactatgtggaggatggataacaagggccggatatcgcacaaat

SEQ ID NO: 253206 - DNA, 598 bp, Homo Sapiens
  misc_feature (581)..(581): n is a, c, g, or t
gtcgtccagtcccaagctccggaggaatgcccactcccggctggagtcctaccggccagacacggacctgagccgcgaggacacgggctgcaacctgcagcacatcagcgaccgggagaacatagacgatttgaacatggaattcaatccttcagatcatcctcgggccagcacaatattcctcagtaaatctcagacggacgtgagagacgcaagagtctcttcattaaccatcatcctccaggacaaatagcaaggaaatacagttcctgctccaccattttcctagatgatagcacagtcagtcaaccaaacctcaagtatacaattaaatgtgtcgctcttgcaatatattatcacatcaaaaacagggacccagatggaaggatgctcttagatatttttgatgaaaatcttcaccctctttcgaaatccgaagtgccaccagattatgacaaacacaacccagagcagaagcagatttaccggttcgttcggacactgttcagtgctgctcagctgacggctgaatgtgccatcgtcaccctggtgtaccttgaaagacttttaacatacgcagngatagatatctgtccgg

SEQ ID NO: 253207 - DNA, 427 bp, Homo Sapiens
caaattagagagtgtaagccggataaggacccccaagcttggagacaatgaagagactcaggtgagaacggagatgtctcagacagcacaagtaagccatgagggtatggaaggaggccagccttggacagaggctgcacaggtggctctggggctgcctgaaggggaaacacacacgggcacagccctgctaatagcgcatgggaatgagagatcacctgctttcactgatcaaaggtcctttacccccacaagtctgatggaagacatgaaagtttccattgtgaacttgctccaaagtacgggagacttcacggaatccaccaaggaaaacgatgccctgtttttcttagaaaccactgtttctgtctctgtatatgagtctgaggcagaccaactgttgggaaatacaatgaaaggtaaggag

SEQ ID NO: 253208 - DNA, 1962 bp, Homo Sapiens
  misc_feature (16)..(17): n is a, c, g, or t
  misc_feature (19)..(19): n is a, c, g, or t
  misc_feature (93)..(93): n is a, c, g, or t
  misc_feature (275)..(393): n is a, c, g, or t
  misc_feature (521)..(521): n is a, c, g, or t
ctccttgttaaatgcnngncgccatgactttttaaactccattattaatctataaaaatttcttgaaaactttttactaaatttcaaattttncactcactgttaaatagtaaatataataatttaaaatttcctccattgtagccttaacaatatttagaaggtacattcatgagaaaataaaaaggcttgagacaagatagtccacttcaaacaccagtggcaaaatgttttggattcaatttccatttcaggcagctgtttaaatattttcnnnnnnnnnnnnnnnnnnnnnnnnnnnnnnnnnnnnnnnnnnnnnnnnnnnnnnnnnnnnnnnnnnnnnnnnnnnnnnnnnnnnnnnnnnnnnnnnnnnnnnnnnnnnnnnnnnnnnnntcagattcaagttggtccaggccatatgaggcagctgtattaacacgagtaatagatggaacaacagttcttctctcagaggatgcctccaaagcagaaagtgcaggggaaatgctgggttcccccanccattattccaggaggtgtcactggagatcccagaactggtgtgaactcctcatttggccctgtgactgtctccatttgttcttccacagtgggagtaacttcaaaagacaaagggacgactgtagttgaaattgtagtggccagaggctcccatcttcttgacagctgagtaacaccaggaacgtcagacacaggagaggggtcctccttttcttcctcagtcttgccactgtctctgataagctcgagggtagcaacctgctcttgtgtcaccatggataaagtggcatctggctcttgaacagctgttgtcatctcttgagtgatgatgtctgagtctcttcattgtctccaagcttgggggtccttatccggcttacactctctaatttggtgtcatcccactcatcacttaaggcagaggcagctggaacagctgtgctgacactcactgtgacttctggggctcccagcagactatcagtttctggctcaacactcagggtgtactcggaagtttcgagtggttgcttggtggcagcagcctgggtgttatcagctgtcatctgcgaaggcttctccttatcaggggtgaggcttccaggctcactgcctgctgtggactcagcaccaggaaaagaagttgtcctgtggtctgtgtctgcttcaaatttctcagtctttggattggtggttagcatttccttagtattcacataggatgaaggtgaatgtcccaaaccaactccttcctgactttcagttgcaaatgattgattatccatatacttcagaaaaccttttgtggtttctgtgatctcttctacaatgggctgaaagttagtgcttgtaaggagttcctccttttcatcaacagtcagagaaggagtcgcagtgatagcaatggttaacatggccttggcaagtccactttcaggagatattctctctggctggctggaaccaaatacttcttcagctgaggggacacctgactcagtaggtgtggaaacaccagggcgttctgtttgcatgagcccagcttgtccaggctgggtttctttgttaatcgagaatgctttatttaatgatgttgccgatggtactgctgacatcatcattggatcttcagagaccaccagttggggagtctgctttgaggtaacagagctattttctaggtcatcggtgttcatcttatcggactgccctttttccgcatgaacatgtgctatctccctcctcctttctattttggggaaggccagacattgtgtggcaacgctgaaaagcagaaggctacagaaagccagacaaatgtgcaatacaatcggtcctctcatagtggaagagaaatggcacgtacactggcagagttgacaagtccagtaattgaatcctgtgcgccttcagctgagcagcgcgcggaggacagaggca

SEQ ID NO: 253209 - DNA, 991 bp, Homo Sapiens
acagaaagcagcaggagctcgtggtccctgtgactccaaatataggttctccttgtcattctcgtgtctatctcctatgcaggtgggtcttgggatcttctcattgacatgaaggtatattcctgccagctcttccacaaattccccataggtctccagcatgagatcacagtattgctccgagtggaatccagttgtctccactgttcctgaggtgctgctgggaacagtgaggctccgaggtcctggtctctgatcagcccctccagtcggacagtctggaagacagccagggctagttctgcttctgtgtcagattcctctttcacaatgtggctcagaagctccccaggccctgaggatgaattctcaagtcccaactcctgaggcaccacttcaagatggggctccacttcccccacttggcagcttggagattccatcttctctgataagatgtcctgtcctagaacctggatactgatccattgccacagtctctgggggtcccccttcaagctttccacaagggtcactgcctcttctccacttcctggacactgtttccgcacccacatctggatctccccaggcagtatggtcagaaactgctccaacatgaggatctctaggatctgctctttggtgtgaacctctggctgtagccactggaaacagagcttccgaagttgcttcaaggtctcatgaggcccagacatcacctggtaacggaactgcctgaaaagctggcgtgcggtctcagggctggagagttcctcttgaagggcagcatctgattctgagaactgggagtcctcggccttcgccagcgatggcagcaggcctagggcctgccccaagtcaacgggcattgtccagcctggcaagtccttttaagtaaagtgcttctgcagtggaattgtctccggcaagaactaggtcttcaccaggacactcggcccgcggcgccggctccgggcgcacttccggg

SEQ ID NO: 253210 - DNA, 739 bp, Homo Sapiens
  misc_feature (668)..(668): n is a, c, g, or t
ggaagctcagggggccaaatgtccttgccagatccttagagcattactttgactcctaaaaatagtagtgtatgttatttgatggcttttgtttccatagttccatcactgacctgtcaatactgttgatggagcagcagcatagcctagagtgatgcattcttacccagaggtggcaataggagagggtccatgtaaataggacgaggtagacagtgcatgattgtaggagaagggttgaagggaggacatgattccaaaaaagatcgttctcaatgtgtcgtctgactcaaccagctggcagattacacttgccaagtcgttccctttccttctaagtcagttggctccatattcacttgaatatgcctctgtttgggcaaagcaagatacctccacttaacctttatccaaggaagctcttggtgtcctcttggtcataaagttgtctcctacctaacccagttttaccaaatggaagtaaaaggggacaaactatggaagatggactccttgcctttgcagtcagccaccattctcttttccatataaggagccccattcataacctacggtgaaggttgaacaacctatggttaatatttcagaaagtggaccacctggctatagcatcatcatgggatgaatccattgaactttttggcaanggggaaaccttttcactaaaaaggctacacttttccggtaaaggccctttctgggtttaaccttggccaaa

SEQ ID NO: 253211 - DNA, 762 bp, Homo Sapiens
  misc_feature (656)..(656): n is a, c, g, or t
cgtcgttgacgttagtcgcagtcttcgctgctaacgttttgttatgagttgctaaaatggtgaaatgctgctccgccattggatgtgcttctcgctgcttgccaaattcgaagttaaaaggactgacatttcacgtattccccacagatgaaaacatcaaaaggaaatgggtattagcaatgaaaagacttgatgtgaatgcagccggcatttgggagcctaaaaaaggagatgtgttgtgttcgaggcactttaagaagacagattttgacagaagtgctccaaatattaaactgaaacctggagtcataccttctatctttgattctccatatcacctacaggggaaaagagaaaaacttcattgtagaaaaaacttcaccctcaaaaccgttccagccactaactacaatcaccatcttgttggtgcttcctcatgtattgaagaattccaatcccagttcatttttgaacatagctacagtgtaatggacagtccaaagaaacttaagcataaattagatcatgtgatcggcgagctagaggatacaaaggaaagtctacggaatgttttagaccgagacgttttcagaaatcattgaggaagaccatcagggaattaaaggatgaatgtctgatcagccaagaaacagcanatagactggacactttctgttgggactgttggcaggagagcatagaacaggactatatttcatgaatttttcatggtaccgttcacctcatttttgggctgttttg

SEQ ID NO: 253212 - DNA, 629 bp, Homo Sapiens
atgcactgcctgcttccgtatcagtccaaggagccctcgtgtttgccacctttacctttgaacctccccctgcctccctgcctgtgtccgcttttgcagctcaatgcagccatgacaaggaaagaaaagacaaaggaaggccagagagccgcgcagttctctgcaggtgcagatgcaggcagtggaggtggcctgagcaggcagaaggacaccaagcgccctatgttgcttgtcattcatgacgtggtcttggagcttctgactaggtcagactgccacgccaaccccagaaaataccccacatgccagaaaagtgaagtcctaggtgtttccatctatgtttcaatctgtccatctaccaagcctcgcgataaaaacaaaacacaaaaacgctgtcaggttttagaagcagatctggtctcccatcaggatcctgtcaccagggttcttttgaaatagtaccacatgtgaaagggaatatggctttcacattatctaatcactgaattgtcaggctctgattgataattgtagaaataagtagccttctgttgtgggaataagttattcagtattcatctcttttggttttgtcactctcttctctcttgtgtcatatgtactgtttg

SEQ ID NO: 253213 - DNA, 1386 bp, Homo Sapiens
aaaaactgtcagaggcagccgaagagttcacaagtgtgaagcctggaagccggcgggtgccgctgtgtaggaaagaagctaaagcacttccagagcctgtccggagctcagaggttcggaagacttatcgaccatggagcgcgcgtcctgcttgttgctgctgctgctgccgctggtgcacgtctctgcgaccacgccagaaccttgtgagctggacgatgaagatttccgctgcgtctgcaacttctccgaacctcagcccgactggtccgaagccttccagtgtgtgtctgcagtagaggtggagatccatgccggcggtctcaacctagagccgtttctaaagcgcgtcgatgcggacgccgacccgcggcagtatgctgacacggtcaaggctctccgcgtgcggcggctcacagtgggagccgcacaggttcctgctcagctactggtaggcgccctgcgtgtgctagcgtactcccgcctcaaggaactgacgctcgaggacctaaagataaccggcaccatgcctccgctgcctctggaagccacaggacttgcactttccagcttgcgcctacgcaacgtgtcgtgggcgacagggcgttcttggctcgccgagctgcagcagtggctcaagccaggcctcaaggtactgagcattgcccaagcacactcgcctgccttttcctgcgaacaggttcgcgccttcccggcccttaccagcctagacctgtctgacaatcctggactgggcgaacgcggactgatggcggctctctgtccccacaagttcccggccatccagaatctagcgctgcgcaacacaggaatggagacgcccacaggcgtgtgcgccgcactggcggcggcaggtgtgcagccccacagcctagacctcagccacaactcgctgcgcgccaccgtaaaccctagcgctccgagatgcatgtggtccagcgccctgaactccctcaatctgtcgttcgctgggctggaacaggtgcctaaaggactgccagccaagctcagagtgctcgatctcagctgcaacagactgaacagggcgccgcagcctgacgagctgcccgaggtggataacctgacactggacgggaatcccttcctggtccctggaactgccctcccccacgagggctcaatgaactccggcgtggtcccagcctgtgcacgttcgaccctgtcggtgggggtgtcgggaaccctggtgctgctccaaggggcccggggctttgcctaagatccaagacagaataatgaatggactcaaactgccttggcttcaggggagtcccgtcaggacgttgaggacttttcgaccaattcaaccctttgccccacctttattaaaatcttaaacaacgg

SEQ ID NO: 253214 - DNA, 432 bp, Homo Sapiens
aagcagcaagactgggtcgaggacaaagacatcattggaattgaggaaattggcccgcgctgggacctcaaaggccttggtgttgttggcgccagttccctggacctggaacagccgtgtggagggcccggtctccaagttgttagttcgggaggtgcctccctggtagaccaccatgcgtcccttgaagatggacataagatgaggtggctccttgcccattgggacccggatctggactggttcaccattgtacttctggtccaggatgacggcttgataagctgatgctgtaacatcttggctggcctggctgccctgccaaacgtagagcaggtaatgctgcttctcgccgatgaggtaggtgtagagcagcaggtagcagtcgcccccatagaagtggcctagccacttggaatccacaggtaccag

SEQ ID NO: 253215 - DNA, 1591 bp, Homo Sapiens
actgttgaccatgtagttttatttcatcagtactcccatttttaatggattcaggcagcaccccagagtacaggactgagttcctaggggtggcctgacccagcagctgtcttctgttccaggaggaaaaagctttttattaaaaaacagaaacgaaactttagaaaatatgaaaaatcagagggaggacagaggtcatttcataaaatcgttatttgaaaacagtgcagtgtgcaaataacactcagttgggaatcgggagaccggggactagtctaactggctcaaactagctgtgaccttaggcgtgtcattcaccacttggggatcatttcctcatctaaagcattcagcacagttaccctgtaaggcactttacaggtgcaaaatcttaaggtgcccccagtgtttgctatcaagtccattctgcggacatatttggtgtcatttccttcctgatgaaaaccaggaaaggccaggaggaaatctcaggaatatattttaggcaagtccagcatctctggccatcccgtagaagatgcctctagctgcaatgaggttggctggagaatcaaattcagctactactcctttgtccaggaccaggaccctggtgtagtccatgatagtgttaagccggtgtgcgatggtcaggacagtgcaggtatcaaactgggtgcggatggtagcctggatgaggttgtcagtctccaggtcgatggcagctgtggcctcgtctaaaaccaggatgcggctcttgcggagcagggctcgggccaggcacacgagctgcctctggcccacgctgagattctccccgccctctgagcactggaagtccaggcctgccggctgggagctcacaaacgtgtgcaggtgggacagctccaaagcccaccaaatgtcctcctctgagtagctgccgaaggggtccaggttcatgcgcagggtccccgagaacaggatggggtcctgcgggatgatggtcagctgagagcgcaggtcatggaggccgatgtctgccacattgaggccatcaatgcggatttcaccctttgccgcctccaggatgcggaacaggcaaagggtcatggaagacttgccagccccagtgcggcccacgatccccaccttctcgccaccgtgcacatgcagactcaggtctctcagcaccaggtctaggcccggccggtagcgcacagaataattccggaactccacctccccacgtgggggccaaccttcgggagggcggctgccttccaccacccagggcgcctctgtctctgtcttggagtactccttgaccctctccacagccacgatgttagattccaaatctgacatcattcgtatcatccagttcagagcaaatgtcacctgcaaggagtaggacacagaaaggcccaccagccccgggttcaggctgctcctcccgatgacggcaaatagtgcagcaaagagcaccacgcagttccccacgaactccactccgatgctcagccaccggttggagatgatgtaggggtagcagcttctctggttggcatccaccttagtatcactgatgatctcaaaatcccggctgcgg

SEQ ID NO: 253216 - DNA, 2449 bp, Homo Sapiens
ggcgacactttgctgccaaaagcctttaatatgccctggtcccaggctgtgttcatgaaagcggacacagcagtgcttccagcttcatggttcccaggttcaggttcctcccagcggaggtgggagggcagccctcacacctggcacccctgagtgccatactcctggaggaagtcgttgagctgggcacaggctgcccgctggcgggtgctccggcacaggcgttcagagggcatctcctcgatccagctattcgagtccagcaggtactgggggtgtccctcgaggtcataggtggccccatccagacccatgatcaaatattctttcccaggttccaagcgaaggggccaggaggctcgaaccaggaagttgcgcatctgattagcagcggccttgacatccttggtgaagtgcaggacttgggtgatcttggtctcaaagaggcggaaagcagctctgctgtcttctcggagaaccttaacctggaagccgtactccacacgggggtagtagcaggcaaacttcatcctgtagccatcctcgtcctgcagaccccgctccagggcgcgacgctggcgagggcacttcccctcagcacactggcagacttcagcagaacacaaggtggccaagagtctgctcttacttggtgccccgtaaaacacagaacatctgcgctcggggttgtagtagtcgtacagggttgcgctggccggctgcaccagccccaccggcacttcctgcacagcctcaaagcccacgcactcccgggaggtggggaccgagtcaaaatacagcaggacgtggggcccctcggtctcaaagtgactcacgtaacggtcagagagggaggtcagcttctccaggtcagcacgcagggcgtggaatccactcaggagggtgacgtccgcgatggccatgccagacagccccaccttgccgttccgccagatgcacacggtgtagtgcaccctggactcctgctcctccaccaccttgggcgcctccctcctgcggcggttcctccgaccctcaaacagctgcaggggtgtcacgggctgcagaggggcatctgggtcatccttggctggaagctcatcgtactcatagtcctcatagtcctcgtttgcttccatcgtgtactcgacgtggcctttgactgtcacttctatctgtaggtcctggcaggtcgtgttcttcatgtccaggacattgtaggtacgaaggaccttcagggttcctttgctgtttcctcccaccttcacattgatcttgctgcccaaggaaaactgcagctcctcctccaggccgcgaatctggcggttgttcagctgcagcgcgtgggacttgaacccattccggcctgtggagctgagagtcacattgagacccctctcctcagtggtgtgggaggcaatccagtaggcagacagggcatccagggcaatcaccgtgtcttgggtactgcggaatcccccttggaagctgccctgacgggtgaggcaggccgcagcctggtctgccatctctgctttgccctcgtgaagcaggaggtgcagcagggcgtaggctgtggtttcaatccacagggctgggccctggggcatggggtcggatgggttgcgaggagccggggtgggcgacacggcattgctctgagaaccagtgactgagccccagtacaggttatctccagtctcctgggccattgccatgaggttgttgtgggcaacaccgagcaggtccacaggcgccttggtcagtgtcagggcataggccgtgatggcagctgcgtgggcacccaggagcccagcacttgctttctcccccaaaaatgagcttgcctttgagatggaggcttccactctctgcttcaatggctctgcaccctcatcctggaagacggccagcccatgatgaagggcgatggtcacaaaggctgtgagtgccacagtctcatcattgcccaccaaacccccctgcatgctcctatgtatcactggagagaggtcctggaacgagccgtcagcctgctgctgggacagaagccagttagatgtctcctgcagtttctcaggcgagcctcctacctgctcctgggccaaactcaggaccttcaacacaaaggctgtgagccaggtgctgctgtcccgtgacaaccaagccgcataggaaccatccgccttccgaaactgctggatccgcatgtagcctttctggatcagatccacggcgtggtccttggtctcgggaggcagtgtgctccactgctctgtcttgtccaggtagcgggaagcagccagtgtcggagccaagtagatcatggtttgctccccacagcctcgaggaagcctcaagagggaggccacgcctcctggtgacaaggccccctcagagcttaaagtgtccaatggatctgaggctgtaaccctgacgtagctgttaa

SEQ ID NO: 253217 - DNA, 830 bp, Homo Sapiens
  misc_feature (697)..(697): n is a, c, g, or t
  misc_feature (718)..(718): n is a, c, g, or t
  misc_feature (732)..(732): n is a, c, g, or t
  misc_feature (744)..(744): n is a, c, g, or t
  misc_feature (761)..(761): n is a, c, g, or t
  misc_feature (789)..(789): n is a, c, g, or t
  misc_feature (798)..(798): n is a, c, g, or t
  misc_feature (807)..(807): n is a, c, g, or t
  misc_feature (818)..(818): n is a, c, g, or t
ggcacctatgccaaagttctcctgaatttcagggtgtcctgcagtgctcaccggggttgtagtagtcgtacagggttgcgctggccggctgcaccagccccaccggcacttcctgcacagcctcaaagcccacgcactcccgggaggtggggacctggccaagcgtggggaggagagatgagggacccactccctgggccctgcagccccctgtactgggtttccttggcctgtttttgtttgcttcctattggccttctctcctatgggacaatggacaccggggtagtgagggggcagagagccctggggctccctgggactgaggaggcagaatggaggggcctgtgcactaactcctctctgttctccagagcgcagatgttctgtgttttacggggcaccaagtaagagcagactcttggccaccttgtgttctgctgaagtctgccagtgtgctgaggggaagtgccctcgccagcgtcgcgccctggagcggggtctgcaggacgaggatggctacaggatgaagtttgcctgctactacccccgtgtggagtacggtcagtcttcccaccgaggccctggcttgaccctccctcggggaccggctgttttggtctctctgggtgtagcctgctcctcttacaggtcatgcacgcagcctgtttgctcttgacaacaacttcctaccctnttcagccttcaaagttaactnaacttttccccttnttcttaaccctnttagggtttccagggtnaaggttttccgagaagacagcagagttntttttccgnctttttttnagaacaagatnaaccaagtcctg

SEQ ID NO: 253218 - DNA, 483 bp, Homo Sapiens
  misc_feature (28)..(28): n is a, c, g, or t
  misc_feature (43)..(43): n is a, c, g, or t
  misc_feature (353)..(353): n is a, c, g, or t
  misc_feature (372)..(372): n is a, c, g, or t
  misc_feature (419)..(419): n is a, c, g, or t
  misc_feature (468)..(468): n is a, c, g, or t
actggaagtgtgaaaatccccttggctngtcagaagccttggnttggcattaaatagggaggcagtggcacctctccatgggggtggcgaaggtggaatgagaggatctacacagagtccccagcctgggctcaccctgcaccttctcttcccctctgaccacttttgcgcacgtcatccccgcagccaaggatgtcaaggccgctgctaatcagatgcgcaacttcctggttcgagcctcctgccgccttcgcttggaacctgggaaagaatatttgatcatgggtctggatggggccacctatgacctcgagggacacccccagtacctgctggactcgaatagctggatncgaggagatggccctctgnaacgcctgtggccggagcacccgccagcggcaggcctgttgcccagnttcaaacgaatttcctccaggagttatgggcattcaggggtgcagggtnttgaggggttgcctt

SEQ ID NO: 253219 - DNA, 536 bp, Homo Sapiens
  misc_feature (13)..(13): n is a, c, g, or t
  misc_feature (31)..(31): n is a, c, g, or t
  misc_feature (66)..(66): n is a, c, g, or t
  misc_feature (76)..(76): n is a, c, g, or t
  misc_feature (99)..(99): n is a, c, g, or t
  misc_feature (120)..(120): n is a, c, g, or t
  misc_feature (128)..(128): n is a, c, g, or t
  misc_feature (135)..(135): n is a, c, g, or t
  misc_feature (181)..(181): n is a, c, g, or t
  misc_feature (224)..(224): n is a, c, g, or t
acctttcaaggtnccttttgctgttttcctncccaacctttcaaaattgaacttgctgccccaaangaaaaaatgnaactccttcctcccaagcccgcnaaatctggcggttgttcaagntgcaaccncgtgggnaacttgaaacccaatcccggcctgtggaaagctgaagaatcaacanttaagaccccctctccctcaagtggtgtgggaaggcaaatccnagtaaggcaagacagggcatcccagggcaaatcaccgtgtcttgggtaactgcggaatcccccttggaagcttgctgacgggtgaaggcagccgcagcctggtctgccatctctgctttgccctcgtgaagcaggaggtgcagcagggcgtaggctgtggtttcaatccacagggctggggcctggggcatggggtcggatgggttgcgaggagccggggtgggcgacacggcattgctctgagaaccagtgactgagccccaagtacaggttatctccagtctccgtggccattgccatgaggttgttgtg

SEQ ID NO: 253220 - DNA, 1072 bp, Homo Sapiens
  misc_feature (540)..(613): n is a, c, g, or t
  misc_feature (617)..(618): n is a, c, g, or t
  misc_feature (621)..(621): n is a, c, g, or t
  misc_feature (623)..(623): n is a, c, g, or t
  misc_feature (626)..(628): n is a, c, g, or t
  misc_feature (647)..(647): n is a, c, g, or t
ctcggccccggcctctgcctcagcttcggttaccctggcgcagctcctgcagctggtccagcagggccaggaactcccgggcctggagcgccacatcgcggcgatccacggcgaacccacagcgtcccggctgtcgcggaggcccaagccctgggaggccgcggctttggctgagtcccttcccccttcgaccctcaggataggaacgggcccggcggagcctggcttggttgaggcagcgactgcgccttcttcatggcatacagtgggcccctgaggttccaggtcctttgcggcggcgatctggagggcgtggctacaggacccgggatgccattcagttactcatcttttatgctttcgtcctgacctgtctcaactagacttgctcctgcaaccaccatgggggttttgcatttacatttgtggaccatgttacagttaagaaaaatcctgtttcagtccttatatgtaataaaatgttttatgatgtaacttggccccagaatgattttgaagatacattaaaggaaagccctnnnnnnnnnnnnnnnnnnnnnnnnnnnnnnnnnnnnnnnnnnnnnnnnnnnnnnnnnnnnnnnnnnnnnnnnnnccannaananggnnngcgccgccccaaccacgtngggcggccacggccctcccccgaaaaccttagaaaacctgtccctggcggaccgctcggccttcacaccaagagaaaaagcggccctggcgggcttcccgcacggtccgcatcgacctcgggaatgggagttctggattcccctcccagggaacaaacgcccccgggggatcacacgagacgctcctataatcaatccaaggtgcgccctcctggagacccccactcccgggaacttgatctcgaagattcccttaacgcgttggtcggccccaatcaaggagataacccctcccacccacacccgacactgactatacaccagggcacttgggcgaataaagggattttcaacaacccctgcgcgcgcggcattgcgaacaccaccacccccccgaccccgtcggagtggaatacacccgcggt

SEQ ID NO: 253221 - DNA, 521 bp, Homo Sapiens
agttctgcaacagtcagacatgtatgtgtttatgtgttagcacttggagactgggaagtaaaagtaaacacctttatcatataaactttgggctgaatgggaagcaaaatagaccaaaagaggttacggcaagtgggccttttaaaaaaaatctggggggtggggaaaataacggagaaggaggctatgtggggccagaggagagcgaagtgggggctggaagctctgggcctcttaataggtatgcttgtggttgggccacctcacagacttccacagccacccagctgggccagaagagaactgacacaagggagaaaccaaaaacaaaacagaacacaccacagaccctaatcctgggcagcggggttagaaacaaatggggtgaaactgtcacaatccgtgtcccttttatatataactatactgaggtatggtgtccttggctgccgtcgagccctggcaactgggggctggccacggagtacaagttgaaaaccacctcgtgccgtattcctaca

SEQ ID NO: 253222 - DNA, 1506 bp, Homo Sapiens
tgttcgttccttcgcccgcccggcagcccccactatacggcctaacgaccgggcctgggtggcgaattcggcacgaggctcgcaagcgaggcagccatgtcttatcccgctgatgattatgagtctgaggcggcttatgacccctacgcttatcccagcgactatgatatgcacacaggagatccaaagcaggaccttgcttatgaacgtcagtatgaacagcaaacctatcaggtgatccctgaggtgatcaaaaacttcatccagtatttccacaaaactgtctcagatttgattgaccagaaagtgtatgagctacaggccagtcgtgtctccagtgatgtcattgaccagaaggtgtatgagatccaggacatctatgagaacagctggaccaagctgactgaaagattcttcaagaatacaccttggcccgaggctgaagccattgctccacaggttggcaatgatgctgtcttcctgattttatacaaagaattatactacaggcacatatatgccaaagtcagtgggggaccttccttggagcagaggtttgaatcctattacaactactgcaatctcttcaactacattcttaatgccgatggtcctgctccccttgaactacccaaccagtggctctgggatattatcgatgagttcatctaccagtttcagtcattcagtcagtaccgctgtaagactgccaagaagtcagaggaggagattgactttcttcgttccaatcccaaaatctggaatgttcatagtgtcctcaatgtccttcattccctggtagacaaatccaacatcaaccgacagttggaggtatacacaagcggaggtgaccctgagagtgtggctggggagtatgggcggcactccctctacaaaatgcttggttacttcagcctggtcgggcttctccgcctgcactccctgttaggagattactaccaggccatcaaggtgctggagaacatcgaactgaacaagaagagtatgtattcccgtgtgccagagtgccaggtcaccacatactattatgttgggtttgcatatttgatgatgcgtcgttaccaggatgccatccgggtcttcgccaacatcctcctctacatccagaggaccaagagcatgttccagaggaccacgtacaagtatgagatgattaacaagcagaatgagcagatgcatgcgctgctggccattgccctcacgatgtaccccatgcgtattgatgagagcattcacctccagctgcgggagaaatatggggacaagatgttgcgcatgcagaaaggtgacccacaagtctatgaagaacttttcagttactcctgccccaagttcctgtcgcctgtagtgcccaactatgataatgtgcaccccaactaccacaaagagcccttcctgcagcagctgaaggtgtttctgatgaagtacagcagcaggcccagcttcaacctccgcagttcctgaagctctacaccaccatgctgt

SEQ ID NO: 253223 - DNA, 907 bp, Homo Sapiens
ggcatgccttcaagaaaagcaactcgagctggtgaatcccatcaggttgaaccggtggtcaccaggtttcttctggttgagacaaaagctgatcggactctgtttgtaggtcagaagccagcagctggcccagcatgtggtgagagctcaggaacctgcggtggtgaaagctggcctgctgcgtcttcatcagaaaacacttcagctgcgcaggaaggctcttgtggtagtggggtgcacattatcatagttggcactacaggcgacaggaacttggggcaggagtaactgaaaagttcttcatagacttgtgggtcacctatctgcatgcgcaacatcttgtccccatatttctcccgcagctggaggtgaatgctctcataaatacgcatggggtacatcgtgagggcaatggccagcagcgcatgcatctgctcattctgcttgttaatcatctcatacttgtacgtggtcctctggaacatgctcttggtcctctggatgtagaggaggatgttggcgaagacccggatggcatcctggtaacgacgcatcatcaaatatgcaaacccaacataatagtatgtggtgacctggcactctggcacacgggaatacatactcttcttgttcagttcgatgttctccagcaccttgatggcctggtagtaatctcctaacagggagtgcaggcggagaagcccgaccaggctgaagtaaccaagcattttgtagagggagtgccgcccatactccccagccacactctcagggtcacctccgcttgtgtatacctccaactgtcggttgatgttggatttgtctaccagggaatgaaggacattgaggacactatgaacatccagattttgggattggaacgaaagaaaagtcaatacttctactc

SEQ ID NO: 253224 - DNA, 1594 bp, Homo Sapiens
  misc_feature (1210)..(1214): n is a, c, g, or t
  misc_feature (1220)..(1221): n is a, c, g, or t
  misc_feature (1223)..(1224): n is a, c, g, or t
  misc_feature (1227)..(1227): n is a, c, g, or t
  misc_feature (1334)..(1350): n is a, c, g, or t
  misc_feature (1455)..(1467): n is a, c, g, or t
  misc_feature (1493)..(1538): n is a, c, g, or t
ggagcgaggcctgggtggcgaattcggcacgaggattccctgggtagacaaatccaacatcaaccgacagttggaggtatacacaagcggaggtgaccctgagagtgtggctggggagtatgggcggcactccctctacaaaatgcttggttacttcagcctggtcgggcttctccgcctgcactccctgttaggagattactaccaggccatcaaggtgctggagaacatcgaactgaacaagaagagtatgtattcccgtgtgccagagtgccaggtcaccacatactattatgttgggtttgcatatttgatgatgcgtcgttaccaggatgccatccgggtcttcgccaacatcctcctctacatccagaggaccaagagcatgttccagaggaccacgtacaagtatgagatgattaacaagcagaatgagcagatgcatgcgctgctggccattgccctcacgatgtaccccatgcgtattgatgagagcattcacctccagctgcgggagaaatatggggacaagatgttgcgcatgcagaaaggtgacccacaagtctatgaagaacttttcagttactcctgccccaagttcctgtcgcctgtagtgcccaactatgataatgtgcaccccaactaccacaaagagcccttcctgcagcagctgaaggtgttttctgatgaagtacagcagcaggcccagctttcaaccatccgcagcttcctgaagctctacaccaccatgcctgtggccaagctggctggcttcctggacctcacagagcaggagttccggatccagcttcttgtcttcaaacacaagatgaagaacctcgtgtggaccagcggtatctcagccctggatggtgaatttcagtcagcctcagaggttgacttctacattgataaggacatgatccacatcgcggacaccaaggtcgccaggcgttatggggatttcttcatccgtcagatccacaaatttgaggagcttaatcgaaccctgaagaagatgggacagagaccttgatgatattcacacacattcaggaacctgttttgatgtattataggcaggaagtgtttttgctaccgtgaaacctttacctagatcagccatcagcctgtcaactcagttaacaagttaaggaccgaagtgtttcaagtggatctcagtaaaggatctttggagccagaaaaaaannnnnaactcnnannaanacataaaaaaacaccacaagcacacaaaaacccaacacgacggcagctcacataataacaatcccctccgaacatggataaaaccaccgcttgcacgcctacaccannnnnnnnnnnnnnnnnaaccacagccgcgccgctcccccgggccggccgaaaagggggtaactcggtgggggcggcccggccccggcgccccgtagcaaaagaatttttttcaaaacaccnnnnnnnnnnnnngtgaccgccccgcccccccccaaagnnnnnnnnnnnnnnnnnnnnnnnnnnnnnnnnnnnnnnnnnnnnnnatccacccccacagaaaattccctcgcgctcgcacaacataatacctttggggggc

SEQ ID NO: 253225 - DNA, 827 bp, Homo Sapiens
gaattaagtaaagatgtaattctaagatggtatgttcattgatacatggttagctgttgtgttcttcctaaccacagaaaaatattacagataatttttatttggtgtttggctcatgtgcatgtatgtgtttctgtcttccctgtccaaaaggacttaattgaaaaagcaaggaaaaataacaaaactgagatgtatagcattttagagctgaaggagattttagggattacctgatccagaaccttcttgtttacagctaaaaaaatggattcctcaaaacatacaacttaattgatgaataggaagatcccgctctcaaactctgggactccagagcttcctctggatagttgagggcctctgcagggaaaactcttggtgtttctacctctggttctatctaggatgaattgggactcatgaatgtttgttctacctccttctacagagtatgtattcccgtgtgcccagagtgcccaggtcacccacatactattatgttgggtttgcatatttgatgatgcgtcgttacccaggatgccatccgggtcttcgccaacatcctcctctacatccagaggaccaagagcatgttccagaggaccacgtacaagtatgagatgattaacaagcagaatgagcagatgcatgcgctgctggccattgccctcgacgatgtaccccatgcgtatcgatgagagcattcacctccagctgcgggagaaatatggggacaagatgttgcgcatgcagaaaggtgacccacaagtctatgaagaacttttcagttactccagcctgggcaacagaacaagactctgtcc

SEQ ID NO: 253226 - DNA, 251 bp, Homo Sapiens
  misc_feature (235)..(235): n is a, c, g, or t
tggcatgagccaccacacctggcaccttgtggcagcaccacaaggccaggaatctttttgttccccgatatacttcatgtgcccacaatagtgaatgaaagatactgaacacttaatacaagaccccaagcccaggggacaggcataccttatcaatgtagaagtcaacctctgaggctgactgaaattcaccatccaggggcttgaggataccgctggtcccacacggaggttnttcatcttgtgttttg

SEQ ID NO: 253227 - DNA, 405 bp, Homo Sapiens
taacattacataagttactaaggagtgtgttattatagacctttgaaaataatataacaaatattagattttcattttactttagtaagtccaacccagttttgaggacgtttatctgctaagaggatgaacaaagctcttctccaccttttgtgtcctggaatatccatgagctcccagaacacacaaaatggagaaacttctacatctatctgtggttctgccatctgttcaagccagtacgcagatgcacacatcagccacccctgggactacctgtgccccatcctgctcatcaaaaccagcaaatgcaccaggccagtccaaaacacaactggctaaggatatttttatgatgtactgtaatgtcattatgatctgttgggaaaatccacttagcatttt

SEQ ID NO: 253228 - DNA, 840 bp, Homo Sapiens
ggtgctacaacttctggaaaaagaaattgaattggaaaattggacagaggagaaaggcctcattgtccgtggggcaaaaaaatactttctcttcaagatctgatctgaatgctgtgaaatacactaagaactccaaaggatggaatggccgtatgcatgtacatgctaaacaccttaacaagatttatgagtacaatgtgtggtgaactggtctgtatccctaggagatgagaaaaagaactatggattggaaagtttttactgctttctgaggaatatgaattgactttgcacctaggtaaagaagcaaagaggaaaaattcttcttggcctatcaagacttcctttaataagtgttgcgctggttcaaggttgggcattgggtggaggagcagaatttactacagcatgtgatttcaggttaatgactccagagagtaagatcagattcgtccacaaagagatgggcataataccaagctggggtggcaccacccggcaggaaataatcggaagtagacaagctctcaaagtgttgagtggggcccttaaactggattcaaaaaatgctctaaacataggaatggttgaagaggtcttgcagtcttcagatgaaactaaatctctagaagaggcacaagaatggctaaagcaattcatccaagggccaccggaagtaattagagcgaaaaaatctgtttgaggaacagtttggggtgggcctgcaaatttagaggctattgctaagaaaggaaaatttaataaataattggtcgtgtgtatggcccccaaacagtatgcacagcatgaccacatggctagaactcgagactagttctc

SEQ ID NO: 253229 - DNA, 1775 bp, Homo Sapiens
  misc_feature (1721)..(1729): n is a, c, g, or t
ggaccctttccagctttttgcctgaaagctttgcagaagaaatggcgaaaagtcttttgaagacagcctctctgtctggaaggacaaaattgctacatcaaacaggattgtcactttatagtacatcccatggattttatgaggaagaagtgaaaaaaacacttcagcagtttcctggtggatccattgaccttcagaaggaagacaatggcattggcattcttactctgaacaatccaagtagaatgaatgccttttcaggtgttatgatgctacaacttctggaaaaagtaattgaattggaaaattggacagaggggaaaggcctcattgtccgtggggcaaaaaatactttctcttcaggatctgatctgaatgctgtgaaatcactaggaactctcagaggatggaatggccgtatgcatgttcatgcaaaacaccttaacaagatttatgagacttcctttaataagtgttgcgctggctcaaggttgggcattgggtggaggagcagaatttactacagcatgtgatttcaggttaatgactccagagagtaagatcagattcgtccacaaagagatgggcataataccaagctgggggtggcaccacccggctagttgaaataatcggaagtagacaagctctcaaagtgttgagtggggcccttaaactggattcaaaaaatgctctaaacataggaatggttgaagaggtcttgcagtcttcagatgaaactaaatctctagaagaggcacaagaatggctaaagcaattcatccaagggccaccggaagtaattagagctttgaaaaaatctgtttgttcaggcagagagctatatttggaggaagcattacagaacgaaagagatcttttaggaacagtttggggtgggcctgcaaatttagaggctattgctaagaaaggaaaatttaataaataattggtttttcgtgtggatgtactccaagtaaagctccagtgactaatatgtataaatgttaaatgatattaaatatgaacatcagaattactttgaaggctactattaatatgcagacttacttttaatcatttgaatatctgaactcatttacctcatttcttgccaattactcacttgggtatttactgcgtaatctggaacatttagctaaaatatacacttttggcttaaaaattattgctgtcaattccaataataattcttagcttataaccaaagagcagtgtttaaaaggagagcttctatacaaaacctattcctggcgttacttttcatacaatttttgttctgttttacctggaaataatttaccaaaataactgagtgttgctgctaaagaacaaaagtggggaggtatcagggaacaagaaaacaagaaagggtatgatcaatcattttcttctgctccaaacagctggagtaaaattcatgggaaatggcccttcatttaaaaaaagatgtacctcactacccactacaaatttggaactttgttcttttcaataattagttttctattgtaaattacctactaaacagtggtagccatgacatggaaagtcaactgattctacaattggacattcatttgtgtgccctggaatttccaactagtaataaacaactactgttgatgtagttttaaaacacttggaaggactcatgaagcatccttgcaactaaatttgcatttttacataagattccnnnnnnnnncctgaaacaactaaacttcaacaacatcttttcaaagtaaaggatt

SEQ ID NO: 253230 - DNA, 935 bp, Homo Sapiens
  misc_feature (676)..(676): n is a, c, g, or t
  misc_feature (679)..(679): n is a, c, g, or t
  misc_feature (701)..(701): n is a, c, g, or t
  misc_feature (705)..(705): n is a, c, g, or t
  misc_feature (732)..(732): n is a, c, g, or t
  misc_feature (771)..(772): n is a, c, g, or t
  misc_feature (778)..(778): n is a, c, g, or t
  misc_feature (800)..(800): n is a, c, g, or t
  misc_feature (806)..(806): n is a, c, g, or t
  misc_feature (825)..(825): n is a, c, g, or t
  misc_feature (830)..(830): n is a, c, g, or t
  misc_feature (839)..(839): n is a, c, g, or t
  misc_feature (841)..(841): n is a, c, g, or t
  misc_feature (852)..(852): n is a, c, g, or t
  misc_feature (863)..(863): n is a, c, g, or t
  misc_feature (869)..(869): n is a, c, g, or t
  misc_feature (879)..(880): n is a, c, g, or t
  misc_feature (884)..(884): n is a, c, g, or t
  misc_feature (888)..(888): n is a, c, g, or t
  misc_feature (891)..(891): n is a, c, g, or t
  misc_feature (902)..(902): n is a, c, g, or t
  misc_feature (905)..(905): n is a, c, g, or t
  misc_feature (917)..(917): n is a, c, g, or t
  misc_feature (925)..(925): n is a, c, g, or t
tgggagaccacaaaatccacttttatttggtagtttttacatctatggccaaatagtattgggttgacacagtaatctagagtttacctctgaaaaaaagtaatgtgagtctgtctaaccatattttcctaactcaacagtaggatcatgatggtaaggcaaatgcaagttatttttaccatgattctcaaatgtgaattgaatgttacagtagcaaatacttttgacctcttgtgatgagtcagaactagaacttaattctttgactttcacattttttaaaaagtgtattgctgggatcataaacattttatgttgtgcatttttattacatttacttttgaaagatagttgttagaaggttagttgtttttcaggaaaaaaaagaaatctgatgtaaaaatgcaaatttatgttgcaggatgcttcatgagtcccttcaagtggtttaaaactacatcaacagtagttgtttattactagtttggaaattccagggcacacaaatgaatgtccaattgtagaatcagttgactttccatgtcatggctacctactgtttagtaggtatatttacaatagaaaactaattattgaaaagaacaaagttccaaatttgtagtgggtagtgaggtacatctttttttaaatgaagggccatttcccatgaattttnctncagctgttttgagcagaagatnatgnttgatcataccctttcttgttttcttnttccctgatacctccccactttttgttctttagcagcannactcanttattttggttattgatttccntgtaanacagaacaataattgtttnatatntaacgccangnataggttttgnatagaagctcncctttnaaacactgcnntttngttnttngctattaatanttntgggattgacantaaaattnttaagccaaa

SEQ ID NO: 253231 - DNA, 653 bp, Homo Sapiens
  misc_feature (279)..(383): n is a, c, g, or t
  misc_feature (444)..(507): n is a, c, g, or t
  misc_feature (581)..(608): n is a, c, g, or t
gtgtgagccactgcacctggacagttttcacatctgtgaactgggatgaccccatgtgtctcgcagggtggccaggagaacaaggccaggaggacaaaatcacactaactcctctgaggctggctctgcccacataaccctgcctgtgtctggagcttggcagattctgtggctgtgctgctcctgctagcgagcatctgtgctccagggattctgcagtcagaactaggttctctctctttctgtgttcttcttagagacagggtctcactttatcannnnnnnnnnnnnnnnnnnnnnnnnnnnnnnnnnnnnnnnnnnnnnnnnnnnnnnnnnnnnnnnnnnnnnnnnnnnnnnnnnnnnnnnnnnnnnnnnnnnnnnnnatgcgccaccacacctagctaatttttaaaatttttattactattttttgagacagttttnnnnnnnnnnnnnnnnnnnnnnnnnnnnnnnnnnnnnnnnnnnnnnnnnnnnnnnnnnnnnnnngttaagcgattctctgcctaagctcccgtgtagctgggattacagtgtgcgccacctacccagctcaattgaannnnnnnnnnnnnnnnnnnnnnnnnnnngggagttgggcccgaattctgcagcccggggaaccactgttttat

SEQ ID NO: 253232 - DNA, 413 bp, Homo Sapiens
gtctgggctggagatgccaggctggagcgggggctccaagctctccaggctattgaggcagctgctgggcaacgtggtctggacctcctgacaagcacagcaacaggggggcctcctgtggacttgagacttgggcaggggctgctgcaacagacacagcagggccccatccagctgctggaagatgctgagcatgagcagggtctggcggagatcaggggacaggctccactgctcctcttccagcaactccctgaccactccaaagtcttgtttgagctgcagcgctccctgcaggctgaaccgaatcccatgggtaagaatgtggtcaagccaggcacccacgatggccgtcagagcctgaccaagcacaggggcctgcgcttgaggtggcaacccgtgcaatccgtgca

SEQ ID NO: 253233 - DNA, 543 bp, Homo Sapiens
gagcccttaacacctgagcaaaggagagaacgctggaggagaaggcgggtgcgagctgagcccttaccacctgagcaaggagagtgtcaaatcaacagtgccttgacatctttccacactgctttggaacttgcagtagaccagagagaaattcaacatgtctgtctgtatgaaattggttggtgcagcatgatagagctcaatttcaaggatgcatttgattcctttgagaggctaaaaaatgagtccaggtggtcccagtgctattatgcctacttgactgcagtttgtcagggagccactggtgatgtggatggggcacagattgtctttaaagaagttcagaaactcttcaaaaggaaaaacaatcagattgaacagttctcggtgacgtctattgaagtgttgtacttgtggaaagctcttccaaactgttccttccccaacctgcagaggatgagtcaagcttgccatgaagtggatgactcatctgttgttggattaaagtatttgcttcttggtgccatacacaaatgtctaggg

SEQ ID NO: 253234 - DNA, 1163 bp, Homo Sapiens
  misc_feature (43)..(54): n is a, c, g, or t
ccagcccattgtggaatagtctttaaacatatttgctcctgcnnnnnnnnnnnncaagtatcatcacttcaggtatcccttatggcattttccctgacttgtacttaagaaatataattatggtttcttacagtttgtcagggagccactggtgatgtggatggggcacagattgtctttaaagaagttcagaaactcttcaaaaggaaaaacaatcagattgaacagttctcggtgaaaaaggcagagcgatttcggaagcaaaccccaaccaaagcgctctgtgtgttggcgtctattgaagtgttgtacttgtggaaagctcttccaaactgttccttccccaacctgcagaggatgagtcaagcttgccatgaagtggatgactcatctgttgttggattaaagtatttgcttcttggtgccatacacaaatgtctaggaaactcagaagatgctgttcagtacttccagcgagctgttaaagatgaattgtgtcgtcagaataatttatatgttcagccgtatgcctgttatgaacttggctgtcttctattagacaaaccagagactgtaggaagaggcagagctctacttcttcaagcaaaggaggatttctctggctacgactttgaaaacagattgcatgtccgcatccatgctgctctggcctctctgagggaattggttcctcagtgacagacccggaacacccgctccgtccctccccacccagggtccgcactttaaaataaaagcagaggacaaagctcttgtgaagatgggcttttcttctgaaaaccacctgtgccagggacacattttcccagttaagctgacatattaaagatctcctcttttaaacatgtagctgaaaagtaataatgatgttgaggaggatgatgatggtaataataactaaccacctggggagagggttaagtgaccttgctcaaacgttttagttttgtgatttattatttttaaaataaaatcaaacggaacatccaacccaagatcctgtaggaacacctaccttaagcacatatctgaatgggtaacatgatgaggtacctgtaaaattattaacaatatcatgacatagcatttatatttgtgttttgaaaaaataaaagtgctttctagtgttttactttatcctc

SEQ ID NO: 253235 - DNA, 611 bp, Homo Sapiens
ggcgggggctgttcacgggcataagctcaggtcaaggggccgtagctgcagtagagctgggataaggtcctgctcagagcaggccccagattcctgcaggaagagaggcagcgagggtcacgccctgggcctaggcaagccccagtccctgccactccctccaggttccgtctcttgccctcacctctgtagacgcccacacttaatggtgctcagcagtgtctcttgttccttgggggtggcacaggcatcataggcggccaggaggctggcaggggtgctgtatcgatccaccagggctgctgccttctccccactcactccgcgcacctgcatcagctgccgggcaaacacttctcgcaccgactgggccttattcttgatggctcctgcgttgaagtcactgaaggtgaggagtgagcagagagggggagaggtcatggcccctgattcagggttcccaggggttccccaggggcggctgcgtagggtgtggccctgagggaagaagggactgaggccaggctggagctcgaaggaacaactccagccagcccctgcccagtcctggggatgcacagggcccaggcaaggtgaattccttgtgggct

SEQ ID NO: 253236 - DNA, 928 bp, Homo Sapiens
  misc_feature (42)..(43): n is a, c, g, or t
  misc_feature (47)..(47): n is a, c, g, or t
  misc_feature (49)..(49): n is a, c, g, or t
aaaccctggggagttggtactggatcacattgtggagcgcannttgngnatgacctttgcagcagcatcatcgacggccgcttccgggagcagaagttccgactgaagcgctgtggtctggagcgccgggtatacctggtggaagagcatggttccgtccacaacctcagccttcctgagagcacactgctgcaggctgtcaccaacactcaggtcattgatggcttttttgtgaagcgcacagagacattaaggagtcagccgcctacctggccctcttgacgcggggcctgcagagactctaccagtgacttcaacgcaggagccatcaagaataaggcccagtcggtgcgagaagtgtttgcccggcagctgatgcaggtgcgcggagtgagtggggagaaggcagcagccctggtggatcgatacagcacccctgccagcctcctggccgcctatgatgcctgtgccacccccaaggaacaagagacactgctgagcaccattaagtgtgggcgtctacagaggaatctggggcctgctctgagcaggaccttatcccagctctactgcagctacggccccttgacctgagcttatgccgtgaaacagcccccagcccccgtctgtcccccaacccaggctagccagccttttaacaacatctttttggggtacaattagaatctaagtgtttgcagccatatgtgtcatgtagaagatgcctagccctggggaccttgtgaaatacgcaggaaccagggataccatctggtccagtggtttttaaacaaagctgcttagcaccttggaattccctggtcagggagatggagtcagtggggcattgcagcttggaatctattttatgtcaccagttggtcctcatcaaataaaatttccttaggagtgcagagggctcattggg

SEQ ID NO: 253237 - DNA, 346 bp, Homo Sapiens
gaagatcctgagctgccgtacatgcgacctcctctttcaaaagaactgtggttttcagatgacccaaatgtcacaaagacactgcgattcaaacagtggaatgggagagaagcatatatttccagccaccttctttctatgtctctgctcaggacctgcctcatattgagaatggtggtgtggctgtcctcactgggaagaaggtagtacagctggatgtgagagacaacatggtgaaacttaatgatggctctcaaataacctatggggctggagcagaggtgaagagtagaacaacgcttttcaggattggagactttagaagcttggagaagatttccggggt

SEQ ID NO: 253238 - DNA, 1856 bp, Homo Sapiens
aaaaagcaggctgtacggtccggaattccgggatatcgtcgaaccacgcgtcgcaacagtaggagctggtgcctatgcctacaagactatgaaagaggacgaaaaaagatacaatgaaagaatttcagggttagggctgacaccagaacagaaacagaaaaaggccgcgttatctgcttcagaaggagaggaagttcctcaagacaaggcgccaagtcatgttcctttcctgctaattggtggaggcacagctgcttttgctgcagccagatccatccgggctcgggatcctggggccagggtactgattgtatctgaagatcctgagctgccgtacatgcgacctcctctttcaaaagaactgtggttttcagatgacccaaatgtcacaaagacactgcgattcaaacagtggaatggaaaagagagaagcatatatttccagccaccttctttctatgtctctgctcaggacctgcctcatattgagaatggtggtgtggctgtcctcactgggaagaaggtagtacagctggatgtgagagacaacatggtgaaacttaatgatggctctcaaataacctatgaaaagtgcttgattgcaacaggaggtactccaagaagtctgtctgccattgatagggctggagcagaggtgaagagtagaacaacgcttttcagaaagattggagactttagaagcttggagaagatttcacgggaagtcaaatcaattacgattatcggtgggggcttccttggtagcgaactggcctgtgctcttggcagaaaggctcgagccttgggcacagaagtgattcaactcttccccgagaaaggaaatatgggaaagatcctccccgaatacctcagcaactggaccatggagtcagacgagagggggtaggtgatgcccaatgctattgtgcaatcctggagtcagcagtggcaagttacttatcaagctgaaagacggcaggaaggtagaaactgaccacatagtggcagctgtgggcctggagcccaatgttgagttggccaagactggtggcctggaaatagactcagattttggtggcttccgggtaaatgcagagctacaagcacgctctaacatctgggtggcaggagatgctgcatgcttctacgatataaagttgggaaggaggcgggtagagcaccatgatcacgctgttgtgagtggaagattggctggagaaaatatgactggagctgctaagccgtactggcatcagtcaatgttctggagtgatttgggccccgatgttggctatgaagctattggtcttgtggacagtagtttgcccacagttggtgtttttgcaaaagcaactgcacaagacaaccccaaatctgccacagagcagtcaggaactggtatccgatcagagagtgagacagagtccgaggcctcagaaattactattcctcccagcaccccggcagttccacaggctcccgtccagggggaggactacggcaaaggtgtcatcttctacctcagggacaaagtggtcgtggggattgtgctatggaacatctttaaccgaatgccaatagcaaggaagatcattaaggacggtgagcagcatgaagatctcaatgaagtagccaaactattcaacattcatgaagactgaagccccacagtggaattggcaaacccactgcagcccctgagaggaggtcgaatgggtaaaggagcatttttttattcagcagactttctctgtgtatgagtgtgaatgatcaagtcctttgtgaatattttcaactatgtaggtaaattcttaatgttcacatagtgaaataaattctgattcttctaaaaaaaa

SEQ ID NO: 253239 - DNA, 980 bp, Homo Sapiens
  misc_feature (892)..(892): n is a, c, g, or t
  misc_feature (894)..(894): n is a, c, g, or t
  misc_feature (906)..(906): n is a, c, g, or t
  misc_feature (913)..(913): n is a, c, g, or t
  misc_feature (961)..(961): n is a, c, g, or t
accaggctgggtgggattcggacgagggatcaatcagttctagaacgagcattcagtttccgaacagttgaggccaaacaggagaaagtttcaactacactgaatgtggctcaggcttattatgcccgtgatgctctggctaaaaacctctacagcaggttgttttcatggttggtaaatcgaatcaatgaaagcattaaggcacaaacaaaagtgagaaagaaggtcatgggtgttctggacatttatggctttgagattttcgaggacaacagctttgagcagttcattattaattattgtaacgaaaagctgcaacaaatcttcattgaacttactcttaaagaagagcaggaggagtatatacgggaggatatagaatggactcacattgactacttcaataatgctatcatttgtgacctaatagaaaataacacaaatggaatcctggccatgctggatgaagagtgcctcagacctggcacagtcactgatgagaccttcttagaaaagctgaaccaagtatgtgccacccaccagcattttgaaagcaggatgagcaagtgctctcggttcctcaatgacacgtctctgcctcacagctgcttcaggatccagcattatgctggaaaggtgctgtaccaggtggaaggattcgttgacaaaaacaatgaccttctctatcgagacctgtcccaagccatgtggaaggccagccatgccctcatcaagtctttgttccccgaagggaatcccgccaagatcaacctgaaaaggcctcctacagcaggctcacagttcaaggcatccgtggccactctgatgaaaaacctacagaccaagaacccaaactatattaggtgtatcaaaccgaatgataatgggcttntngagaacgttcgntgcgganggcaggctacgccttcagcaggcctatgaaccttgctagaaagatcanaatgctttgaaacacatgg

SEQ ID NO: 253240 - DNA, 688 bp, Homo Sapiens
  misc_feature (58)..(58): n is a, c, g, or t
  misc_feature (79)..(79): n is a, c, g, or t
  misc_feature (101)..(101): n is a, c, g, or t
  misc_feature (114)..(114): n is a, c, g, or t
  misc_feature (121)..(121): n is a, c, g, or t
  misc_feature (135)..(135): n is a, c, g, or t
  misc_feature (166)..(166): n is a, c, g, or t
  misc_feature (206)..(206): n is a, c, g, or t
  misc_feature (234)..(234): n is a, c, g, or t
  misc_feature (241)..(241): n is a, c, g, or t
aatactgtctcaagagatctcacgactatcataaagcctcacacaactgctgtcttcnatagcatgttgttacaacatntgacttctagcaggtcatagcngctgaagcgtacntgcctcngatcgacgttctcnaaagcatcaggtcctgaatgcacactagacntagttgagatcttggtctgcaggcatcagagtggccacgnatgccttgaactgtgagcctgctgtagnaggcctnttcaggttgatcttggcgggattcccttcggggaacaaagacttgatgagggcatggctggccttccacatggcttgggacaggtctcgatagagaaggtcattgtgtcaacgaatccttccacctggtacagcacctttccagcataatgctggatcctgaagcagctgtgaggcagagacgtgtcattgaggaaccgagagcacttgctcatcctgctttcaaaatgctggtgggtggcacatacttggttcagcttttctaagaaggtctcatcagtgactgtgccaggtctgaggcactcttcatccagcatggccaggattccatttgtgttattttctattaggtcacaaatgatagcattattgaagtagtcaatgtgagtccattctatatcctcccgtatatactcctcctgctcttctttaagagtaagctcgtgcc

SEQ ID NO: 253241 - DNA, 659 bp, Homo Sapiens
  misc_feature (545)..(546): n is a, c, g, or t
  misc_feature (649)..(649): n is a, c, g, or t
agtatgcattggtctaggactaccatttatgaatatccttagtctttctgtgatgatccttgttgagagatttgagcatattcctttcaacatcaggaataacttttagtttttgtttgattgtaattttttagtctccattctctgtaatgtgctttacgttgaacaaagtgcttttgtagttcttgttattttgaacccataatctgagacctttttttctaagccgtctcgtgccccagcccttacttactgagccctcttattgtatatactgaacgcatttttaaattgaagagatactattctgtgtatctttgcaggcgaatgagtcctaggttggccagtgtctcactagttgagattaaatttttgcttatacttgttgatttgactgccttctgaatagtattaggaacacattgtaaatttgttgttgatggctggctgaagttttccagcacatttctttgaggttgccaagttcttctacaaatgactgaatctactcttcattcattctagtcagcagtctcacacttaannttcaaggtttacttaagatcttttctgataagcaatgcttgctttcatatttgctattggtctctgcctaatagcagaactggctcatcttgcatttgatcanatcttttctg

SEQ ID NO: 253242 - DNA, 737 bp, Homo Sapiens
  misc_feature (528)..(529): n is a, c, g, or t
  misc_feature (532)..(533): n is a, c, g, or t
  misc_feature (535)..(542): n is a, c, g, or t
  misc_feature (545)..(546): n is a, c, g, or t
  misc_feature (554)..(554): n is a, c, g, or t
  misc_feature (562)..(563): n is a, c, g, or t
  misc_feature (577)..(577): n is a, c, g, or t
ctggtacggtccggaatttcgggatatcgtcgacccacgcgtccgggcgagaagtaggggagggcggtgctccgccgcggtggcggttgctatcgcttcgcagaacctactcaggcagccagctgagaagagttgagggaaagtgctgctgctgggtctgcagacgcgatggataacgtgcagccgaaaataaaacatcgccccttctgcttcagtgtgaaaggccacgtgaagatgctgcggctggatattatcaactcactggtaacaacagtattcatgctcatcgtatctgtgttggcactgataccagaaaccacaacattgacagttggtggaggggtgtttgcacttgtgacagcagtatgctgtcttgccgacggggcccttatttaccggaagcttctgttcaatcccagcggtccttaccagaaaaagcctgtgcatgaaaaaaaagaagttttgtaattttatattactttttagtttgatactaagtattaaacatatttctgtattcttccacanntgnnannnnnnnncgnnacgaatanggaaaaannaaaagatgaaaaanaaaacatggtcggccgccctcggccctccaaaaagcttttctaaaaccattccgtttggcgccgcgggcccccagaagggaaaggggaacatgggccataagcgggtttccctaaggaaatcccggggcccatgaactagggccttgggattcccccccc

SEQ ID NO: 253243 - DNA, 635 bp, Homo Sapiens
  misc_feature (30)..(30): n is a, c, g, or t
gggagggcggtgctcccgacaggttggctnttgctatcgcttcgcagaacctactcaggcagccagctgagaagagttgagggaaagtgctgctgctgggtctgcagacgcgatggataacgtgcagccgaaaataaaacatcgccccttctgcttcagtgtgaaaggccacgtgaagatgctgcggctggcactaactgtgacatctatgaccttttttatcatcgcacaagcccctgaaccatatattgttatcactggatttgaagtcaccgttatcttatttttcatacttttatatgtactcagacttgatcgattaatgaagtggttattttggcctttgcttgatattatcaactcactggtaacaacagtattcatgctcatcgtatctgtgttggcactgataccagaaaccacaacattgacagttggtggaggggtgtttgcacttgtgacagcagtatgctgtcttgccgacggggcccttatttaccggaagcttctgttcaatcccagcggtccttaccagaaaaagcctgtgcatgaaaaaaaagaagttttgtaattttatattactttttagtttgatactaagtattaaacatatttctgtattcttccacataaaa

SEQ ID NO: 253244 - DNA, 260 bp, Homo Sapiens
  misc_feature (63)..(63): n is a, c, g, or t
attcggcacaggatcctggataccaaacatttgagcaagaattgaataaaatactgcgacggngtcaaccaagcatacttccagatgggtcaatattctctcgagttgaagaagactatctctggaggataaaacaactaggatcacactctccagtagctcttctgaatacactgttctactttaacactaagtattttggcctgaaaacagtggaacaacacttaagactttcctttggcactgtgtttaggcattgg

SEQ ID NO: 253245 - DNA, 386 bp, Homo Sapiens
agggaatgtcccactcaaacacatgtgagtaaaaagaacctgtcaagaaccccaccttgttggtcactaggaatgcactaatgtgaaaacgcaaagactacactgcttattgttcagaacctagagtcgtatgccagaaaaatcacatgacgaggagcaacactgttcgtagtacttgagctttatcagtctgaatttctgcctgtcccattcacaatgattctaagcatagatgcaaactatctgacaacttcatgacattcggtcaggcccaagcacatatatgtacaaatccctatcaatttataacaaactatgtttcttctcctttatactccttctagacttgattcagggttggcaaactttataaagagccaaatagt

SEQ ID NO: 253246 - DNA, 589 bp, Homo Sapiens
  misc_feature (531)..(531): n is a, c, g, or t
gtctgagaaggctaccaaatggtttaagttcatttcatagttaggagaaaaagattttgagtagtctaatgtcgtcagaaaggattaaaacgttgtatgtaccaagaaggcagaatgaagaaggatcacgttcacaaatgctgtatgtttaacaaaatacgtttagatggtaatatccaatagtcttatcaagtgctacaatctttttaaacagggaatggccaaatccagtgctattgaaacagcctgaagaatgcaatcttaatttgcctgtatgggacccaagggttagtgtattattttttcccctaccaattcacactgtgcaataacaagtaaaaatcatctgcataaactccagggagacttccagccttttacttatgaatggtcatgtccgtattacactttcttttagataacctcaactataattgtcctcaactataattgatgtgagaagcataattatgtaccctgtaaaccacatttaattgtacatagtttttaatacagattttactaacattntaatttattctatatagaactaccttgtaagtcaaagttgtgtgggcatttgtgcttt

SEQ ID NO: 253247 - DNA, 436 bp, Homo Sapiens
  misc_feature (121)..(221): n is a, c, g, or t
cgttatggggggtagcctcctcattaggcccccaggctttccccttttgcttccggctgtattgtttgggaattggaaccggatccattttcaccaggaaccagctatgacatggttaccnnnnnnnnnnnnnnnnnnnnnnnnnnnnnnnnnnnnnnnnnnnnnnnnnnnnnnnnnnnnnnnnnnnnnnnnnnnnnnnnnnnnnnnnnnnnnnnnnnnnngcacgaggttttgagagccaattcagttataatgaatggttttaatttactttatattaaagggtgctgataaataatgttcaattagcattctttgggttctgagttaaatgctatgaaactcttatggtattggagaacataaccaataattttcaggggactaaattaaatattcaatatgtttaaaaatgagggccaggtgcagtggctca

SEQ ID NO: 253248 - DNA, 1159 bp, Homo Sapiens
gactgggaaaataacaattttattctttctcctaagattgtgattttattattccaagatcttatgcttgaattacttagcaagaaggcatgattatgcagaagacagggaaatgaagagaaaagagcgggaatatacgaaaatgaagcttccttaacagagttcatggtggagatggtagacactggtggagtttttatccaagacttaaaacttaggaaacgcctatgatgccactttaactggaagtaatggagacatctgattccaaattcacattttaaatgcctatttgcaatcagcaaagagccaggtatgctgcatgctgcttgctgtaagttacgatttggcttcactggctcaaattttttcactccaccaaaagataaggcacaggcccgtttgtccaatcaagtttgctgaaaatactgcagcctgagtgtagacaaacttcccctgaatttgctagaagttttcttgtgtctggaggtttcaagatcaccatacatctttcaaacacttcttttctgaggatgttctaactgctggggcccttaaatacaaacccattctttgggtagagtcctggcctggtcatttgtgtgtataagtccatcctcggttgcatactgggatagtacgctgtgtaattcatgaagagctgagtgcctgctgggtagtacgctgtggagggctgcagtgctcgtggattcaaaatcacagagggctggtaaatggcagcttctgtaggaataactgcagcaggagctggaaatgtgtaggagggaggagacaggcctagatatgcaaagagagattctttgagacatatttgtaacagctgacatgcacgtgctagcactaaaaacatagtcactgttccatctacacattttaaagaaagagaccacagttctttatcctatcccaagcaatttccttttgattatacagttaatgcatagaagtatctgaattccaccctgtcaacctaaaaaacagttctttgcctgaaattcggaaacaccaaaatcaagtggattttcatgtcttctcaaccatttcacaatatgtaatttttttccctcatgttcctgagtgccagttactacaaaccaactctcagaggaaagaaacaaggaactgatgtttaagtttc

SEQ ID NO: 253249 - DNA, 652 bp, Homo Sapiens
  misc_feature (56)..(56): n is a, c, g, or t
  misc_feature (76)..(358): n is a, c, g, or t
gctctaagcccctccctggtcaactgatatagtgggtgtgaagctgaggtcaaagncagctcagggttgaatctannnnnnnnnnnnnnnnnnnnnnnnnnnnnnnnnnnnnnnnnnnnnnnnnnnnnnnnnnnnnnnnnnnnnnnnnnnnnnnnnnnnnnnnnnnnnnnnnnnnnnnnnnnnnnnnnnnnnnnnnnnnnnnnnnnnnnnnnnnnnnnnnnnnnnnnnnnnnnnnnnnnnnnnnnnnnnnnnnnnnnnnnnnnnnnnnnnnnnnnnnnnnnnnnnnnnnnnnnnnnnnnnnnnnnnnnnnnnnnnnnnnnnnnnnnnnnnnnnnnnnnnnnnnnnnnnnnnnnnnnnnacttacttacccagcaggtgcgccagcagctccatccggtcagagccaaataacatgtgggtttggccatccacatgggccacggtgatgggcagcccaaaggcctggagaaagcagttacaatgcaaggaggaaggcaaaggagcaggtattaggcaggggttgaaacctttgagtcagtacttttctgagttcacagaagcaaagaggtctaagaggctctgtggccccaggtgccttcctgtttctaagatgctctcttttctctcactgtgcatctccttcccttccttt

SEQ ID NO: 253250 - DNA, 1117 bp, Homo Sapiens
  misc_feature (466)..(466): n is a, c, g, or t
  misc_feature (468)..(468): n is a, c, g, or t
  misc_feature (519)..(519): n is a, c, g, or t
  misc_feature (554)..(554): n is a, c, g, or t
  misc_feature (559)..(559): n is a, c, g, or t
ggagctcctgctgccactgctcttccggagcctgcagcatggggcccctgccgcgcaccgtggagctcttctatgacgtgctgtccccctactcctggctgggcttcgagatcctgtgccggtatcagaatatctggaacatcaacctgcagttgcggcccagcctcataacagggatcatgaaagacagtggaaacaagcctccaggtctgcttccccgcaaaggactatacatggcaaatgacttaaagctcctgagacaccatctccagattcccatccacttccccaaggatttcttgtctgtgatgcttgaagagatgctggaggcgtcccgggagctgtggatgcgcgtctggtcaagggtgagtgtcgggctctgggaatcctctgggaggaccttggatgactttctgaccttccccaggcacgttttcagggtcatgatcctgcccccgcccgcgantnctactgtcctcccagtcacacccctctccccgcaccgccttcctgctgtcntctcttcttcccagaatgaagacatcaccgagccncaganatcctggcggctgcagagaaggctggtatgtctgcagaacaagcccagggacttctggaaaagatcgcaacgccaaaggtgaagaaccagctcaaggagaccactgaggcagcctgcagatacggagcctttgggctgcccaatcaccgtggcccatgtggatggcccaaacccacatgttatttggctctgaccggatggaagctgctggcgcacctgctgggagagaagtggatgggccctatacctccagccgtgaatgccagactttaagattgcccggaggaagcaaactcttcgtataaaaaaagcaggccatctgcttaacccttggctccaccataaggcactgggactcggatttctctatctgatagaggtattttctgtggccctgggagctgtctgtctttcccctacccccaaggatgccaggaagacgtccaccattagccatgtggcaacctttacttctatgcctcacaagtgcctttcagagagccccaattctgctttcccacaaaataaacctaatgccatcaggcaaaacattaaaat

SEQ ID NO: 253251 - DNA, 1225 bp, Homo Sapiens
  misc_feature (577)..(577): n is a, c, g, or t
cggcacgagggcagcctctgccgggttccgggaaaaggagctcctgctgccactgctcttccggagcctgcagcatggggcccctgccgcgcaccgtggagctcttctatgacgtgctgtccccctactcctggctgggcttcgagatcctgtgccggtatcagaatatctggaacatcaacctgcagttgcggcccagcctcataacagggatcatgaaagacagtggaaacaagcctccaggtctgcttccccgcaaaggactatacatggcaaatgacttaaagctcctgagacaccatctccagattcccatccacttccccaaggatttcttgtctgtgatgcttgaaaaaggaagtttgtctgccatgcgtttcctcaccgccgtgaacttggagcatccagagatgctggagaaagcgtcccgggagctgtggatgcgcgtctggtcaagggtgagtgtggggctctgggaatcctctgggaggaccttggatgactttctgaccttccccaggcacgttttcagggtcatgatcctgcccccgcccgggcgatcctactgtcctcccangtcacaccgcctctccccgcaccgccttcctgctgtcttctcttcttcccagaatgaagacatcaccgagccgcagagcatcctggcggtgagtgtcctggctccaccccaactgcactcataagagaatctgagaacagttggcgtttgggggtaaagaagacaataggtctcttattgcatggaaaaggttataattactggggaagaaaggatgtctgtgattcagggcacaaactactgaaaagttggaactaaggatcctcaaaaggatatctcaaggttgaaaggggaagtgcaaaagggacaatatatgggaagaatttatttgctgaaagatgtcagtgagagaaagatgctcagtgttggaacccctggatggggagggatatagtattcacaagtctccacaaactccaacacaaacctcaccaacacatccagagtggaaggcaggagacttgttccaagaggctttaaaaagacgaaaagagataactaatgccagggttatataggagcctgagtgagaacaaatggaaatagctcaaaacattgaccagtgagccatggatgggggtataaaagtaagtttgtcttcaggattaaattaggaaattcaaaacagtattattcctctggtttaca

SEQ ID NO: 253252 - DNA, 809 bp, Homo Sapiens
  misc_feature (763)..(763): n is a, c, g, or t
gggagaagctgggcagcctctgccgggttccgggaaaaggagctcctgctgccactgctcttccggagcctgcagcatggggcccctgccgcgcaccgtggagctcttctatgacgtgctgtccccctactcctggctgggcttcgagatcctgtgccggtatcagaatatctggaacatcaacctgcagttgcggcccagcctcataacagggatcatgaaagacagtggaaacaagcctccaggtctgcttccccgcaaaggactatacatggcaaatgacttaaagctcctgagacaccatctccagattcccatccacttccccaaggatttcttgtctgtgatgcttgaaaaaggaagtttgtctgccatgcgtttcctcaccgccgtgaacttggagcatccagagatgctggagaaagcgtcccgggagctgtggatgcgcgtctggtcaaggaatgaagacatcaccgagccgcagagcatcctggcggctgcagagaaggctggtatgtctgcagaacaagcccagggacttctggaaaagatcgcaacgccaaaggtgaagaaccagctcaaggagaccactgaggcagcctgcagatacggagcctttgggctgcccatcaccgtgggcccatgtgggatggccaaacccacatggttatttgggctctgaccgggatggagctgctgggcgcacctgcctgggaaaaaaagtggaatgggccctattacctccagcccgggaaatgcccanaacttttaaaattggccccggaaggaaagcaaactccttccgtatt

SEQ ID NO: 253253 - DNA, 570 bp, Homo Sapiens
  misc_feature (544)..(544): n is a, c, g, or t
ataagcaggaaccaccatacctggcctgtgcaactcttaaatgttatcaaattccaaatttctactgctggcctcacatttttaagaggatgttctactaacatatttatacttagaatgtcaaagattaaatttaattcttttcagaactcacttattctctttttcagtaccagcttcagctccccaacccccaggcaaaaaaacctcaaaacacatttctgactcttcttaaatcccttctttttataagaactgctgactctatcgctcaaatctggcttgtttgttcttgctggctgccaatattcgtttaagccttcattagtgttcactgggatgacttcagcaacttaaaaattattttttccactttaaacttgttaggttttatttctcatagcaccctgtggtaagtgacagcactcaatacagtttgcagttttactgtatttcagaaggtttttgtttttaaattgtgttaagatatataaaatttttgcaaaactgaaactctgcttgtgccgaattcctgcagcccggnggatccactatgtttagaagcggcgc

SEQ ID NO: 253254 - DNA, 364 bp, Homo Sapiens
  misc_feature (175)..(197): n is a, c, g, or t
ccgcggtgggatgttgagctgaggccggaggagaagtagcagtcgctggcagagcacacaggctgctctgggggatgagctggtgcgtttaaggaacaggccagcactggcattcgcaagcagtggggaaggggagagatgccgaggtggtcagtatcctgactttcagaggccnnnnnnnnnnnnnnnnnnnnnnngctagattgatattaaaaactcatgtggaggaactcaaggaatgtttagaagaccgtccccaatgacaggaacacatgtagtccttttgctcaagaagtctttggggaaattaaggatctttgaagctctgataggtgatcaggttagtggtgtctgtcgctgtctt

SEQ ID NO: 253255 - DNA, 1189 bp, Homo Sapiens
  misc_feature (175)..(197): n is a, c, g, or t
  misc_feature (900)..(970): n is a, c, g, or t
ccgcggtgggatgttgagctgaggccggaggagaagtagcagtcgctggcagagcacacaggctgctctgggggatgagctggtgcgtttaaggaacaggccagcactggcattcgcaagcagtggggaaggggagagatgccgaggtggtcagtatcctgactttcagaggccnnnnnnnnnnnnnnnnnnnnnnngctagattgatattaaaaactcatgtggaggaactcaaggaatgtttagaagaccaaaagtccccaatgacaggaacaaaagcaaccaatttttaactttctcttctcattcctgttttcattgatttcccacatgtagtccttttgctcaggaagtctttggggaaattaaggatctttgaagctctgaaataggtgatcaggttagtggtgtctgtcagctgtctaagaggttggaaaatgaactactcaagatagtcacgaaaatactgaaagtttgattttctttccatatttgaatttaatttttctgtttgactggaaggggtttttgtataacctaaaacctcagcgcataaaggagatttaaaaggagcacatgatttagtgggtgggccatgaaactagagatgggatttgggggtgaatttgtaatatctggattttaatccagacatctctgctaacaagcctttggtaagtcacttcagatacttttcctcctttttacaaagagagggctggcttagttatttgccaaagccccttccaggcctgaattccacaagtacgatttactgtagtgtcttatcactctttcatgtcacaatagcgtggagcattagagaaaagcctagacttttagttgatagccagttgaaatatcattgatagaattttagttttaggaaaaattggtttnnnnnnnnnnnnnnnnnnnnnnnnnnnnnnnnnnnnnnnnnnnnnnnnnnnnnnnnnnnnnnnnnnnnnnntcaaaatgagaacattaggctaaatgatttccgagtttccagctagtcctagagttctatatttctacatagttgaattattttatcatgctgttgctggggaatatgactaacccttttgaagctactaattttatgtcgagctttaaagtccataattgttatcttcagaaaatattatttgacctacagtatgtccaaatcaatttaataaaatcg

SEQ ID NO: 253256 - DNA, 1007 bp, Homo Sapiens
  misc_feature (467)..(523): n is a, c, g, or t
  misc_feature (566)..(581): n is a, c, g, or t
  misc_feature (692)..(702): n is a, c, g, or t
aagccccttccggcctgaattccacatagtacgatttactgtagtgtcttatcactctttcatgtcacaatagcgtggagcattagagaaaagcctagacttttagttgatagccagttgaaatatccattgatagaattttagttttaggaaaaattggtttgatttctagctttattactattaggtatgtgagcttgggcaaatcgcttaatctttgagtctagttttctctcaaaatgagaacattaggctaaatgatttccgagtttccagctagtcctagagttctatatttctacatagttgaattattttatcatgctgttgctggggaatatgactaacccttttgaagctactaattttatgtcgagctttaaagtccataattgttatcttcagaaaatattatttgacctacagtatgtccaaatcaatttaataaaatcgctttataacagggnnnnnnnnnnnnnnnnnnnnnnnnnnnnnnnnnnnnnnnnnnnnnnnnnnnnnnnnncgaaccgacacgaccccataaggttaagaaaaaacttttgcgnnnnnnnnnnnnnnnnaaaaattttttaaaacctttctttgggcgcggggccccaaaaggaaaagagaaggggacaaaccttttcccaagaaaacccgggcaaaaaatagggttggaattcccaccnnnnnnnnnnncccccggcggggaaaccaaggggttttagaaaaaatccaaaaggggttcctggggggctattatggggattctttaaacggggaacccaacgagacccttatatttaaatttaaccccccgccccgtgaaattttatggaaaaaatgggtgggaaatcacataaaccttttccgcccccacagggaaacccccttccccaaaccggtcttgggataaccctaatttcctcgccggggtttccaccacccttggcccctctgggggataaaatatattccccccacggggggaaaacgcggggggg

SEQ ID NO: 253257 - DNA, 1029 bp, Homo Sapiens
  misc_feature (696)..(770): n is a, c, g, or t
  misc_feature (950)..(950): n is a, c, g, or t
  misc_feature (953)..(953): n is a, c, g, or t
  misc_feature (992)..(992): n is a, c, g, or t
aggtgccgcacattgtcaagttagaaatactccaggtgggtgttagcactgtggtggtctctggtccacagccttaggtaaacaacttagattctgaggtcaaagaaaaaaggagagggaatgcagccttgtgggggagaagcggggcagagggttctctaatctaatcaggacaggacaggtttcacatacaattgtcccagttcgcatcccagccctggggcacttttctgcttccttccagaggcctgggcctctgataacactttggctttttctccattcacgctgatttggcaaaaggccagagatgggcctccttccctggggaggtgtgatgtagttatcacattcaggacccttgttgatttatcatctattatttgaattcaactggacactctgtaaaatgctgcactgcagaaaaaacaaaaccaccaccaccccagagaaaaccatgtactaattggagtggggtacccccatttcacaggttcccaggttcccctggctttggctgatttcaaaatatagagccctttcttgccagtacatccaagtttaaaattatcagcgaaatggtccatgtttttccaattacctgctgacacggttctaagctaagtgaaggggaagatctgagagcgtgctgtttgtggctgttgatgcatattcgtgatgtaacaggtcctgggnnnnnnnnnnnnnnnnnnnnnnnnnnnnnnnnnnnnnnnnnnnnnnnnnnnnnnnnnnnnnnnnnnnnnnnnnnncaaactgttaatcttcgaaaacgaccatttcacttcttggatatcaagtgctaacccagtatggtcttcttttttatgtaagggacagctttctccacagagtccttttctgctggtgaggacagcatttctgagcagggctttgttctctatgtgcattaggacttttatcatgccctntgntctgggtgtagttaccttgacagcatcaaatggcggccntcttcctaaatgtccccttcagtttttcatgaaccta

SEQ ID NO: 253258 - DNA, 995 bp, Homo Sapiens
  misc_feature (23)..(23): n is a, c, g, or t
  misc_feature (50)..(146): n is a, c, g, or t
ccccctcctatccaaaacacaancttgcttggcttggagctaaacctatnnnnnnnnnnnnnnnnnnnnnnnnnnnnnnnnnnnnnnnnnnnnnnnnnnnnnnnnnnnnnnnnnnnnnnnnnnnnnnnnnnnnnnnnnnnnnnnnntgaaggaagaaaaaaagatttactgaagcctgaagaatagtgagtgttcatttaccatttggaatcaaacaatgtgattgtttcccttgaaaacagaagagtatcagcaacatgctctacccagcggggaaaagtttccagtttcctttgcacggttcctggtcccttttggcttcacaggagactggaatggcttagctggtttaaagagagctgggctttccccctggctgggtcaactctgtgtcccatggctcttcttcaccctttctgctcaggctcatgtccccagttttaagaagggggtgtggcttgatggtctccgttccatctacccattctcacctcaatggtacacacatccataagcgtgtgcccctgtctgtagggcccaggtgacacatagcaacagggaaaacaagggagtgaaggaggctgaacactggggagctttaatggcctgttacagggtggcagaaacagtggctgggtctgggagtcacagcaaaatcaggcgcccagaaccatggtggaaggtggggttgctagttcatgaaaacttgaaggacattaggaagaggcggcatttgatgctgtcaagtaactacacacagaacaagggcatgataaaagtcctaatgcacatagagaacaaagccctgctcagaaatgctgtcctcaccagcagaaaggactctgtggagaaagctgtcccttacataaaaaaagaagaacatactgggttagcacttgatatccaagaagtgaaaatggtcgtttttcgaagatttaacagtttggctttcaccaaattccctctgaggtaggtaagaggcaggtgactttagc

SEQ ID NO: 253259 - DNA, 1440 bp, Homo Sapiens
cgcaggcgcaacccacggctgctgcggggatccttgtggcccttccggtcggtggaaccaatccgtgcacagagaagcggggcgaactgaggcgagtgaagtggactctgagggctaccgctaccgccactgctgcggcaggggcgtggagggcagagggccgcggaggccgcagttgcaaacatggctcagagcagagacggcggaaacccgttcgccgagcccagcgagcttgacaacccctttcagccaccaccagcctatgagcctccagcccctgccccattgcctccaccctcagctccctccttgcagccctcgagaaagctcagccccacagaacctaagaactatggctcatacagcactcaggcctcagctgcagcagccacagctgagctgctgaagaaacaggaggagctcaaccggaaggcagaggagttggaccgaagggagcgagagctgcagcatgctgccctggggggcacagctactcgacagaacaattggccccctctaccttctttttgtccagttcagccctgctttttccaggacatctccatggagatcccccaagaatttcagaagactgtatccaccatgtactacctctggatgtgcagcacgctggctcttctcctgaacttcctcgcctgcctggccagcttctgtgtggaaaccaacaatggcgcaggctttgggctttctatcctctgggtcctccttttcactccctgctcctttgtctgctggtaccgccccatgtataaggctttccggagtgacagttcattcaatttcttcgttttcttcttcattttcttcgtccaggatgtgctctttgtcctccaggccattggtatcccaggttggggattcagtggctggatctctgctctggtggtgccgaagggcaacacagcagtatccgtgctcatgctgctggtcgccctgctcttcactggcattgctgtgctaggaattgtcatgctgaaacggatccactccttataccgccgcacaggtgccagctttcagaaggcccagcaagaattggctgctggtgtcttctccaaccctgcggggcgaaccgcagctgccaatgcagccgctggggctgctgaaaatgccttccgggccccgtgacccctgactgggatgccctggccctgctacttgagggagctgacttagctcccgtccctaaggtctctgggacttggagagacatcactaactgatggctcctccgtagtgctcccaatcctatggccatgactgctgaacctgacaggcgtgtggggagttcactgtgacctagtccccccatcaggccacactgctgccacctctcacacgccccaacccagcttccctctgctgtgccacggctgttgcttcggttatttaaataaaaagaaagtggaactggaactg

SEQ ID NO: 253260 - DNA, 1229 bp, Homo Sapiens
  misc_feature (10)..(10): n is a, c, g, or t
  misc_feature (32)..(33): n is a, c, g, or t
  misc_feature (51)..(51): n is a, c, g, or t
  misc_feature (61)..(61): n is a, c, g, or t
  misc_feature (74)..(75): n is a, c, g, or t
  misc_feature (80)..(80): n is a, c, g, or t
  misc_feature (82)..(82): n is a, c, g, or t
  misc_feature (86)..(86): n is a, c, g, or t
  misc_feature (95)..(95): n is a, c, g, or t
  misc_feature (141)..(141): n is a, c, g, or t
  misc_feature (159)..(159): n is a, c, g, or t
  misc_feature (180)..(180): n is a, c, g, or t
ccttaagagnaggcaggatccaatcagggtanngggcccgaagcatttcanagcccagcgntgattggcgagcnnggtcncncgcnaggttgganagacaccagcagcaaatcttgctggccttctgaaagctgcacctgnccgcggtataaggagtgnatccgtttcagcatgacaatncctagcacagcaatgccagtgaagagcaggcgaccagcagcatgagcacggatactgctgtgttgccttcggcaccaccagagcagagatccagccactgggataccaatggcctggaggacaaagagcacatcctggacgaagaaaatgaagaagaaaaccgaagaaattgaaatgaactgtcactccggaaagccttataacatggggcggtaccagcagacaaaggagcagggagtgaaaaggaggacccagaggatagaaagcccaaagcctgcgccattgttggtttccacacagaagctggccaggcaggcgaggaagttcaggagaagagccagcgtgctgcacatccagaggtagtacatggtggatacagtcttctgaaattcttgggggatctccatggagatgtcctggaaaaagcagggctgaactggacaaaaagaaggtagagggggccaattgttctgtcgagtagctgtgccccccagggcagcatgctgcagctctcgctcccttcggtccaactcctctgccttccggttgagctcctcctgtttcttcagcagctcagctgtggctgctgcagctgaggcctgagtgctgtatgagccatagttcttaggttctgtggggctgagctttctcgagggctgcaaggagggagctgagggtggaggcaatggggcaggggctggaggctcataggctggtggtggctcccgggtctcaaaagggttgtagacgtcaagcgtggcatactgccggctgggtcggtgctggatcacagctgggtcctgaaaggggttgtcaagctcgctgggctcggcgaacgggtttccgccgtctctgctctgagccatgtttgcaactgcggcctccgcggccctctgccctccacgcccctgccgcagcagtggcggtagcggtagccctcagagtccacttcactcgcctcagttcgccccgcttctctgtgcacggattggttccaccgaccggaagggccacaaggatccccgcagcagccagtgggttgcgcctgc

SEQ ID NO: 253261 - DNA, 807 bp, Homo Sapiens
  misc_feature (45)..(260): n is a, c, g, or t
tggagtctcgctctgtcacccaggctagagtgcagtggtgcgatnnnnnnnnnnnnnnnnnnnnnnnnnnnnnnnnnnnnnnnnnnnnnnnnnnnnnnnnnnnnnnnnnnnnnnnnnnnnnnnnnnnnnnnnnnnnnnnnnnnnnnnnnnnnnnnnnnnnnnnnnnnnnnnnnnnnnnnnnnnnnnnnnnnnnnnnnnnnnnnnnnnnnnnnnnnnnnnnnnnnnnnnnnnnnnnnnnnnnnnnnnnnnnnnnnnnnnnnatgagccaccacacccagccccagcaggattttctaggctaaatcctagaaaatcttgcttgtgaaaatgtacaaaaaagttcagaggctcgttgtttttaatagcaaaaacctaggaacaccaaatacccatttggagaagaatgtgtaactaaatggtggcatatttacatcgtgggatgaaagtgtattattaataactggcatgtcatccatccgcatggataaatctcacatttggtgaacaaggaaaggaatctgcagaatacaaacgctgtaacgctgtttacataaaatataaaaccatgtaaaactacacagtatgctggtggaggtgcatacatatgtagtaaatgtatagagaaaagctaaaagcaagaagttcaaaattcaaaatgctggttatttctggtgggggaaggggagactgcaattcagggcacaaagggaccactataagggatgataaggttatgcttcttaaactgggtggtaggcacatgagtggacatattatttgttaatccttttgtgcataataaaataa

SEQ ID NO: 253262 - DNA, 225 bp, Homo Sapiens
aatagaaattatctcactacttaaatcccatttttttcacttcatatgaaagaacatattgatagtatattctatattatttcatagatctgtctgaaagagattggggaacaaaaatatctaattgaggatattctttaattttttacataggcagctttattttttttattctgtaggtatcagcgaaatcagtcatgtttataccttggaatattaaatatc

SEQ ID NO: 253263 - DNA, 573 bp, Homo Sapiens
  misc_feature (134)..(168): n is a, c, g, or t
  misc_feature (448)..(448): n is a, c, g, or t
aatagaaattatctcactacttaaatcccatttttttcacttcatatgaaagaacatattgatagtatattctatattatttcatagatctgtctgaaagagattgggaacaaaaatatctaattgagatattnnnnnnnnnnnnnnnnnnnnnnnnnnnnnnnnnnnttctgtagtatcagcgaaatcagtcatgtttataccttgaatataaatatcaggaatcatgcaattatttctactatgtatttagtagtatcttatatttgtataacattattacattttgcaaattagtatcacaactgctaagtagatgtttctgagtattagaaaaatcagtgttattacctgcaggatattaaaaaacatttggaaaaagagaaaaggagaaatcagtgtttagaaatgttgatagttattgaatctttgaattgaattttaaaanatccattctagtaatcagagtatactttttttatagaacaaggtggcaggtggggagccctttacccttctggtgaagttaaaccatagaagtttacaatttgcctttcacaaacattagcagtc

SEQ ID NO: 253264 - DNA, 565 bp, Homo Sapiens
  misc_feature (496)..(496): n is a, c, g, or t
  misc_feature (508)..(508): n is a, c, g, or t
  misc_feature (520)..(520): n is a, c, g, or t
  misc_feature (541)..(541): n is a, c, g, or t
  misc_feature (547)..(547): n is a, c, g, or t
gaactagtggatcccccgggctgaggaattcggcacgagaaggagtctgagaagatggcgctgtcagagaagttgatgggtacacggcacagcctggccaccatctccctggagatggagcggcagaaaccagatgcccagagccggcaggagcaggaccgggtaggcctgccgtcgtagggaggcttgcggagcaggaagcgccctctctccaccgagctatcccgcggtttccagcatcccatctggcggactcctcttcctctctcttctcctactctgggtcttctatcctggtgttccttgaatgcctatcttccttttgtgcctcggaacctctcacgcctgccacaagttactcttttccttggtagttctgaactttaaataaggtaatgcctgtaagaatgccataaaattgcttcaataaattgtcatctgtttattaatttttcatcagtaaacatcatctggaatcatcagtattggtcctggntttttaacaggntggcattttttncattggtcccaaatatagggncacatnacattttggaaccatttt

SEQ ID NO: 253265 - DNA, 1704 bp, Homo Sapiens
  misc_feature (1151)..(1166): n is a, c, g, or t
  misc_feature (1286)..(1297): n is a, c, g, or t
ggagcacgtgcccagccagggacggaccctcattcctcccaggggccccagacctctgtctctctcggataagtctccatctctgcctgtctctgtctctgactctgcatctgtctgttactgacgcactcagcaaggcctcctgccctgagagaggctccgcccactaccccccactttccccataaaaccagctgagtctttgtgccaggaagactgcgtgcagaaggtgactgtctcagtggagctgggtcatctcaggtggggagttggggtccccgaaggtgaggaccctctggggaggagggtgcttctctgagacactttcttttcctcacacctgttcctcgccagcaggccttggctccttgaacttttggccgccatgtgcttcccgaaggtcctctctgatgacatgaagaagctgaaggcccgaatgcaccaggccatagaaagattttatgataaaatgcaaaatgcagaatcaggacgtggacaggtgatgtcgagcctggcagagctggaggacgacttcaaagagggctacctggagacagtggcggcttattatgaggagcagcacccagagctcactcctctacttgaaaaagaaagagatggattacggtgccgaggcaacagatcccctgtcccggatgttgaggatcccgcaaccgaggagcctggggagagcttttgtgacaaggtcatgagatggttccaggccatgctgcagcggctgcagacctggtggcacggggttctggcctgggtgaaggagaaggtggtggccctggtccatgcagtgcaggccctctggaaacagttccagagtttctgctgctctctgtcagagctcttcatgtcctctttccagtcctacggagccccacggggggacaaggaggagctgacaccccagaagtgctctgaaccccaatcctcaaaatgaagatactgacaccacctttgccctccccgtcaccgcgcacccaccctgacccctccctcagctgtcctgtgccccgccctctcccgcacactcagtccccctgcctggcgttcctgccgcagctctgacctggtgctgtcgccctggcatcttaataaaacctgcttatacttccctggcaggggagataccatcgtgnnnnnnnnnnnnnnnnctgaaacatgatctcctttaacaaagggtcgagactgaagtcctaatcatcctgtggtgtggagagggatcaatctcgaaaaagcggaaacgcgcagcatgtgtacaatcaagacactcnnnnnnnnnnnncgggacccaatgccccctttatgaaggggcccttaaatatagatgagccccgttttaaaaaacatgagcacggaaaaaccgcggctgccccaaatataatggtgtggaaaaaaaccctgtttgggcgtggggggaataatgaagagaccccgccaattcgcccttccacacaaatgtcacaggcccatggacaatacaacatattgtcgtgcttatatttttgaaaaaaccgggatatagctgatacacaggcgcattattaacccaaaggggccacttggcaatacactctataaaaaacaaaacaacccgacaggggggaagtgtggcccaacatgagacaaaattcctctattgaagcccgctccccccgggaagggggaaaaggcctctttagggctgggccc

SEQ ID NO: 253266 - DNA, 929 bp, Homo Sapiens
ggtccaagtattcttccattttggggggattgggggtcacggaccactttcggggggttcagctccctccttgtccccccccgggggggctcgttaggactggaaaggaggccaggaagagctctgccagagaccagcagaaactctggaactgttcccagagggctggcacgccatggaccagggcccccaccttctctttcaccagggccagacccccgtgccaccaggtctgcagccgctgcagcatggcctggaaccatctcatgaccttgtcacaaaagctctcccccaggctcctcggttgcgggatcctcaacatccgggacaggggatctgttgcctcggcaccgtaatccatctctttctttttcaagtagaggagtgagctctgggtgctgctcctcataataagccgccactgtctccaggtagccctctttgaagtcgtcctccagctctgccaggctcgacatcacctgtccacgtcctgattctgcattttgcattttatcataaaatctttctatggcctggtgctgtgaagagaggcagagttggcaccaaagggccggatccttgtccctccagggtcccaggtgtcccacagtgtcctcagtgtcacacgcggagaccccaggcccccaacccctgagcagaagtagggaggagcattaccattcgggccttcagcttcttcatgtcatcagagaggaccttcgggaagcacatggcggccaaaagttcaaggagccaaggcctgctggcgaggaacaggtgtgaggaaaagaaagtgtctcagagaagcaccctcctccccagagggtcctcaccttcggggaccccaactccccacctgagcctcgtgccgaattcgccacccaggcctcgtgatggtgtgtggtgtggttggtggcgctcgtctttgc

SEQ ID NO: 253267 - DNA, 817 bp, Homo Sapiens
ggggactgcgtgcagaaggtgactgtctcagtggagctgggtcatctcaggccttggctccttgaacttttggccgccatgtgcttcccgaaggtcctctctgatgacatgaagaagctgaaggcccgaatgcaccaggccatagaaagattttatgataaaatgcaaaatgcagaatcaggacgtggacaggtgatgtcgagcctggcagagctggaggacgacttcaaagagggctacctggagacagtggcggcttattatgaggagcagcacccagagctcactcctctacttgaaaaagaaagagatggattacggtgccgaggcaacagatcccctgtcccggatgttgaggatcccgcaaccgaggagcctggggagagcttttgtgacaaggtcatgagatggttccaggccatgctgcagcggctgcagacctggtggcacggggttctggcctgggtgaaggagaaggtggtggccctggtccatgcagtgcaggccctctggaaacagttccagagtttctgctgctctctgtcagagctcttcatgtcctctttccagtcctacggagccccacgggggggacaagggaggagctgacaccccagaagtgctctgaaacccaatcctcaaaatgaagatactgaacacccacctttgccctccccgtcaccgcggaacccacccctaaccccctccctcagctggtcctgtgccccgccctcttcccgaaaactcagtccccctgccttggcgttcctgccgcagctcttgaactgtggctggccccctggcattctaataaaac

SEQ ID NO: 253268 - DNA, 923 bp, Homo Sapiens
  misc_feature (472)..(481): n is a, c, g, or t
gccaccaccaccaccaccggggctgacaccctgccccacagggaatggccttggcctggcccagcccaagatcccagcgttatctaactcctggagggtggactctgtcctggcttgtttggtgtcctcagatatctttcacacagtagagcaaaatcaccagccctgcactgatgtcactttatgtagacaggccctgggatgtgggcttgtgttttgtcactgtgaagggggagatgggagaggagcctgttttggggtggggtctggggaaggcaatctgattctgaagctaaagagctttcatcctcttgagtgtatgtccccatagtgggccccttgacccacatgctgaccggtgccttgggatttgactagagttgctggctcgaggcccagcacgaggacttaccctggggttttgttaggtttggaagcagctgtccctagggggtgaagtcccccccctttnnnnnnnnnnacccctgcttctcccacggctttcacctccctatgtgaactgtagactcagatcccaataaagtgctgttgcagctatgatgctaggtggtttctaagcacaggggacaccccacaccccctgcctgaatggatgggtccatcccaggcactggtacttgcccccttgttctgtatccccctttgcccttgccttgcccttccaacaaaccctaggcccttgagaagctgatacttctccttttgctcacagctgccttggccccacccctgggagatgtagcaaattgagtgtgggttttggagtctgagcctcaggctcaaatccaggccaagtgatcttgggcaagttaatctctgggaactttgggtttcttatcctcaaaaaaggcgatggaagggctggggaagtgattaaataaaagcaacgcaagaaaaatgcc

SEQ ID NO: 253269 - DNA, 1004 bp, Homo Sapiens
  misc_feature (52)..(52): n is a, c, g, or t
  misc_feature (910)..(910): n is a, c, g, or t
  misc_feature (920)..(920): n is a, c, g, or t
  misc_feature (944)..(944): n is a, c, g, or t
  misc_feature (953)..(953): n is a, c, g, or t
  misc_feature (969)..(969): n is a, c, g, or t
  misc_feature (981)..(982): n is a, c, g, or t
ggggggggacttcaccccctagggacagctgcttccaaacctaacaaaaccnccaggggtaagtcctcgtgctgggcctcgagccagcaactctagtcaaatcccaaggcaccggtcagcatgtgggtcaaggggcccactatggggacatacactcaagaggatgaaagctctttagcttcagaatcagattgccttccccagaccccaccccaaaacaggctcctctcccatctcccccttcacagtgacaaaacacaagcccacatcccagggcctggagtatttgcatgcatttgcatagacggcaacacaggtccagctaaggcctttttctacataaagtgacatcagtgcagggctggtgattttgctctactgtgtgaaagatatctgaggacaccaaacaagccaggacagagtccaccctccaggagttagataacgctgggatcttgggctgggccaggccaaggccattccctgtggggcagggtgtcagccccggtggtggtggtggtggctatggctgtgcccctccctgggccccgcagctcttgggctctgtgagtgcttgtccttcttccctgacctcttcttcagtgctttgtctccaaagaagtggctgaagatgaagtcctcaaagtcatctacttcatcatcatcacctgtctgttgcacagccacctcctccaagctgtcctccagggcatccacaaaatcccggaagcggaggcggtcatgacggaagatgccatcctcaccaaagaaagcaggtgagaggggtagctccttggtcagctgcccagcccagggcagccgtgccaagtatgttcttagcagagaggccagctcctgttgccgcactggggctagctctgtgccaaagaaagtcaggcctcctgcgggnacactcgtcncactgagcagcctggggtgccggnacttgggcntcacagcctgcccagnatggagggggtnntggtgtcttagtcccttcctcc

SEQ ID NO: 253270 - DNA, 415 bp, Homo Sapiens
gaaaaagcttaattattaaaaacacattacctaccacatgaatgactatatggatcttcagacctgagaagactaaaaagaaaaagcccattgaataactctgagtaagaagagaaaaatatagccaaaggctagaatagaacaagccctctaatataaaaagaagtagagtataggtcttaaatttaaagggcagtctatctttatcacctttgaaaacaataagacccaaaaggagaatcctctcacaatctctgagttaaataaagggatcatgaacttattcttcctctctaactggcacaatacaaaatttgccaaccactggggagtcagctaaaacaggtcttaatatagcaataatgaagacttattatatccttagcactacagtaagcacattacctcgtgccga

SEQ ID NO: 253271 - DNA, 878 bp, Homo Sapiens
  misc_feature (801)..(801): n is a, c, g, or t
  misc_feature (859)..(859): n is a, c, g, or t
caaaaagatggaattagctatcacaaggtgatagcttacatggtcacttactaaaacagatgaaacactaacattcctggtaagtgttaagtggtccgactgaatgcagtatctccagttaacattttacaataataaataactggatgaagtacatgagaggcaagagaaatgcagaatttttaaagtaaaactgatcattgtatgagatagaaaaataaatatttatgaaataaaaaatggcaaatgattttgcctagttatcaaataaaaatacattgtttttttcctttaaaattacaataaaaaaactttgaaggacacgaagcgaaatcacagggcagataaagaaaaatatagcattactataagtaaacaaggcctaagctttggatattgaaagcactatctggaatttgacttaaggccaggaccttccattttgtctccccttccttatttaaatggaggtttttctttacccattttatcacagctataaaaagtcctgttattttccttttcctccatttctccaaaatgactacataaagtagggatgtagattatctttctgattaacatttgcccaaaacttaactcagatcgattttacttaaattcatataatatacaaacttcattgaaactacaaatctttctcaaatgagagacccaaatccactctgagaaactgttctaaatagctgcctgaatattggcccaactttaaagactatctggaaaagataaggcaaacagaaggcaattcacagtggggaaaaaaattaacatttttcnccagtggacctacatattttttccctaaaccaatggccatattggaatggccaagaanttccatatttataccatgg

SEQ ID NO: 253272 - DNA, 369 bp, Homo Sapiens
gaagacggtcagatccacactgggcctgagctcccactcgggaagaaacgatgctagcccaagagggcctagaaatcaatgggtgctccaccgcgccccctgctgactggtgtctgacccacagcctctcatgcaggatccctcctaccccgatccctgccccacggaagcccctgggcgtcacatcagctgtgctctgaatagtaatggaagtagccagtacttcttgaagagaagtaactgaatattaaccaagtaatgttacctgaaaagtaaagggaatgaagggactaggaaacctatcattgattcagaaagaaaatttgacacaggaaaatttcagggaaaatgcaagtcaaccaagagtca

SEQ ID NO: 253273 - DNA, 637 bp, Homo Sapiens
acctccatctccccacacatgatgtagaatgtaataaaacaagcggatgcagaatcaatcagtaatgtaggaatcagtaatgccatccatccacttattccttagaattggtaagtttggcaggcacttaggatcctggcatctctctgaaatgagaagcttttgcaacctgtcaaatcacttgcccttggccttgtggtgactctcggtcttcttaggcagaagcacggcctggatgttagaaagcacgccgccctgagcaatggtcacccggcatagcaggttgagctcctcgtcgttgcgaatggccagctgcaagtggcgcgggatgatgcgagtcttcttgttgtcgcgagccgcgttcccggccagctccaggatctcggcggtcaggtactctaacaccgccgccaggtacaccggcgcgcctgccccaacccgctctgcgtagttgcctttacgaagcaggcggtgcactcggcccaccgggaactggagaccagcgcgagaagagcgggatttcgctttggcgcgagctttgcctccttgcttaccacgtccagacattgcaatcagacaaaaatcaccaaaaccagcggcctaagctcactcgtgccgaattcctgcagcccggggg

SEQ ID NO: 253274 - DNA, 570 bp, Homo Sapiens
ggggactttcccgatcgccaggcaggagtttctctcggtgactactatcgctgtcatgtctggtcgtggcaagcaaggaggcaaggcccgcgccaaggccaagtcgcgctcgtcccgcgctggccttcagttcccggtagggcgagtgcatcgcttgctgcgcaaaggcaactacgcggagcgagtgggggccggcgcgcccgtctacatggctgcggtcctcgagtatctgaccgccgagatcctggagctggcgggcaacgcggctcgggacaacaagaagacgcgcatcatccctcgtcacctccagctggccatccgcaacgacgaggaactgaacaagctgctgggcaaagtcaccatcgcccagggcggcgtcttgcctaacatccaggccgtactgctccctaagaagacggagagtcaccacaaggcaaagggcaagtgaggctgacgtccggcccaagtgggcccagcccggcccgcgtctcgaaggggcacctgtgaactcaaaaggctcttttcagagccacccacgttttcaaataaaagagttgttaatgctggcca

SEQ ID NO: 253275 - DNA, 817 bp, Homo Sapiens
  misc_feature (24)..(24): n is a, c, g, or t
  misc_feature (29)..(29): n is a, c, g, or t
  misc_feature (37)..(37): n is a, c, g, or t
  misc_feature (77)..(77): n is a, c, g, or t
  misc_feature (163)..(217): n is a, c, g, or t
cccacaacatggatgtagaattgnttttnaaataaancaaatttgcggattgcagaatcaatcagtaatgtaggaantcagtaatgccatccatccacgttattccttagaaattggtaagtttggcaggcacttaggatcctggcatctctctgaaatgagnnnnnnnnnnnnnnnnnnnnnnnnnnnnnnnnnnnnnnnnnnnnnnnnnnnnnnngatcagcctcagaagacattttcttagtgccttttttccttctacctacaagcagtgaggttagctcttcctttgaaacggtaggggggctctgaaaagagcctttgggtttgatagcgtttccgggagctcagatacctgtcaaatcacttgcccttggccttgtggtgactctcggtcttcttaggcagaagcacggcctggatgttaggaaggacgccgccctgagcaatggtcacccggcctagcagtttgttgagctcctcgtcgttgcggatggccagctgcaagtggcgcgggatgatgcgagtcttcttgttgtcgcgagccgcgttgccggccagctccaggatctcggcggtcaggtactctaacaccgccgccaggtacaccggcgcgcctgccccaacccgctctgcgtagttgcctttacggagcaggcggtgcactcggcccaccgggaactggagaccagcgcgagaagagcgggatttcgctttggcgcgagctttgcctccttgcttaccacgtccagacattgcaatcagacaaaaatcaccaaaaccagcggcctaagctcacgagaaaacaaacaaaatc

SEQ ID NO: 253276 - DNA, 1704 bp, Homo Sapiens
  misc_feature (982)..(1030): n is a, c, g, or t
  misc_feature (1052)..(1232): n is a, c, g, or t
aggctggtaccggtccggaactcagggatcggcgggcgtctgttctagtgttcgagccgtcgtgcttcaccggtctacctcgctagcatgtcgggccgcggcaagactggcggcaaggcccgcgccaaggccaagtcgcgctcgtcgcgcgccggcctccagttcccagtgggccgtgtacaccggctgctgcggaagggccactacgccgagcgcgttggcgccggcgcgccagtgtacctggcggcagtgctggagtacctcaccgctgagatcctggagctggcgggcaatgcggcccgcgacaacaagaagacgcgaatcatcccccgccacctgcagctggccatccgcaacgacgaggagctcaacaagctgctgggcggcgtgacgatcgcccagggaggcgtcctgcccaacatccaggccgtgctgctgcccaagaagaccagcgccaccgcggggccgaaggcgccctcgggcggcaagaaggccacccacgcctcccacgagtactaagaaggcccgcgacgcggccggccgccaggcctccccatgccaccacaaaggcccttttaagggccaccaccgccctcatggaaagagctgagccgcttcagactgcggggcaagcgggccgcggctcccttcccctcccctcccctcgcccggcttcgccggccgggctcgagtccccgcccgcccccgctcccgtcccgcaccgcctggcgcgtcggcctcgggccctggcctggccgccgtccgccctccggtaggggtcgggccttccggatgcggcttgggcgctcttcggggacctccggggcgcggaagacccgagcctgccggggggaggccggcggcgccgcacctgcccgcctcggcggtcgtgactcagccgccccatcccgagtcgctaaaggggtggggggagggcgcaccaccttctggaagacttggccttccgctctgacccggggcnnnnnnnnnnnnnnnnnnnnnnnnnnnnnnnnnnnnnnnnnnnnnnnnnggccctcgacaagtgcgccctnnnnnnnnnnnnnnnnnnnnnnnnnnnnnnnnnnnnnnnnnnnnnnnnnnnnnnnnnnnnnnnnnnnnnnnnnnnnnnnnnnnnnnnnnnnnnnnnnnnnnnnnnnnnnnnnnnnnnnnnnnnnnnnnnnnnnnnnnnnnnnnnnnnnnnnnnnnnnnnnnnnnnnnnnnnnnnnnnnnnnacgggggaaggccgcggcgcgtcctgcgcccccagcgtggcacgcgccccccagcgcccagccccgggacgcccggcgggatagggagtagagggagtctaataagaacggcaccggcgagccggtgaccacgtcattccatcacgagagctacttagagcgcgcgcggccccctcgggcgacccgcgtgagcggcggctacggaggctcgggcgcgccggtgacgatgagacgagcgagcctatgggaaactgcgagccacctaagcggtcccgggcgggggccgaccgccgacggagggcggctatgagggaactctcaccgccgtgccgccacccgcggctgaggcggggcgaagcgggcgccgaatggcgggagagggcgcgccgccgcccgggccgggggactggcggagacggaggaactacggggtggcgccgccgaaggcgaagacagacgaacgggggggtga

SEQ ID NO: 253277 - DNA, 1161 bp, Homo Sapiens
  misc_feature (126)..(135): n is a, c, g, or t
  misc_feature (1008)..(1097): n is a, c, g, or t
tctcctcagaacaaagcgcggatcaggggcgcagttcaagcagcattggggccggtagcggcccctcttggcaggccccctaaaataggatgccttggagccgtgagttttcggctttggccaggnnnnnnnnnnccattcctttaataaagattattccattgtaaaactcccccaatgcctaaggttctagtcgtggaagggtaagctgcagaattcccagttcagaaagccaacggagggctcagtccagaccagggattaaccgacttgtgctggtatctaggtgcttggattgccgagttgagtttcctggaagggaaatggggcggcgtcggggggcccgacaggccgggctgccagtcggcttccgcgaaaacgactcttgctgtccacatagccagccgtgaagccaaactgcaggcctctgccctcccctaaatgtcctcctaggaggcagtcactcgggaggaagatgtgcctgttaccaagtgcttcgtcccggccccagcgcagacctatgaatgaagatggagggagagctgatgtgaaaggcctgggtcccggccgcagaaggggcgccagaccgaaatcggcgatcgcgtctctcccaccaaagcctcccggccagcggccgcgtctgaaagtcctgggctaagcaccacgccgggggggtaccagacacccccggctgcagctgccgagggcctcactcaccttcagggccgccggcctctcggcctggactgcccacctcggccctgcgtcagagcggaaggccaagtcttccagaaggtgctgcggcctccccgcagccccttagcgactcgggatggggcggctgagtcacgaacgccgaggcgggcaggtgcggcgccgccggcctccccccggcaggctcgggtcttccgcgccacggaggtccccgaagagcgcccaagccgcatccggaaggcccgaaccctaccggagggcggacggcggacagggcagggcccgaggccgacnnnnnnnnnnnnnnnnnnnnnnnnnnnnnnnnnnnnnnnnnnnnnnnnnnnnnnnnnnnnnnnnnnnnnnnnnnnnnnnnnnnnnnnnnncgcggcccgcttgccccgcagtctgaagcggctcagctctttccatgagggcggcctcgtccga

SEQ ID NO: 253278 - DNA, 1076 bp, Homo Sapiens
  misc_feature (670)..(854): n is a, c, g, or t
  misc_feature (909)..(918): n is a, c, g, or t
  misc_feature (950)..(1013): n is a, c, g, or t
ggggcggccgtaaagagtttgtagaggcagttcgggtgcggtacgttgcattccggtaccggacgccgagagcggtttgtctccgtctctggagttgtaggcgagaggtgatcatgtccggtcgcgggaaacagggcggcaaagtgcgagcaaaggccaaatcccgctcctcccgcgcgggcctgcagttcccggtgggccgagtgcacagactgctgcgcaaagggaactacgcggagcgagtgtgcgccggggcgccggtgtacctggcggcggtgttggagtaccttacggcggagatcctggagctggctggcaacgccgcgcgtgacaacaagaagaccaggataattccccgccacctgcagctcgccatccgcaacgacgaggagttaaacaagctgctgggcaaagtgaccatcgctcagggcggcgtcctgcccaacatccaggccgtgctgctgcccaagaagacggagagtcagaagacgaagagcaaatgaccctgacgccgccctcagggagctggctcccccagcaaaggcccttttcatggtcgtcccgcaatgcttttgaatgtgctggatgtcatggagggccggtgacatctagcggggaggtgggcggcgagggtcccggcgggagccaataaagttggtgaaaatcgttnnnnnnnnnnnnnnnnnnnnnnnnnnnnnnnnnnnnnnnnnnnnnnnnnnnnnnnnnnnnnnnnnnnnnnnnnnnnnnnnnnnnnnnnnnnnnnnnnnnnnnnnnnnnnnnnnnnnnnnnnnnnnnnnnnnnnnnnnnnnnnnnnnnnnnnnnnnnnnnnnnnnnnnnnnnnnnnnnnnnnnnnntttttttgtgggcccccccgccccaaaaaaatttttaaaaactctcttttggggnnnnnnnnnnggaagaaaagaatttgggacccactctttttnnnnnnnnnnnnnnnnnnnnnnnnnnnnnnnnnnnnnnnnnnnnnnnnnnnnnnnnnnnnnnnncccctctttcaaaaaaatagaaagggggtgtggaagggtttatgcgtccatcccaaaagggaa

SEQ ID NO: 253279 - DNA, 1591 bp, Homo Sapiens
  misc_feature (415)..(426): n is a, c, g, or t
  misc_feature (665)..(674): n is a, c, g, or t
  misc_feature (688)..(688): n is a, c, g, or t
  misc_feature (820)..(820): n is a, c, g, or t
ttatttccgcggggggttttcgcaatcccacacaggccccccctttttttgggggagaaaaagggggcctctttcccccaatagttcttgcgggccccaagaaaaaaacccctctttttataatggggaaatttttttgccagaacccacggtcttttttgttgtccgaaattttaaaagttggtgcccccagggcgggacccgggggggccccctttaaaattctcccgagtattattcgggagaggcttcttcgccccttttgagggcgttccccccctggtcttggaattaaagaggattcccccccggtttaaaattggagcccccctccccacggaaaattctcccccccttttgtcgggggaatttttggttttcccaagaaaaaacccggttttcccggggtttttgnnnnnnnnnnnngcggggggcccggcttttttttcgctatattttcggggtgggagaggaaaatttccccaagagcccccctttacggtctcaagtgaacccccaggggtttttttctcttagggggaaaaaccaggttaatgggtcccatggtttccccttttcccttaacgggggccccggcggcgcccaaaaaggaatgggttttagaaaagcttcttcgaggggccgagggcggcccgaccaagggnnnnnnnnnnccttctagggttcnacgtttggagatcataaatacttttaatatcagataaatccttaagaaattgccttctgtacttgatgaccacacgggagccttgctagagtcaagagaacttgtcactagtaattatgaagacacctttancggtgagcgttattaaaaccctactagaggttttgggtgggactcaagagcaaggggtggcccacctgtggacgaggggttccctgttgttaacacaacacgttgcccacctcgcaagtatgcagcccaatcagtccccagggtctcggttcccgttgcgcccttccccatggccactgcgctcattcatgagcatagggtgatcaggcctccgccctataaagaactgcaggaacagtgcggctcttttctcgagatggtaggtggctctgaaaagagcctttatgtccatcaaaggggccccgggggcggcgggcggcctcacttgcccttggccttatggtggctctccgtcttcttaggcagcaatacggcctggatgttgggcaggacaccaccctgcgcgatggtcacgcgacccagaagcttattgagctcctcgtcgttgcggatggccagctgcaggtggcgcgggatgatgcgcgtcttcttattgtcgcgagccgcgttgccagcaagctccaagatctcggcagtcaaatactccagcaccgcggccagatacaccggagcgccggcccccacgcgctccgaatagttgcccttgcggagcaaccggtgcacgcggcccacggggaactgcagccccgcgcgcgacgagcgcgacttagccttggcgcgcgccttgccaccctgcttaccacgaccggacatttccgagtcaaggaaaaaagacaacggcaaccgaaaagcgagactaaaaacaagccc

SEQ ID NO: 253280 - DNA, 1132 bp, Homo Sapiens
  misc_feature (1111)..(1111): n is a, c, g, or t
tctgcctggtaatgactccagaacaacaactgggaagaaacttgaagtcgacaatctggttaggggaagcggctgttggattttctcagatgcctttacacgctgatgggactggagggagcccacccttcagcacgagcacactgcatctctcctgtgagttggagacttctttcccaagatgtctttgtcccctgcgttccccactgtggcctagaccgtgggttttgcattgtgtttctagcaccgaggatctgagaaccagcggagggccgggccctgggacccctgctccagcccgaatgacggcatctgtttgccatgtacctggatgcgacgggcccctggggacaggcccttgccccatccatccgcttgaggcatggcaccgccctgcatccctaataccaaatctgactccaaaactgtggggtgtgacacacaagtgactgaacacttcctggggagctacaggggcacttaacccaccacagcgcagcctcatcaaaatgcagctggcaacttctcccccaggtgccttccccctgctgccggcctttgctccttcacttccaacatctctcaaaataaaaatccctcttcccgctctgagcgattcagctctgcccgcagcttgtacatgtctctcccctggcaaaacaagagctgggtagtttagccaaacggcaccccctcgagttcactgcagacccttcgttcaccgtgtcacacatagaggggttctgagtaagaacaaaacgttctgctgctcaagccagtctggcaagcactcagcccagcctcgaggtccttctggggagagtgtaagtggacagagtcctggttcagggggcaggagtgtcccaagggctggcccacctgctgtctgtctgctcctcctagcccttggtcagatggcagccagagtccctcaggacctggcagccttcgccccggcagaagtcttttgtccagggaggcaaaaagccagagattcttgcaacacgaatttcgaagcaaacaaacacaacacaacagatttcctgggaaagaagacgattgtttaagacacgggcaggggggggcttgggagggagctttccgatttttnagttgtttcgggtttttgccg

SEQ ID NO: 253281 - DNA, 629 bp, Homo Sapiens
  misc_feature (65)..(65): n is a, c, g, or t
  misc_feature (80)..(80): n is a, c, g, or t
  misc_feature (124)..(166): n is a, c, g, or t
aagccaacatactgccaggcattgaaagaaaaccagagaagtgtctataaccatcttaccctccnttaatgctgaagaancccactgtgtagtccccagcaaacaaacacatgtgagggagggnnnnnnnnnnnnnnnnnnnnnnnnnnnnnnnnnnnnnnnnnnngtcttgtatgctcaatcacaaagctaaggctatgggttagatccggcagcaaagcctcagcaaacacaagagccagtaattctaaaagcaagatgaaaggcagcaagggaggctgggaggtaatatttctcaaatgcctataagatgcaggcactgcattaaatattttatctctcagtctttcactgaagccttagagcatttttacaagaaaggtatgactgttccatttttcatatgtgaaaactgagtcagcaaaggaggaagttgccaacttacacaaatagtacccagagcctcaatgtgaacccaagcttgctcagacaaaatgcccatgatctccctgctgagaacccaactgtatttggcattcctcactcagggtgcctcacttaccaggcaattactcactacctaccttacctacttgggggcactgcttaaagcctgaagtaagcaaaac

SEQ ID NO: 253282 - DNA, 931 bp, Homo Sapiens
tctgtgcagtactactacggtttaaggtagcgaggctgggtggcgaattcggcacgagggtgtgaaccagcctcttcccagccagaggaggcagcccccacacctgtccctagactgtcggagtcagctaatcctcctgcccagagaccagacccagctcatccaggaggtccaaaaccccagaaaacagaggaggaggttttggagacagagggagaccaggaggtgtccttaggtaccccacaggaggtggtggaggccccggagaccccaggagagccaccactttctcctgggttctgaacacagcccaggtgggaacaatgctgcccctcatgatgaagtggcctgtgtggcttgagcgccccatagtccccagtcagagcagagtggtgtccccagatgacttcagaccccatagctgggcaagatgcgcttgttttggactctgcgctgagcagaaccagctcccccaactccagcagagcttgacctccgccctgtgccctttccctgctgctggctctctgctgcatccctgcccgtcttctgggagtgccgtctcacccaggcctgctcccacgagggggtcgttttgtagatcaactctcagcagatagttgcatcatctttgtcacctccacccccatcgtctgccctgttgggacctcgttcctgtatggggtttctgtgtctgtccccctagccccaccctctctgctccctgtgacttctgtcccagctggaatgtgaggaaggctgcctggaggaagtggccactttgattctgggggatgagtgggatagcatcttggcgaatgatgtttcctgtgggattaccagcagttcttggcagctggaaggtttggatgcaggaaggtgggatgcaagccccttgccaggctcagctgcaggcttcgccctttgtgtt

SEQ ID NO: 253283 - DNA, 1127 bp, Homo Sapiens
  misc_feature (9)..(9): n is a, c, g, or t
  misc_feature (42)..(44): n is a, c, g, or t
  misc_feature (47)..(47): n is a, c, g, or t
  misc_feature (49)..(49): n is a, c, g, or t
  misc_feature (55)..(55): n is a, c, g, or t
  misc_feature (110)..(110): n is a, c, g, or t
  misc_feature (112)..(112): n is a, c, g, or t
gccgcgganagggccctgattggaggccagaggggttgccgnnngangnggaggngaggggtcgcaggcgctgtggcgggccctgggggagagcttggccgcgctgcggngngggggcggggtgcagcgcgtgggagccgggccgcgggaaggggcgggccgcagcggcgcgcggtgagggcggactggggcgcggcgtgaaccccgcgggcggggagcgggtgtgcgcacgctaggtgtgcgcttcgccctgtaggtagagagaccctttggttagctttccacgccaagtggccgttccaggcaggcagtgtcgtcttggttcagccaaggtcacagagggagtgatagcttccgcgcaccctggctacggactctgggcatctttccactgccccgcttgcgccacctgttaggcaggatcgtttttcctctggggcaagatcaaaatccaggtcctgcaggaagaaactcctcttaaaaataattaaccctgatcaagatgacaacctcccaaaagcaccgagacttcgtggcagagcccatgggggagaagccagtggggagcctggctgggattggtgaagtcctgggcaagaagctggaggaaaggggttttgacaagggctatgttgtccttgggcagtttctggggctaaagacagatgaagacctcttccgggaatggctgacagacacttgtgggcggcaacgccaaagcagtcccggggactgcttccggatggccttcccagagggggtgcggaccgcctttctttggggatcgcctctcctgggggaaggctcctccaattccccccagcccctccatgcccagagtttttgcaaccccgaggtagggggactcccctccccccttggcgcctctaaagaaaaggaaaaaagaattgccttatttggccgcaacctcccccctcccggaccgtaacttccgcggggggccttttttggggaaaggtttttcctccccgtagaccacctttggcaagcttgttttttttgtggagatttcctccgcttcgttggggattgggcctcccccccgggcgcggttgtttcccctgttgcgccaggtttccccctggggtgggccaagttaacccact

SEQ ID NO: 253284 - DNA, 938 bp, Homo Sapiens
  misc_feature (773)..(773): n is a, c, g, or t
  misc_feature (883)..(883): n is a, c, g, or t
  misc_feature (911)..(911): n is a, c, g, or t
gggggacccggaagcggaagtggaagaaagttctagtggcttgaggtatccgcaggagcggccgggtggcgggaggaaccgttacgggaactgaagttgcggattaagcctgatcaagatgacaacctcccaaaagcaccgagacttcgtggcagagcccatgggggagaagccagtggggagcctggctgggattggtgaagtcctgggcaagaagctggaggaaaggggttttgacaaggcctatgttgtccttggccagtttctggtgctaaagaaagatgaagacctcttccgggaatggctgaaagacacttgtggcgccaacgccaagcagtcccgggactgcttcggatgccttcgagagtggtgcgacgccttcttgtgatgctctctgggaagctctcaatccccagccctcatccagagtttgcagccgagtagggactcctcccctgtcctctacgaaggaaaagattgctattgtcgtactcacctccgacgtactccggggtcttttgggagttttctcccctaaccatttcaacttttttttggattctcgctcttgcatgcctcccccgtcctttttcccttgccagttccctggtgacagttaccagctttcctgaatggattcccgggccccatccctcacccccaccctcactttcaatccggttgataccatttggctcctttttttggcagaacagtcactgtcccttggtaaagttttttagatcaataaaggccagtggcctttcaaaaanaaacaaaggcaagcccgattcccgccaaaattggtctataatccgcccacccaccaatggcgcccagtaccggtgcattgccatcgaccaccgcggggaaaagagctganccgaccgtgtgccacacaagctataatntctcttttttcggcccgcgcccccctc

SEQ ID NO: 253285 - DNA, 950 bp, Homo Sapiens
  misc_feature (802)..(802): n is a, c, g, or t
  misc_feature (829)..(829): n is a, c, g, or t
  misc_feature (834)..(834): n is a, c, g, or t
  misc_feature (842)..(842): n is a, c, g, or t
  misc_feature (902)..(902): n is a, c, g, or t
gggagagaaaggaagtcctctccctggaggcctatctccctcagaacggcgcgagaagcgagaccttagaacgcagcgcttcccgcgaaggaccggaaaggagcgcctactaaggacgccgtcgaggtccggggcgcctcaactctatagctctaactggctagaagtgcccaacgtggaatgtttcttttttaaaggcggctcttgaagcgacccggaagcggaagtggaagaaagttctagtggcttgagattaagcctgatcaagatgacaacctcccaaaagcaccgagacttcgtggcagagcccatgggggagaagccagtggggagcctggctgggattggtgaagtcctgggcaagaagctggaggaaaggggttttgacaaggcctatgttgtccttggccagtttctggtgctaaagaaagatgaagacctcttccgggaatggctgaaagacacttgtggcgccaacgccaagcagtcccgggactgcttcggatgccttcgagagtggtgcgacgccttcttgtgatgctctctgggaagctctcaatccccagccctcatccagagtttgcagccgagtagggactcctcccctgtcctctacgaaggaaaagattgctattgtcgtactcacctccgacgtactccgggggtcttttgggagttttctcccctaaccatttcaacttttttttggattctcgctcttgcatggcctcccccgtcctttttcccttgccagttcccctggtggacagttaccaacctttcctgaaatggattccccggnccccattccctcaccccccaccctcanttttnaatcccgnttggatacccattttgggctccttttttttgggcaaaaccaggtcacctggccccttggnaaaaggttttttttagaaatcaattaaaaagtcccaggtggccctttt

SEQ ID NO: 253286 - DNA, 377 bp, Homo Sapiens
  misc_feature (168)..(168): n is a, c, g, or t
  misc_feature (287)..(287): n is a, c, g, or t
ggaaagttctagtggcttgaggtatccgcagagcgcgcagggtgggggaggaaccgttacgggaactgaagttgcggattaagcctgatcaagatgacaacctcccaaaagcaccgagacttcgtggcagagccaatgggggagaagccagtggggagcctggctggngattggtgaagtcctggggcaagaagctggaggaaaggggttttgacaaggcctatgttgtccttggccagtttctggtggctaaagaaagatgaagacctctttccgggaatggctgnaaagacacttgtggccgcccaacgcaaaggcagttcccggaattttttccggaatgcctttcgagagtggttgcgacgccttctttgttg

SEQ ID NO: 253287 - DNA, 366 bp, Homo Sapiens
gggctgagacggggacagggggagcgaggccagtgagtggtaggccagggccccagggagctcctggacccagtgtcaccttggccgcccccatcactccgaaccttgtcaggttggtgttggctcgatgctgacaacaggtgtgtgaggtgtggatgtggatgaagcccggggtctcgagtggccgttctggggccagagcacagggctgaaagcgggtggctcgtcccacggaggcatacccacatgtgcccggcggggttgtgggcttcgctcaggcctgcctcttctcgccgtttcaaacaggctgctttgggattcaggttccgctctcgcacttgctgctccaagttcaggatgaccgag

SEQ ID NO: 253288 - DNA, 1128 bp, Homo Sapiens
  misc_feature (1027)..(1027): n is a, c, g, or t
  misc_feature (1030)..(1030): n is a, c, g, or t
  misc_feature (1034)..(1034): n is a, c, g, or t
  misc_feature (1069)..(1069): n is a, c, g, or t
  misc_feature (1081)..(1081): n is a, c, g, or t
ttacaacaataaaccatgcgcctacaaaaaagccacacaaaccgtgtggcctgggtgggcggcacgcaggcctggttggaggcagccaccccgaggacggcctcgcaggcagcaccagcctcatgcacaaccacgcggccctccccagccagccaggcaccctccctgacctgtctcggcctcccgactcctacagtgggctagggcgagcaggtgccacggcggccgccagcgagatcaagcgggaggagaaggaggacgaggagaacacgtcagcggctgaccactcggaggaggagaagaaggagctgaaggccccccgggcccggaccagcagtacggacgaggtgctgtccctggaggagaaagacctgagggaccgggagaggcgcatggccaataacgcccgggagcgggtgcgcgtgcgggatattaacgaggccttccgggagctggggcgcatgtgccaactgcacctcaacaccgagaagccccagaccaaactgctcatcctgcaccaggctgtctcggtcatcctgaacttggagcagcaagtgcgagagcggaacctgaatcccaaagcagcctgtttgaaacggcgagaagaggaaaaggtgtcaggtgtggttggagacccccagatggtgctttcagctccccacccaggcctgagcgaagcccacaaccccgccgggcacatgtgaaaggtatgcctccgtgggacgagccacccgctttcagccctgtgctctggccccagaacggccactcgagaccccgggcttcatccacatccacacctcacacacctgttgtcagcatcgagccaacaccaacctgacaaggttcggagtgatgggggcggccaaggtgacactgggtccaggagctccctggggccctggcctaccactcactggcctcgatccccctgtccccgaatctcaaccaccgtgtcactctgtgaacttgtcccatggatcctgaaactgcatctgggccctgttgcctgggctgacaggagcanttntttnttttccagtaaacaaaacctgaaagcaagcaacanaacatacacttntgtcagagagaatgccttaactatattcttctagccccgcttggcct

SEQ ID NO: 253289 - DNA, 984 bp, Homo Sapiens
  misc_feature (851)..(851): n is a, c, g, or t
  misc_feature (955)..(955): n is a, c, g, or t
tcaccaagctgccccctgcggagaggagatactttaagcgggtggtcctggcagcccggaccaaacggggacacctggtactgaagagtttcaaggacacgccgctggaaggcctggagcagctgctgccggagctgaaggtgcgcacgcccaccctgcagcgcgccctgctcaacctcatgctggtagtctccggcgtggcgatcttcgtcaacgtgggcatggtggtgctaaccgacctcaaggtggccacctccctgctgctgctgctcttcgccatcttcatgggcctgcgggcctccaagatgttcgggcagcggcgcagcgcgcaggcgttggagctggcgcacatgctgtactatcgcagtacgtccaacaactcggagctgctcagcgccctggccctgcgcgcgcaggacgagcacaccaaggaggcgctgctggctcacagcttcctggcccggcggccagggggcactcaaggctcgcccgaagagacctccaggtggctcaggtcggaggtggagaactggctcctagccaagtcaggctgtgaggtgaccttcaacggaactcgggccctggcgcatctgcaggccctgacccccagcatgggattgtacccacccccgggtttccccaaactagacccagtggctccgatcacttccgagcccccgcaagccacgcccagcagtaacatctcctgagtagaacctacctccctgcccagtcagcaggctaggaactaagccccggctccttcacgacaggctgtcaattacggttattatacttttcactccaacttccaataacttgacaggtgattatttttgctgcactgtgtntttaagcaaagcagccaatcaaagcagctagcagttgttaagtctttccccgccctttcgatggaacaggccaatcaaagcgatttaggtctggtttctggttncctttatttagttcccaccttcaccataa

SEQ ID NO: 253290 - DNA, 740 bp, Homo Sapiens; identical to SEQ ID NO: 81863
  misc_feature (513)..(547): n is a, c, g, or t
  misc_feature (550)..(557): n is a, c, g, or t
  misc_feature (658)..(658): n is a, c, g, or t

SEQ ID NO: 253291 - DNA, 1008 bp, Homo Sapiens; identical to SEQ ID NO: 15279
  misc_feature (986)..(986): n is a, c, g, or t

SEQ ID NO: 253292 - DNA, 805 bp, Homo Sapiens; identical to SEQ ID NO: 170553

SEQ ID NO: 253293 - DNA, 890 bp, Homo Sapiens; identical to SEQ ID NO: 15280
  misc_feature (564)..(581): n is a, c, g, or t
  misc_feature (625)..(641): n is a, c, g, or t

SEQ ID NO: 253294 - DNA, 618 bp, Homo Sapiens
gaaaaagaggaaagtattatactaccgacaagttcaaacaatcctagaaaagcacatgtccatctgagtgcaaaatgggatcctagactcaaacattataaatgatctgttctggctaattcagtatattataaactaatctctcttggcttcttggaatctggtcacctcatttccctcgcataagtacttgaaatgttctacctaaagtacttcttaattaaactataaagatatttgtgagacaggatactcctaagacatctttattatttaaatctctgggaatcatcacttccttcatattaatcttcctaaaacccatctttacacattatctccctgcttaaaatatactttccactaaatactttaaatttagcatttattccatactccacccctttcggatctttccaacctcatcactcctgtatttctactctaaccaggcaggtttactcaatgtcctcccactgtcttggaagacctctgtatctttcatcataggggttcaagaacctaaaatgtcctctctccctttattttaactcataatcatatccatttttcaaagcccagccaattcattactctagtatataattttttgttcct

SEQ ID NO: 253295 - DNA, 367 bp, Homo Sapiens
aggaacaaaaaattatatactagagtaatgaattggctgggctttgaaaaatggatatgattatgagtttaaagggagagaggacattttaggttcttgaacccctatgatgaaagatacagaggtaatacaggagtgatgaggttggaaagatccgaaaggggtggagtatggaataaatgctaaatttaaagtatttagtggaaagtatattttaagcagggagataatgtgtaaagatgggttttaggaagattaatatgaaggaagtgatgattcccagagatttaaataataaagatgtcttaggagtatcctgtctcactatctttatagtttaattaagaagtactttaggtagcatttc

SEQ ID NO: 253296 - DNA, 975 bp, Homo Sapiens
ctccctcaatcagtcaggacttccccaaccaccacatccattccacctttccacttagacactactgagtcctgcatctccccagactctttgtgtcgggagaatcaaactcaagttccagggacacaaatttcaggtcccccaaacaacctgcgtagcaagacatggaccccatgtctcccaaacttcctgtgtcagagatgtgaaccttctattccccaaagctcctccttcacaggaccccaactcctccatgcctgccacttccccttatctggggcaccccagttccctctccagcccctgtgtactttcaccaatcccccgaccctcctcatcacacacaacttcctcctccctaccagggcaccgaagtgttccctatgctgggctccgtgctgagagaccccagcttcttctccaaccctcaggacttcaatccccagcatttcctgaatgacaaggggcagtttaagaagagtgatgcttttgtgcccttttccatcggaaagcggaactgtttcggagaaggcctggccagaatggagctctttctcttcttcaccaccgtcatgcagaacttccgcctcaagtcctcccagtcacctaaggacattgacgtgtcccccaaacacgtgggctttgccacgatcccacgaaactacaccatgagcttcctgccccgctgagcgagggctgtgccggtgcaggtctggtgggcggggccagggaaaggcggggtcagggcggggttcgcggaagaggcgggtataagaatggggggaagatgcgggaaaggaaggggcgtggtggctagagggaagagaagaaacagaaggggctcagttcaccttgataaggtgcttccgagctgggatgagaggaaggaaacccttacattatgctatgaagagtagtaataatagcagctcttatttgctgaaagagcacaaatacataacttgaggtcgacgg

SEQ ID NO: 253297 - DNA, 1187 bp, Homo Sapiens
  misc_feature (42)..(42): n is a, c, g, or t
  misc_feature (225)..(225): n is a, c, g, or t
  misc_feature (247)..(247): n is a, c, g, or t
  misc_feature (261)..(261): n is a, c, g, or t
  misc_feature (296)..(296): n is a, c, g, or t
  misc_feature (329)..(329): n is a, c, g, or t
tagcaaagccctagccttgggaggctgtccaactctgcggcncaatagagctctcacaaggcacatggcatccccttaccgggaataccaagagggcgcaatatctttttttaaagaggcttaaacccccaagaaatgatgtctcctatcactgagccttacatgatgagcctacgtcttcttctctagacacgcctttctttcgcatcttgccaattcttatgncctctcaaagccagtcttgccntcctttcctggccngccaccagacttgcaccgcacagccttcgtcagcngggcacgaagctcatggtgtagtttcgtggatncgttcaaagcccacgtgtttggggacacgtcaatgtccttagctgactggcaggacttgaggcggaagttcttcatgacggtcgtgaagaagagaaagagctccattctggccaggccttctccgaaacagttccgctttccgatggaaaagcgcacaaaagcatcactcttcttaaactgccccttctcattcaggaagtgctggggattgaagtcctgggggttggagaagaaactggggtctctcagcacagagcccagcatagggtacacttcggtgccctggtagggaggaggaagttgtgtgtgatgagcagggtcgggggattggtgaaagtacacaggggctggagggggaactagtgtgccccaggtaaggggaagtggcaggcatggaggagttggggtcctctgatggaggagctttgggggatagaaggttcacatctctgaaacaggaagtttgggagacatggggtccatgtccttctaggcaggagtttgggggacctgagatttctgtccctatgacaaaaggccgaatggaaagggggcttctgtttcttaagataggaagtttgggaacatgtgtttgattctcctgacacaaagagtctggagagatgcaggactttgactgattgagggagtgggacagggtctagaaagcttctaatgtgggtgggatgctggggacacagagaggggctggaagtccccgtagtctggggggtgggggcggatagcaccttagggaggaagaaatcccgaaacttggtgtcctgactctgcgggccaaactcatggggatcacgtctccaaatctttggatctcgtggatcactgcctccatgtag

SEQ ID NO: 253298 - DNA, 1253 bp, Homo Sapiens
  misc_feature (1054)..(1054): n is a, c, g, or t
  misc_feature (1231)..(1231): n is a, c, g, or t
  misc_feature (1237)..(1237): n is a, c, g, or t
atctatcatcccactaccaccatgctggcctcagggatgcttttggtggccttgctggtctgcctgactgtgatggtcttgatgtctgtttggcagcagaggaagagcaaggggaagctgcctccgggacccaccccattgcccttcattggaaactacctgcagctgaacacagagcagatgtacaactccctcatgaagatcagtgagcgctatggccccgtgttcaccattcacttggggccccggcgggtcgtggtgctgtgtggacatgatgccgtcagggaggctctggtggaccaggctgaggagttcagcgggcgaggcgagcaagccaccttcgactgggtcttcaaaggctatggcgtggtattcagcaacggggagcgcgccaagcagctccggcgcttctccatcgccaccctgcgggacttcggggtgggcaagcgaggcatcgaggagcgcatccaggaggaggcgggcttcctcatcgacgccctccggggcactggcggcgccaatatcgatcccaccttcttcctgagccgcacagtctccaatgtcatcagctccattgtctttggggaccgctttgactataaggacaaagagttcctgtcactgttgcgcatgatgctaggaatcttccagttcacgtcaacctccacggggcagctctatgagatgttctcttcggtgatgaaacacctgccaggaccacagcaacaggcctttcagttgctgcaagggctggaggacttcatagccaagaaggtggagcacaaccagcgcacgctggatcccaattccccacgggactttcattgactcctttctcatccgcatgcaggaggaggagaagaaccccaacacggagttctacttgaaaaacctggtgatgaccacgttgaacctcttcattgggggcaccgagaccgtcagcaccaccctgcgctatggcttcttgctgctcatgaagcacccagaggtgggaggccaaggtccatgaggagatttgacagagtgatcggcaagaaccggcagcccaagtttngagggaccgggccaagatgccctacatgggaggcagtgatccacgagatccaaagattttggagacgttgatccccatgagtttgggcccgcagagttcaaaaagggacaccaattttcgggatttcttcctcccttaagggcaccgaagttttaccctatgctggggctcttgtgnttgagnagaaccccagttttct

SEQ ID NO: 253299 - DNA, 500 bp, Homo Sapiens
  misc_feature (391)..(391): n is a, c, g, or t
  misc_feature (419)..(419): n is a, c, g, or t
  misc_feature (447)..(447): n is a, c, g, or t
gagctgctattattactactcttcatagcataatgtaagggtttccttcctctcatcccagctcggaagcaccttatcaaggtgaactgagccccttctgtttcttctcttccctctagccaccacgccccttcctttcccgcatcttccccccattcttatacccgcctcttccgcgaaccccgccctgaccccgcctttccctgggccccgcccaccagacctgcaccggcacagccctcgctcagcgggggcagggaagctcatgggtgtagtttcgtggggatcgtgggcaaagcccacggtgtttgggggggacacggtcaatggtccttagggtgactgggggagggactttgagggcgggaagttcttggcatgacgggtgggntgaaggaaggaggaaaggagctccattntgggccaggggctttctccggaaacagntccgctttccgaatgggaaaagggggcacaaaagcatcactctttcttaaaaa

SEQ ID NO: 253300 - DNA, 355 bp, Homo Sapiens
gttaagagaagggagtgtgtcctgaagaagcccttcttctgatgttgtgacagagctgcagacccctgccttgagtctcatctcagcaatgctgccaccctcttgtctttcagagttgttagtttactccattctttgtgacacgagtcaagtggctcacaacctcctcagggcaccagaggactcactcactggttgctgtgatgatatccagtgtccctctgcccccttccatccccaaccacatttgactgtagcattgcatctgtgtcctgttgtcatttatgttaaccttcaggtattacttgctgcatatcttgacatatcttgagattctgcatgtcttgtgaggggg

SEQ ID NO: 253301 - DNA, 1133 bp, Homo Sapiens
  misc_feature (4)..(4): n is a, c, g, or t
  misc_feature (7)..(7): n is a, c, g, or t
  misc_feature (17)..(18): n is a, c, g, or t
  misc_feature (20)..(20): n is a, c, g, or t
  misc_feature (27)..(27): n is a, c, g, or t
  misc_feature (29)..(29): n is a, c, g, or t
  misc_feature (36)..(36): n is a, c, g, or t
  misc_feature (41)..(41): n is a, c, g, or t
  misc_feature (48)..(48): n is a, c, g, or t
  misc_feature (58)..(58): n is a, c, g, or t
  misc_feature (63)..(63): n is a, c, g, or t
  misc_feature (83)..(83): n is a, c, g, or t
  misc_feature (183)..(183): n is a, c, g, or t
agtnaanaatccagagnngnggaggancnccatgtnggatntgagganaggagtggcnggagngcagatggtcccatgtcagnacctcctaggcatcatgaagattgctatcactcagaagcaccttttcccccaggtttgaaggctggcatcccaaggtaggggcagctggcacagcggaangcatcgccccaggtagcagttcccacaagctgacttgggttgggagctcatctgttcccttgacttctctttttccagttcttcggcaaaggccacaggtgcagttcttacaggccttcctctttttccccttccccacaagaagcagcccgcagggaagctggatctggcttcttcaaatcttctggatccagcagctcatctgagtcaatgagatccatgctgtcgtcctccatatcgttggctgagagggtccacagcttggcagcagcagggtccacagcaggtttcactgaaggagaagacttcttggtgatggaaagcttaagctgcctagaagaacccacttcaaagtttggttttttgcctgtgatctgaacaaacagcaggttgtcactttcatgaccaaggtgttctcgaacagactgtacttcctcaggggttaggggctcccgctgcagctctttcacttccacaagaccagaaagagtcagggctgaacacagcttagatgctgtcttcactttgctattgttatctacagctgtctctactggctccttcagaaaaagacatccaccaggccgaaggatccgggcgatttcagccaaaatctcagcactgtgcagagtggtgcttcctgggactaaacctgacaaaataatgtcaaagctggattctttgtgggcagattgcaacagctgcttgatgttttccacagacacgcggccctcattgccggttaacgcttgaagcttatccaccagacctttcagagcctccactggggatgacttatcccagaccactgccacaaactggccagcagagatcccaaaatctgccattcttgcagtgcagtactgacagacctaaaaactgctggccaaaagggaatcaagactgccgcctgggctcgctcccggcttctctccagccgtcgactcccc

SEQ ID NO: 253302 - DNA, 1336 bp, Homo Sapiens
  misc_feature (93)..(93): n is a, c, g, or t
aagttaaagcttccctccccaaagaagtttttccctccaggaaaacccttttgggaccctgttggtcccaagctgtggaccttttaagccaanggataaggaggggcgacagcatggatctccatgactcagatgagctgctggatccagaagatttgaagaagccagatccagcttccctgcgggctgcttcttgtggggaagggaaaaagaggaaggcctgtaagaactgcacctgtggccttgccgaagaactggaaaaagagaagtcaagggaacagatgagctcccaacccaagtcagcttgtggaaactgctacctgggcgatgccttccgctgtgccagctgcccctaccttgggatgccagccttcaaacctggggaaaaggtgcttctgagtgatagcaatcttcatgatgcctaggaggttcctgacatgggacccatctgctcctccagccaactcctgtccctcacatcccaccatggtggctcctcccacctcctctggatttgttcactctgagatctgtttgcagagtgggtgcttagcagacagagtgaagctggctggggggcacagtggtgtgtagtgctgctgtgtatcaaaagaccaaggtattatgggacctggtttcagaatgggatgggtttcttcacctcatgttaagagaagggagtgtgtcctgaagaagcccttcttctgatgttaaaatgctgaccagaacgctcttgagcccaggcatcgttgagcattaacactctgtgacagagctgcagacccctgccttgagtctcatctcagcaatgctgccaccctcttgtctttcagagttgttagtttactccattctttgtgacacgagtcaagtggctcacaacctcctcagggcaccagaggactcactcactggttgctgtgatgatatccagtgtccctctgcccccttccatccccaaccacatttgactgtagcattgcatctgtgtcctgttgtcatttatgttaaccttcaggtattaaacttgctgcatatcttgacatatcttgagattctgcatgtcttgtaaagagaggggatgtgcatttgtgtgtgatgttggatagtcatccacgctcagtttggaccattggaggaacttagtgtcacgcacaaatggggctattcctacgcttagaatagggcttgtctgcccactttagaagagtccaggttggtgagcatttagagggaagcagggcagaactctgaacgacaatacgtctctctgagcagagacccctttgttcttgttatccacccatatggacttggaatcaatcttgccaaatat

SEQ ID NO: 253303 - DNA, 468 bp, Homo Sapiens
  misc_feature (348)..(348): n is a, c, g, or t
  misc_feature (367)..(367): n is a, c, g, or t
  misc_feature (383)..(383): n is a, c, g, or t
  misc_feature (423)..(423): n is a, c, g, or t
  misc_feature (434)..(434): n is a, c, g, or t
  misc_feature (443)..(443): n is a, c, g, or t
  misc_feature (451)..(451): n is a, c, g, or t
ttaattatttgcagagatggtctccctgtgttgcccagcctggaaaatgtatgttctaaaaatagtacagcaccgcgatgtcttcagcatgaagccactggaggcagcatggcaggctccagtcaccccagcactcaccagttcttacaggccttcctctttttcccttccccacaagaagcagcccgcagaaagctggatctggcttcttcaaatcttctggatccagcagctcatctgagtcaatgagatcctggagagtgttcaaagcaatgagtgatacagtcgtggtctctgctaatgaaaagctaaagtgactgcaggcttcgagagggaaacttgggagtncagggggtaaagaagggtntcccacccttgtcctncttttgggttgatccatcatgtttcaacctggaccacatnctcaagagggnccaacggtnaaggtttnaaacttacattccacag

SEQ ID NO: 253304 - DNA, 368 bp, Homo Sapiens
cacgagagataacattcagggattccacatgaccacctgcaaataatgagaataaagatatgaacaaaatagatgtggttcccgcccttctgaaggttaacacctatctagttagggagacagacattaacaatcacacatatattattaaaactgagataagtgctatgatgaaaaaggcgcgggcagaagagcacagtggtggaaaatgccagtaaggagagtcaagctttatacttgggaacaaaacacaaattttccattttggaaaaaaagcctgagtcgaagtgtgctgactgggtaaattaaggagaggaactctggaacctgggtgcctcagggaaatgtggtggggaccgggcatgagg

SEQ ID NO: 253305 - DNA, 2188 bp, Homo Sapiens
  misc_feature (1806)..(1819): n is a, c, g, or t
tctgctgctgctgcaccacctctccgagctcttctgcccctgcatccccatgttcgacctggaaggctcgctcgacgaaactggactcgggccttctgttgggttcgacactctccgaggaattctgatatcccagggaaaggaggcggctttccggaaagtagtacaagcaactatggtacgcgatcgtcagcatggccccgtcgtggagctgaaccgcatccaggtcaaacgatcaaggagcaaaggcgggctggccggccccgacggcaccaagtctgtctttgggcagatgtgtgctaagatgagctcgtttggtcccgacagcctcctccttcctcaccgtgtctggaaagtcaagtttgtgggtgaatctgtggatgactgtgggggcggctacagcgagtccatagctgagatctgtgaggagctgcagaacggactcacgcccctgctgatcgtgacacccaacgggagggatgagtctggggccaaccgagactgctacctgctcagcccggccgccagagcacccgtgcacagcagcatgttccgcttcctgggggtgttgctgggcattgccatccgaaacgggagtcccctgagcctcaaccttgccgagcctgtctggaagcagctggctgggatgagcctcaccatcgcggacctcagtgagggtggataaggattttattcctggaactcaggtacatccgaagacaatgaagccacctcagaggagtttgaagccatgagcctgcccttcacagtgccaagtgccagtggccaggacattcagttgagctccaagcacacacacatcaccctggacaaccgcgcggagtacgtgcggctggcgataaactatagactccatgaatttgatgagcaggtggctgctgttcgggaaggaatggcccgcgttgtgcctgttcccctcctctctctgttcaccggctacgaactggagacgatggtgtgtggcagccctgacatcccgctgcaccttctcaagtcggtggccacctataaaggcatcgagccttccgcatcgctgatccagtggttctgggaggtgatggagtccttctccaacacagagcgctctcttttccttcgcttcgtctggggccggacgaggctgcccaggaccatcgccgacttccggggccgagacttcgtcatccaggtgttggataaatacaaccctccagaccacttcctccctgagtcctacacctgtttcttcttgctgaagctgcccaggtattcctgcaagcaggtgctggaggagaagctcaagtacgccatccacttctgcaagtccatagacacagatgactacgctcgcatcgcacttacaggagagccagccgccgacgacagcagcgacgattcagataacgaggatgtcgactcctttgcttcggactctacacaagattatttaacaggacactaagatggggaaacgtcctcgtgagatgagagcctgagccaggcagcagagcactcgctgctgtgtagactgtaggctgcctggtgtgtctgatgagaagcgtccgtcctcgagccaggcgggaggagggagtggagagactgactggccgtgatgggaatgacagtgagaaggtccgcctgtgcgcgtggaacactgtggacgctcgacttccaagggtcttctcacccgtaatgctgcattacatgtaggactgtgtttactaaagtgtgtaaatgtttatataaataccaaattgcagcatccccaaaatgaataaagcctttttacttgtgggtgcaatcgannnnnnnnnnnnnnctcctttctttcaagtgtcgtgagtcgtcttgattgtatattggaaataactgtgtaacaaatcgtattataaatatttcaattaattttactctgaatttgtttattaaaagacttttgaacatgaaatgattagtattacttgaatgcatccagaggatatttaaaccaaaatgaaaaaccagaaggccatttggtgtcccctctcccaggtgtccccttgtagcatatgcattatgtcatctgaattgaggcctttctgtgaacagcatcataacttctatcatggaaagtgtactatatataatgtttgtgtcatgtatatgcctaaattttaattatctataaataaaacatctgacataatta

SEQ ID NO: 253306 - DNA, 627 bp, Homo Sapiens
  misc_feature (73)..(73): n is a, c, g, or t
aaactatctgtacccctcacggactggaagctcctagaaggcagggattgtatcataatgactgtttcatctntaagggcacatagtctggcagatggtatatagtcaataagtatttctgttagactaattggcacactcactgccccaccattaatgaaacaagctttaattggccattatcccagatcaggcagatatgcccaacttcaaatatctaatggtctctacctaaacactgggcatctttacgggaggcagcagaaaataatgctcaatttgtgagttttgagtctttcttttctgattcagattctgctactaactagcggtacctctggcaagtcactttaccttagtagatttcatgtcagagattaaagtggggaattggactaaatggtctccaagaacctagctaggtccagctctaaaagtgattgggcttgaattaataagggtattactgatatagcaagtccttgtcaacaccagagggagctacattcatatcatcactggggtggttcagaagatttcagggaaaagcagttaaattgaaaacttactttccagaatgagagaaattctatagcaaggtaagagctccacactgctcatacggcc

SEQ ID NO: 253307 - DNA, 651 bp, Homo Sapiens
gaagaaccagaccaaacatcctttccaaacctaaaagtttatgattctaaaacccagctcttcagagtcctagctctttatcttctatacaatcttgggcaaccaatatcattctccaagaatttaggatatgatatttctgccagcaatagatacataatcttagcaatccaacactccatttagattccaaatcctctcacaaccttgcccaaggtaatttcttatgtgaaactatattttgcaaagcagaacaggacattttgagtctcattctttgaaaataggataatcaatcaggaaagacagacagagatgaagtgaccccaatgatcttgctaataagaccagaagcaagagtcttgatttaaaaatctccaaagactgccatttctataaccaataatgcccaaaaatgtgcattggaagaatatgagctaacagtagacaaaaaactgagaacaagttcaagcagagaggctgaaaccatcatccccaaacaaaatagtaaggtgagttagattttttttcagctatcaagaaagcccaaaaatgaaccaagaagatgaaacactgccaaaaagaccttttccttcacattctttgtcctatgaagataaacattgtcaacatttaaaaatagcattgtct

SEQ ID NO: 253308 - DNA, 980 bp, Homo Sapiens
  misc_feature (493)..(493): n is a, c, g, or t
cagcaacagagagcaggacgtgagacttctacctgctcactcagaatcatttctgcaccaaccatggccacgtttgtggagctcagtaccaaagccaagatgcccattgtgggcctgggcacttggaagtctcctcttggcaaagtgaaagaagcagtgaaggtggccattgatgcaggatatcggcacattgactgtgcctatgtctatcagaatgaacatgaagtgggggaagccatccaagagaagatccaagagaaggctgtgaagcgggaggacctgttcatcgtcagcaagttgtggcccactttctttgagagaccccttgtgaggaaagcctttgagaagaccctcaaggacctgaagctgagctatctggacgtctatcttattcactggccacaggggattcaagtctggggatgacctttttccccaaagaatgataaaggtaatgccatcggtgggaaaagcaacgttcttggatgcctgngaggccatggaggagctggtggatgaggggctggtgaaagcccttggggtctccaatttcagccacttccagatcgagaagctcttgaacaaacctggactgaaatataaccagtgactaaccaggttgagtgtcacccatacctcacgcaggagaaactgatccagtactgccactccaagggcatcaccgttacggcctacagccccctgggctctccggatagaccttgggccaagccagaagacccttccctgctggaggatcccaagattaaggagattgctgcaaagcactccccaagtctgtgacaccagcacgcattgttgagaacattcaggtctttgactttaaattgagtgatgaggagatggcaaccatactcagcttcaacagctggagggcctgtaacgtgttgcaatcctctcatttggaagactatcccttcgatgcagaatattgaggttgtctcctggtgagattatac

SEQ ID NO: 253309 - DNA, 1107 bp, Homo Sapiens
ctatcagaatgaacatgaagtgggggaagccatccaagagaagatccaagagaaggctgtgaagcgggaggacctgttcatcgtcagcaagttgtggcccactttctttgagagaccccttgtgaggaaagcctttgagaagaccctcaaggacctgaagctgagctatctggacgtctatcttattcactggccacagggattcaagtctggggatgaccttttccccaaagatgataaaggtaatgccatcggtggaaaagcaacgttcttggatgcctgggaggccatggaggagctggtggatgaggggctggtgaaagcccttggggtctccaatttcagccacttccagatcgagaagctcttgaacaaacctggactgaaatataaaccagtgactaaccaggttgagtgtcacccatacctcacacaggagaaactgatccagtactgccactccaagggcatcaccgttacggcctacagccccctgagctctccggatagaccttgggccaagccagaagacccttccctgctggaggatcccaagattaaggagattgctgcaaagcacaaaaaaaccgcagcccaggttctgatccgtttccatatccagaagaatgtgattgtcatccccaagtctgtgacaccagcacgcattgttgagaacattcaggtctttgactttaaattgagtgatgaggagatggcaaccatactcagcttcaacagaaactggagggcctgtaacgtgttgcaatcctctcatttggaagactatcccttcgatgcagaatattgaggttgaatctcctggtgagattatacaggagattctctttcttcgctgaagtgtgactacctccactcatgtcccattttagccaagcttatttaagatcacagtgaacttagtcctgttatagacgagaatcgaggtgctgttttagacatttatttctgtatgttcaactaggatcagaatatcacagaaaagcatggcttgaataaggaaatgacaattttttccacttatctgatcagaacaaatgtttattaagcatcagaaactctgccaacactgaggatgtaaagatcaat

SEQ ID NO: 253310 - DNA, 737 bp, Homo Sapiens
gggagcaagtaatctcactcctgccagatcccaaacacatcataaggtcggtctggtcacctccaagtctacaaatccagcgacgtaacctgtgcacatctgcagggcttccagctcatcggcgttgaggtgcacgtaagaatgaaggatggtccagtcctgtcggtgccacaccagggcaggcagagtccagcatcagtgctgtgtgtaagataacagtttccattccaaactgagatacaatgtctttgatggagccagccaggtaggcctttcgggcatcaaaatccttactaaggaaagagccgcttcactctggcatatcccctttgtgagaactgcaatataactctccatcattttaactgggctcccatgtttcaggtacattctacacaatatcctagtgaaggcagcatacttctctgggttaaaatctttggcggtcaggacaatagaaaaatgagtcacctttttcaaaatggaagaatctggaacttcaattgttgtgatataaaaccatgttcttctgtactgaccaaagacaaagggatggagaagtttgttttcatctgtaaggcagcattttctcagcagcaggttccttaatgtggctgtcgtggaaggataacaccacacccacagaacttctccatttgtgtccttttctacggtggaaagatggtcacgatcagcccgactccaagcatcagctgagtgtccgccacctcggccgc

SEQ ID NO: 253311 - DNA, 315 bp, Homo Sapiens
ccccgggctgtacgaatttggcacgagggcggcggaagatggctgcggccgaggtggcggacactcagctgatgcttggagtcgggctgatcgctctcaccaaggaccgaggggccgtgggaaacgtctgacgcccacttcacggaggagcaaatggaggcccaggccgtcattgtgcacggacacaccataggccgtacagagccgggagtgggaccctcgcagtgtagcccagagcccccaacccccaccagtggagagctcctgcatcatgtgatcgagcttgtgcataaataaagcaggagtttctacaca

SEQ ID NO: 253312 - DNA, 1371 bp, Homo Sapiens
gggagccagagctgcgcgccgcggcggcggaagatggctgcggccgaggtggcggacactcagctgatgcttggagtcgggctgatcgaaaaggacacaaatggagaagttctgtgggtgtggtgttatccttccacgacagccacattaaggaacctgctgctgagaaaatgctgccttacagatgaaaacaaacttctccatccctttgtctttggtcagtacagaagaacatggttttatatcacaacaattgaagttccagattcttccattttgaaaaaggtgactcatttttctattgtcctgaccgccaaagattttaacccagagaagtatgctgccttcactaggatattgtgtagaatgtacctgaaacatgggagcccagttaaaatgatggagagttatattgcagttctcacaaaggggatatgccagagtgaagaaaacggctctttccttagtaaggattttgatgcccgaaaggcctacctggctggctccatcaaagacattgtatctcagtttggaatggaaactgttatcttacacacagcactgatgctaaagaaaagaattgtggtgtatcaccccaagatagaagcggtccaggagttcaccaggactctgcctgccctggtgtggcaccgacaggactggaccatccttcactcttacgtggcacctcaacgccgatgaactggaaaccctgcagatgtgcacaggttacgtcgctggatttgtagacttggaggtgagcaacagaccagacctctatgatgtgtttgtgaatctggcagagagtgagattaccattgctccccttgcaaaagaggccatggcaatgggcaaactgcacaaagaaatgggtcagctaattgttcagtctgcagaagatccagagaaatcagagagccacgttatacaggatattgctctaaaaacaagagaaatctttaccaacctagcaccattttcagaagtttcggctgatggagaaaagagagtccttaatttggaggcgctaaagcaaaaacgatttccaccagcaacagaaaacttcctttatcatctagcagcagccgaacaaatgctgaaaatctgactgggtgacagaacgtatcactgatgactgataaaaagccctctttcactctgattacccactcactacatgaagtcctgaaaataacaaagaaactggtatatcttttttaaggatttattttgcaagtattgaaatttgacctgaaaaacaatgaaacacatgaacacacttccgattttctcctcgctgattagcttcctgcctgctgtcagtgctggacgaagtgctataactactttatgtaacattacagaacagct

SEQ ID NO: 253313 - DNA, 970 bp, Homo Sapiens
  misc_feature (41)..(41): n is a, c, g, or t
  misc_feature (98)..(98): n is a, c, g, or t
caggctcgcacgaacaaagagaacatcttgcaggggtgggnaggcatcaatgaccctgccatcttattcccccatgaatattgtcccaaaactccaanaatccatttctgtttctaatccttagatattcaaccgttggctgcaccctggtgcacttagtgtttattatatggcttcttagtggtgctgcaagttgttgctcaaatacctttttgctcattcccaaggaatggccagaaaacaatagaataaggcaatgtttctccatccccgactttgctttcctgtaacaattaaaaattaagaaacaagccaaggagccagcttgccttctgctccaggagcagcctgtgggctgcctcgatgtccggggccatgaagcgatcatccagggccttacaacagagcgcaccaggtcatagaccttctccagcggagtggttgtcaggggacgtagaaactctatgccctggcaggctgcaaggagctcgatggccagcacttgctccacatgctcgatgaccctgagggctttccttgctgcccatcctcccatggagacgtggtcctccgtggctgcgctggtggagagggagtcaacagacgagggatggcacagagccttgttctcagaaacaagggctgctgccgtgcagtgagctatcatgaacccagagttcagaccaccttcagccaccaggaaggcaggcagctcactgagggagggattgcagagccgctcgattcttctctcactgattgcagcaagttcatggatgccaatggccaagtagtctagggctttggctgggtattcaccatggaagtttcctccagaaattgtctctcccctattggcaaagaccataggattatctgttgcgctgttcagttctgtggtaatgatgttcttcacaaatgctattgtatcattcaccacaccatggacctgtggacagcagcgcaaggt

SEQ ID NO: 253314 - DNA, 409 bp, Homo Sapiens
  misc_feature (18)..(18): n is a, c, g, or t
  misc_feature (46)..(46): n is a, c, g, or t
  misc_feature (62)..(62): n is a, c, g, or t
  misc_feature (65)..(73): n is a, c, g, or t
aggccatggccattaaangggtaaattttcccaaaataatttaaangttaacaccccaaganttnnnnnnnnnaataggtgccctttcctcaaaacccaaggcaacctaattccattgcctaatactggggcatgaatttttggcaaatgtttatggttttactttccttcattaatcaaaaaattttttaaagtgctaccaagcagcaaaacaagtcgcatcagttctctgctcatggcagaagtgccaactgtgaaatcgcaaaaggtacagttttaacagtaagtaatgcatgaagaaactgtaacaaatggcctaaatacagagttggacagagtcaaaccagttatgtctagaattactcaattgaaactaatagaggtacattcaaaataaagttggagattc

SEQ ID NO: 253315 - DNA, 788 bp, Homo Sapiens
  misc_feature (297)..(305): n is a, c, g, or t
tataagcatttatccaatcaatgttaaacgttgcataatgaatagaagctgtagatattgccatactgcaatccaattttatggatatgagaagaaactcttggggttactaaaatagctgttttaactactagagagactacacaggtggttcaacagaatttacttgtatattttccattttctatactatttgaaggcataggatagttttgtattagctttctacaatactgtgttttaaatttatccagtaaactaagatgcagtacaacttttatacaactcaggagattnnnnnnnnntctccacaagaagaagcaactcagcaggcactggcattaaaacatttcccagaataaacagatatgcattgcattaaaggtaattttcaaatatttaagttacaccaagatttccctccaatatgtgcctttctcaaaccaatgcaactaattcattgctaatactggggcatgaatttttggcaaatgtttatggttttactttcttcattaatcaaaaaattttttaaagtgctaccaagcagcaaaacaagtcgcatcagttctctgctcatggcagaagtgccaactgtgaaatcgcaaaaggtacagttttaacagtaagtaatgcatgaagaaactgtaacaaatggcctaaatacagagttggacagagtcaaaccagttatgtctagaattactcaattgaaactaatagaggtacattcaaaataaagttggagattataatcgctatttagaatcaaatttgaagacttcctt

SEQ ID NO: 253316 - DNA, 414 bp, Homo Sapiens
cagaaaaaacccaccgaaaaaataaaagcaggactggttcaagactgctaatttaaatttcagagacctttgaacacatgaaaatttctgggcatatccactgctcaacagaatgctaaatgtgaagaacacagctcagctttcaccatggaacgtttcggctctctttcgcctcctttgaacttctctactttaagtgctgcctttttcctttattctcactgtttcttgtttttctcctccacttttcatttcccaccttttctcttttgaccctaccgtgtcataaatataacccgaagtatgagcatcatttgctgacttaaagtatcatgctttgtgctcataatatgagaaaagctgttttttctcataaaatctcttgtgaaagctcctctcgtgccgtatcctaca

SEQ ID NO: 253317 - DNA, 356 bp, Homo Sapiens
caccagaggagaacccagcgaaagaaactcagagaactgctaaaagatacagcaaaactaatttcaccaagcatattgtcaacaattgattataggtataataagtttaaaatatgattattttcttgattgaagacatataaatgcatttacaatcaatcaaaaaataagtttatgtatattttctgattttgtcttcatgtatgagtaaaataagaatcatgatcctgaggaataaaactattttccaaacaattaaatgtttctcttattatcattggcttgacagaattattttcactccccaatccctactcataactgatgatgtccaaaacattaacaacaaccttatt

SEQ ID NO: 253318 - DNA, 1135 bp, Homo Sapiens
  misc_feature (11)..(11): n is a, c, g, or t
  misc_feature (13)..(13): n is a, c, g, or t
  misc_feature (17)..(17): n is a, c, g, or t
  misc_feature (20)..(20): n is a, c, g, or t
  misc_feature (23)..(23): n is a, c, g, or t
  misc_feature (26)..(26): n is a, c, g, or t
  misc_feature (28)..(28): n is a, c, g, or t
  misc_feature (34)..(34): n is a, c, g, or t
  misc_feature (40)..(40): n is a, c, g, or t
  misc_feature (45)..(45): n is a, c, g, or t
  misc_feature (64)..(64): n is a, c, g, or t
  misc_feature (72)..(72): n is a, c, g, or t
  misc_feature (74)..(74): n is a, c, g, or t
  misc_feature (78)..(78): n is a, c, g, or t
  misc_feature (86)..(86): n is a, c, g, or t
  misc_feature (122)..(122): n is a, c, g, or t
  misc_feature (124)..(124): n is a, c, g, or t
  misc_feature (127)..(189): n is a, c, g, or t
  misc_feature (409)..(409): n is a, c, g, or t
aaacccccctngncccnccnccnganancccttncccccnagaantactgcctgctttatatgnattcccangnatgnttcctaantaatatagtttgtttaacttatatttgaaactatgnanacnnnnnnnnnnnnnnnnnnnnnnnnnnnnnnnnnnnnnnnnnnnnnnnnnnnnnnnnnnnnnnnaactagttcacatccaagcatttgggtaacaatggtgagttaagagggttcacatttgatgatttgtcctgaatatgaaccatgtttgtcttgcttttgtcctgaaattccaatacccagttttatgatggaaattttgtaaaattcaacttgaaccgctcagaagagtctaactgatgatactcatttactggggacatagtatgtgcccaagaacttnacatgcaccttctgtcttccatttagtcatcgttacctttagaaaaagctgattccgttaacaagatctttggagggaatcagcttcacaaacgtagcagtgggtgggggtcatgttggttaaccagttcacacatcagctcactaaaggaaaaaatatttctgcaaaaaatcttcacttgtcagaggggggtgcatgaaatttgagagccatgtgttatgcatccagctcttgaactggtctcagcttcagcgggctgcagtgccctagggaagttactatgggaaaagtggaaatagttgaggcccagggaactgatcaggccagaggaagtggaagctcaagatcaactgtgcttattttgctgatggctgggcctaaatgccccaaccacctacttgggacaggaaatgacaggaccctgtcaaccttggactgggaaaggagggcttcctggcccctgacagaccctggggtcctgaggctaccttagttgggattaaatgcccgtattggtctctagctgtcactccctctgctccttcctcaatttctgcacacatctcagagcttcctctagcagctcttcgacctgttttgttgttttattttctttctccccaggtgtgaatcaacttcttgggccttggctctgagttggaaaaggttttagaaaaagtgaagagctggaatgtgggggaaaataaaaagcttttttgcccaaaa

SEQ ID NO: 253319 - DNA, 1883 bp, Homo Sapiens
  misc_feature (368)..(368): n is a, c, g, or t
caggctggtaccggctccggaattccgggatatcgtcgacccacgcgtccggagggcgttgcaatcggttcggggcgggggctttccggggagggggtgctcaggtgcaccagcggcggcggaccctcagactctgccctcccctccctttaacccccttccagccggacgggaggcggggcagggctgagcatttgtgacacctacatttccgtggctcccttctttccccccgacccctggttatctcttcgccttccagaagttcttgttccatcagcccgtcgcaccttgcgtgggaaggagcaccccacttgaaagcaggaggcggggtttcagatcttgggccctaccccctcctgtgttanaagtccgcgagcctcagtttccctcacagtattttttgcctcgccttacccggttttgaggatctgtacgagaaagagaaaggaagtggacatatgttgaattcctgcatggccaaataccacgcagactgcttcatccgccacgtttaatccttattacttggtgttctcagaactcccatttcatggattcttaagctcacagagtcagtgaataacagaaagggattcagatctagccgtttagctgcacagtggagttcttctccagagtcttcccttgtctgggctctggctggaactattcctcagcaaaatcctcgccccagaacagtgctttcctgtttctccagctaagaagtctccctttcagtttccttcttccagcacggagtacactgctctgcctccacttagattacttcagaaatgaaatgcagcaaatatttatccagcagtgcagggagttgaacttttggagtcgggaaccttggattcttgttctggctctgccacttactgtgtggccttgggaagtcctttgtcttctctgagctttcttttctctttgcgtaaaagcggtgctcttgtcccattctccctccctgtcttccagcaggctctccccggaggctcagccccctctgctccccatgggcaactgccaggcagggcacaacctgcacctgtgtctggcccaccacccacctctggtctgtgccactttgatcctgctgctccttggcctctctggcctgggccttggcagcttcctcctcacccacaggactggcctgcgcagccctgacatcccccaggactgggtctcttttttgagatcttttggccagctgaccctgtgtcccaggaatgggacagtcacagggaagtggcgagggtctcacgtcgtgggcttgctgaccaccttgaacttcggagacggtccagacaggaacaagacccggacattccaggccacagtcctgggaagtcagatgggattgaaaggatcttctgcaggacaactggtccttatcacagccagggtgaccacagaaaggactgcaggaacctgcctatattttagtgctgttccaggaatcctaccctccagccagccacccatatcctgctcagaggagggggctggaaatgccaccctgagccctagaatgggtgaggaatgtgttagtgtctggagccatgaaggccttgtgctgaccaagctgctcacctcggaggagctggctctgtgtggctccaggctgctggtcttgggctccttcctgcttctcttctgtggccttctctgctgtgtcactgctatgtgcttccacccgcgccgggagtcccactggtctagaacccggctctgagggcactggcctagttcccgacttgtttctcaggtgtgaatcaacttcttgggccttggctctgagttggaaaaggttttagaaaaagtgaagagctggaatgtgggggaaaataaaaagcttttttgcccaaaaaaaa

SEQ ID NO: 253320 - DNA, 879 bp, Homo Sapiens
  misc_feature (17)..(17): n is a, c, g, or t
  misc_feature (363)..(363): n is a, c, g, or t
  misc_feature (381)..(381): n is a, c, g, or t
  misc_feature (647)..(656): n is a, c, g, or t
  misc_feature (670)..(807): n is a, c, g, or t
cgcatcgcgcgcctggnggacaaggtgaagacgctcaaggccgagaacgcggggctgtcgagtaccgccggcctcctccgggagcaggtggcccagctcaaacagaaggtcatgacccacgtcagcaacggctgtcagctgctgcttggggtcaagggacacgccttctgaacgtcccctgcccctttacggacaccccctcgcttggacggctgggcacacgcctcccactggggtccagggagcaggcggtgggcacccaccctgggacctaggggcgccgcaaaccacactggactccggccctcctaccctgcgcccagtccttccacctcgacgtttacaagcccccccttccacttntttttgtatgtttttttnctgctggaaacagactcgattcatattgaatataatatatttgtgtatttaacagggaggggaagagggggcgatcgcggcggagctggccccgccgcctggtactcaagcccgcggggacattgggaaggggacccccgccccctgccctcccctctctgcaccgtactgtggaaaagaaacacgcacttagtctctaaagagtttattttaagacgtgtttgtgtttgtgtgtgtttgttctttttattgaatctatttaagtnnnnnnnnnnttggttctttattnnnnnnnnnnnnnnnnnnnnnnnnnnnnnnnnnnnnnnnnnnnnnnnnnnnnnnnnnnnnnnnnnnnnnnnnnnnnnnnnnnnnnnnnnnnnnnnnnnnnnnnnnnnnnnnnnnnnnnnnnnnnnnnnnnnnnnnnnntctcttcggggcgggggaatttaaaccgttatatttgattacgccccaaaaaggggggcccccttaaccccc

SEQ ID NO: 253321 - DNA, 620 bp, Homo Sapiens
  misc_feature (582)..(582): n is a, c, g, or t
attcaaaccaatccagggactagaaaatacttccaagaggacacttacagggtgagcctactctattctttctctctcaaaaatggaagattaaaaagttttattaattaggtgtttgctttaatcaggaccatttatttgatatatattattaaggatttcaacaaaattaactcttttgtaataagaaaaaacattacttttgcatggaaaatacagatccatggaaaataattgtggcatatttcctccaagtatatggtaggattataggaggtttttcttctttatactttacatataatttgataatgtcaacatgaatttcataaataattatacaagtgaagttttaaccccttttaaattgtttagtccaactttatttaaaaatgtatatatatttttttaaattaagaccctaagctcattcaggaaagtgagataccatggtgtttttggtgcagataagtggatttttaaactagtaaaaactaaaaaatcagacatatgaaggttatcaacacatcattgtagtccatcaagtttctatcaaaggagtggaaggcactcgggatagantagaaacccgctggttcaaatgcaatggtgtttccttg

SEQ ID NO: 253322 - DNA, 638 bp, Homo Sapiens
  misc_feature (536)..(536): n is a, c, g, or t
  misc_feature (551)..(559): n is a, c, g, or t
  misc_feature (625)..(625): n is a, c, g, or t
gacagtcagtactgaaagataaaaagggctctgaaatgaagcttttaagtagatttagggaattgtactcacatctgcttatctttaaatcattttattctcttgtatatggtcttgcattgcctcagacataaatgagcatattctgatgtactctttggatctgaactcatcttcacaggtaggactcactgtggggaaaatttctatcttatttggtagcgttgtttgttttggactgaccttcctcaggttcgcatgtagttaattgtggcagttaactgttcagatggagtccagtattcagtgggagacgaaaggcaggcagaaagcaaatacaaatatgtatgttttattaaatttataccaatagtgagttcagtagggcaggccttgcttctgttcctagtagttatactttgaatgctttacagggttatgtattgtaggttcttagaactttgtggtcaataagttagagccttctgatggactgtagttgatgaaatgtcatgtagaactcactctcttaaatntacatttaatgtccnnnnnnnnnagatgccttcaaataaagttgcagagtctgatggagagatatttgaagttgatgttgaaatttgcnctctgtgactatt

SEQ ID NO: 253323 - DNA, 1280 bp, Homo Sapiens
  misc_feature (968)..(985): n is a, c, g, or t
  misc_feature (994)..(1030): n is a, c, g, or t
  misc_feature (1085)..(1136): n is a, c, g, or t
gttcgcgcgggcgtcgtgcacgcggttgtagctgcccggcggcggcagaagcggcgctcgcgccaagggacgtgtttctgcgctcgcgtggtcatggaggcgctgccgctgctagccgcgacaactccggaccacggccgccaccgaaggctgcttctgctgccgctactgctgttcctgctgccggctggagctgtgcagggctgggagacagaggagaggccccggactcgcgaagaggagtgccacttctacgcgggtggacaagtgtacccgggagaggcatcccgggtatcggtcgccgaccactccctgcacctaagcaaagcgaagatttccaagccagcgccctactgggaaggaacagctgtgatcgatggagaatttaaggagctgaagttaactgattatcgtgggaaatacttggttttcttcttctacccacttgatttcacatttgtgtgtccaactgaaattatcgcttttggcgacagacttgaagaattcagatctataaatactgaagtggtagcatgctctgttgattcacagtttacccatttggcctggattaatacccctcgaagacaaggaggacttgggccaataaggattccacttctttcagatttgacccatcagatctcaaaggactatggtgtatacctagaggactcaggccacactcttagaggtctcttcattattgatgacaaaggaatcctaagacaaattactctgaatgatcttcctgtgggtagatcagtggatgagacactacgtttggttcaagcattccagtacactgacaaacacggagaagtctgccctgctggctggaaacctggtagtgaaacaataatcccagatccagctggaaagctgaagtatttcgataaactgaattgagaaatacttcttcaagttatgatgcttgaaagttctcaataaagttcacggtttcattnnnnnnnnnnnnnnnnnnctcgaggcnnnnnnnnnnnnnnnnnnnnnnnnnnnnnnnnnnnnngacatgggccatagcctgtttcctgacccacctttcttgtacaaagcgcgaaaannnnnnnnnnnnnnnnnnnnnnnnnnnnnnnnnnnnnnnnnnnnnnnnnnnncggccttaatgaaatccggctgcagtaaccccgggaatttaacccccgcctaaatgagccgggcttcgttttttggggattcgcaagggggcttctgtggaggaaacattttttttccgcgcaaagaaaactggcctggttggc

SEQ ID NO: 253324 - DNA, 1010 bp, Homo Sapiens
cggcagtactactcagggtataggtagcgaggcctgggtggcgaattcggcacgaggtgcccccagctggcgcggggctaggcttgttcaatcggtgttaagagtctggcaggtgggccctcatgtcgcgagggagcgggtgatccctttttcctcactcttaggcttccaacggaggtgcgtgtcctgcgtcgcggggtccgctttctctggtccccgcttggcctcggcttctcgcagtaatggccagggctctgccctggaccacttcctcggattctctcagcccgacagttcggtgactccttgcgtccccgcggtgtccatgaacagagatgagcaggatgtcctcttggtccatcaccctgatatgcctgagaattcccgggtcctacgagtggtcctcctgggagccccgaatgcagggaagtcaacactctccaaccagctactgggccgaaaggtgttccctgtttccaggaaggtgcatactactcgctgccaagctctgggggtcatcacagagaaggagacccaggtgattctacttgacacacctggcattatcagtcctggtaaacagaagaggcatcacctggagctctctttgttggaagatccatggaagagcatggaatctgctgattcttgttgtggttccttgtggatgtctcagacaagtggacacggaaccagctcagcccccagttgctcaggtgcttgaccaagtactcccagatccctagtgtcctggtcatgaacaaggtagattgtttgaaagcagaagtcagttctcctggagctcacggcagcctcactgaaggtgtggtccatgggcaaaagctccagatgagggagggctttcactcacaccctgggacccatggccccagccccgaagttaaggaacccaaccacaaatctgggggaaatccttcaaaaggattggctcggccccccttcaaggaaaatcttccgtgttgttagcccctaaagccaggagggaactg

SEQ ID NO: 253325 - DNA, 1857 bp, Homo Sapiens
gggtcccgcagtgccttgcggctgtaatggctgcccccagctggcgcggggctaggcttgttcaatcggtgttaagagtctggcaggtgggccctcatgtcgcgagggagcgggtgattcctttttcctcactcttaggcttccaacggaggtgcgtgtcctgcgtcgcggggtccgctttctctggtccccgcttggcctcggcttctcgcagtaatggccagggctctgccctggaccacttcctcggattctctcagcccgacagttcggtgactccttgcgtccccgcggtgtccatgaacagagatgagcaggatgtcctcttggtccatcaccctgatatgcctgagaattcccgggtcctacgagtggtcctcctgggagccccgaatgcagggaagtcaacactctccaaccagctactgggccgaaaggtgttccctgtttccaggaaggtgcatactactcgctgccaagctctgggggtcatcacagagaaggagacccaggtgattctacttgacacacctggcattatcagtcctggtaaacagaagaggcatcacctggagctctctttgttggaagatccatggaagagcatggaatctgctgatcttgttgtggttcttgtggatgtctcagacaagtggacacggaaccagctcagcccccagttgctcaggtgcttgaccaagtactcccagatccctagtgtcctggtcatgaacaaaggtagattgtttgaagcagaagtcagttctcctggagctcacggcagccctcactgaaggtgtggtcaatggcaaaaagctcaagatgaggcaggccttccactcacaccctggcacccattgccccagcccagcagttaaggacccaaacacacaatctgtgggaaatcctcagaggattggctggccccacttcaaggagatcttcatgttgtcagccctaagccaggaggacgtgaaacactaaagcaataccttctgacacaggcccagccagggccctgggagtaccacagtgcagtcctcactagccagacaccagaagagatctgtgccaacattatccgagagaagctcctagaacacctgccccaggaggtgccttacaatgtacagcagaagacagcagtgtgggaggaaggaccaggtggggagctggttatccaacagaagcttctggtgcccaaagaatcttatgtgaaactcctgattggtccgaagggccacgtgatctcccagatagcacaggaggcaggccatgacctcatggacatcttcctctgcgatgttgacatccgcctctctgtgaagctcctcaagtgaccaccctctactgaccctcccagggcattccagctcaagctgctggcaggaactgaccagttctttccttggctggggaccctccaggcactggtgagagacatgaacactgactggccactagctggcctggccctgttgagtctgcacagtccctgcccagctgtgtcttctgttggaagaaggaacctgccttagctcagtttccaggtggttcttctgcctggcaccacagctacaaaggtgtagctaagaagatggcccattggtgggagcaatgtcaccctgcctccagctagctatgggcccagagtttctccctgagtcgctgttgctagcagggagatttctcttcctgccctcacttctttcaccttgaacttggataagaactcgtgtctcctgagtgaggtagcgcctcccatctgctccccaattcttgatctctcccaccccatccctctccccagtcttggatactaataaaatataagcattctggttctcatctttaaaa

SEQ ID NO: 253326 - DNA, 602 bp, Homo Sapiens
aaaagaaagctcccctggaccaatactgtgctgtcaatagctccgagtacttcttagaatgcgcagctttgattccagccggactttgactctctgtacagggctccacatgccagtcattgaacagtggccatcttctgcgcagaaaggacaaggtcgcttcagattatccttgtaatctcgaagcatagtctcgtatcttgcaatagtttcagtatgtggaagattttgtaggtattgaagttatcgatgctgtcaatatcacacaagcaatcatccagaactccagtgacctgcgcctcgacgacgctccgcaggaagctcagggtgaccagcagctgcaccgcggccgctaccccctgcccagcgcctgcccggcggaccccttggctcatgctgacctctacccacaccgcggccagccggacccctcggggccggggaacgacgggcggcccaggcgacgacccaaggggacggttcccagcggccgagcgactccagggtcagaggtctgcactccggtccggaggcaggcgactctttccccaacacccggcagctgcgagtgaggcaggaaaggcgagcgcccccacttcatc

SEQ ID NO: 253327 - DNA, 1907 bp, Homo Sapiens
ggggacgagcaccggcctgcgcgcggagccggcaccggatggtgggcgggggccagccgtgcggacccaacatgagtgaagtttcctgcaagaaacgggacgactatttggaatggccagagtattttatggctgtggccttcttatcagcacagagaagcaaagatccaaattcccaggtcggcgcctgcatcgtgaattcagaaaacaagattgtcgggattgggtacaatgggatgccaaatgggtgcagtgatgacgtgttgccttggagaaggacagcagagaataagctggacaccaaatacccgtacgtgtgccatgcggagctgaatgccatcatgaacaaaaattcgaccgatgtgaaaggctgtagtatgtatgttgccttgttcccttgtaatgaatgcgctaagctcatcatccaggcaggtataaaagaagtgattttcatgtctgataaataccatgatagtgacgaggcaactgctgcgaggctcctgtttaatatggccggggtgacattccggaaattcataccgaagtgcagcaagattgtcattgactttgattcaattaacagcagaccgagtcaaaagcttcagtgagttacatctcattcaatctccagaagattgggattatcgtcttctaagaggttgctaatgcctttcatcttgaagttacacataacttcttactagccagtatggcaaaagtaggcatctaaagaatataaagcctcaaatcttccttactgtctctcttgtcacatggaatctacatgtgtttgaactattgctttagggtttaaaataggggagcctgtggtggcctggtgcacagggctagaacgagagtgcctccccttcttgtgtcctggctggctgggatgctggtggctcttcagaggagcatcagctgtctgtcatctgctgcgatccggcagcctctcttcactgctacatgtgctggaaggacaaataaataattgtggttgtgttcttaatggggacgagcagacacactgatctgaacatctggcccaagtgaagcatggcatatagtgcccttggaagaaaattaggcctcaaatgacagtagcattgaagtgtttgctgcagagttgagggaaacccccagccaccctcccggaatccgagatagggtggcacatctgtcctgacagacgaggagtgtaactgaaccaggaatatttcctccattcctgctctcccactgcacacagggtggtggcacattatccctctggggggtggggacgcctgttgttttggctcaatttgggtttgttggtcacatggagctcttccatttcgtttagctgaataatgagttgttcctagaggagacagcctgtctctccttgttgcccccaaagcccatgccctgccgtggtggcagctggggctgtggatgggaggggtccccaacatggatgtgttgcccctcctccgcatgccaacgcagttcatgtacaaggcccctctgcaactggagagaaaattaattcctatcccgtgagtggattgtgagaaattccacccacgtggagacagcttactgcagcactgttggtgttcggagctcttctgtgccctggctccatgctttcacctacacaagcatcaccttcctaattcacccggggcggggagcgtgtggctgtgccccttctctttaatctcatttaatttttattaaacatgctcagtacctgtgttgagaaaaggctttctttatcctaaagattattacctttttaaagtgctcttatattttcatgagtttttattttgtctctgagattttgtattccacattctagggtattctgtaatttggctccttaccaatattattaaaatcttattaaaatctaccct

SEQ ID NO: 253328 - DNA, 346 bp, Homo Sapiens
ccacgcctccagacaatactgaattgtacctccttggtacttcccattcgatgaagcagtctctctctgtggtctctgaaccactatttataaaagtgatgactccaggaccactaaacaagcctgctaggtaagtcttatgcactccaaggtagatgagaaccactaccctaaacatagctacaacaggacttacagcaagaaaaaccatttgactgcaaatattaacaatgggcttcttaatgtcatttttaaaaattaatcacacaaatagtttgtactttcataactgaagcttgtcttcattatgcccttatcccttgactagaattttgttaaataaaac

SEQ ID NO: 253329 - DNA, 1281 bp, Homo Sapiens
tggtagcgaggcctgggtggcgaattcggcacgaggcgggcgcgctcaggcccggatcctggcggcctgggcggccgcaccatggactcgggaaccgaggagtacgagctcaacggcggcctgcctccgggcacacccggctccccggacgcctcgccggcccgctggggctggaggcacgggcccatcaacgtgaaccattacgccagcaagaagagcgcagccgagagcatgctggacatcgcgctgctgatggccaacgcgtcccagctgaaggccgtcgtggaacagggccccagcttcgccttctatgtgcccctggtggtcctcatctccatctcccttgtgctgcagatcggcgtgggggtgctgctcatcttccttgtcaagtacgaccttaacaacccggacaagcacgccaagctggacttcctcaacaacctggccacgggcctggtgttcatcatcgtggtagtcaacatcttcatcacggccttcggggtccagaagcccttgatggacatggcaccccagcagtaggacacccaggaccctggatgctgcctgccctgcaactcagctgcccgaccccaggagtcgccatacctgtgaggtgtccacctccctgcacatggcactacccagactgccagagcccaggctggcctcatctgcaccatgtccccggaccagcccttgctctgactgcggccaagcaccacgcaggaggccactcttgtctctcagcagctgttcccaggaggcagctccctcctggcacatgggggctggccacaatagcccagagggtcagaactggacagctgcagagacctgtgcccagagaagggtctcgacccactcaaggacacacagcaggtccgtggatgggctggatgagtgaccagggccagcctctgtctcaggacattccagaaggacaaggagatgtctctccctctcccaaagcaccagcgtccctgcctcccgtgggccctgtccgggttgccctggtgaccccagcctctgtccacttcctaacccagggaccctgcacagccagaactgcctttggccctacggatggccactggctctggtctaaagtgcctgggcttggtggccatcaagagggagccagtcaggcctgtgagggccgtagaccttgtatataccctgcaccagcagtgaccgggcagagcccaacccccttcacgggggtcccagcacccacttttctaatcatgaatgaacaataaagcccacgctctttgtcaggct

SEQ ID NO: 253330 - DNA, 1131 bp, Homo Sapiens
cggacgaggcgggcgcgctcaggcccggatcctggcggcctgggcggccgcaccatggactcgggaaccgaggagtacgagctcaacggcggcctgcctccgggcacacccggctccccggacgcctcgccggcccgctggggctggaggcacgggcccatcaacgtgaaccattacgccagcaagaagagcgcagccgagagcatgctggacatcgcgctgctgatggccaacgcgtcccagctgaaggccgtcgtggaacagggccccagcttcgccttctatgtgcccctggtggtcctcatctccatctcccttgtgctgcagatcggcgtgggggtgctgctcatcttccttgtcaagtacgaccttaacaacccggacaagcacgccaagctggacttcctcaacaacctggccacgggcctggtgttcatcatcgtggtagtcaacatcttcatcacggccttcggggtccagaagcccttgatggacatggcaccccagcagtaggacacccaggaccctggatgctgcctgccctgcaactcagctgcccgaccccaggagtcgccatacctgtgaggtgtccacctccctgcacatggcactacccagactgccagagcccaggctggcctcatctgcaccatgtccccggaccagcccttgctctgactgcggccaagcaccacgcagggaggccactcttgtctctcagcagctgttcccaaggaggcagctccctcccgggaacatggggggctgggccacaaaaagcccagaggggccagaactgggacagcttgcagaaaacctgtgccccagaaaaaggggtctccaaccccctcaaggaacacccccgcaaggtcccgtgaaagggcttgggaatgaattgacccaggggccaagcctcttgggttcaggaaaatttctcccaaagggagcaaggggaatgtttttctccccttcttccccaaaagaaccaacggttcccctgcgcctccccggggggcccccttgtcccgggttggcccctggggagacccccgaccctctggggcccctttccccaaaccccggggagcccctgggcgaaaccccaaaaactgcgcctttggcccccaaaag

SEQ ID NO: 253331 - DNA, 641 bp, Homo Sapiens
tggcttgtaggtgtactgcccatttatctttaaggaaaaagaaaacaaaagccagacaaacccaagttgtccaggcaaataaactcaaatctttgtcacgtctgatattataatcttctatgtaaggtttttaattaaaggtatttctatatgccgggggttgcttggtattaaatgcgacgtattcatggcacaaagctttcccaagctgaataaaaacaaacattaacaaatttttaccttgtaatgcaggaagaaacccaagcaagctctagtctgtgcttaagggttagcattcttatttattgaaccttactcaaaacttatagtagcctcaagaagtctattgatattggtcatgtttatttcttgccatatttataacacagcaagagtatttacaggaatgaagtagctgacacatatagactctgtataattcagaacagttataaatatttagtttatggattgactctgtatcctgtcatcttttcgcctacctgatctttcttggaataaaataatatatccttggggtcaagatccatagttccagaattttctcagccatctggttctgctacagcgtaaaattagactggaaataagacaacgttaagtaaaaagcttctcgtgcc

SEQ ID NO: 253332 - DNA, 1116 bp, Homo Sapiens
gaagaacgagagcaagaaaaagatgatgtagatgttgccctactacctaccattgtggaaaaggtgattcttcctaaactaacagtgatagctgaaaatatgtgggaccctttttctacaacacagacttcaagaatggtgggaattacactaaaattaatcaatggatatccttcagtagtgaatgcagaaaataaaaatacacaggtatacctaaaggcacttttattgagaatgagaagaactttagatgatgatgtatttatgcccttatatcccaaaaatgtcttagaaaataaaaattctgggccttacttgttttttcaacgacagttttggtcttcagttaagctgttaggcaattttcttcagtggtatggcattttctcaaataaaactctgcaagagttatcaatagatggtttattaaatcgatatattctcatggcttttcagaattcagaatatggagatgacagcatcaaaaaagcccaaaatgtaatcaattgtttccccaaacaatggttcatgaatctgaaaggagaaaggactatttctcagttagaaaacttttgccgataccttgtacacttagcggatacaatttatagaaatagtatcgggtgttctgatgtggaaaaaagaaatgcaagggaaaacataaaacagatagtaaaactccttgcaagtgttcgagctttggatcatgctatgtctgttgcaagtgaccacaatgtgaaagaatttaagtctttgatcgaaggaaaatagatctatgagactgaaaaacctatttgcttgattaccattcccaatgtgtaaattttgtatatatgtaaagtttcttaaactgtaaaatagcaattcttgttttaatacaaaaaacattatattcaatactgtgtccttaaatgatatttcttcagaatgaaaggaattcagattatttctaggagtctatgaatgttttctttactgcctgtcatactttgtttactgaagtattttgtatggtcatttaaattaaccctctcagttaattgtcccctgtaaacgatgtgtgcagtgtaaattgtgtaattatgcatatatatatttataccaccatggacttac

SEQ ID NO: 253333 - DNA, 384 bp, Homo Sapiens
gaagacaaacacaaggccctgtcccgtcccagaatcctccttggccccccctgagcagcaatcctttcccttcctgggtatggggcaggaccccctctggaatgggggttttatgaccttaactgaagaccaaaactgtcgttgaaaaaacaagtaaggcccagaatttttattttctaagacatttttgggatataagggcataaatacatcatcatctaaagttcttctcattctcaataaaagtgcctttaggtatacctgtgtatttttattttctgcattcactactgaaggatatccattgattaattttagtgtaattcccaccattcttgaagtctgtgttgtagaaaaagggtcccacatattttcactcgtgcc

SEQ ID NO: 253334 - DNA, 877 bp, Homo Sapiens
  misc_feature (854)..(854): n is a, c, g, or t
  misc_feature (856)..(856): n is a, c, g, or t
gggtgagacattcctcaattgcttagacatattctgagcctacagcagaggaacctccagtctcagcaccatgaatcaaactgccattctgatttgctgccttatctttctgactctaagtggcattcaaggagtacctctctctagaactgtacgctgtacctgcatcagcattagtaatcaacctgttaatccaaggtctttagaaaaacttgaaattattcctgcaagccaattttgtccacgtgttgagatcattgctacaatgaaaaagaagggtgagaagagatgtctgaatccagaatcgaaggccatcaagaatttactgaaagcagttagcaaggaaaggtctaaaagatctccttaaaaccagaggggagcaaaatcgatgcagtgcttccaaggatggaccacacagaggctgcctctcccatcacttccctacatggagtatatgtcaagccataattgttcttagtttgcagttacactaaaaggtgaccaatcatggtcaccaaatcagctgctactactcctgtaggaaggttaatgttcatcatcctaagctattcagtaataactctaccctggcactataatgtaagctctactgaggtgctatgttcttagtggatgttctgaccctgcattaaataattccatcaccttttccatcttccaaggtatcaggagcctctggttgggggtatccaatctcagactcaatactacaggtgaacaatcgctttaagaagccgtatcatggtcaggcactccaggcaattcatgtacacaacaccacgaggaatgagttgctcttacaggaacgtcttctgggacttgaaaattagatntncgcacacaaaccaccagagag

SEQ ID NO: 253335 - DNA, 605 bp, Homo Sapiens
  misc_feature (64)..(64): n is a, c, g, or t
  misc_feature (135)..(135): n is a, c, g, or t
  misc_feature (185)..(185): n is a, c, g, or t
gcaaggggaaatgtagtaactcaaagcaaggctataacgtaagtgcccgaaaagtcggcttccnaaggactcctccagcagcatgacgacttggttctttgcttggacctcccggtgatagtcttctggacatgnagttatccatgatttgcattgccaagtcatgtcacaaggggtggtctctntgccattatatacatatactcggccgtcttctcccccaatcagtccagaggttacatctgctatcctcaggggggctgccatgatgatttcatctaagccatcatcatccaggtcactcaagtgcagaacgccaccaaatcgggagaagcggcggtctccgctgaaggtgctgagcagcagaggctgcgcgtcagatatgagtgcgtacatgcgagtggctccgccttggtgtagggtcacggtcaggaatgccaccttagacacgtcatcgtacgtaggggctccaaccagcagcacttgtttcagagtcccattcatcagtacatggccactggaaagggaagtacccagtttccccattgccttgtctccagaaatggtaaaccagctttggccgtttggtgggaagtagccataca

SEQ ID NO: 253336 - DNA, 710 bp, Homo Sapiens
  misc_feature (15)..(15): n is a, c, g, or t
cagtcttgcctatangtcatgctgtctgagctcctactcaatgacaacgtctatatccgtgctgtatatgaaactcatctcatgcttagaattagactgatgatcgattcataggatcagagtatagtgcctggctcgaggagttctcatcaagactgtgagggcgcagtagctggagtcttgctgatggtccgtggcatgcaagcacttcatagaggagttagctgttgagccaagtcgtcaagggttagtcacagtctgtatgtaagtctgagtagctaagcaaatgcgcgcaatagcggcgtcttgtaaagtccaagtgtaacctgctatcagtggcgtctcgtaaagtccaagtgtagagtgtaggctgctaccagtggtgtcatgtgcagtccaggtgtaaagtgcagactgctctcagtggcgtcttgtcaagtccaagtgtagactgctgctcagcatctcttccaggtgcacctcctaccattcttcgagcgcctggtatgcctcaaacatccctctaggactgactttccgcatctccttgacttgaggccaggcctccccaccaggagggccatagaaagcaaggttcctctcaccccagggatgtcttgcctacccagtcacttctggccttggaatgacagacagggtattgtccaccttcccgagaagaaactccaaatcctcttgcaggacagggg

SEQ ID NO: 253337 - DNA, 643 bp, Homo Sapiens
  misc_feature (97)..(212): n is a, c, g, or t
aggaatgagagaccccgcaagaggcatgctcgtgtgggtaggtcatcacgtcggaaagggttatctttttttatagtcaaggtctcactttgtcacnnnnnnnnnnnnnnnnnnnnnnnnnnnnnnnnnnnnnnnnnnnnnnnnnnnnnnnnnnnnnnnnnnnnnnnnnnnnnnnnnnnnnnnnnnnnnnnnnnnnnnnnnnnnnnnnnnnntaatgtaggtagtttctcatagtaacgtaaagaatatgtaacctgtgttttcctgaaagttgagggaaagctgaggcagctaatgggctcatacaaaggtttggaagacccattctgactacctaaaggagagtcagcattctgaccattctgattgtgcttatagaagagtcagaacttgtgaagaaagaagccttaaaatccaaggtagtaatcatcctgggaaatatttcaggaaataacttaaggtttgtattttcccctaaaattgttagaagaaaagaaatgaagatctacatatatgctcttttagagctgagaatagcttctataaagcagaattttagacttttctccccaaaggaaaataggcatatttattgtaattattctatcacagtcaacttgtgttaacatatcgttaattcttc

SEQ ID NO: 253338 - DNA, 602 bp, Homo Sapiens
  misc_feature (42)..(80): n is a, c, g, or t
  misc_feature (528)..(528): n is a, c, g, or t
gccaggaggagggtggatctccccagagcaaagcgtcggagnnnnnnnnnnnnnnnnnnnnnnnnnnnnnnnnnnnnnnnagccgcccaggctcccccgccacccgtcagactcctccttcgaccgctcccggcgcggggccttccaggcgacaaggaccgagtaccctccggccggagccacgcagccgcggcttccggagccctcggggcggcggactggctcgcggtgcagattcttcttaatcctttggtgctgagacacatcatggagggcagtggtggcgtgggcgtcagctctgactctacagttcatgtacgatgagtttgtggaggactatgagcctaccgcagacagctatcggaagaaggtagtgctagatggggaggatgtccagatcgatgtcctagatacagctgggcaggaagactacgctgcacttagagacaactacttacggagtggggaagggttcctcaggggttgctgctatacagagatggaatcccttggagctacagctgaccncaggggagcatattttaagagttgaagaacgatgagaatggcccagtttcactgggtgggaaccaatcagtttg

SEQ ID NO: 253339 - DNA, 618 bp, Homo Sapiens
  misc_feature (252)..(252): n is a, c, g, or t
  misc_feature (258)..(258): n is a, c, g, or t
  misc_feature (264)..(264): n is a, c, g, or t
  misc_feature (309)..(309): n is a, c, g, or t
tcggggcggcggactggctcgcggtgcagattcttcttaatcctttggtgaaaactgagacacaaaatggctgcaaataagcccaagggtcagaattctttggctttacacaaagtcatcatggtgggcagtggtggcgtgggcaagtcagctctgactctacagttcatgtacgatgagtttgtggaggactatgagcctaccaaagcagacagctatcggaagaaggtagtgctagatggggaggaagtncagatngatatnttagatacagctgggccaggaggacttacgctgcaattagagacnaactacttccgaagtggggaggggttcctctgtgttttctctattacagaaatggaatcctttgcagctacagctgacttcagggagcagattttaagagtaaaagaagatgagaatgttccatttctactggttggtaacaaatcagatttagaagataaaagacaggtttctgtagaagaggcaaaaaacagagctgagcagtggaatgttaactacgtggaaacatctgctaaaacacgagctaatgttgacaaggtattttttgatttaatgagagaaattcgagcgagaaagatggaagacagc

SEQ ID NO: 253340 - DNA, 853 bp, Homo Sapiens
  misc_feature (96)..(134): n is a, c, g, or t
ggggccccgctccccagcgccccggaagtgatctgtggcggctgctgcagagccgccaggaggagggtggatctccccagagcaaagcgtcggagnnnnnnnnnnnnnnnnnnnnnnnnnnnnnnnnnnnnnnnagccgaccaggctcccccgccacccgtcagactcctccttcgaccgctcccggcgcggggccttccaggcgacaaggaccgagtaccctccggccggagccacgcagccgcggcttccggagccctcggggcggcggactggctcgcggtgcagattcttcttaatcctttggtgaaaactgagacacaaaatggctgcaaataagcccaagggtcagaattctttggctttacacaaagtcatcatggtgggcagtggtggcgtgggcaagtcagctctgactctacagttcatgtacgatgagtttgtggaggactatgagcctaccaaagaagacagctatcggaagaaggtactgctacatggggaggaaagccaaatcgatatcttaaatacagctgggcaggaggactaccctgaaattaaagacaactacttcccaaatgggcacggggtcctccggggttttctctattacagaaaatgcaatccctttggcgctacagcctgaattccatggaagcccatttttaagaagtcaaagaagaatgacgaatggttcccatttcctcacggggtgggtgacacaaatccgaattccagaagtataacacgcaccggcccttcctgttagaaacaagggctcaaaaaaaccccaagcctgcagccaccggggaaatggctaatacctacccctgggcacaaccctctctggttt

SEQ ID NO: 253341 - DNA, 609 bp, Homo Sapiens
  misc_feature (35)..(35): n is a, c, g, or t
ggatgctaaatgaagtcagtctcaagaatctagtntgcacatctcttctcagctcccacattgcatggaaatcaggaaatgctgcaaactaggacttcccccactccacccagagctggctgtcaaacatttaccaacatattactgttccagagtaagctaaggtcagaggaaaaggacaataccctggagggtcaggaaactattctaagaagagacgttacctacagagtctgcctatccctaccagatcccatgaggcagattcttgtaatcaaaacctgcattcactgccaggtaaacatgagttctcattgaagtgaggaaatgcgtccagctatgaatttcagtctagactgaaattctgttcctacaaatggaacaacaacaacaaaagaaccaacaaacatttggagaaaccaagagcactaaagagagcaccaaatttaacaaatagaactagcccacttaaaaagaatagtcaatagaaacagataaaaacttgaaattaaacatagttcagatcctcagagttgctttaaagtaaatcacattgaaacaagagacagctgctatgaaacacaaccagaattcatggaaaaaaatatt

SEQ ID NO: 253342 - DNA, 789 bp, Homo Sapiens
gttctgcaacccacccactcccccagcaaacataactcctagtatgctttactcacaggcaagggaaaggatggggtttgaacccctttggcctgaatatttgtaacttcccaactggtgcgggtcattacatttggtgtgtgtcccattgaatcaaccctgttgtttccttctgtcatgctttccacttcttcctggatcatctctccccatcacttgccttggtagtcactgccctggatctctttacccagcagtgatggcctggcttttcttttgggcaatccacccctatccctatcctgcaggctgtgtggatggtcacctgggtggcagtagtgaccctgagtgtggatttgggcctggctgtgggtgtggtcttctccatgatgactgtggtctgccgcacccggagctcctccaggtcccggggctctgcatcctgagctatccaacaccactgtactttgggacccgtgggcagtttcgctgcaacctggagtggcacctggggctcggagaaggagaaaaggagacttcaaagccagatggcccaatggttgcagttgctgagcctgtcagggtggtggtcctagacttcagtggtgtcacctttgcagatgctgctggggccagagaagtggtgcagctggccagccgatgtcgagatgctaggatccgcctcctcctggctcagtgtaatggtgagatgtgtggagaagagcggggcccagtgcctgggcaatgactggacacctgcggtagggaaaaggacccggtgtggactta

SEQ ID NO: 253343 - DNA, 1411 bp, Homo Sapiens
  misc_feature (484)..(599): n is a, c, g, or t
  misc_feature (675)..(740): n is a, c, g, or t
  misc_feature (1352)..(1352): n is a, c, g, or t
  misc_feature (1381)..(1381): n is a, c, g, or t
caaggaggggcaactaagtgaagagaatagcaggaagaccaggattaaaatccccagatgccctgttattggtctatgtcactaccagtaggacaaaaggcaatgcttctgaagactagaatatgcaaggaaaaaattaaggtgcctgcctgcctggggcctaacgagccaaacagtgctaacatccatgccaaacaaaattgttcattccttgctgatttgggaaggaaccatgctgatcatcagagaaaccaggcaattctattctgaagcccaggggaagaaatggtggggatttctgagttacagatggtgcaggggttaacaccatctgccactatgaagggaaaaatctatcttggtaaactttggtcttccataggacatggaaccagagtagcaagatcagggcctgcgtgaccgatcctgattgagcaggacttcctcacataaggtacacaagagctgggcgcagttgctcatnnnnnnnnnnnnnnnnnnnnnnnnnnnnnnnnnnnnnnnnnnnnnnnnnnnnnnnnnnnnnnnnnnnnnnnnnnnnnnnnnnnnnnnnnnnnnnnnnnnnnnnnnnnnnnnnnnnngaattagccgggcgcggtggtacatgcatgcaatcccagctgatcaaggggccgaggcagaatcacttgaacccannnnnnnnnnnnnnnnnnnnnnnnnnnnnnnnnnnnnnnnnnnnnnnnnnnnnnnnnnnnnnnnnntgtctcaaagagaaaaacaaaacccataagatgcacaggtatctgagaagggtctaaacaccctagaactgcaagcaaaattttgagtgtatacatgttttcctggcgaaggggtcctcattctcaaatcctgagcttttaggaaaaagtactaagccagtttcaggttacgatacaaaagccaccagatacacttagagccagtcaagtttgagaattctcaaagccatcactgaaaagttggaacacatactcacagcagagacaagtgaacatttatttttatgcctttcttcctatgtgtatttcaagtctttttcaaaacaaggcctgaggaatctccagattcaattatgtccctgggctttgtcgacagctgcaggagtcttagggagccttgtacaaatgctagagttactcatttaccaacattaaacccgagaatagaagatgcaacaaagcaggtttccttcctccatggaaagtgctgatttcagacaagggcagcagcaaatgtaggaaaatgctgggaatttttccttgggaactgggactgtggatgagagggtgctttgcccatggaaccataaggctactgtcttttcttttggncccttccctttcccaggtttttggaaggnataaaggccgggaaataaatctttctctgg

SEQ ID NO: 253344 - DNA, 1229 bp, Homo Sapiens
  misc_feature (399)..(702): n is a, c, g, or t
ctgctgttagctggctgcaggttccatgcaaatctttgacgtggtgtctgcgccgactgcctaagatgggatgcgtggtcgcacggctaggcatcggcgctctgcgaccgcacgggtggcggcggcgcggagaagcgttccgggcgagtgggtgtgctgacgcgcgctggtaccatcgaatcggtgcgccactggttgggggagtgtgacgttccttctttgtggtcggcggggaagcccccgcctctcccttagtgcgggcacagcaccgggcggatataagctgtggccaccagtgggcccaccggcttttggcacatgggagtagcatctatagcatcttttctgggcaggtaccctcgggggagaaccagtgtacttccctcatccactggcacnnnnnnnnnnnnnnnnnnnnnnnnnnnnnnnnnnnnnnnnnnnnnnnnnnnnnnnnnnnnnnnnnnnnnnnnnnnnnnnnnnnnnnnnnnnnnnnnnnnnnnnnnnnnnnnnnnnnnnnnnnnnnnnnnnnnnnnnnnnnnnnnnnnnnnnnnnnnnnnnnnnnnnnnnnnnnnnnnnnnnnnnnnnnnnnnnnnnnnnnnnnnnnnnnnnnnnnnnnnnnnnnnnnnnnnnnnnnnnnnnnnnnnnnnnnnnnnnnnnnnnnnnnnnnnnnnnnnnnnnnnnnnnnnnnnnnnnnnnnnnnnntaagctggcatgttttaaggcagttacatctctaacttgatttaccagctatgcttgagggtccaaggagccaaaattgcagccaaactgatcttaaaggaccagggaatagaatggtcaagcatgtttccaagtttaacctaggcctggcacatccttgccaattgctcagatggcaagtgaggggcaactaagtgaagagaatagcaggaagacccacttggggtggacactgatgaaaaacacaagcagtatcagactcactgttttcaggattaaaatccccagatgccctgttattggtctatgtcactaccagtaggacaaaaggcaatgcttctgaagactagaatatgcaaggaaaaaattaaggtgcctgcctgcctggggcctaacgagccaaacagtgctaatttcatccatgccaaacaaaattgttcattccttgctgatttgggttttaaggaaccatgctgatcatcagagaaaccaggcaattctattctgaagcccaggggaagaaatgg

SEQ ID NO: 253345 - DNA, 743 bp, Homo Sapiens
aatatttcatcggcgtcaataggaggcatcggggacagccgctgcggcagcactcgagccagctcaagcccgcagctcgcagggagatccagctccgtcctgcctgcagcagcacaaccctgcacacccaccatggatgtcttcaagaagggcttctccatcgccaaggagggcgtggtgggtgcggtggaaaagaccaagcagggggtgacggaagcagctgagaagaccaaggagggggtcatgtatgtgggagccaagaccaaggagaatgttgtacagagcgtgacctcagtggccgagaagaccaaggagcaggccaacgccgtgagcgaggctgtggtgagcagcgtcaacactgtggccaccaagaccgtggaggaggcggagaacatcgcggtcacctccggggtggtgcgcaaggaggacttgaggccatctgccccccaacaggagggtgaggcatccaaagaggaggaagtggcagaggaggcccagagtgggggagactagagggctacaggccagcgtggatgacctgaagagcgctcctctgccttggacaccatcccctcctagcacaaggagtgcccgccttgagtgacatgcggctgcccacgctcctgccctcgtctccctggccacccttggcctgtccacctgtgctgctgcaccaacctcactgccctccctcggccccacccaccctctggtccttctgaccccacttatgctgctgtgaa

SEQ ID NO: 253346 - DNA, 542 bp, Homo Sapiens
atgaaccactgcacctggcctttcattatatcattaaaatacattttactttcagaaagaagtaaaattttacagcagaaagagatccccctcagtaaatttaaaaagcaggtcccataattattttcaaatgacaaatgacaaggccaggtatctttgtaaataattttgcaaaagctggtttgttttattttaaaggctgatttatataaaataggaagaaacctatgttttcttaatactgtggaataagctaattgtaaatgaaatgttgagatcattattaggaccaaatgcagtatgtgcatatcatataaatttttttaactaagtatgccattaattattacaccttctagtttcacaaagcatataaaaaggaaatgtttatataaagcaaagttcaaatcactaaaccactttgaatttttactgtcaacctacataacagagagaggatcacaaagaaaagatgtttatttcagaacagagcattgcaataggaatatgcataacatagtaaactatgccatacatattca

SEQ ID NO: 253347 - DNA, 915 bp, Homo Sapiens
gcgcgatctcagatcactgtagacactgtgcctcagattcaagtgagactcctgtctcagactctcgagtagctgtgatatacaggcatgcgctaacacacccagctaattttggatttttaggagagaccagggttctctcatgtgtcgacaggctgtgctcgaacttccaccttagacttccaaactggtgggattacaagtgtgagccaccgtgaccagccaatgtgccttcttatagtgtctactcattggtctttgttctgcccagtgataacaatgggataacgcctgctacacatcttcattgtgaaacccttcccctgtgctgagattaaatgaactctaagattattaaatagtatattttccttgacagcctagcgtttgatgattttaaagccttatgtataaataaaccaaaggaagtaagcagtcatattgctaatttgctaactcctatctattgaatggtgaagttttaaaaatttccccaggtaagtttaagattcaaacaccatctattgagcacctacattgtgtgccaggtagtaaaataggtgctttcatacacattgtctcaattcctgtgaggtcagaattatctctgcatttgaaacttgaggaaacatgctcagagtgcaagaagcttccttgcctgagatcacctagaaaggaaccctcagagccggcaactgaatcttggtccctgtgatgtcaagcccattgctctcccactgcagaacatggcctctagattaatgccaccgattcaggaacacctccgacagtcttgaaatacccccatgttgccttgtttgttttttccttctgggcttcttctattacagtctctttcattgggaagctctgtagggccaaggccagagctgatactgacacgggggccattgc

SEQ ID NO: 253348 - DNA, 500 bp, Homo Sapiens
  misc_feature (91)..(110): n is a, c, g, or t
ctgagccttcctgctgcagctgtccagtcctttcctggatgctgacactgaggttggagaaagtcaaggctgggcatgtactggtgggggnnnnnnnnnnnnnnnnnnnntcttctctctctcatcaaattccaaagccaaatagaaatgatttctggaatcaccattgtttgcccatgccttttctctcctcctttactccatttttacaaatgaattccagagacgagacactgagacttgcctagctatatcctaagagtgagtgacaggttactctttctacctcattgggccactttctgagtgatgactgctatgtatcccagatggcaatattcacgtttctgaatctaagcacttttctttcttttctccttgcccgatcagctggacggccaaccgccatgtgatgtaagcctccatacgaaagcactgttgcagatagaagaagaggtggttgctgctcatgtagatctataaatatgtgttgtatgtct

SEQ ID NO: 253349 - DNA, 624 bp, Homo Sapiens
aagaggcgaatctttagataacctggactccccccgatccaattcttggagacagcctccttggctcaatcagcccacaggattctatgcttcttcctctgtgcaagactttagtcgcccaccacctcagctggtgtccacatcaaaccgtgcctacatgcggaacccctcctccagcgtgcccccaccttcagctggctccgtgaagacctccaccacaggtgtgggccaccacacagtcccccaccccgagaagccattccccttcagcttcacagtcaggctctcagctgcgtaacaggtcagtcagtgggaagcgcatatgctcctactgcaataacattctgggcaaaggagccgccatgatcatcgagtccctgggtctttgttatcatttggcattgtttttaagtgtgttgcctgtgagtgtgacctcggaggctcttcctcaggagctgaagtcaggatcagaaaccaccaactgtactgcaacgactgctatctcagattcaaatctggacggccaaccgccatgtgatgtaagcctccatacgaaagcactgttgcagatagaagaagaggtggttgctgctcatgtagatctataaatatgtgttgtatgtc

SEQ ID NO: 253350 - DNA, 642 bp, Homo Sapiens
cagagatagagcgggaaacatcagtcagaatataccagtacaggaggcctgttgattcctatgatataccaaagacagaagaagcatcttcaggttttcttcctggtgacaggaataaatccagatctactactgaactggatgattactccacaaataaaaatggaaacaataaatatttagaccaaattgggaacacgacctcttcacagaggagatccaagaaagaacaagtaccatcaggagcagaattggagaggcaacaaatccttcaggaaattgaggaagagaacaccccttcacaatgacaacagctggatccgacagcgcagtgccagtgtcaacaaagagcctgttagtcttcctgggatcatgagaagaggcgaatctttagataacctggactccccccgatccaattcttggagacagcctccttggctcaatcagcccacaggattctatgcttcttcctctgtgcaagactttagtcgcccaccacctcagctggtgtccacatcaaaccgtgcctacatgcggaacccctcctccagcgtgcccccaccttcagctggctccgtgaagacctccaccacaggttggccaccacacagtcccccacgccgagccctatgcagtctc

SEQ ID NO: 253351 - DNA, 755 bp, Homo Sapiens
  misc_feature (416)..(416): n is a, c, g, or t
ggcacagggagcagaacattgtacacagcgaggcaccacccggcttggcatctgcctcggtggacttactacctctagaaggaaatacctgagttcctctggcctcagctcctagagtgactggtgtgctgtccctgttactcttctgtcaaggtgacaactgtgtgacccatcatctgtgtgtcaaagcaaggccctgcctgggcctctgctcctgtgctgaccccaaaggcaaatgctttgctagtttccttccagttaatttcacctatgaatagatgtgtgttcagtggcatctttctctaacccccagcctcccttcccacagaggccaccgtcatggccagttgctgcagtttctttccagagaacctgtgtatgtgtaaagctgtacaggcgtgggtacaccacacagnctgtcttgcactgtggactgttgagttactagtacatctaggtaagcaccgcatatctgtattcatgtctgccttggccttttaacatctgtgtggtagccgtgtttgaatacccattccctttttgggaacccattagttgttcagcaatttttactgtagataaggctataccgatatctgtgtcatgggttttatgacatgggcagatatctgggagagaaagttcctcagaagaatctgggcacacatgtgtaattctaatatgatgacacccagtttcacctaagaggtggcccatgacttcccaacttaccagctggcctaaactgtttggca

SEQ ID NO: 253352 - DNA, 2279 bp, Homo Sapiens
  misc_feature (295)..(295): n is a, c, g, or t
  misc_feature (412)..(412): n is a, c, g, or t
  misc_feature (1458)..(1467): n is a, c, g, or t
gggagtcaacatggaggcagaggaatcggagaaggccgcaacggagcaagagccgctggaagggacagaacagacactagatgcggaggaggagcaggaggaatccgaagaagcggcctgtggcagcaagaaacgggtagtgccaggtattgtgtacctgggccatatcccgccgcgcttccggcccctgcacgtccgcaaccttctcagcgcctatggcgaggtcggacgcgtcttctttcaggctgaggaccggttcgtgagacgcaagaagaaggcagcagcagctgccggnaggaaaaaagcggtcctacaccaaggactacaccgagggatgggtggagttccgtgacaagcgcatagccaagcgcgtggcggccagtctacacaacacgcctatgggtgcccgcangcgcagccccttccgttatgatctttggaacctcaagtacttgcaccgtttcacctggtcccacctcagcgagcacctcgcctttgagcgccaggtgcgcaggcagcgcttgagagcggaggttgctcaagccaagcgtgagaccgacttctatcttcaaagtgtggaacggggacaacgctttcttgcggccgatggggaccctgctcgcccagatggctcctggacatttgcccagcgttcctactgagcaggaactgaggcgcccgtaaagcagcacggccagggggacgtgaacgggctcgcctggcaactgcccaggacaaggcccgctccaacaaagggctcctggccaggatctttggagccccgccaccctcagagagcatggagggaccttcccttgtcagggactcctgagggcctgggtggccccttccaatttcctggccctgctctgcttcctgtctacctcatactagaatgatcgtgactacccgggcagacattttactgtgtttctcagaccaagtgtctactgatggcccaaacatggagttttgtgggcttccactgtccccactccgaactcctgtatgtgcctggctgagtcacctaattcatactgtcatactagcataattatgactattgcatatgcttgttttgtttgactcttggctgcctacgtctgtagggtcccctgaaaatcccacttcctgcccccagaaagggcctttatttccaactaggaggataatgcctagtccaggcaatctttctctgtttagcagtcacaggtgagggtggtattagcatcttttttatgtagaaaaaattgagttaatggggtggactgggttgggaagaaatacatttcctaatgtatttatagaaaataaaaatatttttatgtgcctttttatttttgttggtggggaggtcattggacaagttccaactttcatcttgtgttcccttcaccttcatatcctgatcttagagcccccctccccctgccacccaccttactgtttaacctggannnnnnnnnnctatttaatttttgtctaatatcttagcccagtttatcaatcagttatcttaagtcagcattttctaagccattgtttgaggaaacagtgacaataggtaataacacatcttagtattaagagttttacaggccactagtataagataggcaccgtggtagatgcatataaagggtggaatgggagccatggcaggtcatagagtcctctcaatgggaacctgattgatgatcacagtcttcagtggtgagtcagtcctcaccaagttttccagatcattcctacaaagtaaactgggagaataataagtctgaaagagtgtggagtgctcccacaattacaaagaatgcttcctgggtggagtgttgagttggaaccattgtaaaagtgggcaaaacctaatagacaaccactgcacctcaggtgcacttacatatggtggggctgaggcaaagcagccctgtaggcttcaaagaatcagtgtaagccactaaaaggaactgaaaacctaggtgtcacaataaacagtctacacagtctcacgtagaccaaaattctgatcattttccaggctgttgcatgaagtgatagagtatgattataatttctgtttgcttgtgctgtttgtttttgtttttcatctgtcaatgtgatgatctgtgttttatagggtagagtggatttgtctactttggctgttaccctaatcacattatgatcttgacaggtgcactttactggggagaatatatacttggcacacaaactacgtttccatttgctttcgtcttgtttctgtttttttcttgggg

SEQ ID NO: 253353 - DNA, 388 bp, Homo Sapiens
gctgcaggttgaggactaactattacagaaatgtttactcttctgagtcctgatttctagtctcctggactaaataggttcactgttttcctcccggttcagtttccagacacatcacagaattataagaatattaaaaactcaggcttatacctacacaggattttctataaccctctttctgctttgagctcctaaagctatttcatagatgaccttatttttaaatagagggggcagttgataattagcattataaagtgctaattatctttggacacagaggacctgcacaccagagacagaggtccgcattaagtgtggatttcactttcttcagttgtgagtttctcttttttcttctttgttgatgcgatatatcttcccc

SEQ ID NO: 253354 - DNA, 2118 bp, Homo Sapiens
  misc_feature (1834)..(1834): n is a, c, g, or t
caaaataaatgcaaaatttaatgaaaaaaataagtacaaagtgaatggaaaagaacaaaaacagtcaatgaatgcaggagtaaatgaattaacacgtgaagcaattttagaaaagcatgttaacgtaacagactagcaagccacacttcctcaggcctcgtatccatgagccccacttaacagggagcccacatttacacatacacaaacatatgcagtcagtaatgcacaattacaaaccacctagatcagggtacccacaactaggaaagaacatatttccacatcggcctgggacaggtctggtttatgccttttgatctggtgtaattaatagcatcccctttctctctcaatagtcccaatttgggcaacgaattatatggtgattcttctacctcaaacaaacatggtttatgataaagacatgatagtaaatgccaacatgatcctgtaagacagccctaatgaaagccaacaaatgacaatgagaaaaagaggggtaaatgagactctgcagacagggtcacattctatgggggctaacttactaaacagtggcaagttttaagctcactttatgcaccaaggtttaatttggtctcagctaaagaagacaaaattccaaacacaaacagcaaggggagaggtgcagtgaggcttgctggagggacctgtggaggcagctcagaccagaaaacacaagtctgtcaagtgtcctgaagatcctgggaaggcttaggcccgcaggcagccagccacgagtatggcctttcagtatgcctggggtgcgacccgcaggccacaatggacgaatggccaagtctgcatactccagagtcctaggttggcccatgaaccaggaattctcatttcttatgtatccaatgaacctgctgggtcaccaggcctcatcttcataaatatgttagctgagagaggctatcttaaaggtcatgctctgacccaactgcatacactttcagacataaaattaccctagagatgagccattggcagcccacatttgccctggatatgccagtttacctttttagataccctcactgaagcatcagttttcaattgcaaccagatacggacttattgtgacgctaaggaagcttaatcttcagggccccttccaagaccctgtacctaattttatattaacattgtttttcttaaagaagtctttctaaataattcaagtttcagccccataaaatttagatccacccctggtcatagcataaaaagttgaattgtcactagaacctgctctgctgctggagcatggagcccctcacaggtaaaggctgcctcttcctggccgtgcctcagtggacacacacagctcacccctccacttctccctgagcagaacatcatctcaggaaggcaggaggaagccaggacttggtcctggaaatcaataatgcaagccagacagaaagggggaaatggtcatgagaaggaagacaggggcatgaataagcaaactacctattccacaataaattagcacgtcttcctgaggcttccagccagggagtaggctagactgtgagctccttgaggggagcgttgtgcattccttctgggtagctcccagtgcccagcacgggtgcttccaacattaaaaactaccctgcctttcatttagtcattgtacatctcccattttaccaggccgtattcctcaacactgacattcttggtggcttgtaaaccaacaggagcatagaagagtcaaagctgctagtacttccttaaaatgttcccctttagagtgcagctgaaggggaaagctcctttgccgctcatttttccntaattgtctatatacatcagacaccttcatctcttcaccctgtgacccagccaggaaagaagcaatgactttgaggtaacaacctttttcccactgagtactctttacatttggaatatgcaggatttgcttgggagtcttaattggagtcaaacacttaacacacacacatggagttggtccctgtctacaggtagcacctctggggcacagacaacagctttgggctgctgttccatttacattcacagtaaaaacgctggacatggtcttgttcatgttcc

SEQ ID NO: 253355 - DNA, 997 bp, Homo Sapiens
  misc_feature (20)..(20): n is a, c, g, or t
  misc_feature (23)..(23): n is a, c, g, or t
agctgctttacttccaaaanganaaaaaggcatagctctctttttcaattaaacagaaaactacataattacgttcaaacactcactgaagagcctgcctcatgggaagggcagggctgtcgtgggaagagtcagctgcactttggcaccatctcaggtgcctgtccaagccggatctgaatgggactggtcaagtgaggggtcagtcctgcagtctgcgctcacacctcttctccagatctgccatctcctttaggaccagggccacgctgtaccgcagctcctggaacttggctgtggggacctcaaagcggtatgctgacccatctgaaagcttcagctgcatcaggacgctcggctgcagggagcgagccagggcactggtggagattgctacatccacccgccaccgaaagtcagcaacatgcggcagccaggccccctgctgctgggccacagaatcaaggaggggccgctggctcccaaataccacgctggccaagtccccgaccaggtcttgggggatgcagagctcctggagctggtccctgaaggtgtcaggcttcaggctggtggggggcagacggagggcctgctggagcagtgtgtgcatgcctgccagcagggcacccagctgctcctccggcaggttggcgctgaccccaagacgctgcacagcctctcggcagtcctccccctgcaggctgctgaccacaaacttcagcaactttctgaacgtgctcctgtctaggtcccctagtagccgggccattgctgccacctctggaggaagctgggcccccaagaaactcactcggccactgtgactatcaccaggatgatgcaggtatggagttgcagcccccacagcagacattgctgctgcttcctctttgatcagccagcccaggaggtcggtcccagatgcagatgcctggcgccggcaatccccggctgatgcagccaaaagcgggcctggtccccggaagcgcccccc

SEQ ID NO: 253356 - DNA, 895 bp, Homo Sapiens
ggggagtcacgcgcgccggacgccacccgacaggaggggaaacggggcagctctcaaaaccctggaggcgcagaccgtccacacgagacagggacgcccgctcggctccgctccgcgctgatcctcaaggtctcgcggtttccccgccgcccacccggacgccgacgaaagccagcgagctcctcagcctcaggcatctgcatctgggaccgacctcctgggctggctgatcaaagaggaagcagcagcaatgtctgctgtggggactgcaactccatacctgcatcatcctggtgatagtcacagtggccgagtgagtttcttgggggcccagcttcctccagaggtggcagcaatggcccggctactaggggacctagacaggagcacgttcagaaagttgctgaagtttgtggtcagcagcctgcagggggaggactgccgagaggctgtgcagcgtcttggggtcagcgccaacctgccggaggagcagctgggtgccctgctggcaggcatgcacacactgctccagcaggccctccgtctgccccccaccagcctgaagcctgacaccttcagggaccagctccaggagctctgcatcccccaagacctgggtcggggacttggccagcggggtatttggggagcccgccggcccctcccttgattcctgggggcccagccaacaggggggcctgggcctgcccccatggtggcttgacatttccggggggcggggtgggatggataccaaatctttccccccaggtggcccttggggttcggcttcccctgggagaaccgaaaagggttccttggaatggcccccttttgaaaacctttttttccaaaaagggggggtcaaaaaccaaattaacccgcccctttttgt

SEQ ID NO: 253357 - DNA, 657 bp, Homo Sapiens
aaaaccactgtacacacaattaaaacttaagttccatccttcttgcatattaaaaaaatgcttatgttctataggtaacctgtactatccaaagatctgaagcacaagaagtttgtaccctctcccaccccattactactattaagctctaatgttatttccaacatgggaatatgcgaaaatcaagagccaaggagccaggagtagaactggaatccaaggccaaataacttcctaagatttttactcacactggtatttctaattataacaaacagatggaaatcctaggcatacagccttaataaaagtagataattatttaataaaagttttgctgctgggtagtctttaaatttgattactcaggatcagaaacgctagggatgtcgacccaaaaagacactttaatcaatcaatcaaattttctaataggattatcataaacatgtttctaattcagagtaaagcattactatgcacatttccctgtttgaaaacagtaagcttttctttgttctagtctgatctgatgacatatgtagtgacaaaacaggcaaaaattactaagatccctgaaagtcaagcctaaagtaaatatagaaataaacggattcaactggctgtactggcagacatgtaagctcgtgccgaatt

SEQ ID NO: 253358 - DNA, 366 bp, Homo Sapiens
aacaggagctggaagaaggattccaactctcatggatgacgtggaagggttcaagactgcatcagaggaaggaactgcagatgtggtggaaatagcaagagaactagaagtggagctggaagatgggactgaattgctgcaatctcacgacaaaatgtagatggctgaggagctggttcttacggataagcaaagaaagtggcttgggatggaatctatttctggtgaagatgccatgaatattgttgaaatcacaacacgggattcagaatattatgaaagaagttctactgtgggtaaatgctatcaaacaggattgcatgctacagagaaatctcttgtgaaaggaagagtcaactgatgtgg

SEQ ID NO: 253359 - DNA, 621 bp, Homo Sapiens
  misc_feature (18)..(18): n is a, c, g, or t
  misc_feature (37)..(37): n is a, c, g, or t
gtacaagagaaatgtggntcatgcttgctaacacacnatccattctgcagcccgtaaggctatagctgccatggatagtgattcctctgatggatctcggcaaagttaactgaaaaccttctgtaaaggatgcaccattttagatgccattaagaatatttgtgattcatgggaggaggtcaaaatatctacattaacaggagtctggaagaagttgattccaactctcatggatgacgtggaagggttcaagactgcatcagaggaaggaactgcagatgtggtggaaatagcaagagaactagaagtggagctggaagatgggactgaattgctgcaatctcacgacaaaatgtagatggctgaggagctggttcttacggataagcaaagaaagtggtttcttgggatggaatctatttctggtgaagatgccatgaatattgttgaaatcacaacacgggattcagaatattataggtacttagtagagtaagcagtggtagagtttgataggattgactccaattttgaaagaagttctactgtgggtaaatgctatcaaacaggattgcatgctacagagaaatctcttgtgaaaggaagagtcaactgatgtgg

SEQ ID NO: 253360 - DNA, 929 bp, Homo Sapiens
gccaccttccctgccccagccccagcagccatgggtacatgggtccccagctcacctatggattcccgccagtctgcccagctgcagtactcacgccccatgggggatcttggtctgtttttcttgtgggagcctagtggagagcagacgtggctttttatgtgtcttgttggggaggtgacttgcatggtggggacaaggctgtcgtggcaaccttgggatcgagtttgagactaaaggatgtcatgagatccctggcttctccccatgttgttcccggacaagggcagaagggaggcatggcaagggacctctgctgtccttactcaacagtggtcctcatccctccccacctcccactgcttcctgcaagggcaccagttgtatgagaaagttggcctttggacttaggatttcttattgtagctaagagccatctgaagcagcaggttgcaggacaaatgcttcagtccgccgagagcagtaccgtgtggccaagaggtggactcagagccttccttgagctaaactcggccaaccaaggcacgcagcatgtcccctcaggtctccagtcagtccaggttgaccctcagttctggacgtgtgtatatagctgtatttaatacctcaaggtcattgtggctctggggatgccggggcaggaggacgagggtgcgctgtggacacagcagtccgcggaattccgttctgggaagccaatggtcgccggcaccccttgcttcctccctctgttgtctgcctgtgtgacacacatcaatggcaataacttcttccaactcctcgcagaagtgggagaggccggcagcctgcaccgagaggggctttcctctctcttgctccccgcttcgttctgttttggctgcagagagtggttcatccatactctcattccctcgcctccccttgtg

SEQ ID NO: 253361 - DNA, 996 bp, Homo Sapiens
  misc_feature (456)..(456): n is a, c, g, or t
  misc_feature (719)..(764): n is a, c, g, or t
cgaggcctgggtggcgaattcggcacgaggccaggcgagcgcgggggactcggacccacagagccggcccctgctgctgctcgggcagctgcaccacctgcaccgcgtgccctggagccacgtccgcgggaagctgcagccccgggtcaccgaggagctctggcaggctgccctgagcacgctcaaccccaaccccacggacagctgtcccctctacctgaactacgccaccgtggctgccctgccctgcagggtgagccggcacaacagcccctcggccgcccacttcatcacgcggctggtgcggacctgcctgccgcccggagcgcatcgctgcattgtgatggtctgcgagcagccggaggtctttgcttccgcctgtgccctggcccgggccttcccgctgttcacccaccgctcaggtgcctctcggcgcttggagaagaagacggtcanccgtggagtttttcctggtgggacaagacaacgggccgggtgggaggtgtccacattgcagtgcttagcgaatgccacagacggcgtgcggctagcagcccgcatcgtgtgacacaccctgcaatgagatgaacaccgacaccttcctcgaggagattaacaaagttggaaaaggagctggggaatcatcccaaccatcatcccgggatgagggaactgaagcagcagaggaatttggacggaatctatcggggctggccaannnnnnnnnnnnnnnnnnnnnnnnnnnnnnnnnnnnnnnnnnnnnngccagaacggagccaccgcgaacccttcgcctggggggggcaaagggcaatcctccatggaaactggaaggccgcccccatcgagcgggaaacaattcccatgtccgggtgaatccaccgaagaccggcccggatgggctctgccgcccattctggggggggccccccgccactcctaaatgcaggcggggccttccccccagaaaaacgcgccccccgtgcgcgatacgtg

SEQ ID NO: 253362 - DNA, 539 bp, Homo Sapiens
agaagcagtctctcacaaaaaagacaatatccgagttctgttaaagccccagccagcaaggcccataaaggaatgaagacataggatagattcatggtagtaaactgttccagagcacagtaatattgtgtgatccatgtcgagggtcaaagccagacttacaccgcccagccattttcacaatcagcaggacaagaaggatagtatcaaatatccagactggaatgaatatgaggaaccagttccaaggtgctttctcatccagtttcaacaccaacatgatcaagaagagtagtgtgaaaagccaggtgagtagtactctctgagccaaggacattctcatttaaacagtttaaagaggctgttgcaggatcggaaaaaaggaaatataccctaagagaaggagaaaaagtcaagattgttttgataccagaaaaaaagtatcacttccattcctaatgaacaaaactggttctttcccaactgacttcctaattttgaaaacattctactattcttcctttcaaatcctctaaaac

SEQ ID NO: 253363 - DNA, 884 bp, Homo Sapiens
  misc_feature (461)..(469): n is a, c, g, or t
gggaggtagaactgagagatcctctaccgcagtcgtttgaggaggcggaactgaagttttttcttaattatcatgtgacgggttctggatttaatggggggaaaagggcggaaaaggacaaggatccaaactggcgaatttgctgatcttcgcgtccctctccgctttccggccggcagcgctgccagggtatatttccttttttccgatcctgcaacagcctctttaaactgtttaaatgagaatgtccttggctcagagagtactactcacctggcttttcacactactcttcttgatcatgttggtgttgaaactggatgagaaagcaccttggaactggttcctcatattcattccagtctggatatttgatactatccttcttgtcctgctgattgtgaaaatggctgggcggtgtaagtctggctttgaccctcgacatggatcacacaatattnnnnnnnnngcctggtacctcattgcaatgttacttaaattagccttctgcctcgcactctgtgctaaactggaacagtttactaccatgaatctatcctatgtcttcattcctttatgggccttgctggctggggctttaacagaactcggatataatgtctcttttgtgagagactgacttctaagtacatcatctcctttctattgctgttcaacaagttaccattaaagtgttctgaatctgtcaagcttcaagaataccagagaactgagggaaaataccaaatgtagttttatactacttccataaaacaggattggtgaatcacggacttctagtcaacctacagcttaattattcagcatttgagttattgagatccttattatctctatgtaaataaagtttgttttggacctca

SEQ ID NO: 253364 - DNA, 446 bp, Homo Sapiens
  misc_feature (30)..(30): n is a, c, g, or t
  misc_feature (54)..(54): n is a, c, g, or t
  misc_feature (60)..(60): n is a, c, g, or t
aaaaaaacccgggtaccctcaatggcaaangttaccttaaaattagcccttccngccccncccgctctgtgccaaaaccgggaaccagtttacctacccatgaatcctatccctatgtcctcaatccctttatggggccttgcctggctggggctttaacagaactcggatataatgtcttatttgtgagagactgacttcctaagtacatcatctcctttctattgctgttcaacaagttacccattaaagtgttctgaatctgtcaagcttcaagaataccagagaactgagggaaaataccaaatgtagttttatactacttccataaaacaggattggtgaatcacggacttctagtcaacctacagcttaattattcagcatttgagttattgagatccttattatctctatgtaaataaagtttgttttggacctcaaaa

SEQ ID NO: 253365 - DNA, 1392 bp, Homo Sapiens
ctcaattttcatgtctcttccccttccaattccccttcccctccccgccatcactgatcaactaggactctacccaagaagagctttgaacagatcagtgccaatataactaagtttaacattcagggccttgtcatcattgggggctttgaggcttacacagggggcctggaactgatggagggcaggaagcagtttgatgagctctgcatcccatttgtggtcattcctgctacagtctccaacaatgtccctggctcagacttcagcgttggggctgacacagcactcaatactatctgcacaacctgtgaccgcatcaagcagtcagcagctggcaccaagcgtcgggtgtttatcattgagactatgggtggctactgtggctacctggctaccatggctggactggcagctggggccgatgctgcctacatttttgaggagcccttcaccattcgagacctgcaggcaaatgttgaacatctggtgcaaaagatgaaaacaactgtgaaaaggggcttggtgttaaggaatgaaaagtgcaatgagaactataccactgacttcattttcaacctgtactctgaggaggggaagggcatcttcgacagcaggaagaatgtgcttggtcacatgcagcagggtgggagcccaaccccatttgataggaattttgccactaagatgggcgccaaggctatgaactggatgtctgggaaaatcaaagagagttaccgtaatgggcggatctttgccaatactccagattcgggctgtgttctggggatgcgtaagagggctctggtcttccaaccagtggctgagctgaaggaccagacagattttgagcatcgaatccccaaggaacagtggtggctgaaactgaggcccatcctcaaaatcctagccaagtacgagattgacttggacacttcagaccatgcccacctggagcacatcacccggaagcggtccggggaagctgccgtctaaacctctctggagtgaggggaatagattacctgatcatggtcagctcacaccctaataagtccacatcttctcagtgttttagctgtttttttcattaggtttccttttattctgtaccttgcagccatgaccagttctggccaggagctggaggagcaggcagtgggtgggagctccttttaggtagaatttaacatgacttctgccccagctttatctgtcacacaaggctgggcacctctagtgctactgctagatatcacttactcagttagaatttttctaaaaataagctttatttatttctttgtgataacaaagagtcttggttcctctactacttttactacagtgacaaattgtaactacactaataaatgccaactggtcactgtg

SEQ ID NO: 253366 - DNA, 581 bp, Homo Sapiens
ggctggccccctccctttatatctacagattcctcagggtgtcccaacaatggccattctatgggtttgagccaaagcttatttttcttcttcacttaggaacaaaccatggatgaggtaccttaacaccaagccccttttcacagttgttttcatcttttgcaccagatgttcaacatttgcctgaaaatgaaagagtaaatcctaagcctaactgggaatggataaggttgggtataaatcatcttccacaccacacctctccaggaaggaagagacacatggaagagagttgtttacaatcctgggcctgaactgtgcctaattcctgtaagaagctcagtgtggactgaaatttaaacaatgactccaaatgagacagaactggaagagggagcactacagacagctgcagtaactgtcagtgttcagcccctcaccctctccaatctccctttccaagcctttctggttccccttgcctcagagggctgacttgtggtcacagtgtcagtgttgacactttatatctctgttttgagagtatctctctcaaagcagaatgacagcaagggaaatct

SEQ ID NO: 253367 - DNA, 398 bp, Homo Sapiens
  misc_feature (383)..(383): n is a, c, g, or t
tttttttcacagtgaccagttggcatttattaggtgtagttacaatttgtcactgtagtaaaagtagtagaggaaccaagactctttgttatcacaaagaaataaataaagcttatttttagaaaaattctaactgagtaagtgatatctagcagtagcactagaggtcccagccttgtgtgacagataaagctggggcagaagtcatgttaaattctacctaaaaggagctcccacccactgcctgctcctccagctcctgggccagaactgggtcatgggctgcaagggtacaggatttaaaagggaaaccctaatgaaaaaaaacagcttaaaacacttgaggaaggatgtgggactttattagggggtgttgagcctgnccctgatcagggtaa

SEQ ID NO: 253368 - DNA, 597 bp, Homo Sapiens
tccatctgagcagcctgcgtggccgtctggagtccgtgagactgaaaggacccgtgcatcttactgtaacccgggggccaggccggctctctcgctgtacattctgtaaaggtgtcttctcttctcagactcttcctctgtcacacgtctgactccttcacgtcaggctcaggttccatgggaggacgaagcagtggacgcattgtgggctttagggacagatgagttttccagatagtgtcagcttatttgaagattaattttctttgttaactttaactattttaacccttgagtggcttctttttaaaccatcaaggggggaaccacaccaggtcagcgctgcgcctgctgtggccgccgcgagccacgccctctgggatctctggtaccgtcactcttgcttgtgccttccacaccttctcggtgcagatccctatgggggagctgcctcacgttctctgactggtcagagcagcgcctggtgggtgttccctggcccactctcctctctccttctgcagttctccacagtctatgcccgagtcaccaggacggcctgtctggccacagacagggggctgcctgtggcctgcc

SEQ ID NO: 253369 - DNA, 687 bp, Homo Sapiens
  misc_feature (101)..(101): n is a, c, g, or t
ggactgcactgccgggggccggtgggcaggctccacaggcagcccctgtctgtggccagacaggccgtcctggtgactcgggcttcatagactgtggtttnagaactgcagaaggagagaggagagtgggccagggaacacccaccaggcgctgctctgaccagtcagagaacgtgaggcagctcccccatagggatctgcaccgagaaggtgtggaaggcacaagcaagagtgacggtaccagagatcccagagggcgtggctcgcggcggccacagcaggcgcagcgctgacctggggtggttccccccttgaatgagaaagagatcctgattctgctgtgataaaaaagcaaagaaagacggtttttggtttaaaaagaagccactcaagggttaaaatagttattttaagttaacaaagaaaattaatcttcaaataagctgacactatctggaaaactcatctgtccctaaagcccacaatgcgtccactgcttcgtcctcccatggaacctgagcctgacgtgaaggagtcagacgtgtgacagaggaagagtctgagaagagaagacacctttacagaatgtacagcgagagagccggcctggcccccgggttacagtaagatgcacgggtcctttcagtctcacggactccagacggccacgcaggctgctcagatgga

SEQ ID NO: 253370 - DNA, 745 bp, Homo Sapiens
caagacatgccagcaactgcacggctacttctccatttagccactatcccagagaattctgccaccttccagagccaactgttttcccctttctctgcgtttgatagtttcctccttttcaggacagagaataaagggtccctgtattcatgccttcctggaaatctcagtgcaaggccctatcaggaggtttcctggagcagctaagggaacagctagaccacccaggaagaaatgacagaagcctacctgacttccaatctgcttgcttcatggtgtaatgggggcctagacagaagcaccccaaggacacttacaacaactgttctgccagctctagtccattggagaagatgtgccaacataccttctcaccattcctagagcccaaccttgctatggaaaggtcaaacccttaccattggccctgccaaggatccccagacagagaagcacaatggaggccataaattatggcttcttatcatggcctccacataacttaaactctggatggtgaatgaaatctggggccaagtcttaaagggtcagggtagccaatgagcataactcaatatttgtgtttctaagagaaaaccacagaacctccatatccatggcaaactggccagccacaggctggatccagtgtgcagtagtgttttgtgtacaccattcactatttgtctacttgggttaaaaatgttttatattagttagcaatgtttaaacattgggagaatta

SEQ ID NO: 253371 - DNA, 232 bp, Homo Sapiens
ccggggtgcccccagaacacagatagcagatcagaggcagaagcagcctcagtcatctagacagtgcagggttctggtaaggacaggtgcaaaccatctaggtgggcagaacttggtgatgactaggaaccactgagactcagcagctgccccagtggcacccacaaatcagaggaggaggaggctgggaggacctaggtaagtaatgtagacagtgcagtgtggtctattt

SEQ ID NO: 253372 - DNA, 493 bp, Homo Sapiens
aaatagaccacactgcactgaaatctacattacttaccaaaacctctggagctgcttctgtcttgtaggcagggagctcgtcctgtagcccttaggtcctcccagcctcctcctcctctgatttgtgggtgccactggggcagctgctgagtctcagtggttcctagtcatcaccaagttctgcccacctagatggtttgcacctgtccttaccagaaccctgcactgtctagatgactgaggctgcttctgcctaactgatctgctatctgtgttctgggggcaccccagggttagaggtaaatggcacaggcattgaaatctccaactgctctgactccaggttggtgcacttcaatgccaagtactaaccacacaataacaggatgccaccaaaaccttggtatggggctgctgcatcctaattaaaaagtaatagatgttattttttaggttctaggtttacagaacagtttccccttagtatgttgct

SEQ ID NO: 253373 - DNA, 1170 bp, Homo Sapiens
  misc_feature (13)..(13): n is a, c, g, or t
  misc_feature (21)..(21): n is a, c, g, or t
  misc_feature (45)..(45): n is a, c, g, or t
  misc_feature (53)..(56): n is a, c, g, or t
  misc_feature (64)..(64): n is a, c, g, or t
  misc_feature (83)..(84): n is a, c, g, or t
  misc_feature (99)..(99): n is a, c, g, or t
  misc_feature (122)..(122): n is a, c, g, or t
attttcgaccagngagctttnccttattccacttttgagaagggntgtcatgnnnnaagagcanaacatttacatttcctaannactcctgtcctccancatcgagctcctggtacatctgncgcctcttctggaacccatgaagttcacgacatccgctggaactttgagaagttcctggtgggccagatgtatacccatcatgcgctggcaccaccggaccacggtcagcaacgtcaagatgacatcctgtcctacatgaggcggcaggcagccctggggtcaagaggaagtaactgaaggccgtctcatcccatgtccaccatgtaggggagggactttgttcaggaagaaatccgtgtctccaaccacactatctacccatcacagacccctttcctatcactcaaggccccagcctggcacaaatggatgcatacagttctgtgtactgccaggcatgtgggtgtgggtgcatgtgggtgttaacacacatgcctacaggtatgcgtgattgtgtgtgtgtgcatgggtgtacagccacgtgtctacctatgtgtctttctgggaatgtgtaccatctgtgtgcctgcagctgtgtagtgctggacagtgacaaccctttctctccagttctccactccaatgataatagttcacttacacctaaacccaaaggaaaaaccagctctaggtccaattgttctgctctaactgatacctcaaccttggggccagcatctcccactgcctccaaatattagtaactatgactgacgtccccagaagtttctgggtctaccacactccccaaccccccactcctacttcctgaagggccctcccaaggctacatccccaccccacagttctccctgagagagatcaacctccctgagatcaaccaaggcagatgtgacagcaagggccacggaccccatggcaggggtggcgtcttcatgagggaggggcccaaagcccttgtgggcggacctcccctgagcctgtctgaggggccagcccttagtgcattcaggctaaggcccctgggcagggatgccacccctgctccttcggaggacgtgccctcacccctcactggtccactggcttgagactcaccccgtctgcccagtaaaagcctttctgcagcagcttgaaaaaaactgg

SEQ ID NO: 253374 - DNA, 1591 bp, Homo Sapiens
  misc_feature (1567)..(1567): n is a, c, g, or t
  misc_feature (1579)..(1579): n is a, c, g, or t
  misc_feature (1581)..(1581): n is a, c, g, or t
  misc_feature (1583)..(1583): n is a, c, g, or t
aaagcaggctggtaccggtccggaattcccgggatgccagggatcaggcagcggctcaggcgaccctgagtgtgcccccaccccgccatggcccggctgctgcaggcgtcctgcctgctttccctgctcctggccggcttcgtctcgcagagccggggacaagagaagtcgaagatggactgccatggtggcataagtggcaccatttacgagtacggagccctcaccattgatggggaggagtacatccccttcaagcagtatgctggcaaatacgtcctctttgtcaacgtggccagctactgaggcctgacgggccagtacattgaactgaatgcactacaggaagagcttgcaccattcggtctggtcattctgggctttccctgcaaccaatttggaaaacaggaaccaggagagaactcagagatccttcctaccctcaagtatgtccgaccaggtggaggctttgtccctaatttccagctctttgagaaaggggatgtcaatggagagaaagagcagaaattctacactttcctaaagaactcctgtcctcccacctcggagctcctgggtacatctgaccgcctcttctgggaacccatgaaggttcacgacatccgctggaactttgagaagttcctggtggggccagatggtatacccatcatgcgctggcaccaccggaccacggtcagcaacgtcaagatggacatcctgtcctacatgaggcggcaggcagccctgggggtcaagaggaagtaactgaaggccgtctcatcccatgtccaccatgtaggggagggactttgttcaggaagaaatccgtgtctccaaccacactatctacccatcacagacccctttcctatcactcaaggccccagcctggcacaaatggatgcatacagttctgtgtactgccaggcatgtgggtgtgggtgcatgtgggtgtttacacacatgcctacaggtatgcgtgattgtgtgtgtgtgcatgggtgtacagccacgtgtctacctatgtgtctttctgggaatgtgtaccatctgtgtgcctgcagctgtgtagtgctggacagtgacaaccctttctctccagttctccactccaatgataatagttcacttacacctaaacccaaaggaaaaaccagctctaggtccaattgttctgctctaactgatacctcaaccttggggccagcatctcccactgcctccaaatattagtaactatgactgacgtccccagaagtttctgggtctaccacactccccaaccccccactcctacttcctgaagggccctcccaaggctacatccccaccccacagttctccctgagagagatcaacctccctgagatcaaccaaggcagatgtgacagcaagggccacggaccccatggcaggggtggcgtcttcatgagggaggggcccaaagcccttgtgggcggacctcccctgagcctgtctgaggggccagcccttagtgcattcaggctaaggcccctgggcagggatgccacccctgccttcggaggacgtccttcacccctcnctgtccactgcntnanctcacccc

SEQ ID NO: 253375 - DNA, 992 bp, Homo Sapiens
  misc_feature (649)..(649): n is a, c, g, or t
  misc_feature (680)..(680): n is a, c, g, or t
acggagcgaggcctgggtggcgaattcggcacgagggtggccagggatcaggcagcggctcaggcgaccctgagtgtgcccccaccccgccatggcccggctgctgcaggcgtcctgcctgctttccctgctcctggccggcttcgtctcgcagagccggggacaagagaagtcgaagatggactgccatggtggcataagtggcaccatttacgagtacggagccctcaccattgatggggaggagtacatccccttcaagcagtatgctggcaaatacgtcctctttgtcaacgtggccagctactgaggcctgacgggccagtacattgaactgaatgcactacaggaagagcttgcaccattcggtctggtcattctgggctttccctgcaaccaatttggaaaacaggaaccaggagagaactcagagatccttcctaccctcaagtatgtccgaccaggtggaggctttgtccctaatttccagctctttgagaaaggggatgtcaatggagagaaagagcagaaattctacactttcctaaagaactcctgtcctcccacctcggagctcctgggtacatctgaccgcctcttctgggaacccatgaaggttcacgacatccgctggaaactttgagaagtntccctggtggggggccagatgggtatacccnatcatggcgctggcaccacccggaccacggtcagcaaacgtcaagatggacatcctgtcctaaatgaggcggcaagcaacccctggggggtccagaggaaagaactgaaaggccggctcctccccgtgtccaccatggaggggggagggaactttggtcaaggaagaaatcccggggtctccaacccccactaatcctacccgtccaccaaaccctcttcccgatcactccaagggccccaggccgggcgaaaaagggatggcattacaggttctcggggtactggcccaagccagttaggctgctaggctc

SEQ ID NO: 253376 - DNA, 807 bp, Homo Sapiens
  misc_feature (492)..(501): n is a, c, g, or t
ggggtaggaaggcgccggccgtggaggcgccacgtcccttgcggcggcgggagagaaatcgcttggacttcggggcggcctcggacggccatggcctttaccctgtactcactgctgcaggcagccctgctctgcgtcaacgccatcgcagtgctgcacgaggagcgattcctcaagaacattggctggggaacagaccagggaattggtggatttggagaagagccgggaattaaatcacagctaatgaaccttattcgatctgtaagaaccgtgatgagagtgccattgataatagtaaactcaattgcaattgtgttacttttattatttggatgaatatcagtggagaaaatggagactcagaagaggacatgccagtagaagttattactttggtcattattggaatatttatatcttagctggctgaccttgcacttgtcaaaaatgtaaagctgaaaataaaaccagggtttctatttatctggnnnnnnnnnnaatggtgcacttgtagtttcattacaaaagatcagatcatgaaaggcagtaactctccaggactggaatatctgattgctcaatgttaatagtagttcatgctgtggtgagattgttaaaagggtgcaagactgttgcttctctttttttagatatttttctatctctcacttctcaaggatgaaattctttttcaaaggtttgaagatccttgcaacttagccatgatgtgagtggttatccctagataaaattaaggatttttagtgattactgtgcattattgtctattgtcttagctatttt

SEQ ID NO: 253377 - DNA, 543 bp, Homo Sapiens
gaaggcacccccattcccaccctgtgccttccttgcgggcagagagggagagaagggctccccagatctacacccctccctcctgcatctcccctggagtgttcacttgcaagctgccaaaggagtctatacctggacacccacctccccagacacaactcccttccccatgcacacatctggaaggagctggcccctcagtcccttcctactccccaacaaggggctcactatccccaagggagctgttggcgacccacgacgcagcccctgtactggattacagcatattctcatctctggccccgaggctgcctgtggggcgagtggagacctcccatcactgagacagatcacagaccacgagtgcctttcccggacctggacgttgcctccagagaaggcaccagctctttccctctctagacagaaatatttttgtaaggttctggggcagggagggagcatgaagtacgaggaaaacttaattccagatttttaatgcaaagtatttatcatttctaccagaaataaacgttttaa

SEQ ID NO: 253378 - DNA, 580 bp, Homo Sapiens
ggggtggcaacccccacctgtggccttatatccctccctctccactcccctggccctagagcctgtgcccctctggccccatctcacatgactgtgaagggggtgtggcatggcacggggtctcatgaaggcacccccattcccaccctgtgccttccttgcgggcagagagggagagaagggctccccagatctacacccctccctcctgcatctcccctggagtgttcacttgcaagctgcccatgatggcctctggttgttctgttgaactccttgaacgtttagaccctgcacacatctggaaggagctggcccctcagtcccttcctactccccaacaaggggctcactatccccgggagctgttggggacccacgacgcagcccctgtactggattacagcatattctcatctctggccccgaggctgcctgtggggcgagtggagacctcccatcactgagacagatcacagaccacgagtgcctttaccggacctggacgttgcctccagagcacgcaccagctctgtccctctctacacagaaatatatttgtaaggttctggggcaggga

SEQ ID NO: 253379 - DNA, 360 bp, Homo Sapiens
ccctcgaggcccaagaattcggcacgagattttatttaaagatccctagtgactgatgcacattgtgcccctgttgctacgataggagcggaggatgttggatctgagagatctcatgcttaacccttaagtgagaagtagcgtgtggtgtgggaaggtaacacagctctctcctgtaagcagaaatcaagcggtggtctactgagagccattttattacttccagagaaccctgaaggtgaaatgaaggttctggggcagggagggagcatgaagtacgaggaaaacttgaattccagatttttaatgcaaagtatttatcatttctaccagaaataaacgttttaagtttttacttga

SEQ ID NO: 253380 - DNA, 381 bp, Homo Sapiens
ggctgtagcgaattcgggacgagctccttaagggatctcgggcccttgtcatcaatccgtaccatttacattcttactttgaacctagtcctcactcttctctgggatgcattatgatccctataactttctttagcttctctttctccctcctcaatcccccaactttctagaggtttctgtctgtaggggagagatttgacagtgcccttcccattcaggatttccaactttgacacctccctcgagtttcagggatttctctgatccttgtgacatttggtctgtttttcccgtgggcttcatgtgttctctgttacactctttatctccacataccacttatttcaggatcaactccttgaactaagaggggtgttt

SEQ ID NO: 253381 - DNA, 352 bp, Homo Sapiens
aggtaacgcagatcataaagcagctgcagcgcccggctgggtgactggaaatgcaccttcctgcaaatgaattcccggtccccggttgagtttcagcttgctatttcagaagcagatggaatgctcatatggccagtttaatctcacaacaacaaaacaaattttgttagaaacttgaccttaaaattaaaaacctaacagcagggaagagacctggcccttaaaaaaggcctcagatgctgtaaatggttgttctaaaggggaaaaaaaggctccttgcctgaaggagaagtgttttgaggaggctcattagagaagacttactgaattctttccaaaatcaggatttgtt

SEQ ID NO: 253382 - DNA, 670 bp, Homo Sapiens
gggccaaatgatactcagcagctgctaggctgactcagaagagaggggaataagagtccacctacacgaccattgcatttatccagcaagcggcccattatttaacttgctggtaatatgagcacttactgttcaaaacaaacacaatgaatgtggaagagaccgccttgacatagctccctagaggatacgacacctggagtctggcatgctccggccactcttcacctcgtcacccttggctgtcagaacaatgttgaggtaacgcagatcataaagcagctgcagcgcccggttctgggtgactggaaatgcaccttctttctgcaaatgaattcccggtccccacccatgaagagagaggacttggtatgtgagcgtaataaacagcttcaagggttgagtttcagcttgctatttcagaagcagatggttttaatgctcatatggccagtttaatctcacaacaacaaaacaaattttgttagaaacttgaccttaaaattaaaaacctaacagcagggaagagacctggcccttaaaaaaggcctcagatgctgtaaatggttgttctaaaggggaaaaaaaggctccttgcctgaaggagaagtgttttgaggaggctcattagagaagacttactgaattctttccaaaatcaggatttgtt

SEQ ID NO: 253383 - DNA, 1171 bp, Homo Sapiens
gtttgccagtagcggcctctccatgaaagcacaagccatcagcccttgtgtacagaacttctgttctgccctggattctaagctgaaggttaaactagatgacctcctggcttacctcccctctgatgactcatcactgcccaaggacgtttctcccacacaggccaagagttctgcctttgacagatacgcagatgcggggaccgtgcaggagatgctgcggactcagtccgtggcatgcatcaagcacatcgtggactgcatccgggcagagctacagagcattgaagaaggtgtgcaagggcaacaggatgccctcaacagtgccaagctgcactcagttcttttcatggccagactctgccagtccctgggagagctgtgcccccatctgaagcagtgcatcctgggaaaatcagagagctcagagaaaccagcaagggagtttagggctctgagaaaacagggaaaggtgaaaactcaggaaatcattcctacacaggccaagtggcaagaggttaaagaagtactcctccagcagagcgtgatgggctaccaggtctggagcagtgcagttgtgaaagttttgattcatggattcacccagtcattacttctagatgatgctggctcagttctggccacagccaccagctgggatgagctagaaattcaggaggaggcagagtctggcagcagtgtcacatccaagatccgactccctgcacagccgtcctggtatgtacagtccttcctgtttagtttatgccaggaaattaatcggggttggaggccatgccttgccaaaggtgacattacaggagatgctgaaaagctgtatggttcaagtagtagctgcctatgagaaactctccgaagaaaaacagattaagaaagaaggtgcatttccagtcacccagaaccgggcgctgcagctgctttatgatctgcgttacctcaacattgttctgacagccaagggtgacgaggtgaagagtggccggaccagccaaaactcagaattgagaaagggactgaccacctgggaagccctcttgatccatttgacctggacgttttcccgcccaaactcaacagcaaccttcatcgccctggggggaggaacttctgttctggttgggattgggggcatgggaacaaagaaccagct

SEQ ID NO: 253384 - DNA, 1713 bp, Homo Sapiens
ctctgcctccaggccgcccgctgctgcgggccaccatgctcctgcccaggcctggagactgacccgaccccggcactacctcgaggctccgcccccacctgctggaccccagggtcccaccctggcccaggaggtcagccagggaatcattaacaagaggcagtgacatggcgcagaaggagggtggccggactgtgccatgctgctccagacccaaggtggcagctctcactgcggggaccctgctacttctgacagccatcggggcggcatcctgggccattgtggctgttctcctcaggagtgaccaggagccgctgtacccagtgcaggtcagctctgcggacgctcggctcatggtctttgacaagacggaagggacgtggcggctgctgtgctcctcgcgctccaacgccagggtagccggactcagctgcgaggagatgggcttcctcagggcactgacccactccgagctggacgtgcgaacggcgggcgccaatggcacgtcgggcttcttctgtgtggacgaggggaggctgccccacacccagaggctgctggaggtcatctccgtgtgtgattgccccagaggccgtttcttggccgccatctgccaagactgtggccgcaggaagctgcccgtggaccgcatcgtgggaggccgggacaccagcttgggccggtggccgtggcaagtcagccttcgctatgatggagcacacctctgtgggggatccctgctctccggggactgggtgctgacagccgcccactgcttcccggagcggaaccgggtcctgtcccgatggcgagtgtttgccggtgccgtggcccaggcctctccccacggtctgcagctgggggtgcaggctgtggtctaccacgggggctatcttccctttcgggaccccaacagcgaggagaacagcaacgatattgccctggtccacctctccagtcccctgcccctcacagaatacatccagcctgtgtgcctcccagctgccggccaggccctggtggatggcaagatctgtaccgtgacgggctggggcaacacgcagtactatggccaacaggccggggtactccaggaggctcgagtccccataatcagcaatgatgtctgcaatggcgctgacttctatggaaaccagatcaagcccaagatgttctgtgctggctaccccgagggtggcattgatgcctgccagggcgacagcggtggtccctttgtgtgtgaggacagcatctctcggacgccacgttggcggctgtgtggcattgtgagttggggcactggctgtgccctggcccagaagccaggcgtctacaccaaagtcagtgacttccgggagtggatcttccaggccataaagactcactccgaagccagcggcatggtgacccagctctgaccggtggcttctcgctgcgcagcctccagggcccgaggtgatcccggtggtgggatccacgctgggcctaggatgggacgtttttcttcttgggcccggtccacaggtccaaggacaccctccctccagggtcctctcttccacagtggcgggcccactcagccccgagaccacccaacctcaccctcctgacccccatgtaaatattgttctgctgtctgggactcctgtctaggtgcccctgatgatgggatgctctttaaataataaagatggttttgatttaaaaaaa

SEQ ID NO: 253385 - DNA, 411 bp, Homo Sapiens
  misc_feature (62)..(62): n is a, c, g, or t
  misc_feature (80)..(80): n is a, c, g, or t
caagaaaccaaccggtcaaaagctgggtcaaccaatgcgctggccttcgaagtgaatctttnatggccctggaagatccnactcccggaagtcactgactttggtgtagacgcctggcttctgggcccaggcacagccagtgccccaactcacaatgccacacagcgccaacgtggcgtccgagagatgctgtcctcacacacaaagggaccaaccgtgttcgccctggcaggcatcaatgccaccctcggggtagccagcacagaacatcttgggcttgatctggtttccatagaagtcagcgccattgcagacatcattgctgattatggggactcgagcctcctggagtacccccgcctgttggccatagtactgcgtgttgccccagcccgtcacggtacagatctt

SEQ ID NO: 253386 - DNA, 530 bp, Homo Sapiens
tgtccattcccggcagtgcaaatgtgttaggtggggtagggggtgggatagggagataaatagcagcctggcgttggcactggctggtgctctgtggtgggtatgagtaggggacggggccgccttcctggagacaagctcctgggtgctgtgatcagaagggtctgtagctccagtagctggagaacacggagatcttgtccttgagctgctggcagagctgcagggagacggtgaagtagaccagggcgtcgttgagccaggggatcacgcactccacgtgcacgtggctcacctccaggcgctgagagccccactcgaacatggccccagggctatgcagcaccgcgcccccagctgggcggaagttcttggtggagttgggctgcagggcatgcagctggtacaccgtgaggcagagcttgttgaggttgatgtagacgttgaccagcaggtcggacggcagggcaggggcgaacatccgcgtgaggccgctggcggcgatctcggggagggtgagggtggcgggg

SEQ ID NO: 253387 - DNA, 354 bp, Homo Sapiens
aaaagtgtctggagagtctgctcatatctgtgcttaatgctcgaaatagtgttcatctagagtttgggcacagtttatcaaatagtgtcagttcttccatcgactcttaactagctttgcaaataaaattaaagccattgcctctgccccagctgtagagcactaggaaagtagatgctggatcatcaaccattgcacccatgaaatactttcccatacctatttctttcctagctttcttaacgccaaaccctgacatttcccccatgtgtatgtatggccctaccctaaatgattgagtaattctgactggagagtcagaagaacttgagtagccttaaacggaccccctca

SEQ ID NO: 253388 - DNA, 410 bp, Homo Sapiens
gccccagtgacgcccccttgcccgcaggtgctggccacggacatgtccaagcacatgaccctcctggctgacctgaagaccatggtggagaccaagaaagtgaccagctcaggggtcctcctgctagataactactccgaccgcatccaggtcctccggaacatggtgcactgtgccgacctcagcaaccccaccaagccgctggagctgtaccgccagtggacagaccgcatcatggccgagttcttccagcagggtgaccgagagcgcgagcgtggcatggtcagccccatgtgtgacaagcacactgcctccgtggaggtctcaggtgggttttattgactacattgtgcacccattgtgggagacctgtgcggaccttgtccacccagatgcccaggagatcttgg

SEQ ID NO: 253389 - DNA, 408 bp, Homo Sapiens
gcgcagaagcccctgacaggcaaggtaagtaaacacctggagccatggaggggagcctggaaggcttctgcttaggagggagatcagagctgtgatttagaaaaagcaaccatccccctctgcaccctgcccctcttcctaacaaaggccttcactgtttaaattggaggtgacaattctggttcacgatggcaatactgagaaggcaaggaggaaatgcatgtgtgttgggtaatactgcacagagagggtcagaataagcagaactgctgactgactggacttcagggcagaaaccaagggcaataccgacgtccagccattctttgaacaggcacagggcccgggaacaaactccacacgtgtgcatggccagagggtcaggcaggttgtgttaccttggccaag

SEQ ID NO: 253390 - DNA, 992 bp, Homo Sapiens
gggaactcaaactaaccaacccactgggagaagatgcctgggggtccaggagtcctccaagctctgcctgccaccatcttcctcctcttcctgctgtctgctgtctacctgggccctgggtgccaggccctgtggatgcacaaggtcccagcatcattgatggtgagcctgggggaagacgcccacttccaatgcccgcacaatagcagcaacaacgccaacgtcacctggtggcgcgtcctccatggcaactacacgtggccccctgagttcttgggcccgggcgaggaccccaatgagccgccccccaggcccttcctggacatgggggagggcaccaagaaccgaatcatcacagccggggggatcatcctcctgttctgcgcggtagtgcctgggacgctgctgctgttcaggaaacgatggcagaacgagaagctcgggttggatgccggggatgaatatgaagatgaaaacctttatgaaggcctgaacctggacgactgctccatgtatgaggacatctcccggggcctccagggcacctaccaggatgtgggcagcctcaacataggagatgtccagctggagaagccgtgacacccctactcctgccaggctgcccccgcctgctgtgcacccagctccagtgtctcagctcacttccctgggacattctcctttcagcccttctgggggcttccttagtcatattcccccagtggggggtgggagggtaacctcactcttctccaggccaggcctccttggactcccctgggggtgtcccactcttcttccctctaaactgccccacctcctaacctaatccccccgccccgctgcctttcccaggctcccctcaccccagcgggtaatgagcccttaatcgctgcctctaggggagctgattgtagcagcctcgttagtgtcaccccctcctccctgatctgtcagggccacttagtgataataaattcttcccaactgca

SEQ ID NO: 253391 - DNA, 886 bp, Homo Sapiens
ggggcaactcaaactaaccaacccactgggagaagatgcctgggggtccaggagtcctccaagctctgcctgccaccatcttcctcctcttcctgctgtctgctgtctacctgggccctgggtgccaggccctgtggatgcacaaggtcccagcatcattgatggtgagcctgggggaagacgcccacttccaatgcccgcacaatagcagcaacaacgccaacgtcacctggtggcgcgtcctccatggcaactacacgtggccccctgagttcttgggcccgggcgaggaccccaatggtacgctgatcatccagaatgtgaacaagagccatgggggcatatacgtgtgccgggtccaggagggcaacgagtcataccagcagtcctgcggcacctacctccgcgtgcgccagccgccccccaggcccttcctggacatgggggagggcaccaagaaccgaatcatcacagccgaggggatcatcctcctgttctgcgcggtggtgcctgggacgctgctgctgttcaggaaacgatggcagaacgagaagctcgggttggatgccggggatgaatatgaagatgaaaaacctttatgaaggccctgaacctggacgactgctccatgtatgaggacatctcccggggcctccagggcacctaacaagatgtgggcagcctcaacataggagaatgtccagcctgggagaagccgtgacaccccctacctcctggccaggcctgcccccccgcctgggttggggaaccccagcttccaagtggttctccaactttcactttccctggggacaattccttccctttttcacccccgttccttgggggggcccttcccttatagacatataattccccccccaat

SEQ ID NO: 253392 - DNA, 359 bp, Homo Sapiens
gccacagtagtcattgtgctctccaagactgactgactacgttcctctatccggtgatgacattccatggcatgctggcacaggtaaaacacagtcacacaactaatcaccagacatgccaatagtaagttctggctcaaaatgacggaaaatgttcagcccatggacagtctactgcagaaagataaccaacatctgggatgagtgaggagccaccgcgccgcctggacggcatcctggcctcagccgctggtcccaccgccttcggtgcggggccactcgggagcccgccctcaccgccaagagccggcagctgacagcctggaccggcaccgcagagcagcgccgttccgacccgc

SEQ ID NO: 253393 - DNA, 1394 bp, Homo Sapiens
  misc_feature (21)..(21): n is a, c, g, or t
  misc_feature (40)..(40): n is a, c, g, or t
  misc_feature (80)..(80): n is a, c, g, or t
  misc_feature (146)..(146): n is a, c, g, or t
  misc_feature (658)..(658): n is a, c, g, or t
  misc_feature (1321)..(1321): n is a, c, g, or t
  misc_feature (1362)..(1362): n is a, c, g, or t
aaggcagatcccctcacgagnccccaaaagctgtgcgganacctcccatcctctcaagtgggaggaaactggcaaatgcnacaggcgcgcagccaaggtgcagacgctccaccaagcttggcaggggacagccaatcctaggaatntcccttctgctgaaaaggcagcaatcttcctcatgtatggaagaggctcctggttctgctactccacttgctcagtctgtggtttttctttaagaaagtcaggtagttggaattctcccttatagactttgacagagacactcccccagctttcccaatcatctcttcatggtgcaatactgagtggttccatggaatctggaggaactttaagagtgttctcatccaccgttcaggatgtaagacaagttgttcatagtgaaccaacatgcactttttataaccaacctccatacactggttatacatggtctctatagcacgattccactttgtcaaacagtccctatagctgttcagatcaaatccagctatagtaacttttcgagaaatcattgaatgtactgatgcccggccatctcggaccatcaggagaaatttggcattggggaataacctagaaaggtaagttaaagatttcagggcaaaaggatctttattacataaataanggggctggctccccatgcttaacgataatttctagtaagaaggcttgcatggcagaatccagcacttcatcagtaacaccagcctcatccaggcggatcttctctttaccttgaccgtgaccacatctgcttcagggccaggattcggggaatgaccctggtttcctctccacagcgaatgtcaggatgtgcgtccagcatggccctcatgagtgtggttccactccgaggcacacctcccaataaatattaaaggcatatctttgtgataggcaaaggttttgttggctttgaggtccaggccagttctcacagtggtccttgtgctctccaatttgactggctggctacgttcctctatccggtgatggcattccatggcatgctggcccaggtaaaacacagtcacagaactaatcaccagacatgccaatagtaagttctgcttcagctttccaaccatcttgatgtggttatcttgttattaaacagatattttgctcaaaatgattttcggaaaatgttcaggccatggacagtctacttcagaaagataaccaacatctgggatgagtgaggagccgccgcgccgcctggacggcatcctggcctcagccgctggtcccaccgcttcggtggggggccactcgggagcccgccctnaccgccaagcgccggcagctgccagcctggaccggccccgnagagcagcgccgttccgacccgcaaccgaagc

SEQ ID NO: 253394 - DNA, 1696 bp, Homo Sapiens
  misc_feature (723)..(754): n is a, c, g, or t
  misc_feature (939)..(995): n is a, c, g, or t
  misc_feature (1221)..(1221): n is a, c, g, or t
  misc_feature (1498)..(1511): n is a, c, g, or t
  misc_feature (1535)..(1535): n is a, c, g, or t
  misc_feature (1550)..(1550): n is a, c, g, or t
  misc_feature (1629)..(1629): n is a, c, g, or t
acagtagtgcactgagttcatctgaaagtgaacagagcctgcgggccacccctcatgtttcagtggggacggtcacttctcatgctgaccaacttcaaggacattaaaacatcttttctttccttcaacagactgagcaagtggagtagcagaaccaggagcctcttccatacatgaggaaagattgctgccttttcagcagaagggaaattcctaggattggctgtcccctgccaagcttggtggagcgtctgcaccttggctgcgccgcctgtgcatttgccagtttcctcccactgagaggatggaggtgtccgcacagctttgggcctcgtgagggatctgcctcctgagcaaagagctcttgatcccgatttcatgcacagccctgcagtaaggagcccagaaggaacatgtgtttcctgttaaaactcctcttgttctcttttcttacattatgacgtttgttttcaaggagagggtttaaaaatgggatcctgtaagcagacttgggcagtctccttttgaaataggttgtctgtacatgttctaatgttttgtagaacacgtgtgcctgtttaagtgtattgatgtgaataatattaaatatcctaattatttaattcattgtattgtttctgagaagttgggaaattaccattatacatttacaacctaatgacttttgtattttatttttcaaaataaaagctttcaatgtgnnnnnnnnnnnnnnnnnnnnnnnnnnnnnnnngtcatcaaagatcagaaagatccacaacggcaccatacccaacgacggcgaagcacctggaaggagaggggcagaggcagattcgaagcgaccgcgcccaactcaaccccgaggaaaagcaggtattcagagaggtggcgccgcgccctccctctccgacattagaataatttagcaaaaccaannnnnnnnnnnnnnnnnnnnnnnnnnnnnnnnnnnnnnnnnnnnnnnnnnnnnnnnncgaacatgctcgcgctgccagaaaagaagacgccgtggtctaagaccacgaagaggacgctgatattctttcccgcgcccgacacaagaagcaggccgcgcgcggtggagggagcacgaccgggccgctgctagcgtatagcaacactacactcgccgcatcgccgggtgctctctcggcaggcagagagagaagcacaaaagaaggagacgatcccgctgctgcnctcgagagatgctagtgtcctcacgagcggagagtgcgtggcggatgtttagccgcctcaagggtgtggggtctctccctactgcttagctgggcacactagtacggatatgaccagcgactaaggggcgttgggtactatgctctctaacatacataaaaacagttactcgtcgccccacagagcgagtgtaacaagtgcgccgcacctacgtgcaggggctggtagatggaataggactgagcacgcgcatgcagccgtgccgagcaccatgtannnnnnnnnnnnnntggaaccgatccgcacgagtagantcaatgttacagagncctctgccgtgggccgcaacgcacaggcgagcgcgcggaacagaccgacttccctctcgtcgccattgggcgcccgtcncccgttcctaaggacgtagcgcgggtgggggggagagataaccactcccagatgtagcatatagatc

SEQ ID NO: 253395 - DNA, 573 bp, Homo Sapiens
  misc_feature (26)..(26): n is a, c, g, or t
  misc_feature (147)..(147): n is a, c, g, or t
ggggaaagctcaatagtcatagtacnaatcatataataaagaaagggaggagacttaaagagtttgtgagatgaagcagggaatctcaaacatgggatacagtattccaagcatagatttaagtatagaggaaaataatggatgagnaagcagaaggttcttggtctgtaaggaatcaatattacctctcagctgaaaacagccccattgggctgatgagttacactcgggaatgttctaagacctgacaatcccaacaccctcccaggagaaaagaactaaggataggggagaagatgttgaatgaaggaaggagggtatgcactttacatctgttccctattgtttggatttgttttcattaagcatacatatacttctgtcaccctgatcaagtcacacatactaccttcgatgccaaaggagagatcttacctgagtggtaatttctaatccaaggccactggcatctaccacagttagagtgagcagcgtctgcagtgccagggcaatgaaggtatttacaccaaatactagggcatagcgttccatgctgaggtttgcagcaatttg

SEQ ID NO: 253396 - DNA, 356 bp, Homo Sapiens
aggggctgatgagacactcgggaatgttctaagacctgacaatcccaacaccctcccaggagaaacacatctgttccctattgtttggatttgcattaagcatacatatacttctgtcaccctgatcaagtcacacatactaccttcgatgccaaaggagagatcttacctgagtggtaatttctaatccaaggccactggcatctaccacagttagagtgagcagcgtctgcagtgccagggcaatgaaggtatttacaccaaatactagggcatagcgttccatgctgaggtttgcagcaatttgaaaacttaaaaaacaataaaagagtgaataaataagaattacttctgga

SEQ ID NO: 253397 - DNA, 1082 bp, Homo Sapiens
  misc_feature (1041)..(1041): n is a, c, g, or t
  misc_feature (1053)..(1053): n is a, c, g, or t
tcacaaaaccattaagaacccagtgaataatgtgaggcctggttttccagtttctcttccattagcatatcctcctccacagtttgcacatgctttgcttgctgctcagactttccagcagatccgtccaccaaggttgcccatgacccactttggaggtacttttccaccagctcaatccacttggggtccgtttcctgtcaggcctttgagccctgccagagctactaactcgcctaagcctcacatggtgcctcgccatagcaatcagaatagcagtggttctcaggtgaattcagcaggttctttaacttcaagcccaacaactacaaccagttcatcagcttcaacggtgcctggtacatctacaaatggcagtccaagttcaccttctgtccgaaggcagctttttgtcacagttgtgaagacatccaatgccaccacaacaacagtcacaaccacggcaagcaacaacaacactgcacccacaaatgccacatatcctatgcctactgccaaagaacactatccagtatcatccccatcttccccatcaccaccagcccagccaggaggggtttctagaaacagccctttggattgtggatcagcatctccaaataaagtggcatcttcctccgaacaggaagcaggtagtccaccagtagtagaaacaacaaacactagacctccaaacagcagcagttcttctggggagttcatcagctcattctaatcagcaacaacctccgggatctgtttctcaggaaccaagaccacctcttcagcagtctcaggttcctccccccggaagttagaatgactgttcctcctttagcaacaagttctgctccagtggcggtgctttctactgccccagtgacttaccctatgcctcagacaccaatgggatgcccccagcctactcctaaaatggaaacccctgctattaggaccacccccttcatgggcacaactggccccttcacaaggaatttcaggtttcagtggcaaaatttcattcttgtttggcagttcctncagtgttcaatncacatttaaaaaggaccttcacagtgttt

SEQ ID NO: 253398 - DNA, 575 bp, Homo Sapiens
  misc_feature (495)..(495): n is a, c, g, or t
gaaagaaagcttgaggactgttgggaatattggaattattcttcgttatccttttacctttgtatagtaccttacagattacaaagtttttggatccattatctcatttcctcctcatcactaactgtgagagcctattgatagggctcagaagttgagtgagtttgccaaagttacccaagtaccaggacttgaatgtgagtcttctgacttcagtgttcattttacccatcacacctgcctcttaaagtagagattgtcatattgtcctgtgtaaccttggtcgaggctaccttcacattgtgagtgctaggtcctattgtggtgaacacaccttcgggccagcatcaccaaagtgatcaagggtgtagagagtctgctgctggacaggctaaatgtgccaggactctcctcagtggaaaaggatttcctcaaagtctacagatccaggaaggaacaaatgttaccttcaccatacaggcttaagaaaggcanatttgggacattgtaactgtgtagacttctgcttctggctaagatggactaacagagaccagacttcctttgtccctctg

SEQ ID NO: 253399 - DNA, 664 bp, Homo Sapiens
  misc_feature (65)..(65): n is a, c, g, or t
  misc_feature (99)..(99): n is a, c, g, or t
  misc_feature (179)..(179): n is a, c, g, or t
ggagaccagcccaggggacagagtcagaggcactgggtgtaaaaagagcgagcgtgtggcacatntggtccagtcatgtccgggtatggcagcagcagngggtattctagaagccccacatctagggccttctagggacccagatatgccacctaggcaaagctcacatgccaaagcanagcagatgaggtcagcctggcttgggttgagggctcagtgcctcttagccttgccctggggttcttggaccttccggaaactgagccacatcaggctcacgttgatagcataggtggtgatacaaacaatgcagaaatcatagagcacgaagaacaggatccaggccaggtagacagaaccagcgagagacaccagggagctcagcagcatcaggacagaggcccagcgtgtccgcaggcaaccctatgccaagtcctgttgtaagaattgcagcatccgggacctagagaccagcggatcaggggatccagcgaatacggcgatccgattcgggaaccaagcacccctgaaactatttcaggcaccattcgggctgcagcctcccatcctcccgggtcctgcctcaccagtgcttcctggtggtcggtctccctttctcccatacattcacagaaccactcctttggccacacacacccttgac

SEQ ID NO: 253400 - DNA, 896 bp, Homo Sapiens
ggagtgcgagcacggccggccaatcgccgagtcagagggccaggaggggcgcggccattcgccgcccggcccctgctccgtggctggttttctccgcgggcgcctcgggcggaacctggagataatgggcagcacctgggggagccctggctgggtgcggctcgctctttgcctgacgggcttagtgctctcgctctacgcgctgcacgtgaaggcggcgcgcgcccgggaccgggattaccgcgcgctctgcgacgtgggcaccgccatcagctgttcgcgcgtcttctcctccaggtggggcaggggtttcgggctggtggagcatgtgctgggacaggacagcatcctcaatcaatccaacagcatattcggttgcatcttctacacactacagctattgttaggttgcctgcggacacgctgggcctctgtcctgatgctgctgagctccctggtgtctctcgctggttctgtctacctggcctggatcctgttcttcgtgctctatgatttctgcattgtttgtatcaccacctatgctatcaacgtgagcctgatgtggctcagtttccggaaggtccaagaaccccagggcaaggctaagaggcactgagccctcaacccaagccaggctgacctcatctgctttgctttggcatgtgagccttgcctaagggggcatatctgggtccctagaaggccctagatgtggggcttctagattaccccctcctcctgccatacccgcacatgacaatggaccaaatgtgccacacgctcgctcttttttacacccagtgcctctgactctgtccccatgggctggtctccaaagctctttccattgcccagggagggaaggttctgagcaataaagtttcttagatcaacca

SEQ ID NO: 253401 - DNA, 716 bp, Homo Sapiens
  misc_feature (161)..(252): n is a, c, g, or t
gagccacatcaggctcacgttgatagcataggtggtgatacaaacaatgcagaaatcataaagcacgaagaacaggatccaggccaggtagacagaaccagcgagagacaccagggagctcagcagcatcaggacagaggcccagcgtgtccgcaggcaannnnnnnnnnnnnnnnnnnnnnnnnnnnnnnnnnnnnnnnnnnnnnnnnnnnnnnnnnnnnnnnnnnnnnnnnnnnnnnnnnnnnnnnnnnntagctgtagtgtgtagaagatgcaaccgaatatgctgttggattgattgaggatgctatcctgtcccagcacatgctccaccagcccgaaacccctgccccacctggaggagaagacgcgcgaacagctgatggcggtgcccacgtcgcagagcgcgcggtaatcccggtcccgggcgcgcgccgccttcacgtgcagcgcgtagagcgagagcactaagcccgtcaggcaaagagcgagccgcacccagccagggctcccccaggtgctgcccattatctccaggttccgcccgaggcgcccgcggagaaaaccagccacggagcaggggccgggcggcgaatggccgcgcccctcctggccctctgactcggcgattggccggccgtgctcgcactccacgacccaaatggctgttccagggcgctagtcaagcgggcgagttaggaaaacagcgaagaaat

SEQ ID NO: 253402 - DNA, 1020 bp, Homo Sapiens
  misc_feature (629)..(692): n is a, c, g, or t
  misc_feature (863)..(863): n is a, c, g, or t
  misc_feature (875)..(875): n is a, c, g, or t
  misc_feature (900)..(900): n is a, c, g, or t
  misc_feature (915)..(915): n is a, c, g, or t
  misc_feature (989)..(989): n is a, c, g, or t
  misc_feature (999)..(999): n is a, c, g, or t
agaagggcgacttgccagtgagcagccgagcttcaaaagtgaccacggacgcaggttcacgatgggagaaaggatcggcgcaattaagcacagagtcctgaagaaccccccacaaaaaagaaccggatgcagctttcggatgatgaaggccatttcactagcagtgacctgatcagctccccgttcctgggcccacacccacaccagcctcctttctgcctgcccttctacctgatcccaccttcagcgactgcctacctgcccatgctggagaagtgctggtatcccacctcagtgccagtgctatacccaggcctcaacgcctctgccgcagccctctctagcttcatgaacccagacaagatctcggctcccttgctcatgccccagagactcccttctcccttgccagctcatccgtccgtcgactcttctgtcttgctccaagctctgaagccaatcccccctttaaacttagaaaccaaagactaaactctctaggggatcctgctgctttgctttccttcctcgctacttcctaaaaagcaacaagaggcatggagaacagatgcaagattgttgcattgtgtatactgagataatctgaggcatggagagcagattcaggnnnnnnnnnnnnnnnnnnnnnnnnnnnnnnnnnnnnnnnnnnnnnnnnnnnnnnnnnnnnnnnntggtataggactttaaagctccttttggcatagggaagtcacgaaggattgcttgacatcaggagacttgggggggattgtagcagacgtctgggcttttccccacccagagaatagcccccttcgatacacatcagctggattttcgtggctttgatcagaaggtacttntcgaaggctttncaaggctcagctcccaaccagctgntaggaccccaccctnttgccttttgtcgacgtgactcaccaggacgtcgggagagagagccagcagaccgagctttcttgctacatggngaggtagcangcacttgcatagcacggtgtg

SEQ ID NO: 253403 - DNA, 229 bp, Homo Sapiens
acacaaatccagggggaaatagtctaaagaaagttcacaccattttcttggctcttttactcttgagaggtaaagtcaatgactcagcacagctcatcctcagctgccaaccatgtgtgatcaattctacatgtttatccatgtgtgagattttgtgctacaatcctgctctcataccttgcccctacaatccattttctacaaagtagccagtatgacccatatttat

SEQ ID NO: 253404 - DNA, 693 bp, Homo Sapiens
  misc_feature (518)..(518): n is a, c, g, or t
  misc_feature (643)..(643): n is a, c, g, or t
actaaaatttataaatggaattgttctctggtgtcccaggcatttttaaaaaaacaataaaagtaatgcatgagtctgattctgtttctagttccaaaatctttgtagcacaagctgtatacatcatttgtaattcaaaatgatgtcaacagcccacagaatacttgagggcaaagtatgacagatagatttgatttccatcctttaaaaacatgttgtagattatgcatgagtacattgcggttattcttttaatgcatgagcgtgtctgttattttcttaatattctgcaccacagaacaaatacattcggagtgtctgaaatcagagcaaatacataacttgtcttcgtaattttcttttcttcctcactgatcagagcggcttctgttttccatcttctttgttgaatcaaggcagcttgtgctttgtgtgtgccattataattcatctaaactaaatcatggcaacactttctcactgtctgatatatggcaggaaatacttgccctctcctnctgttctcttagtctccagctgaagcgaatgaatggaatctgctggctgttctatcttttaatctaagaaacaacttacttctcttttcatttcccctttctgaaaatacataaacaatatattntatacataatccaaggggtttgaaatagtctaattagaaaagttactttt

SEQ ID NO: 253405 - DNA, 768 bp, Homo Sapiens
  misc_feature (659)..(659): n is a, c, g, or t
  misc_feature (671)..(671): n is a, c, g, or t
  misc_feature (700)..(700): n is a, c, g, or t
  misc_feature (720)..(720): n is a, c, g, or t
  misc_feature (728)..(728): n is a, c, g, or t
  misc_feature (737)..(737): n is a, c, g, or t
  misc_feature (750)..(750): n is a, c, g, or t
agcatttaatgaaaccataaaaatatttgaagaacagtgccagacccaagagcggtacagcaaagaatacatagaaaagtttaaacgtgaaggcaatgagaaagaaatacaaaggattatgcataattatgataagttgaagtctcgaatcagtgaaattattgacagtagaagaagattggaagaagacttgaagaagcaggcagctgagtatcgagaaattgacaaacgtatgaacagcattaaaccagaccttatccagctgagaaagacgagagaccaatacttgatgtggttgactcaaaaaggtgttcggcaaagaagttgaacgagtggttgggcaatgactgaagaccaatattcactggtggaagatgatgaagatttgccccatcatgatgagaagacatggaatgttggaagcagcaaccgaaacaaagctgaaaacctgttgcgagggaagcgagatggcacttttcttgtccgggagagcagtaaacagggctgctatgcctgctctgtagtggtggacggcgaagtaaagcattgtgtcattaaacaaaacagcaactggctatggctttgccgagccctattaactttgttacagctctctggaaagaactgggtgctacattaccaacacacctcccttgtgncagcacaacgantccctcaatgttcacattaggcctacccntattatggcacagcagaggncgatggangcgtttatnctttggttccttnttcctgagttcaggccac

SEQ ID NO: 253406 - DNA, 325 bp, Homo Sapiens
gcaccggccctggtagtgataaatccaatccaacaactataggctgggaaataaaaggtcattccttatatttaagggaaatcacttctaaaaaaacacactaatcagaactgtgatgctctaattagaaacaactcatcgggccaactatttgctgctcaaagtttcttatttcttaaatgaaaaaaactcatcagttatattcatgtgatcgcggctaaaaagccagtaccttttgttcaaatgtggcttcatttgaaatttctcagattctacatgggactaattatgaataacaaattataaattaaaaactcttaaagag

SEQ ID NO: 253407 - DNA, 402 bp, Homo Sapiens
ggctgtaggaatacggcacgcgggaatgtggaaagaaacgaggttaatatcttttgggaaattaatttgtgccaaactatttggcttcttcgtcctagttgcattgtctccctgacctcatctcccctgagaatcagcctctgtttccctggtcaaggccacggcttttctctgatcctgaggagagtttcctaccagagtggaagcagggaggactgaaagcactaggaacagaggggagctatcggattgcatctagaacctgctgtgagcaacatcttcagaattaaccataatgtgttccctcctttcctgtgtccagatgaggaaggagaactttgattcttccttccaattacattctgcgagaggaaatcttatgatgttgggaggccattgggg

SEQ ID NO: 253408 - DNA, 683 bp, Homo Sapiens
  misc_feature (544)..(544): n is a, c, g, or t
  misc_feature (564)..(564): n is a, c, g, or t
  misc_feature (598)..(599): n is a, c, g, or t
  misc_feature (606)..(606): n is a, c, g, or t
  misc_feature (642)..(642): n is a, c, g, or t
  misc_feature (650)..(650): n is a, c, g, or t
ttttaattccaagaaagactgggctggaatatggattagggagtcacctgcatatacagattataattaaagtcttgggaacgaagaggccctttggagatcccagctccagtttagactgtggagaggccacctgaggtcatgagcactattggagcatgccctataagcatatgcggcttctacttcttccccttcactcatctctgcttcaagttatccctggaaaacacaagctggtaatccaagttgtgcccaatgctaccaccaacccttgcatgggcctcccttaatggcctcccaaccatttcataagaattcctctcgcatcctcaccccaaaggatcaaagcttccaaatattaggaggtgtgtggatattttggatgtaattggaaggaagaaacaaaggtctccttcctcatctggacacaggaaaagagggaacacattatggttaattctgaagatgttgctcacagcaggttctagatgcaatccgatagctcccctctgttcctagtgctttcagtcctccttgcttncactctggtaggaaactctnctcaggatcagagaaaagccgtggccttgacagnngaacagnagctgattctcagggagatgaggtcagggagacaantgcactangacgaggaagccaaatagtttggcacaaattaa

SEQ ID NO: 253409 - DNA, 715 bp, Homo Sapiens
  misc_feature (25)..(25): n is a, c, g, or t
  misc_feature (30)..(30): n is a, c, g, or t
  misc_feature (81)..(81): n is a, c, g, or t
  misc_feature (132)..(132): n is a, c, g, or t
  misc_feature (165)..(165): n is a, c, g, or t
  misc_feature (449)..(449): n is a, c, g, or t
ggaaaactgtctcactgactaattnggtgnaagaaagagcccaccaacttgaaacattgggaaaggcatttgtctctgggnaatcgaaccttgctcaaggactggtggtacgaaacaatcccaaagtagatntcctaacctagggtttactctgcatccctaccnagcctggcggaactgaagctccccaggggacagctccttgatgactaccggggcccacggagtgctgcacaccctcatccgctgccggttctcccccattcatagcactggccagcagttcatctacagtggctgctccactggcaaagtggtgggtaaggattgtgtcagaaaagggggcctcaggaagggcaggaatgactccttgccattccacctataacgactagtgaccaccttaaaaagcccagtgccagctacaggtaaaatcaaacttagcttgnaggcttaaccagagaaatagaaaccattctatttttcagtgttttaaattaagaaaaggaacatagaattctagacagtaaatataatagattgccaaaaatatagttggttctgtttttcagccagtcaagaaagaggttgcagatgaaaggtaggagggaacagagacaaaatgacacagcaagatggtagcaagtagttaagggacatgcagtcgctaaagcagaaaagcatagaaagaaataagctggctgcagtggctcat

SEQ ID NO: 253410 - DNA, 711 bp, Homo Sapiens
  misc_feature (31)..(31): n is a, c, g, or t
tccctgcccaaaactctggcccaaaagatanggaaccccaaacctgaactgggtgtgaaccaacgtaaaggaagacccactcctgcccccatggggagaaatccttccccagggctcaagctgaagcctcaaaagccccaggcttaatgttaatcccccatcaaatgcccagtgattcctccaaacattccccacaagggaagaaagggaggaggaggcagagagcttatcaagaggttcaccctatatggggctggaggttggatctactggggtgaggaaaagggtgtagaggattggggcactggggcaggggcgctggcacattcctcagattctggcatgtcatcctggaagtactcagcctggcggtactgccacagacgcaggttcccgtcccacgaactgctgacaatcttctcttcaaaggggtgccaactgacgtcacgcacacaggccatgtggttggtcagcttcttcacaatgtggccacttagaaggtcgtacacaaccactttgccagtggagcagcctctgtagatgaactgctggccagtgctatgaatgggggagaaccggcaccggatgagggtgtgcagcactccgtggcccttgggcacttgctgccaccgatagtcccagttttgctgtgtggcagcctggcgtgaagcttccatgccttcccggctggaaaagcgtcggatatcccag

SEQ ID NO: 253411 - DNA, 2044 bp, Homo Sapiens
aatggagaccacgaagcccacgaacgcaatgaataggtaatcatccagggtcagggtcaggtggcaggccttgaagctctcctcagtgagtgagaagagcggggcgccctcgacttcaggagggccccggcactcagccagctgagaatctgctgtacagcgctggatccggtttcgcagccacttcagcaggggttccatggtgcagccacacacccagggattgccaccgatctgcagggtcaccagccccggtaggccctcaagagcctaagaactcagcctgaccgtactgccacagacgcacgttcccgtcccacgaactgctgacaaccttctcttcgaaaggggtgccaaatgacgtcacacacacaagccttgtggttgatcagcttctccacaatgtggccacttagaaggtcgtacacaaccactttgccagtggagcagccactgtagatgaactgctggccagtgctatgaatgggggacaaccggcagcggatgagggtgtgcagcactccgtggccccggtaggtcatcaaggagctgtcccctgggagcttcagcttccgccaggcttttttgggcacttgctgccaccgatagtcccagttttgctgtgtggcagcctggcgtgaagcttccatgccttcccggctggaaaagcgtcggatatcccagaggatggtctggtctttagagttggagatcagataccgggcatcacccttgctgtcaatgaaggtgatgccatcctggtgtccagccagtgcacccacaggcttggggtcatcctcccgcatggtgcgtcgatcccacactttgcagatggcatcatctcccccagagaacaggatttgggagcttatatcagcaaaggccactgcattcacatcatcctcatgggactcaatctgaagggtgcgccggttctgttctcggtcaaagacatacaggcagccatcattggcccctcctagtacttctcgtccatctgaggagacagcaatggagaagacagcaaagcgacgctcatctggcctgagatccagggcagtgtgtgtatctccctcaccatagatattgcagatatgaatgtaatcagaccagctagagtagaggaagtgttcccatcaggggtgaaggccacatccaagacgctccagcctacgtcgcgggccttgatgctcttgaatttacggaaacggccatatcggcagtcatagagtcggattgtctggtcttggcaagcagacatgaatatttgaccatctttgctgtagatgccacagaaagccttctgagagtagctatcagtgaagcccagatcattgggcaagaagtgagatatcactcgagactgttctccaagggagaagcttccccgatggcagaggccccgttctctctggtgcaacattcgaggaaagctgtgcttctgggcggcccgcctaagccccagctgccctgtggccagttccacttgtgtcttgatctcattgaattccagctcccgggtgtcaggggtagcatccacaggtgggttgtatcgatccccaagacgaccatcccaagctctgtcattctcttcctctgagtccaagagggcctgaatgaattgtaaatttgctgcacctcctccctgcaccaacctcacttggcctctgcggaggagataggccagtacctgggccagatccacatcttcatcctcttcttcctcttcctcactccgacgcaggccagcccctcttcggggcaagccctcggaggggtctccggacccggatcctgcactgctgctgttccgcgatcccatcttctggtcacagcattcttaggtcctgtgcgggggctcctcctgtcacctccttgggtttggtgaaagcaaagcgtgctctagaaataccagggtctcctgagacggggtagtagctatctctaggagggtgacccttcctcggggctgagatcccttttctttagcctatgccaactaccaaggcgtcgggaacacaaaccttctccaatcctatcgaag

SEQ ID NO: 253412 - DNA, 1429 bp, Homo Sapiens
  misc_feature (163)..(163): n is a, c, g, or t
  misc_feature (278)..(278): n is a, c, g, or t
  misc_feature (330)..(330): n is a, c, g, or t
  misc_feature (464)..(464): n is a, c, g, or t
  misc_feature (470)..(470): n is a, c, g, or t
  misc_feature (568)..(568): n is a, c, g, or t
  misc_feature (753)..(753): n is a, c, g, or t
  misc_feature (785)..(785): n is a, c, g, or t
  misc_feature (841)..(841): n is a, c, g, or t
  misc_feature (846)..(846): n is a, c, g, or t
  misc_feature (1249)..(1249): n is a, c, g, or t
cgccgggggtgtgtacgccatgagggggaggaagccgagaagcacctcccactgaagccggcggtaaccgccccacgcgagaccacccaccagccaggagcggtcgcaggacccgcagcggcgcgaggccttgtttacaccgactgccgccactgcgtctgcnaaccgctcctccgtcacgcgcttcgctcgtcacgcatctcgcggcttcctggccggcgggctgcaaacgtcacacgacggccccgcccccttggccagccaactggacagcgganacgatgattgataggtgcactcctcccagcccagctccagaatggccctgcnccccagccccctggccatggaatatgtcaatgactttgacttgatgaagtttgaggtaaagcgggaaccctctgagggccgacctggcccccctacagcctcactgggctccacaccttacagctcagtgcctncttcanccaccttcagtgaaccaggcatggtgggggcaaccgagggcacccggccaggcctggaggagctgtactggctggctaccctgcagcagcagctgggnggctggggaggcattggggctgagtcctgaagaggccatggagctgctgcagggtcagggcccagtccctgttgatgggccccatggctactacccagggagcccagaggagacaggagcccagcacgtccagctggcagagcggttttccgacgcggcgctggtctccgatgtctgtgcggganctaaaccggcagctgcggggctgcgggcgccnacgaggcgctgcggctaaagcagaagcgccgcacgctgaagaaccgcgctacgcgnaggcntgtcgctccaagcggctgcagcagcggcgcgggctggaggccgagcgcgcccgcctggccgcccagctgaacgcgctgcgggccgaggtggcccgcctggcccgggagcgcgatctctacaaggctcgctgtgaccggctaacctcgagcggccccgggtccggggacccctcccacctcttcctctgagccgttcagagcaccttgtggtgtagtgggggctgggtggggtgctccgcccaggaggcggctgcacggttttctgcatcgttaccagagcgccttctggtcctagccacgccctgtatgaccgcgcaaatatccccaaagcttttgggtcctcaagtcatgcccgaatttagatgctggtcattttctggagaggggtcccctccccttacgnacacagaaacccagcccacatgactagcacgctgagctctgcagggaccagtgccaggcactggggggtggaagtgtggtgacacagtgaatgggaggtggaggagggttgcagctcccacctcagtttagtttttaattcagggttttcaacctgtaacacattaaagctgtaattagc

SEQ ID NO: 253413 - DNA, 1364 bp, Homo Sapiens
ggtagcgaggcctgggtggcgaattcggcacgaggcccaagcctgtgggtgcactggctggacaccaggatggcatcaccttcattgacagcaagggtgatgcccggtatctgatctccaactctaaagaccagaccatcaaactctgggatatccgacgcttttccagccgggaaggcatggaagcttcacgccaggctgccacacagcaaaactgggactatcggtggcagcaagtgcccaaaaaagcctggcggaagctgaagctcccaggggacagctccttgatgacctaccggggccacggagtgctgcacaccctcatccgctgccggttctcccccattcatagcactggccagcagttcatctacagtggctgctccactggcaaagtggttgtgtacgaccttctaagtggccacattgtgaagaagctgaccaaccacaaggcctgtgtgcgtgacgtcagttggcacccctttgaagagaagattgtcagcagttcgtgggacgggaacctgcgtctgtggcagtaccgccaggctgagtacttccaggatgacatgccagaatctgaggaatgtgccagcgcccctgccccagtgccccaatcctctacacccttttcctcaccccagtagatccaacctccagccccatatagggtgaacctcttgataagctctctgcctcctcctccctttctcccttgtggggaatgtttggaggaatcactggcatttgatggggaataacataagcctgggctctgagcctcagctgagccctggaagattctccccatggggcagagtggtctccttacgtgctcacacccagtcagcttgggtccctatctctggccagagtttggcaggactgccattatctggggtgtggcctctgccagcaagagaagtgtcctgggtgtttttaatcatgtttgaatgttaggggttggatcctagagtagatgcctgaggccacatctgaacagacctgtcagccaggcctgccaggtcttcacgttgaggattcaactggccaatcacaggacaggtgtcctggcctttcttcctgaggtctctaggggaggggcatgggtaagggtgtttcctcagcaccctcctggggtggggattatgtctgctgtcatgtctgggtctttagggtaggacaggctgtggtatgagaggcaggagtctccacaaggcttcatgtggccccttatagggcaggccctgccctctgggaaggtcccttcatgctggaggcacacagctttaaggaagtaggttgaagtaggactccttcgtcctctcactggctttggctccctcaataaactgtgtggggccctg

SEQ ID NO: 253414 - DNA, 1122 bp, Homo Sapiens
  misc_feature (30)..(30): n is a, c, g, or t
  misc_feature (35)..(35): n is a, c, g, or t
  misc_feature (39)..(39): n is a, c, g, or t
  misc_feature (485)..(503): n is a, c, g, or t
  misc_feature (1039)..(1039): n is a, c, g, or t
  misc_feature (1057)..(1057): n is a, c, g, or t
  misc_feature (1093)..(1093): n is a, c, g, or t
  misc_feature (1100)..(1100): n is a, c, g, or t
aaaaaaatcccccgggtgtttttaaaccangtttnaaangttaaagggttgggaacccctaaaagtaagaatccctgaaggcccacatctgaaacaaaacctgttcaccccaggccttcccagtccttcacgttgaggattcaaactggcccaatcacaggacaggtgtccccggcctttccttccctgaggtctcctaggggaggggcatgggtaagggtgtttcctcagcaccctccctggggtggggattatgtctgctgtcatgtctgggtctttagggtaggacaggctgtggtatgagaggcaggagtctccacaaggcttcatgtggccccttaataggcaggccctgccctctgggaaggtcccttcatgctggaggcacacagctttaaggaagtaggttgaagtaggactccttcgtcctctcactggctttggctccctcaataaactgtgtgggaacctggctcagtgtctgnnnnnnnnnnnnnnnnnnngtttttcctatctgaggtctttcatctcctcacttcaggaaaacacagttcagcaaagtcttcagatgcgatcctgtgtaggagaaaatacccttctggtgccccatgaaaaagggaaataccaaaaccatttgttcactgagccttgcaataggtgctcccttaccaatttcagaagcttccctgcaagtagatatcgagagagcacactttccattagagcctggtaatacccatatcacctctgctctgaggctgggcctgcagctgtgtagtctttggaagaggtagcccctgaacgcagagcctaagagaagcaagtcggccctgacgccaggccccagtgggcgcctcacactcagaacctcataccccagagcaaaccgatggtcagggagagggctagagctcacacccagctcggaatagatcttccctgatgacatttcatgccctctaaggcagtttttaaatgaaggtacacacatccaggggtgtttcacaggctttcacagcaagggtacctatttcatggncaaaatagggcagttttnaaaaggattaaacaagctaggtgtggtggctcatgnctggttnattcctaggcattttggggaag

SEQ ID NO: 253415 - DNA, 385 bp, Homo Sapiens
cggcacgagccgactccctgccctccccagtgtggttatttgagaaaaggcagcttgggtgagggggaagggattggggctgagaggggtatagtctgcctccccacccacggctggtggaacctgagggcccccggcgccaccagagcttcgtggcttaatgggggaggcgaggagccactgcggacctgctcgggacagtgaagggcgccagtctcagccctcatctgaaacctgctccgtgaccctggactagttcctgctcctctctggacctcctggccctgctcctttctggctgagtaactttgggaggcaggggcagtattatcatctccattttacgaggagggcaagcaatgtacccaagttcccacagctcggg

SEQ ID NO: 253416 - DNA, 343 bp, Homo Sapiens
  misc_feature (288)..(296): n is a, c, g, or t
gttggtggtaccacctatgagatttcggtgtgagccttcggcacctcccctccccaacgcctctgcgcctacaccaaagggccccaggtggccaccttccttccctcaaggggctcccctcccgtgcatggacattttttaaaccaccgattccaagaggatgaggagtgttttctaacccccccttttatcttttaagaccttcccttccttgatccctggaccagactcagtggacatttgtgcaattgctcgccctggagggaaccagatcatttttaaaccagnnnnnnnnnattattgttacggattctatttttttcctcttctgcgttaccggtgt

SEQ ID NO: 253417 - DNA, 1541 bp, Homo Sapiens
  misc_feature (383)..(383): n is a, c, g, or t
  misc_feature (387)..(387): n is a, c, g, or t
  misc_feature (420)..(420): n is a, c, g, or t
gggagatgctgctgaagccacatagccgtgtccaggtattcgagggtgcggaggacaacctcccggaccgcgatgcgctgcgggctgcactggccatccagcaactggctgagggactcacagctgatgacctgctgctcgtgctgatctcaggtgggggttcagctctgctgcctgcccccatcccacctgtcacactggaggagaagcagacactcactagactgctggcagcccgtggagccaccatccaggagttgaacaccattcggaaggccctgtcccagctcaagggtggggggctggctcaggccgcctaccctgcccaggtggtgagcctcatcctgtcagatgtggtgggggaccctgtggaggtgattgcnagtngccccaccgtggccagttcccacaatgtgcaanattccctgcatatcctcaatcgctacggcctccgtgcagccctgccacgttctgtgaagactgtgctgtctcgggccgactctgacccccatgggccacacacctgtggccatgtcctgaatgtgatcattggctctaatgtgctggcgctagctgaggcccagcggcaggccgaggcactgggctaacaggctgtggtgctgagtgcagccatgcaaggtgatgtaaaaagtatggcccagttctacgggctgctggcccatgtggctagaacccgcctcaccccatccatggctggggcttctgtggaggaagatgcacagctccatgagctggcagctgagcttcagatcccagacctgcagctggaggaggctctggagaccatggcatggggaaggggcccagtctgcctgctggctggtggcgagcccacagtacagctgcagggctcgggcaggggtggccggaaccaggaactggccctgcgtgttggagcagagttgagaaggtggccgctggggccgatagatgtgctgtttttgagcggtggcaccgatgggcaggatgggcccacagaggctgctggggcctgggtcacacctgagcttgccagccaggctgcagctgagggcctggacatagccaccttcctagcccacaatgactcacataccttcttctgctgcctccagggtggggcacacctgctgcacacagggatgacaggtaccaatgtcatggacacccacctcttgttcctgcggcctcggtgatggcataggtcacattttgggagttcagaggaggcctacaagggcaaggtcagatggcagagcaaggttggtcctcagggcctctctaagccttagggcccctcctcttcttggccttggctgtttggttatactgtcaccttccactcagggcctctgctctatatctattcccttccagccagactggcagatgggggcttccccctacccctgaggatgaggacaagcccctcggccagttcagcgttcccgtgcttctcccttgggcagcctctctcttgagcccctcaccctgtttctttctgtgaagcgagaatgtctgaaaataaataggaccatgcc

SEQ ID NO: 253418 - DNA, 1052 bp, Homo Sapiens
ttattatattaacatacttatttccatagggtgctgtgactttgcagctagtgcatactaatgccacctgatccttgatttgcataagtggtgatgtacaccaaatacacaaaagctggagtataaatatttatttttaaaaattaggccaaactgaatatagatatttaatctggtttcacaaactcttaaaataattttctgaggaaacaatgatgaggaatgtgtaggaaaggcaatgtttctatgctagcggtaccaaacctggaactttaagtatcattttttagctcattaactatatagaagattactaagaccagtaagggagccatttcttcccctcctctatttttattacttatctctctcctctttactcttaaaattggcaatcttctgacaacccaagctaataaaataatatagctatatataattcaaataactaaagaacttttgagtccatatatgcaggatttttgaatacctcactacatttgctcttataccctcactgtcctggtatcataaatattattaagggaagataacttagaaggggaaagcaattccaacctgggataaaaaagtgattacaaataattatcttgttgatagtaagggcttatggtaacaagtagctctgatttttcacataaagatccccccccaaaaaaacaaaatacaaacaattccagtttttttcccccagaatgtgacttatttccattatacaaagcagtataacaaaataagctctcttctgcacaaaaaacgattaatggtttataagacaaataagtagaatgcttctctttgcctttaaattaaaatactatgaacctaggtaacaaaacatacatggctttcttcaaaagggccacaagatttcttctggttattgtgacagctacccaatttaatgggaaataacactcaagcagtcatttggtaagtttcccatgaatttcagcatttacagtgccacaaacacaactgccacaattatgacaactctctgaaaagcacaaataaagcacatttaaaac

SEQ ID NO: 253419 - DNA, 359 bp, Homo Sapiens
ctgaggaaacaatgatgaggaatgtgtaggattagctcattaactatatagaagattactaagaccagtaagggagccattttcttcccctcctctatttttattacttatctctctcctctttactcttaaaattggcaatcttctgacaacccaagctaataaaataatatagctatatataattcaaataactaaagaacttttgagtccatatatgcaggatttttgaatacctcactacatttgctcttataccctcactgtcctggtatcataaatattattaagggaagataacttagaaggggaaagcaattccaacctgggataaaaaagtgattacaaataattatctt

SEQ ID NO: 253420 - DNA, 666 bp, Homo Sapiens
cgtaggcccatgagagtaaagtgcccccacataattagtagcccaacataaaaaaagctagattcttactttgtaggcctgataaggtttacagaatattttaaatgttgttatgaacctcaagaatatctggtccctgatactcgcaccccaagataactttaaatattaacagcttaatcagaattattgcaatattgatcaatttcatcaagaaaagacttacctggagtgattccatttggtcaatttaattacctgattaactgatacatcacagctaaacttcccaattttacatattatgcattttagcaaaactatttattagaattgttttctattgacaatttattctaaagatacgacatgttcatatatcaaatgttattaagaatagcctctcccactataaatgttttcctatcaattttgcagaaggaaatttgttgagatttgattcctctgtcaattttttagtcacaaattttactacgtgtgatttttgtgttgccaattttgtgttaattatttgtatccataatagctattattaattgcattaaatggctgataggaattgaatttgctatatttatttatgagataatctatgagaaaaacaattctgagacaatgagatggactcagggagatggggacgag

SEQ ID NO: 253421 - DNA, 568 bp, Homo Sapiens
  misc_feature (55)..(56): n is a, c, g, or t
  misc_feature (58)..(59): n is a, c, g, or t
cccagcacgacggtaaacgacgggccagtgaattgtaatccgactcactataggnntnntttttttgaccagatggaactagatgtgggcacagttttgtggcaggttgtccaagacaggtaaattctccagctgaggctccaggatatgcctggtgttggcgttataggcacaatggccacagctgtctccggtgagctttgattccacacaggttttcagtagtgtcccttgaggatgagatgcaaaagaagaggaggtactgggtgttgagaggtaagggtgggaggaatcaggagcgggcccagtccatattgagaggagcagaaaaaacaaatattcctgatccatagagggggagagtgcagagtgggggtggttctagtctttatttacggatggagagggccgaggcagaggttgtccagctctgtattccgcgtcagagagaagagctgaccctggctaggagcaggggaaggcagaggcagagatggtctttgtgccggcccccgcacacaccaagtaggaggtggtggcagaagctctccctttgatctcacccagc

SEQ ID NO: 253422 - DNA, 615 bp, Homo Sapiens
  misc_feature (28)..(28): n is a, c, g, or t
gcgcctgggtgcgccaacgcaaaggtantgagtacccggaactgacctagtaagtatatccaaaggtttagaaagggctgggttaagagctacaagaagcattaaccgcaacggccacaactaatttggactttcctttattagttcgcaacacaagaacatacaaaagaccgtagcgacaaccatttctgacgccttcaacaaatccaaattacgtgaaaccacaaagcatcagtggtgtctccccgaggaatccaagaccccccggccggttgccaagccgccggaatttcagcaggagaggaaggctcaccctcccaccgcatggcgatgcccgggagactggagaagctcaggcaggcttggaagccaatccccggcatacagcagctctcgggaatgcagagccctagagcaagaccaagggcctcggccgacactgagagcctccagggagaggtcaggtctctctttctgtcctatttctcccttcgacttccctcccagcaggctgctattgagcattcagcaatcgccagacaaagcccttctggtctgcagaacgcactccggcaagcccaccgggagaaccaaagccgcctcctcgcccctgtg

SEQ ID NO: 253423 - DNA, 1242 bp, Homo Sapiens
  misc_feature (1080)..(1080): n is a, c, g, or t
tgaaaaccgtgttgctaatacagcgaggtctccacagtttatcaacctgaaaagggatcctaggcaagcagcaggacgaagtcagcctgtaactacttcagaaagcaaagatggagatagttgccggaatggagaaaaacacatgctgcctggcctgtcacacaacaaggagcacttaacagaacaaatcaatgtagaggaaaagttgtgttctgcagagaaaaactcgtgtgttcagcagagtgacaatttaaaagttgcacaaaactcaccatcagtagaaaacatacagacttctcaagcagaacaagcaaaacccttacaggaggatattttaatgcaaaatattgaaactgtgcacccatttcgaagaggatcagcagtagcgacatctcattttgaagttggaaacacatgtccatcagaatttccttctaaaagcatcacctttacttccagaagcaccagccccagaacaagtacaaacttttcacccatgaggccacagcagcccaaccttcagcatctcaagtctagcccacctggatttccatttccagggcctcctaattttcccccacaaagcatgtttggatttccaccacatttgccacctccattacttccccctccaggctttggctttgctcaaaatcccatggttccctggccacctgttgttcatctcccaggtcagccacagcgtatgatgggtcctctctcacaagcatcaaggtatataggcccgcagaatttttaccaggttaaagacattcggaggccagaaaggcgccatagtgacccttggggtaggcaagaccaacagcaactggataggccatttaataggggtaaaggggaccgccagagattttatagtgattcacaccatttgaaaagagagcgacatgaaaaggaatgggagcaagaatctgaaaggcatagacgcagagacagaagccaagacaaggacagagacagaaacaagccagggaggaagggcaccaaagataaacgagagggcacgggttatcacatggtgatcgaggaacagatggaaaagcaagcagagataggtanggaatgtagaccaagaagccagataaacctaaaagtgacgactatgcgaagggccagaacgagagaaaggtacccggaacaggcaaaaggcgggttgtcccacagattgggccccgtcgacaaacccaggaattgcccgcggccgactccttaaacggacgt

SEQ ID NO: 253424 - DNA, 578 bp, Homo Sapiens
  misc_feature (54)..(54): n is a, c, g, or t
  misc_feature (81)..(81): n is a, c, g, or t
ggcaccggtcaggacctcttgaggctgtcacaggtgcatccttaaccttggcanaataaactgagactggtctcagatatntggggttcacaaaggcgtgagacggcagggtcctgaggtctgaggcgccgtgggcgaggagaagggtcctgaaatctgaggcgccgtgggcgaggaggagggccaagcacacgccagggtcaggtcctgggcaggtggaattgtgcagtccccctgcgtctgcaggtgctgtctgtctggcttgggcagggttgggggaggaccgaggccagagccatccttcctccaggcacttgcagggccaactggagattctaggcctggcctgagtctgcgcaggtgctagtgggacccacagcccggaggtgcccagttcatgaccgcccagttgcacacgttgagctggggctgcgcggggaccaaggcttcctggtgctgctggacgaccgaggtgatcctgctgagggcctcctggtactcggcgctggcaaagctgagggggaacctctcccctgggtcccgtcccaggtggaagatcaggggcagcttcgtgtggt

SEQ ID NO: 253425 - DNA, 1223 bp, Homo Sapiens
tacggtcctaggtagcgaggcctgggtggcgagcacgtgagcctagggcgagcggagggagtcctggtggccccgcaggtcaggagggaaagcagggctcagagggcatcgtggccccagggcagggtcctacctgggggtcaggagcaccttggtcttgatgattgattgattgatagaatggagctgggtctgagcctcccaggcttgagctcctgggagttcttgtgcggtgagctgggcagctcctgggtaggtccgggcaccaagcaggccctgatgtggacggagtcccatcagagggagctgatgaagaatggtccctgtaagtaagtcactaggttcaacaactgcctggccgagcactcagcccgtggagctcaggccaacaccagagccccggttttaggggccaggagagcaggtgaccaattatttggggagtcttgggtagaatttccgccacacattctccccagggctgcaggggtcttccgaaggcagggcggtggagcaggattcaggatgtggtgggaatagagttgaggggcagtgggtgggcaaacctgggcgtcagaggtcctgatgggaaaggaggcaggggctacccagagaggggggctcgtgtggcacagcccccaccgactccgccgtccccctcccctgtgagccccgggggctgtacatactctactccatccccttgtccatccctgagaaccacccccgccgcccttgcgtcgacttagccaaccacctcataggcccacccacctcgggatccgagccaaccatcccacatcacaaactttggtttgggggactttacgttcgtttaatttctcattttgcacggagaaatattcttttcgcgtcttttgactgaagtaactttcctggtgctgttgttaactcgttcctttgtttaatttattcccccaccccaggcagccctcctgggtcctactcaccgttagtcccattctgaccctacgtaccatgtgaaccattcgctcctatactgttccgtcagatttaggaaacagtcttcactcctacccggcctattcacagcatactgcccgatttacatgtagtcactgctaccaggtacagatgcactgtgaagatttcacgcttaataaaggtgtactggtgttaaccctggtgtcgtactgacaccatgggcggcccggtccccaatctgcctatgaagctgttgc

SEQ ID NO: 253426 - DNA, 633 bp, Homo Sapiens
agaggtaagaacaacacgtgtgcgcataccccccaatcagaaataggatccttgtgacctctgaagttaatatgccataaatgagaagggcccgaagacgcaatccagccaccatagtacacctgtgcctccaagtgacccgagtatgaccagaatcgttaagatccacacaagtactcttgatatatacctgattatcaccatcaaaatcatggatagaactagtgataacaagcaaagtcccaatataatttctttgctggtcattactccactaatcagcctgtgtaagacactattgtcactgacaaaggtgatcagggcctctgcaaacttggcatagcaggaaatgttcacaggagcacagcgatggaagaatggaataggtgcactcgctggaactggtagtttggggcagagaacagaagattttgcagatgtagtgtattcagaaggctttaggttgtagctacatagggctgaaccatttatctctgcaaacttctgaacatcactcagagttttcagttcttgccttggacacgctgctacacacagtgctacagacttaatcttccggtttatcaagtccaggttgcatggatccaaaaagaatacatacttccgctgggt

SEQ ID NO: 253427 - DNA, 1012 bp, Homo Sapiens
cacacagctctttacacatcgaaaatctgagttaatgttaaagaccaatgattagtcaatccctgaaaccatttagtgcaattgggggattcctcattttaagtcgctgctttagaattccgctcccctgcttgtctgcgttccgggtggaaagcggcatgctgcctttggacaaacagcctctgcaggggcagacacagttgtctggactcttttggaaatgaacaaagacactaaacctacagaacatcgtttttaaaggagatagttaaaaagtaatgccctaaaagccagaaatatttcaatcggcttgaaaagtgacacacaacaggagcaggaaacaccagtttttagtattttgccatcttaggcacactgctacttggaaagatttaagtgaactttgccttataaaaatattgataaatatatgtacttaagcgagaatccaaatcgtacccaaacttcatgaaagtgaaagtctattgctatgacatctagaagaaacactgagttatctaaaaggcaatgttcagtggtgggcagaaaggaagagaaaacggggggttccgagttagctccattcaagaggaagacacggttgtggcctcagctgcctctctactcgtcatgtaagggggtcttaacatgtcagaacattgtggggtcctgcaacttgctgacagatctcgatggagctgcttatgggactccatggggggaactgtaaggactcaacgtatcactggtggacatgcgcgatctactctagtcagaagcatgacaccaaacccaaccacccaggcacagtggcagttcagaaaagtattgctctgagagatctgagatctaaggtggcccctggctgctccgcgtgtgatgtcgccagagaggactctcactggacaaggcccagtggtctgaggctctgtacaaagcatgacgccacatgtgatcattctcacacgcacacacagcctaatcatccaaaaccctcgtgccgaattcctca

SEQ ID NO: 253428 - DNA, 840 bp, Homo Sapiens
  misc_feature (529)..(529): n is a, c, g, or t
  misc_feature (711)..(711): n is a, c, g, or t
  misc_feature (771)..(771): n is a, c, g, or t
  misc_feature (784)..(784): n is a, c, g, or t
  misc_feature (808)..(808): n is a, c, g, or t
  misc_feature (821)..(821): n is a, c, g, or t
cagcagagatttacccgagcgtgttgcggcagcggctgggcttgcaaggcgcgatccaagagggatttaagcagcccagagctccagagaaaaagagagcgagagagaaccacacacagagacggcttaagcgtttacccgaattaaatatatatttttaaaaagaactgttgagttttatcattttcgttaagtgaccgtgcgcaggctgttaactgcaggatggggaagcagaatagcaaactggcccctgaagtgatggaggacctggtgaagagcacagagtttaatgagcatgaactcaagcagtggtacaaaggatttctcaaggactgtccaagtgggaggcttctcgaggaatttcagcagctctatgtgaagttctttccttatggagacgcctccaagtttgcccagcatgccttccgaaccttcgacaagaatggggacggcaccattgacttccgagagttcatctgcgctctgtccatcacctccaggggcagctttgagcagaagctgaactggngccttcaatatgtatgacctggatggtgatggcaagatcacccgagtggagatgctggagatcatcgaggctatctacaaaatggtaggcactgtgatcatgatgaaaatgaatgaggatggcctgacgcctgagcagcgagtagacaagattttcagcaagatggataagaacaaagatgnccagattacactgggatgaattcaaagaagctgcaaagagcgacccttccattggtattncttctggcaggtncgacatccagaattggagctggtngtcaatggctttnggactggcacaaaagttct

SEQ ID NO: 253429 - DNA, 355 bp, Homo Sapiens
  misc_feature (86)..(104): n is a, c, g, or t
cagcagagatttacccgagcgtgttgcggcagcggctgggcttgcaaggcgcgatccaagagggatttaagcagcccagagctccnnnnnnnnnnnnnnnnnnnaccacacacagagacggcttaagcgtttacccgaattaaatatatatttttaactgcaggatggggaagcagaatagcaaactggcccctgaagtgatggaggacctggtgaagagcacagagtttaatgagcatgaactcaagcagtggtacaaaggatttctcaaggactgtccaagtgggaggcttctcgaggaatttcagcagctctatgtgaagttctttccttatggagcgcctccgtttgcccg

SEQ ID NO: 253430 - DNA, 592 bp, Homo Sapiens
  misc_feature (394)..(394): n is a, c, g, or t
  misc_feature (438)..(438): n is a, c, g, or t
  misc_feature (500)..(500): n is a, c, g, or t
  misc_feature (507)..(507): n is a, c, g, or t
  misc_feature (519)..(519): n is a, c, g, or t
  misc_feature (534)..(534): n is a, c, g, or t
  misc_feature (539)..(539): n is a, c, g, or t
  misc_feature (562)..(562): n is a, c, g, or t
gttgcggcagcggctgggcttgcaaggcgcgatccaagagggatttaagcagcccagagctccagagaaaaagagagcgagagagaaccacacacagagacggcttaagcgtttacccgaattaaatatatatttttaactgcaggatggggaagcagaatagcaaactggcccctgaagtgatggaggacctggtgaagagcacagagtttaatgagcatgaactcaagcagtggtacaaaggatttctcaaggactgtccaagtgggaggctaaatctcgaggaatttcagcagctctatgtgaagttctttccttatggagacgcctccaagtttgcccagcatgccttccgaaccttcgacaagaatggggacggcaccattgacttccnagagttcatctgcgctctgtccatcacctccaggggcagctttnagcagaagcttgaacttgggccttcaatatgtatgacctgggattgtgatgggcaagatcanccgagtnggagatgctggnagatcatcgagggtnttctnacaaaatggttagggcacttgtnattcatgattggaaaatggaatttagggat

SEQ ID NO: 253431 - DNA, 659 bp, Homo Sapiens
aggatattgaacagagtattaaatctgaaacatctggtagctttgaagatgctctgctggctatagtaaagtgcatgaggaacaaatctgcatattttgctgaaaagctctataaatcgatgaagggcttgggcaccgatgataacaccctcatcagagtgatggtttctcgagcagaaattgacatgttggatatccgggcacacttcaagagactctatggaaagtctctgtactcgttcatcaagggtgacacatctggagactacaggaaagtactgcttgttctctgtggaggagatgattaaaataaaaatcccagaaggacaggaggattctcaacactttgaatttttttaacttcatttttctacactgctattatcattatctcagaatgcttatttccaattaaaacgcctacagctgcctcctagaatatagactgtctgtattattattcacctataattagtcattatgatgctttaaagctgtacttgcatttcaaagcttataagatataaatggagattttaaagtagaaataaatatgtattccatgtttttaaagaatactttctactttgtggttcacagacattgaatatattaaattattccatattttcttttcagtgatttttttgggctgttct

SEQ ID NO: 253432 - DNA, 746 bp, Homo Sapiens
tcgaggctgggtggcgaattcggcacgaggcagaggaggagcgcagcccggcctcgaagaacttctgcttgggtggctgaactctgatcttgacctagagtcatggccatggcaaccaaaggaggtactgtcaaagctgcttcaggattcaatgccatggaagatgcccagaccctgaggaaggccatgaaagggctcggcaccgatgaagacgccattattagcgtccttgcctaccgcaacaccgcccagcgccaggagatcaggacagcctacaagagcaccatcggcagggacttgatagacgacctgaagtcagaactgagtggcaacttcgagcaggtgattgtggggatgatgacgcccacggtgctgtatgacgtgcaagagctgcgaagggccatgaagggagccggcactgatgagggctgcctaattgagatcctggcctcccggacccctgaggagatccggcgcataagccaaacctaccagcagcaatatggacggagccttgaagatgacattcgctctgacacatcgttcatgttccagcgagtgctggtgtctctgtcagctggtgggagggatgaaggaaattatctggacgatgctctcgtgagacaggatgcccaggacctgtatgaggctggagagaagaaatgggggacagatgaggtgaaatttctaactgttctctgttcccggaaccgaaatcacctgttgcatgtgtttgatgaatacaa

SEQ ID NO: 253433 - DNA, 1404 bp, Homo Sapiens
tagtgggggaagggtgagagctcagcactcactgctttattatcacagtaggtgacaaaggccgcaggagagggggaaaggtccagagctgtggagaaagaaggggctccctgtctccagggtttgtttaaggttttctccatggcctagggcccagccacttccctcactggcctcaaagccctggagttgagccctctaggcagtcaagggcaggcaggagatgggccagagaggggaggatgtgttctttaggtacagaatccctgaccacggggtccagtgcctgtgggccaaccaccaggaagctgtgcatgcccacagcccgaggcccctggtaatcgcagaggtaattatccccaacatgggctgccactactggttccatatgagcaagccgcaaggcctcctggaaaatgcgggggtccggcttgggccagccagcagcctcggaggtcagcacaaagtcgaagtgttcacgcaggccaaggccctccaggatgccctctagccgtcggtcaaagttggagatcactgccagtctcagaccccgtgtgcggcactccctcagggtgtcctcagccccatccaacacctgccaggtgcaggggtggctgaagtctttataaagctgttcagcgatgggggctacagcctgagcatcctggacacccgccaggtggaaggtctgcaggaccacatccagccaccactggcgggaggttaggccgtggctcaggccgtagttggggaagctgtggctctgagccctgtatgcctgcctgaagccttgttccagggctgagggctccacctccagcccatgggcccgggccttggtggcataggcctcccctaaggggtggcggagcctgagcagcgtgtccttcacatcccacgtcagcagtcgtatctgcagccggtgtgccatggaggaggccaagtccaccccagttctgcctcaggtcccacggtgggtcccaggggaagctgagctggataagaccacctctgcgcaacctaacaatcacctctttccaggccttgtgggtcagatttgctggctaacatgaagcacttgggaaatgtcttcacagcacaagatcccaaggtcacagtgagtcagtggcacagccaggaccagaacccaaacttccagactctctggccagttcttccactgtaccatgagatatatttggattttaaaaattggtgaaccttttctccccacctccagggctcgggaaaggcgaagtccaggagcccggacctcacgcagaatgtctatagctgccgtcggcagcgtgagctggggcggcggtcctaggggccttggccgcggccgaccccttgggtccccttctcagctgtagcgcgtccacggctccgggccggttcctg

SEQ ID NO: 253434 - DNA, 974 bp, Homo Sapiens
  misc_feature (310)..(337): n is a, c, g, or t
ggcctgggtggcgaattcggcacgaggccttgggcggctggacaggtttttgtgatgtgaaggacatgcatggggcacatggtaagcttggcaagggctccaggaacgctgacgaagggttttaggacccccacccccatgcctgtaccagggctggcctccagagcgggtgaggacagagcagctgtgggcttttcattctgaggtcttggcccccctggccaccgcaagggactctttgcttgtcagggcttgcaaaaaccaaccttcgagaaagaaaagggaactcttcacgttgaatgttgacttnnnnnnnnnnnnnnnnnnnnnnnnnnnncacgcgcgcgtgtgcgtgtttacttcatggaattttgttttgtgaaattcccctccaatcgtgtcagaatttacctccatgccccagtcacactgttggttctgcgctctgaacctgggtgtagctcatttgaaggactctcttctgcgtttcctaacagttatttggtggtctcaagagttgaggttgtggagggttgggagaaactgaagttctatacatttccatagagtttacatcctgcagttaaaaggcagggagggctcagcccgggccccacagctccaggccatcccctacgggctgcccacagtgcccccttttctctagccgaatctttttcgaacagcccgggaaaggaaaacggattcacttgctgattttgttcacggcggaagcaccatggtccgttcctttttcagggtcagtttgttgggaaaatggcggtttttttctgagtgagctctggtgatggaggcagggctccctttgaagacatggtcccacctccgggtcttgaaaccacccaaataaaaatccgggtttgggcccaggcccccctccggccacatcaacctgaaaccccccctctgaattgctcgggcgacaaaaaagacatttccaccagctgaatgcc

SEQ ID NO: 253435 - DNA, 996 bp, Homo Sapiens
  misc_feature (403)..(403): n is a, c, g, or t
gaataataatttgaacagtgaatgttgatgtaacatcttaataatagagcaccagaaaaatttctaccaaatgagacaacaactttaggataagttcatcctctaggagctttctaatgtgcactcagttcctgtatactgtgtgttttgttctgatcaaggggtagggaacctttccagagaagtcccattagtaagaaatgacataaaatacgtgctttctcaggttactgtataactgttataatatatttaatatataaaattaagacttttgcttccagcaagtatgttagactagatattataaaacaactagatcctgaattctgcttttaataggttcactggaagtaggagaattttcaagaaccatacttcgacatttcctctgccacaaggnatatggttgtctggatggcagataccaatagccacattgtcatatgcagtttgcctcaaatcagaaacaagaagacatcggaatctgagatgctgccctagagaggacaggtaaagaaggttcagtggtcctcaatttgcagtgctctagctcctggcagaagcaagagggaaacattcttaatttagttccaagattcctacagattattatcaagtagtagtattttatgactagagatcacaggcacaagttgaaacaaactaacatgacaagaaagctatagaaaaaataaacattgaactcagttcttcaaggtttcatcaccaacataaggaatgaagttggaaccacaggcagatctgaaaaagaaccaaatagagctcctaaaaatgagaaatatttattgaaataagaaaaaagccctcagacatgttgaatattttattagactcagctgaagagacaagtgaactaaactataagctggatctaaagaaattacccagtgagcagtgaggagaaacaaggagctagaaaacattggaaagttaagagagttcgagggaagaattataaagactaggagtcct

SEQ ID NO: 253436 - DNA, 747 bp, Homo Sapiens
  misc_feature (47)..(143): n is a, c, g, or t
  misc_feature (159)..(168): n is a, c, g, or t
agtcgacggtaccggacatatgcccgggaattcggccattacggccnnnnnnnnnnnnnnnnnnnnnnnnnnnnnnnnnnnnnnnnnnnnnnnnnnnnnnnnnnnnnnnnnnnnnnnnnnnnnnnnnnnnnnnnnnnnnnnnntacataagtaaatttnnnnnnnnnngaataataatttgaacagtgaatgttgatgtaacatcttaataatagagcaccagaaaaatttctaccaaatgagacaacaactttaggataagttcatcctctaggagctttctaatgtgcactcagttcctgtatactgtgtgttttgttctgatcaaggggtagggaacctttccagagaagtcccattagtaagaaatgacataaaatacgtgctttctcaggttactgtataactgttataatatatttaatatataaaattaagacttttgcttccagcaagtatgttagactagatattataaaacaactagatcctgaataaaatctgcttttaataggttcactggaagtaggagaattttcaagaaccatacttcgacatttcctctgccacaaaaaatgaacgcattttaagttaggagtcatgaatactgtattgaccatacaagtggattatggttgtctggatggcagataccaatagcaacattgtcatatgcagtttgcctcaaatcagcaagaagacatcggtctgagatgctgccctagagaggaccagttaaagaaggtc

SEQ ID NO: 253437 - DNA, 373 bp, Homo Sapiens
agaagactgacaaaagggcaggttgccacacagaaaaacatgtcaactggctggtcttggttgatactcctaaatgtgcgagggcagacggtgttgttaacttcaaaaacagaagtatttccatgttatcttgggtaatagttatcttgtttgtatttattaggtttccattagtgctctattataaaatatttaaaacacagatttacaatagtgaggaacaaacataaaatttgattcatatggcctgtttgcaaaagtaggcttatttcagggggagtatgaaaataagcaaggcagactattatgagaaatagcctctaatgaagatctccatctctttagaataaccttgaaaagtaacaagaggaag

SEQ ID NO: 253438 - DNA, 614 bp, Homo Sapiens
cagccacctgctgtagttggacctgaggtcagaggcggggcatcagaggctcaaggtgctgagaagccacccggaaagcagccagcacaagggcccaggaagccagcccccgagagctgagcgtgggggtctttgagtgtctttctccaagctgagacgtgggcggccgcgtggtatctcccgagggctgcttggaccctggtgggctgagtgctccgaggaggggtggactccaccttggacagtgggatgtggtgttccacatgtgcctgtttccacgccagcaccttgacttggcagcatggagccaaggtctgtccccgcccaggagggtgccttcctcgggggtagggggacggcccactctgccccagggagtcccttttgatgggaagtgcagtcagcagcgtggaggtgtctgggcccccttcaaaaggtggatgtggtggccgagaccccgtccacggagggtgatggcctttcccttctgcaggtgcgggcaggtgggcctgggaccggtgctggggcctctccctgctgtgtgtgagggcccaggtggaaggcgcggacctgacagcattccaataaagcatacgggaacatgccaaaaaaaa

SEQ ID NO: 253439 - DNA, 892 bp, Homo Sapiens; identical to SEQ ID NO: 3869

SEQ ID NO: 253440 - DNA, 965 bp, Homo Sapiens
  misc_feature (146)..(155): n is a, c, g, or t
gccaaggaattttttattaagtaaataatttaatgatagaacactgaaatttctttagacacagtattttcaagttatatttctgcctggagtacagatatgaaatagcacaaactgtactctgaattaagcaaacagaatgaatnnnnnnnnnntattctcccaacctaagtttccgttcctcatttccacttgcctcagactctttctattgaacatatctagttaaatctctaatggacggcctgtgggaagatttactgccaacagggatgactgacttctttccggacactgagcaggggactgtgggctctgaagcagtttacttcctgtggaaagccagtcccatttctattttacttcgatccaggcctattcagataaagcaccactcagtagctactgaccatttaagtatggagagaaaagcaaagtagaaaaatggttttcacttaaagaaaaagcaaatggaagaccagccataatagctccatggcacaagagacatgacagggatctcctccccagatgtcccctgatgtttgtcagcctctcatatccctggccctctggcttctggctctgtgattacagttgccacagaggattcatggacagcaaaaagcttaaggaacctggaggttttgtacaacatgtacattctgctgacagaaacacatacatggtatggactattattaaaattgatagcctgcttgcactcagtatacaggctgcttaggaacactttattgggagataccctgctggtgttggagcagcacaaaatgatgaggctaacttaagtagtgacaagaatgatcctcttataccatatggccaaagaacagctgtccatccccaagtctatgggggatcagatgaagtgtggagtttggttggttggtcagtgaatttttggtcagtgaatacatacatatggcatagtgaagtacaattgc

SEQ ID NO: 253441 - DNA, 1325 bp, Homo Sapiens; identical to SEQ ID NO: 102234

SEQ ID NO: 253442 - DNA, 775 bp, Homo Sapiens
aaagcattagtttgctgcaggtatgttaggagtactttccccatgtgattgatcagtgaatttaaaaatggctaaagtgcgtaaccttaaatgatggtgcaaatataccttaaacattttatattttcattgaaaacacaagtgtacttgacaccttttgatgtagagcagaggctttttttcttcgaatatggggtcaccagtagaaggtctctggtgcatttcctgcataaactatgctctagtgcaacatctacaataattactttccttatttttgaagtggaccatatctcgacatttattaatcaatctgcatgtgtaaaacctttagatttttatgaattcctcctcaagctttacagtcaactatatgagtggattgccctctgtggatctgatagcaattttttaaatgattcacgtttcaacttgttaaaaacatttaatttagttaaaaaccaaacaagagctttgtttcttttcacattcatttctcagtttagatcatctttaattaaatataaatgtaagaaagttggcatgggtgggcacactagcaaacacctgccagctgcatgtggacccaggtgggcaccggactgttttaaacacaggagagggcccattgtctaactggtgagttggttgagtggaagctgggtgagaacttttactgcaaaccatttacagtagaccacaattttatagtcctgtttggcactttttcatatcactgggagcctgaagtaggtgggtggatctctttcgcctc

SEQ ID NO: 253443 - DNA, 644 bp, Homo Sapiens
ttgaagtggaccatatctcgacatttattaatcaatctgcatgtgtaaaacctttagatttttatgaattcctcctcaagctttatagtcaactatatgagtggattgccctctgtggatctgatagcaattttttaaatgattcacgtttcaacttgttaaaaacatttaatttagttaaaaaccaaacaaaaaagagctttgtttcttttcacattcatttctcagtttagatcatctttaattaaatataaatgtaagaaagttggaaaatgcaaagaaacgactcgttgtaagcacataactcacgtggggggaacagacatgggtgggcacactagcaaacacctgccagctgcatgtggacccaggtgggcaccgcactgttttaaacacaggagagggcccattgtctaactggtgagttggttgagtggaagctggttgagaacttttactgcaaaccatttacagtagaccacaattttatagtcctgtttggcactttttcatatcactgggaccctgaagaaatagaagtgggttggatctctttcagcctcggaaaagcctgccattcccccatctaaaaaccctttccccattctcttactctgtctcatcatgtatgtaacatgtatcca

SEQ ID NO: 253444 - DNA, 741 bp, Homo Sapiens
ctgcccggcgcgccccgggtgcccgtcaccccgtgggccaggcccttccgtggtgtggggtccgtatcgggctcgttcgcttctcggctgttctccttgactgtggaattaccacactgttggtacacccctcgacaaattcagattcaaaatcctgctcactgtaccaggctccaccagtcacagaccggtctggctgcaggttatagagcatatacaccttctgttttgaggctgctacagacttaacagctttgataagctttttactttccagattcttcagaattttgttgatttctgttaatggcaaattacttttatagcggatatctctgctccatattcctttatttcctgcatcctctatgatttgatatactagtttttcttggttatcggatcccttcattttaccagcattctgagagtcctttattctatataaaaggcccgtattgctccttaagagatccaactgacccatagacaacaacctattgatggctactgcccgctgctgggcttctatatgaggcatttcattctgaattacttggtctgtgattccatgagggaactggtgacataattctataatcctgttttctatttcgaccggatccgcgtcaggcggctgcaccttcaccttcacctccgccatgagggcgcagttcctgacgcctggggggaaagatgcacggagcagcccggtagcaagccggggaacccgggtaacca

SEQ ID NO: 253445 - DNA, 756 bp, Homo Sapiens
  misc_feature (104)..(104): n is a, c, g, or t
gccgccgcagcgcccctggtggccgtcccccgctgccaattcccctcccagggttcgggtctgtcccggacctcctgggcccggcaatgcccctcaggaggccntgctttcttgacgtggtcgttgcttctctctgttccgcttggctgtagaatttaaacgctgtggtttaacccctcgacaaatgcagattcaaaatcctggtcactgtaccaggctctagaggctgctacagacttaacagctttgataagctactttccagattcttcagaattgtgttgatttctgttaatgccaaattacttttataccggatatctctgctccatattcctttatttcctgcatcctctatgatttgatatactagtttttcttgcttatcggatcccttcattttaccagcattctgagagtcctttattctatataaaagccccgtattgctccttaagagatccaactgacccatagacaacaacctattgatggctactgcccgctgctgggcttctatatgaggcatttcattctgaattacttggtctgtgattccatgagggaactggtgacataattctataatcctgttttctatttcgaccggatccgcgtcaggcggctgcaccttcaccttcacctccgccatgagggcgcagttcctgacgcctggggggaaagatgcacggagcagcccggtagcaagccggggaacccgggtaaccagtggaggatagcgctctgctgaggccg

SEQ ID NO: 253446 - DNA, 1915 bp, Homo Sapiens
ggcgcctttgtatataacccttgattaaaagcaggctggtacggtccggaattcccgggatatgtcgacccacgcgtcgcgtggcccaaggagggagtggaatggccgcggtgcggctcgacgcagaagaggcgacgctgagatggcgtgcagcttcagtcggacggcgatctcaggagctggtcgctgtcggctaagcaagattggagctactcgtctgtccacctccagctcgcgtaagggtggctgtgcgacgtgcggcaattttgtggatggaacagcggtgaagcaagtgatcctccccctgttgtgcggggcatggacagctgctctctagagattgctaactgtgaggaaccaccaggagactctcaaataccagtttgatgccttctatggggagaggagtactcagcaggacatctatgcaggttcagtgcagcccatcctaaggcacttgctggaagggcagaatgccagtgtgcttgcctatggacccacaggagctgggaagacgcacacaatgctgggcagcccagagcaacctggggtgatcccgcgggctctcatggacctcctgcagctcacaagggaggagggtgccgagggccggccatgggccctttctgtcaccatgtcttacctagagatctaccaggagaaggtattagacctcctgcaccctgcttcgggagacctggtaatccgagaagactgccgggggaatatcctgattccgggtctctcccagaagcccatcagtagctttgctgattttgagcggcacttcctgccagccagtcgaaatcggactgtaggagccacccggctcaaccagcgctcctcccgcagtcatgctgtgctcctggtcaaggtgtaccagcgggaacgtttggccccatttcgccagcgagagggaaaactctacctgattgacttggctgggtcagaggacaaccggcgcacaggcaacaagggccttcggctaaaagagagtggagccatcaacacctccctgtttgtcctgggcaaagtggtagatgcgctgaatcagggcctccctcgtgtaccttatcgggacagcaagctcactcgcctattgcaggactctctgggtggctcagcccacagtatccttattgccaacattgcccctgagagacgcttctacctagacacagtctccgcactcaactttgctgccaggtccaaggaggtgatcaatcggccttttaccaatgagagcctgcagcctcatgccttgggacctgttaagctgtctcagaaagaattgcttggtccaccagaggcaaagagagcccgaggccctgaggaagaggagattgggagccctgagcccatggcagctccagcctctgcctcccagaaactcagccccctacagaagctaagcagcatggacccggccatgctggagcgcctcctcagcttggaccgtctgcttgcctcccaggggagccagggggcccctctgttgagtaccccaaagcgagagcggatggtgctaatgaagacagtagaagagaaggacctagagattgagaggcttaagacgaagcaaaaagaactggaggccaagatgttggcccagaaagctgaagaaaaggagaaccattgtcccacaatgctccggccccctttcaccatccacagtcacaggggccaaagccccctgaaaaaaggctgtgggtgatgccccctacagcttaattcaggaagcaagccagcatcccccaaatgcccgagatccacattcctggaaaaataaaggcccggaaagagaaaactgggagtccccgggaaggccctaaaaccctgaaggaaaaaggttgtaggaatggctggggagcttaagaattagccccgggagcttacgggcctcatgggggcgccc

SEQ ID NO: 253447 - DNA, 977 bp, Homo Sapiens
aaggccggaatgaaggaaaaccaccggtccaggagggcgccccccagcgctggcccggcgggggaaaccccaggaatgtttccctttcaggaaagggctcccatctggtttcccccgttatcccctcccacgcgtttccaggtcctcccccctggcggagggggcccgggagcttccccccagcccacgattaggcgggccttcttcgggcccaatgcgctgaaaactgcggagatcctcgggctgagccttcgttcagcagatccagtattttttggcgcccatgagccagtagctccgggctgatctgtagctcccagcagtcctcagccttctcctcaggctctagggcatccagggactccagctttctcttccggcctttattcttcaggatgtggatctcggcatttggggatgctgcctgctcctgaattagctgtaggggcatcaccacagcctttttcaggggctttgcccctgtgactgtgcgatgtgaaaggggccggagcattgtgggacaatggttctccttttcctcagccttctgggccaacatcttggcctccagttctttttgcttcgtcttaagcctctcaatctctaggtccttctcttctactgtcttcattagcaccatccgctctcgctttggggtactcaacagaggggccccctggctcccctgggaggcaagcagacggtccaagctgaggaggcgctccagcatggccgggtccatgctgcttagcttctgtagggggctgagtttctgggaggcagaggctggagctgccatgggctcagggctcccaatctcctcttcctcagggcctcgggctctctttgcctctggtggaccaagcaattctttctgagacagcttaacaggtcccaaggcatgaggctgcaggctctcattggtaaaaggccgattgatccctcgtgccgaattcgccacccaggcctcgctacct

SEQ ID NO: 253448 - DNA, 620 bp, Homo Sapiens
ctaatattaccactgggtactgagtagtacctctctttcactagttgcataataagaattaacccagagagtgacctgagggcgggattttggacacacttgacaagagaggaagaggctggagcgcaggaggtagctggtgctgggctcctagtcttggcataggagcccaaagcacttggctgccctgcgtgtcactcatctccctttgcctcccagctggagtccctggatgccctagagcctgaggagaaggctgaggactgctgggagctacagatcagcccggagctactggctcatgggcgccaaaaaatactggatctgctgaacgaaggctcagcccgagatctccgcagtcttcagcgcattggcccgaagaaggcccagctaatcgtgggctggcgggagctccacggccccttcagccaggtggaggacctggaacgcgtggagggcataacggggaaacagatggagtccttcctgaaggcaaacatcctgggtctcgccgccggccagcgctgtggcgcctcctgaccgtcgtctcctcactccgccttttcaaatttttgtataaccccgtgttgtgtaaatacagtttttgctccggtgaaaaa

SEQ ID NO: 253449 - DNA, 633 bp, Homo Sapiens
  misc_feature (427)..(427): n is a, c, g, or t
  misc_feature (442)..(442): n is a, c, g, or t
  misc_feature (449)..(449): n is a, c, g, or t
  misc_feature (545)..(546): n is a, c, g, or t
tttccctctgccccggcggttgtaatcttaaaccgccggagcccgaggcctatatttatagagaaacgcgtgtccccgaggccgccgtgggcagcgtccggtcgcctcttaaaggatttttacccttcggaaggggattccccgtttaatttttttcctactttgattttttgaaatttggagcttcgcaccaggaccgcggagaagtgcgtcgcggggagggccgtattgtgcggagagccttttgtctgcggtgctgcggccgtgggagccggcccccgcctcccgtttccgtcccgtctccaagcccgccgactccagctcgtcctcgccgcgccggtgccacctgtgagccgcggcgcgggcccgggctccgaaggcgcccctttgtcctgcggcgggcccgataagaagtcctcctggcggngctcggagtggtggngggcggngagatgaacgctgcggccagcaactaccccatggcctccctgtacgtgggcgacctgcattcggacgtcaccgaggccatgctgtacgacacccgnncgcttcctgggctagtgctacgtcttccagagacggccgacgcttaccggctttggacaccatgaaccttgaggtgattagggggcc

SEQ ID NO: 253450 - DNA, 659 bp, Homo Sapiens
ggccgtgtgggtgagttggctgccggtgagttgggtgccggtggagtcgtgttggtcctcagaatccccgcgtagccgctgcctcctcctaccctcgccatgtttcttacccggtctgagtacgacaggggcgtgaatactttttctcccgaaggaagattatttcaagtggaatatgccattgaggctatcaagcttggttctacagccattgggatccagacatcagagggtgtgtgcctagctgtggagaagagaattacttccccactgatggagcccagcagcattgaggatgctaagactttaattgataaagccagagtggagacacagaaccactggttcacctacaatgagacaatgacagtggagagtgtgacccaagctgtgtccaatctggctttgcagtttggagaagaagatgcagatccaggtgccatgtctcgtccctttggagtagcattattatttggaggagttgatgagaaaggaccccagctgtttcatatggacccatctgggacctttgtacagtgtgatgctcgagcaattggctctgcttcagagggtgcccagagctccttgcaagaagttaccacaagtctatgactttgaaagaagccaatcaggcttcactcatcatccttcgttggggg

SEQ ID NO: 253451 - DNA, 368 bp, Homo Sapiens
aattctggccaggctgcactgtggctagctggaaagaaaacagaagggttaataagctgggctgagttaccctgctgatggccctaccatggtcaggagaagctgtgttggtgatgcagctattcattaggaactaagggatctgctgtcccaaggatatcctttccaggcagcagctattttaaggttaactcaccacatcatacttaaccaaatgcctggcatcattgtcacttcttgaagtcacttcaacagggatcacaaaagcagcagcaaagtacatggagtcagtacttttttctgttaaagactcctttagaaatatatttgaagtatatttaaatacttaaaagttgagcttgtgtgtg

SEQ ID NO: 253452 - DNA, 562 bp, Homo Sapiens
ttaaaaaattttctttatttcagaactgcctttatgtacagacatcatttaaaaaatgcacatacaatggagattttccaaggaacaggagctggaaataaaatttaaggacattattagaactgaaattgtcccagagaagttctgaggatcaggattccttaaatgtccttgataacctcttcaagttcttcctttgtgaacatgtggaaattctggccaggctgcactgtggctagctggaaagaaaacagaagggttaataagctgggctgagttaccctgctgatggccctaccatggtcaggagaagctgtgttggtgatgcagctattcattaggaactaagggatctgctgtcccaaggatattctttccaggcagcaggtccctaaaatagctctctggctccaaaataaaaatgcttattgaccaaattttctattttaagggtaactcaccacatcatacttaaccaaatgcctggcaatatttgcactttttggaggcactttaacagggatcacaaaagcagcagcaaaagtcattgagtcagtacttt

SEQ ID NO: 253453 - DNA, 1011 bp, Homo Sapiens
gggggtccttagtactgcggccgtgtgggtgagttggctgccggtgagttgggtgccggtggagtcgtgttggtcctcagaatccccgcgtagccgctgcctcctcctaccctcgccatgtttcttacccggtctgagtacgacaggggcgtgaatactttttctcccgaaggaagattatttcaagtggaatatgccattgaggctatcaagcttggttctacagccattgggatccagacatcagagggtgtgtgcctagctgtggagaagagaattacttccccactgatggagcccagcagcattgagaaaattgtagagattgatgctcacataggttgtgccatgagtgggctaattgctgatgctaagactttaattgataaagccagagtggagacacagaaccactggttcacctacaatgagacaatgacagtggagagtgtgacccaagctgtgtccaatctggctttgcagtttggagaagaagatgcagatccaggtgccatgtctcgtccctttggagtagcattattatttggaggagttgatgagaaaggaccccagctgtttcatatggacccatctgggacctttgtacagtgtgatgctcgagcaattggctctgcttcagagggtgcccagagctccttgcaagaagtttaccacaagtctatgactttgaaagaagccatcaagtcttcactcatcatcctcaaacaagtaatggaggagaagctgaatgcaacaaacattgagctagccacagtgcagcctggccagaatttccacatgttcacaaaggaagaacttgaagaggttatcaaggacatttaaggaatcctgatcctcagaacttctctgggacaatttcagttctaataatgtccttaaattttatttccagctcctgttccttggaaaatctccattgtatgtgcattttttaaatgatgtctgtacataaaggcagttctgaaataaagaaaattttaaaataaaaaa

SEQ ID NO: 253454 - DNA, 481 bp, Homo Sapiens
  misc_feature (55)..(55): n is a, c, g, or t
  misc_feature (307)..(307): n is a, c, g, or t
  misc_feature (418)..(418): n is a, c, g, or t
aaccctttcctcatcaatccttccaaaataataagcctactccaaaaggaacganaacatggcacctggatctgcatcttccttctcccaaactgcaaacccagattggacacagcttgggtcacactctcccactgtcattgtctcattgtaggtgaaccagtggttctgtgtctccactctggctttatcaattaaagtcttagcatcagcaattagcccactcatggcacaacctatgtgagcatcaatctctacaattttctcaatcctgctgggctccatcagtggggaagtaattctcttncctccacagctaggcacacaccctctgatgtctggatcccaatggctgtagaaccaagctgtcgtactcagaccgggtaagaaacatggcgagggtaggaggaggcagcgntacgcggggattctgaggaccaacacgactccaccggcacccaactcaccggcagccaactcc

SEQ ID NO: 253455 - DNA, 2135 bp, Homo Sapiens
  misc_feature (1799)..(1799): n is a, c, g, or t
  misc_feature (1929)..(1929): n is a, c, g, or t
  misc_feature (1978)..(2028): n is a, c, g, or t
  misc_feature (2057)..(2057): n is a, c, g, or t
ggcgcgctgcttaggccggggcgtttcgacaggcagatctttattggaccaccagacataaaaggaagagcttctattttcaaagttcatctccgaccgctaaaactggacagtaccctggagaaggataaattggcaagaaaactggcatctttaactccagggttttcaggtgctgatgttgctaatgtctgtaatgaagctgcgttgattgctgcaaggcatctgtcagattccataaatcagaaacactttgaacaggcaattgaacgagtgattggtggcttagagaagaaaacgcaggttctgcagcctgaggagaagaagactgtggcataccacgaagcaggccatgcggttgccggctggtatctggagcacgcagacccgcttttaaaggtatccatcatcccacgtggcaaaggactaggttatgctcagtatttaccaaaagaacaatacctctataccaaagagcagctcttggataggatgtgtatgactttaggtggtcgagtctctgaagaaatcttctttggaagaattacaactggtgctcaagatgacttgagaaaagtaactcagagtgcatatgcccaaattgttcagtttggcatgaatgaaaaggttgggcaaatctcctttgacctcccacgtcagggggacatggtattggagaaaccttacagtgaagccactgcaagattgatagatgatgaagtacgaatacttattaatgatgcttataaaagaacagtagctcttctcacagaaaagaaagctgacgtggagaaggttgctcttctgttgttagaaaaagaagtattagataagaatgatatggttgaacttttgggccccagaccatttgcggaaaaatctacctatgaagaatttgtggaaggcactggcagcttggatgaggacacctcacttccagaaggccttaaggactggaacaaggagcgggaaaaggagaaagaggagcccccgggtgagaaagttgccaactagaggcccagagggaggccatctcagtctgtccactgtggtttcagctggtgcattatttcagctgtggctttcagaagaatgggaatgctgcgctgattttagccagccactggcccagctgaaatgatggggaaaggagtccttagtcctttcagcctcagaggtcacagtgggtggcaggtgactttccggaggccttgagggaaatgcacactgtcccatagcctcattgggctcccagacgtgctggaaaggttgagcccagagtggccgaggctggaccctgtggcaccaagtggggtcggctgaccgtgtggcagggatcgttgcactggactcttggcgtgtgggaagggatgctttctctttgtcgcccactcttcattcctgtttctcctcagttcccctgtgcagatgggctgtgaaattaaattggagtcttgataagaacattttaatttgacttaatattttaaagattgaatccagatcacttgttgctgtcttaatggaatggttttctacaggagctgtaacatacttaaaaatatgaatgtattatgtaaatatggcttctttacataaaaaataagatgtcaacactgcaagcaagaagcgcaggaagccgaagacattggcgtggtcggggcggcctcggcccctcgaggaagccttttccgagaccctttcggtttggccggcgcgggggccccgggagagagtaaggtgaaacccttggccccattacccgtggtttctccctaggggaaaaatgcccggggccnccactctgaacctataggtgcccctttggccactttcttcccccctcaactaacaaaataaccggcgccgttgcagggctgaggcgcggagggcgtgttcgtggaggtgaagagtgcccgcggagtgggngaggggcggggagggggcggtctcaatgtgggaggtatctatcggagcnnnnnnnnnnnnnnnnnnnnnnnnnnnnnnnnnnnnnnnnnnnnnnnnnnncggcgggacgggtggggaggtgcaggggnaggagaaggggatgggccagtggggttgggggctggtgcggtgggcggagggggccgaggccggggtggaagggaggg

SEQ ID NO: 253456 - DNA, 906 bp, Homo Sapiens
  misc_feature (19)..(19): n is a, c, g, or t
  misc_feature (84)..(84): n is a, c, g, or t
  misc_feature (626)..(626): n is a, c, g, or t
  misc_feature (628)..(643): n is a, c, g, or t
  misc_feature (645)..(645): n is a, c, g, or t
  misc_feature (648)..(648): n is a, c, g, or t
  misc_feature (652)..(652): n is a, c, g, or t
  misc_feature (671)..(671): n is a, c, g, or t
  misc_feature (683)..(684): n is a, c, g, or t
  misc_feature (696)..(696): n is a, c, g, or t
  misc_feature (706)..(706): n is a, c, g, or t
  misc_feature (715)..(715): n is a, c, g, or t
  misc_feature (743)..(743): n is a, c, g, or t
  misc_feature (796)..(796): n is a, c, g, or t
  misc_feature (805)..(805): n is a, c, g, or t
  misc_feature (811)..(811): n is a, c, g, or t
  misc_feature (834)..(834): n is a, c, g, or t
  misc_feature (840)..(840): n is a, c, g, or t
  misc_feature (849)..(849): n is a, c, g, or t
  misc_feature (866)..(866): n is a, c, g, or t
  misc_feature (879)..(879): n is a, c, g, or t
  misc_feature (893)..(893): n is a, c, g, or t
tgatcaacataggctggtnggagtacaggactcgcctcctcagggttccctgtgctagccacttttcagccatggccacaagtnaacagagtatctgccaagcccgggcttccgtgatggtctacgatgacaccagtaagaaatgggtaccaatcaaacctggccagcagggattcagccggatcaacatctaccacaacactgccagcaacaccttcagagtcgttggagtcaagttgcaggatcagcaggttgtgatcaattattcaatcgtgaaagggctgaagtacaatcaggccacgccaaccttccaccagtggcgagatgcccgccaggtctacggcttaaactttgcaagtaaagaagaggcaaccacgttctccaatgcaatgctgtttgccctgaacatcatgaattcccaagaaggaggcccctccagccagcgtcaggtgcagaatggcccctctcctgatgagatggacatccagagaagacaagtgatggagcagcaccagcagcagcgtcaggaatctctagaaagaagaacctcggccacagggcccatcctcccaccaggacatccttcatctgcagccagcgcccccgtctcatgtagtgggcctccncnnnnnnnnnnnnnnnnanttntaantttaaataatgggggtaantaaattttttanntttaatgttagntggaggaganaaggggttnagataagaagagagatttatgttaggantgggaggtggtatagatggggggaagatgagaagagtttaaagggaagaaganggatttggngggttnagttgtagtggggaattaaagtntgatgntaaaggggnaagagagggggtggggnggagggttatggnggaaatgaaaaaantgttgggtaaagg

SEQ ID NO: 253457 - DNA, 633 bp, Homo Sapiens
  misc_feature (113)..(113): n is a, c, g, or t
  misc_feature (324)..(324): n is a, c, g, or t
cctaagccaagcaattacactttaaattaatactatgaaaagagctctactctatacacaaaggcagaactgcaaataaatttacctaagggaaaaaataaataaataaccanatttaccctacaatttgttaggtatccccgatgtgccaaatgctgacgaactaaaggggttgtgtgccaaattacacatactgaaggagctctacattgacacaaaattctataccataacagtcataagcagaaggcatctttttaaaacctgagcctattaattttttgctaaacctaaatatttcaaaattaccaaatgataaaaaanaattacaaacaggaataagaacttcttatttcttctgaaagtggaattagacaattatttatttgtttaaaatatattttaagactgtaacaagtgcattagtcatcaactattttaaattactattcattcactttcaaaaagtatttattacatgcctaatgtgcccagctcagattagtgtagaagatacaaaaatagttcatagtcctagaaataagaaatattaaatatctttacataggactatggattgatcgccaggatatacggctaagagaaaaaaataaggttagagaaaagagtaga

SEQ ID NO: 253458 - DNA, 1855 bp, Homo Sapiens
  misc_feature (7)..(7): n is a, c, g, or t
  misc_feature (32)..(32): n is a, c, g, or t
  misc_feature (36)..(36): n is a, c, g, or t
  misc_feature (40)..(40): n is a, c, g, or t
  misc_feature (57)..(57): n is a, c, g, or t
  misc_feature (65)..(67): n is a, c, g, or t
  misc_feature (128)..(128): n is a, c, g, or t
  misc_feature (907)..(934): n is a, c, g, or t
  misc_feature (940)..(940): n is a, c, g, or t
ttcaagnaaccttggtggtcacatctacaaanatanccancccaacccaaccccccnttccaaannncgacccccagcagaaaagcacatacttaccagaattttagcaagtatggtttgggaatttntgtggtttttgttttttaaaaaaaagccccccagggcaagttatttaacagtttaaattgcccactgtcaaactgaatctggaccttgaatcgggaccgggacctctggcgatcccacagatgctggagacttagatctacttgaagaaccacgtttctggctcttctcaggcacgggagacctactaacagaacgggacttgctccggctccggctcctgctcctgcttcttgaccggctgtaagatttgcgactacgggaacgggatcggctacgagacctagaggaacttctggtccgggatcgagacctgcttcttgacctactgtgccttttgctgccttcaattaattttatttttctcccatttatttcctttccagaaagtttttcaatagcattctttaagtcaccataagaggcaaactcaaccaccccttcatttaatttaggtcgggtgtcatccgcaaacgttacttccccagcttgtctcatgaaatctttgagatccttaacacaagataattgtgttaagcaaagaagaggaaaggggacacacaaacaatcacatgatataaaaaaaacaagactactgaaagagaagatgttagataaagtacaaacatggcatttaccacacttgtattctatcagaattcaaaaattatctatgtcagggcacggaataagcaaatagcatattgcttttaagcaaaatgctaaaagaaattcagattttaacattaaggtagtattagtctatactgagctcagtccnnnnnnnnnnnnnnnnnnnnnnnnnnnnaacaanaaaggaaacagtacatatttttaaagtaaagactaaagtagagaagttttatttaaaaaaacagaacatttacaagacaccagttattttgtgccccatatgtcattaaaaaagtttactttacctttattattatttccctaggctagtcaagcagcaaaccattaatcggtcggagaaaccttcatgacatatgcccgactggctcttcgccacccacttgaaggacactacccaatcgatggaagcctttaatcgcacagccctccctattagcggactattggcggatgcagacatgttctactcgagcagttaccaaggaccactttactgcgatcaggattccaacgaccacctaatttcgtatctttcaactcttttcgaccggacctcttattcggaagcgttacaggaagacaggtctcaacttagggatcagatcacgttatcaacgctctgggatcgctgcaacctggcacttcaaggaagtgcaccgataacgtctagaccggcaaacacagatctagaggtggccaactgatcactgtaggagctgactggcaaagtcaaccaggcccaaccaagagtgaccaagacaacgattaggataacccacaggcactcctcgtcataaggccaacgacacagacaggctggcaaataaagggtttaatatttggttaaaaattgattttaaaaaacaagaaaaatatcctcaaaacatttacatttgatcactaatattaaagttcaaaatatcccccaaattacatttaattaaatgtttaaaattacaattccattaaatccattaatttaaaactacttttaataaaacaatacaacattagctacccattaacttttttaaaaagccacatcaaaataactcaaaactgtatttcaacaaac

SEQ ID NO: 253459 - DNA, 719 bp, Homo Sapiens
tttccctagcttagtcagcaacaaaacattaatcggtcgaagaaccttcatgacatatgccgactaggctcttcgccacccacttgaaggacactacccaatcgatggaagcctttaatcgcacagcccccctattagcggactattggcggatgcagacatgttctactcgagcagttaccaaggaccactcgaccggacctcttattcggaagcgttacaggaagacaggtctcaacttagggatcagatcacgttatcaacgctctgggatcgctgcaacctggcacttcaaggaagtgcaccgataacgtctagaccggcaaacacagatctagaggtggccaactgatcactgtaggagctgactggcaaagtcaaccaggcccaaccaagagtgaccaagacaacgattaggataacccacaggcactcctcgtcataaggccaacgacacagacaggctggcaaataaagggtttaatatttggttaaaaattgattttaaaaaacaagatatcctcaaaacatttacatttgatcactaatattaaagttcaaaatatcccccaaattacatttaattaaatgtttaaaattacaattccattaaatccattaatttaaaactacttttaataaaacaatacaacattagctacccattaacttttttaaaaagccacatcaaaataactcaaaactgtatttcaacaaac

SEQ ID NO: 253460 - DNA, 443 bp, Homo Sapiens
aagacaggtctcaacttagggatcagatcacgttatcaacgctctgggatcgctgcaacctggcacttcaaggaagtgcaccgataacgtctagaccggcaaacacagatctagaggtggccaactgatcactgtaggagctgactggcaaagtcaaccaggcccaaccaagagtgaccaagacaacgaaggataacccacaggcactcctcgtcataaggccaacaaaaaacaagaaaaatatcctcaaaacaacatttgatcactaatattaaagttcaaaatatcccccaaattacatttaattaaatgtttaaaattacaattccattaaatccattaatttaaaactacaataaaacaatacaacattagctacccattaacttttttaaaaagccacatcaaaataactcaaaactgtatttcaacaaacctcgtgc

SEQ ID NO: 253461 - DNA, 382 bp, Homo Sapiens
cgtagacgagttaagtcctggtctgcgtggaggtcgacgactccgtcgcagactacggacctgtctgggtctcagccgccaaagaccccgtccggtaggaagtactagccggacatcatgagtggctgtcgggtattcatcgggagactaaatccagcggccagggagaaggacgtggaaagattcttcaagggatatggacggataagagatattgatctgaaaagaggctttggttttgtggaatttgaggatccaagggatgcagatgatgctgtgtatgagcttgatggaggtggaagaggtagaggacgatactctgaccgttttagtagtcgcagacctcgaaatgatagacgaaatgctccacctgtaagaacag

SEQ ID NO: 253462 - DNA, 1202 bp, Homo Sapiens
  misc_feature (1186)..(1186): n is a, c, g, or t
aggccaccaggggaagggctaggctgtgcaaggggagcagtcctcccctttgtaggtgccatttcccagagctcctggaattgtttcttcagttgtggcagctgtgtagatcatttttgttttatccttgggagtcttgaatttctcatagcaccaaaatatggcaatgaggagaagcccttctccaagctggaaaatcatgtagaggaggggaaagaagaaaagtggtccaatgacttcaggtggaaaggccacattgaggatggtggaacagagttggacattttggcatccagtctccatgctgacagtgcgtctgcaccgtccattgaggcagaagagagcagagagaacataacccagcagaaagccaataaaaggcatcagggaggaggtggcaatcaagagtggtgtcatggcaaacatgatgctcttccccacattgatggcagagagaactgtgacggccacactgcacaagagaatgatgatcatccctcccttgatgacatagcgcatgtattgtggccgtttggatttgaggacgatccctatggtgcaaggaatgagaaccaggaccagtgatatcacgatgcctttatagggcaccttgtccttcaggtccccatcatagatccccctggagtagatgtacaggaggagaggcatcatgccaagggcacagaaggtggagcaggtggtcatcacaatgctgaggttcatgtcccccttcatggccagactgaagacattggacaggttccctccaggtgagcagccacagaccaagatggccagtgcctcaatgttcttcagccggaagaccttgcccagcacaaaggccgtgaggggcatgatgccatactgtgccaccagggcgatggccagccctttaggcttccataagtgagccttgatcttgctgaactccatggtgcagcccagcgagagcatgatgaagaacaacatgaacaccaggatgacgctcagtgccaggtctgtggggcgcttgccaaagttgggtggcagggtgaagttgaatggggcagacgcgttgtgggcctccatcctcctgtgaggcagtggaagaccactccttgttctccggctgactccgtttcttgtgcagttcttgctggatgccttctttaatcacctctcaggacagagagtttctggacaaaangctctggggaaatagg

SEQ ID NO: 253463 - DNA, 531 bp, Homo Sapiens
  misc_feature (180)..(200): n is a, c, g, or t
  misc_feature (447)..(447): n is a, c, g, or t
gttagtaggtctcccgtgcctgagaagagcccagaaacgtggttcttccaagtagaatctaagtctcccagccatctgtggaatcgcccagaggtcccaggtccccgatcaaggtcccagaaccagttgaccagtggcaattaaaactgtaaataactttcccctgggggcctttttttnnnnnnnnnnnnnnnnnnnnnttcccaaaccatacttgctaaaaattctggtaagtatgtgcttttctgtgggggtgggatttggaaggggggttgggttgggctggatatctttgtagatgtggaccaccaaggggttgttgaaaactaattgtattaaatgtcttttgataagccttctgctcacatttttgtgaatgtctgaagtatatagtttgtgtatattgacagagctcttttataactaaagcaaatttaattttttgtnctgaaaaaatttgacatttaagtctggtataaaatgtaatcagattagttatgcctaataactattaatgcttggcactaaggc

SEQ ID NO: 253464 - DNA, 810 bp, Homo Sapiens
aaagagcgaggcctgggtggcgaattcggcacgaggggcgtagacgagttaagtcctggtctgcgtggaggtcgacgactccgtcgcagactacggacctgtctgggtctcagccgccaaagaccccgtccggtaggtgagtggctcactttgagggcaagccttctcggatcgaggcttcttcatggccgctcagatcgtgagcggccggggctgctctctttgcggaggatggcgtctaatgagcgcagttgattcgaggaagtactagccggacatcatgagtggctgtcgggtattcatcgggagactaaatccagcggccagggagaaggacgtggaaagattcttcaagggatatggacggataagagatattgatctgaaaagaggctttggttttgtggaatttgaggatccaagggatgcagatgatgctgtgtatgagcttgatggaaaagaactctgtagtgaaagggttactattgaacatgctagggctcggccaccaaggggaagaggcagaggaccatactctgaccgttttaaaagacgcaaacctcgaaatgatagacgaaatgctccacctgtaagaacagaaaatcgtcttatagttgagaatttatcctcaagagtcagctggcaggatctcaaagatttcctgagacaagctggggaagtaacgtttgcggatgcacacccgacctaaattaaatgaaggggggggttgagtttgccctcttatggtgaacttaaagaaatgctatttggaaaaaacttttcctgggaaagggaaaataaatggggaag

SEQ ID NO: 253465 - DNA, 2476 bp, Homo Sapiens
  misc_feature (1026)..(1046): n is a, c, g, or t
  misc_feature (1672)..(1714): n is a, c, g, or t
  misc_feature (1821)..(1892): n is a, c, g, or t
  misc_feature (2047)..(2047): n is a, c, g, or t
  misc_feature (2430)..(2430): n is a, c, g, or t
  misc_feature (2434)..(2434): n is a, c, g, or t
ggggccctccattttgtggagcgccaaagctgcgaagtgcgtcagttgtggagtggcgtagacgagttaagtcctggtctgcgtggaggtcgacgactccgtcgcagactacggacctgtctgggtctcagccgccaaagaccccgtccggtaggaagtactagccggacatcatgagtggctgtcgggtattcatcgggagactaaatccagcggccagggagaaggacgtggaaagattcttcaagggatatggacggataagagatattgatctgaaaagaggctttggttttgtggaatttgaggatccaagggatgcagatgatgctgtgtatgagcttgatggaaaagaactctgtagtgaaagggttactattgaacatgctagggctcggtcacgaggtggaagaggtagaggacgatactctgaccgttttagtagtcgcagacctcgaaatgatagacgaaatgctccacctgtaagaacagaaaatcgtcttatagttgagaatttatcctcaagagtcagctggcaggatctcaaagatttcatgagacaagctggggaagtaacgtttgcggatgcacaccgacctaaattaaatgaaggggtggttgagtttgcctcttatggtgacttaaagaatgctattgaaaaactttctggaaaggaaataaatgggagaaaaataaaattaattgaaggcagcaaaaggcacagtaggtcaagaagcaggtctcgatcccggaccagaagttcctctaggtctcgtagccgatcccgttcccgtagtcgcaaatcttacagccggtcaagaagcaggagcaggagccggagccggagcaagtcccgttctgttagtaggtctcccgtgcctgagaagagccagaaacgtggttcttcaagtagatctaagtctccagcatctgtggatcgccagaggtcccggtcccgatcaaggtccagatcagttgacagtggcaattaaactgtaaataacttgccctgggggcctttttttnnnnnnnnnnnnnnnnnnnnnttcccaaaccatacttgctaaaaattctggtaagtatgtgcttttctgtgggggtgggatttggaaggggggttgggttgggctggatatctttgtagatgtggaccaccaaggggttgttgaaaactaattgtattaaatgtcttttgataagccttcggctcacatttttgtgaatgtctgaagtatatagtttgtgtatattgacagagctcttttataactaaagcaaatttaatttttttgtactagaaaaaaatttgaacattttagttcttggttataaaaatgttaattcagaattagtttaatgccttaattaaactaattaatagctttggacacttaaaagagctctaaatttgcttgtacataaaggcttaatttgttttccttgttaggcgctccaagggtgtcctccactctttaacagctgctggacagacacattagagcagctgtttgttattgataatgaaatattatacacctaggaaaaaaaacaaacaaacgcatcaaaccacaaaataaacccgtccaccatccgcatcccgcaaacactccttcacacccacgcattccggcctctgataccctattcgcgccacgcgaccccagcccgtacnnnnnnnnnnnnnnnnnnnnnnnnnnnnnnnnnnnnnnnnnnntcggcttccctatcacaacccccccacgcccctccgcttcttcccctctccgcgaccatctccccgtccttgccatacccaccgcagcttgcccgcgcgcgttatgnnnnnnnnnnnnnnnnnnnnnnnnnnnnnnnnnnnnnnnnnnnnnnnnnnnnnnnnnnnnnnnnnnnnnnnnttgacgaatttccccgaccgctccccccctcgcgccctattctctcctgtctcgtattgcgcatacccgttttccgctacgacctcgccgcgcccgccccacattccctattctcccgccgcgttcggtttatcgccctttccatccccgttaantccctgcccgcgcgcccgccctcttgtttgaccgccgcgccctccaccgccttatccgcgcccgccctattcatcacccatttataccctcatgccacgctgttcgtaccgcgcgcatcctctttatctccccctatccccaccccttctctttgtcccgccctacatgtgccaccaatctcaccttcctctggctgtcccgcccctatataaaccactctgccaagcgctctcgtttcccgcttacgcggcgttattccataccgccacgcggcgctatgtctccgcctatatttacctatttaccgcttcacctctgttgatacgccccgtgtcgtgcgccggatatcccaccccgtactctaaccgccccgcctccctgnctancgcccgcatatttttcccctctttccgccgccctgttgtccc

SEQ ID NO: 253466 - DNA, 389 bp, Homo Sapiens
  misc_feature (28)..(28): n is a, c, g, or t
  misc_feature (360)..(360): n is a, c, g, or t
agggccccaagaccagttgaccagtggncaaattaaaacctgtaaaataaaccttccccccgggggccctttttttaaaaaacaaaaccccacaaaaattccccaaacccatacttgcctaaaaattcctggtaagtatgtgccttttcctgtgggggtgggatttggaaggggggttgggttgggctggatatctttgtagatgtggacccaccaaggggttgttgaaaactaattgtattaaatgtcttttgataagccttctgctcacatttttgtgaatgtctgaagtatatagtttgtgtatattgacagagctcttttataactaaagcaaatttaatttttttgtactagaanaaaatttgaacattttagttcttggttat

SEQ ID NO: 253467 - DNA, 998 bp, Homo Sapiens
  misc_feature (28)..(28): n is a, c, g, or t
  misc_feature (34)..(34): n is a, c, g, or t
  misc_feature (40)..(40): n is a, c, g, or t
  misc_feature (57)..(57): n is a, c, g, or t
  misc_feature (498)..(533): n is a, c, g, or t
  misc_feature (934)..(934): n is a, c, g, or t
cccccaaaacgttgaaaaaaccgtgaanctgaancccccnaaattgaaaacccctgncctcccctgtaaacgccttcccgaaataaagaggtcccggtccgaaaaagagttgaaaagataccgaaaataaggtggtccgttggaaccctgaccgcaagtaaagtggaccctgggtaactgcctcgaagtagaacatgtcctgcatcccgcccaatagtcccgcctaatagggagggctgtgcgattaaaggcttcccatcgattgggtagtgtccttcaagtgggtggcgaagagccagtcgggcatatgtcatgaaggtttctccgaccgattaatggtttgctgcttgactagcctagggaaataataataaaggtaaagtaaacttttttaatgacatatggggcacaaaataactggtgtcttgtaaatgttctgtttttttaaataaaacttctctactttagtctttactttaaaaatatgtactgtttccnnnnnnnnnnnnnnnnnnnnnnnnnnnnnnnnnnnngtactgagctcagcatagactaatactaccttaatgttaaaatctgaatttcttttagcattttgcttaaaagcaatatgctatttgcttattccgtgccctgacatagataatttttgaattctgatagaatacaagtgtggtaaatgccatgtttgtactttatctaacatcttctctttcagtagtcttgttttttttatatcatgtgattgtttgtgtgtcccctttcctcttctttgcttaacacaattatcttgtgttaaggatctcaaagatttcatgagacaagctggggaagtaacgtttgcggatgcacaccgacctaaattaaatgaaggggtggttgagtttgcctcttatggtgacttaaagaatgctattgaaaaactttctggganagggaattaaatggggagaaaattaaaattaatttgaagggcaggcaaaagggcacagttgggt

SEQ ID NO: 253468 - DNA, 399 bp, Homo Sapiens
  misc_feature (18)..(18): n is a, c, g, or t
  misc_feature (30)..(30): n is a, c, g, or t
cccactttacctgcgatncagggattcccnaacgacccacccctaatttccgtatcctttcaaactccttttccgacccggaccctccttattcggaagcgttacaggaagacaggtctcaacttagggatcagatcacgttatcaacgctctgggatcgctgcaaccctgggacttcaaggaagtgcaccgataacgtctagaccggcaaacacagatctagaggtggccaactgatcactgtaggagctgactggcaaagtcaaccaggcccaaccaagagtgaccaagacaacgattaggataacccacaggcactcctcgtcataaggccaacgacacagacaggctggcaaataaagggtttaatatttggttaaaaattgattttaaaaaaaa

SEQ ID NO: 253469 - DNA, 577 bp, Homo Sapiens
  misc_feature (111)..(111): n is a, c, g, or t
agaagcaaaactaatgatagtcaaacccctccgggggaactacacaaatgctaattaaaacacgagacactgcctttacctatgagatcatgaaggtaaattgtttcatanacctaaacccaatgtatacacataataacttgagtatttcctggtttgtagcgaccatcgatagcagggtatctcaaaatgagcactgatgacatttggactcaataattctttgttgtagaaagttataagatatatataaacctatgctactcctcatttatttaggaaccctcatatgcatagagagtgcaaagttaaactgcagccacactggaatttccataattgcccaagaaatcgagtttaatgcagaggctcacacagaacatattacacaaagaccagccaagataattgcagcaatgactgggaagaaagaatacgcccatgtggtacaaagtgcaggggtgatgatctgaattacaaatctgtgctatagatcaaaatagagctaatacccacacaaagatatacacattactcttttcagcatgagcagcatttagctccgagctagaagcag

SEQ ID NO: 253470 - DNA, 807 bp, Homo Sapiens
  misc_feature (511)..(556): n is a, c, g, or t
  misc_feature (635)..(635): n is a, c, g, or t
  misc_feature (657)..(669): n is a, c, g, or t
tagcgaggcctgggtggcgaattcggcacgagggccctccgaatccagagaggcgctgctgacaccgccgccacaccgccgccacaccgccgctgcctcagtcatgccgaagcacgagttctctgtggacatgacctgtggaggctgtgctgaagctgtctctcgggtcctcaataagcttggaggagttaagtatgacattgacctgcccaacaagaaggtctgcattgaatctgagcacagcatggacactctgcttgcaaccctgaagaaaacaggaaagactgtttcctaccttggccttgagtagcaggggcctggtccccacagcccacaggatggaccaaagggggcaggatgctgatcctcccgctggcttccagacagacctgggacttggcagtcatgccgggtgatggtgttcctgcggagaccctcagttgtcctattccttcctagcttccctgcaataaaatcaagctgcttttgttggaaaaaaaaaaatcacaannnnnnnnnnnnnnnnnnnnnnnnnnnnnnnnnnnnnnnnnnnnnnttacccttttccaatttacccacccatactaccctgaacatttcacccaccctgggaaacaaaataactaaaccccttnaaaataaaaaagttgtgggcgnnnnnnnnnnnnnaagaaaaattttttttaaaaaccctttttgtttggggcgcggcggcgccccaaaagagaaaagagaaaaagggcccaaatccttgtctccccaaaaaaaccccgcgggcaaagaaaataggggtttggaatttccccc

SEQ ID NO: 253471 - DNA, 757 bp, Homo Sapiens
attcggcacagatttcagtaaccatgtattgtttggaaaggctcctggaaattcagatgcacagtactcagtaagaatcacccaataagccagctttagtccacatgctcaggcagcatgtctttgaagtctgttttaagaggctcctcagtgactgatttgaagccaggcttgggaacctcaaagatagagtgtttattggttttgaagtcaccttgatcatctgactcttggcagatttatttgccatgattttgttcattgcctttccaacctgtaacaggatagagagtgctgttgactgggtatcctgggcagccctgggaaattccccagaagagggctttggcagtgattggcttagcaaggttaattgcgttccagccaacctaagtataacagacttcatgggagcagtgtgcagggctggacactggggctctagttcctgctcctgcatctgcaccctgcgttttccacctcacccctgccttttagtgcaagactcttagtgcacccctgcgtcacccctgtctcttagtgcatttattgcctttgcaatgtcgctatgtccacaccagatggcacctttgttccatctaactttccatctttcctaggatgctgatcctcccgctggcttccagacagacctgggacttggcagtcatgccgggtgatggtgttcctgcggagaccctcagttgtcctattccttcctagcttccctgcaataaaatcaagctgcttttgttgg

SEQ ID NO: 253472 - DNA, 631 bp, Homo Sapiens
aaaggggcacaggggcccccagggaaatgacacgggccaaaaaggggaaaacgaagcaatagagcctggcccacaaagacaaaatcgggtggaaaaagtttgagccctcccatgtcatgtttgtaaaatggtcttagcttgtgaaatgcaagtgattatttaagcgcatatagtccaaagacatagtggattatccaatgtgatccatctgaaaaaaacatacagtatactcctgaacacggacacaggtatgtctagattggcggtataaatacagcgtgtctgcattcacttctgagtcataagagaccaagagaatccagtttgtactcgtggtggtaacaactaaggccacaatgctgacgacagctgaagtggcaccgttggttccaacaactgtcccgggattaaagctgaggaagtaaccgcaatgttggtagtttgaacaatttctcctgtgtaaaagaaaacctcacactgtcgaatgaatgtaaagacaacagattgataactcttagtagtagacaaaatctcgcgatgaccaaaaccgggtctcatcaacgctggccgaaaacagaagactcaggtgtcagctgtcactagctagattatatgaggctgtataacagcg

SEQ ID NO: 253473 - DNA, 423 bp, Homo Sapiens
gacacacagtcagcatcacctgctctggagataaatagggggataaatatgctcgcgtggtatcagcagaagcgcaggccaggcccctgtgctcggcatctatcaagataggaagcgcccctcaaggatccctgagcgagatctctggctccaactctgggaacacagccactctgaccatcagcgggacccaagctatggatgaagctgactattactcgcaggcgtgggacagcagcactgcacacagtgacacaagcagatgccgaagtgagacacgccagacacctcggcctggctcacaagacaccttccctctctcctgccctgtcacactgagcacgagggagccttccatgtggaatggaagtttccagacctatccctgcccttatggtcctgagagacggggcgttcctgccc

SEQ ID NO: 253474 - DNA, 726 bp, Homo Sapiens
ggccaactgccacgtaacggaagttgggagtaattcaattagtaagtacatacaaataaatatctactgaataatcagatagatgcctagcattatggtaaatataaaaataaatgctatggttcctgatctcaacagattcttctagggaacaagatctatacagggaacagagtaatagtgccccaaatgaacatatataggtaagtgctgtgggtcaacttgtcctctccagctgtatcagtgttttactagcaccaggaacaaagagatataggccaaaagacctataaatttcttatgtttgacttgtttctagaacttgaatgtgctttgattcaagcaacagcagggtgttttaaaatggaatggagatgacatgaattacctgttgttacgcaggtcatagcctctcaccattgcacattatcagaaaaggaatggtattgataaaagacatgcagcactattaaaaatatgtgatttcagaagttattatattaatacaaattcaggcttaaagatgttaaacaaacgtgtccataagcagcccaagagaaaagggaagggagtagggcccgacaattatcagggtacacagcactgacctcggagtgacatcccgcccctaagtagggttctggtggcacgtcccccacgtagtcctcctctgggcaagcctctctggattatgggtaggcctcgtcctccgattgctcccctggc

SEQ ID NO: 253475 - DNA, 547 bp, Homo Sapiens
  misc_feature (465)..(465): n is a, c, g, or t
cccccgcgctgtacgaattctgcacgaggatatagggaggggagacctccgcgctgattgtcgcaagcgcccccgcaagccccccgtccaccctctacgccagacatcccggagggtcgcgcggccgccgcccattggcgccgaggtccccgacgtcaccgcgacccccgcgaggctgcttttcttcgcgcccacccgccgcgcggtgccccttgaggagaaagaagcccccgccgctgacgccatcatgtcgcccgaagaggaactggacgggtaccagccggagcctctcgggaagcggccggctgtcctgcccctgctggagttggtcggggaatctggtaataacaccagtacggacgggtcactaccctcgacgccgccgccagcagaggaggaggaggaccagttgtaccggcagtcgctggagattatctctcggtaccttcgggagcaggccaccgngcccaaggacacaaagccaatgggcaggtcttggggccaccagcaggaaggcgcttggagaccttacgacgggtttggggat

SEQ ID NO: 253476 - DNA, 816 bp, Homo Sapiens; identical to SEQ ID NO: 69348

SEQ ID NO: 253477 - DNA, 576 bp, Homo Sapiens
ctagcggaattactggaggaagaaaaactaagttgtgtgccagtgctcatctttgctaataagcaggatttgctcacagcagcccctgcctctgaaattgcagaaggactgaacctgcataccatccgcgaccgagtctggcagatccagtcttgctcagctctcacaggagagggcgttcaggatggcatgaactgggtctgcaaaaatgtcaatgcaaagaagaaataaaatctagacgaatggagatgcaggagctgcgggagccgaattcggtcctgaaaaacactaatttgctgctttctgaccaaatgtttttccatctgtgtacagctccagctgtttgaagagagggaacaacacggtttagaaagaatccccattccagcagtagatttaactgatctctgaggttcagtatcatttttcaaataaaggaattatattatttcctctgcataattgaaatagtattaaatgtctcaaagcacatgattagaaagtgagatcttttaaatgagcaagagattgcattgcagtttagacaattccagtgggcttttttttcctcgcggg

SEQ ID NO: 253478 - DNA, 1280 bp, Homo Sapiens
caagtcacacaacaatcttccacaaagcaacatgacacttgaaatcacatggccacattaactggaaaagcaagtgttacccatgactgccagatgcccacccagcccaagacccaatttccacagcgccctagagaaccacgatggtcccctggcacctacacaaccctcccagtggtgtcgtatcttccgtaggccaggtttctgcagcaagccccaaagacaaagcttggcagagctgtggcagccaactctctctggagcctcatccctttgtccttcccaacaggtagtcgtacatcttcactgacacagcgcctctatgggagccttggccagcccttaggaaataaagtgtgtctgtggggtaacctgatggaccctatggtctgctgggttggcagatgcttcgtaattgcagatggtcacctcgtgtcggcgaagctcagtccactctcctctcaggccaatataaaagacctttgtcgtatctgctccgaagttttttgaaatatgaattgagagatgatagacatttgaaaaacgagaaatttgtgtagcatactctaattctcctgtaagatcccggttcagactaaaggtctgatctggctccctttctgtatcatcaaaggacatctgtggaatattcttgtacagtctcatctcagaggggtgtgagtcatcatcctctcccattataatgatgcctttgagcttgacattgcccgtaaatctgccagaatgcaaaagagaaggttgtcaaacctgagtttgaatacctgtttagttgtgtgaccctgggcaagacccttcccctgtatgggctccagttaactcatcggtcaacgtgtactagataatttctaagatcctgtctacctagagcattatacaattataagaaatctacctcaatttcccagttagtgttctacaaatacatctgtttccagtcggcaccaagaaagatatgatgctttcctcctcaaacccaccaaagtaatttatcccatttctagaagcaaatgtgtgctcttgacaccagtgaatgaatccatctgaggcaactgggtacagcctatttagcctgagtgtaggcaacaaggagatacttacggaatattaaacaaaagctcttcatctgcatcactttcaacaaactggaggggatggggaggggggaggaaaaagcaacaaatatgtgctgagagcctacaatctcaggcatctcccaccctgctcgcgtgccgaattcctgcagcccgggggatccacta

SEQ ID NO: 253479 - DNA, 815 bp, Homo Sapiens
agtcaggtgggtgccaggccctggccgtggcgaaagagccggcggagccggagacccgctcccggagacgccgcctcgcgatccccgcgcgggcgggaccgggcggccggcatcatgaccctgtttcacttcgggaactgcttcgctcttgcctacttcccctacttcatcacctacaagtgcagcggcctgtccgagtacaacgccttctggaaatgcgtccaggctggagtcacctacctctttgtccaactctgcaagatgctgttcttggccactttctttcccacctgggaaggcggcatctatgacttcattggggagttcatgaaggccagcgtggatgtggcagacctgataggtctccttgtcatgtcccggaatgccggcaagggagagtacgatcatggttgctgccctgggctgggccactgctgagcttattatgtcccgctgcattcccctatgggtcggagcccggggcattgagtttgactggaagtacatccagatgagcatagactccaacatcagtctggtccattacatcgtcgcgtctgctcaggtctggatgataacacgctatgatctgtaccacaccttccggccagctgtcctcctgctgatgttcctcagtgtctacaaggccttttgttatggaagaccttcgtcccacctctggctcgcctggggcaggttgggggcagctcctacctggccccccaagcaagttgggtaacccgggggcctgccttgggccccctccagcaactttttgggcccccctggtaattggtcccccccgcttttggtcc

SEQ ID NO: 253480 - DNA, 671 bp, Homo Sapiens
ggggcaagggacgggccagagacccccaaaggggggcacctgggtgagagccctggaccgcacaccaaggcaaaggggtgcccctgaaggactctgggcaggcaatgacaggatctgagggtgtccagacgcagatctccactgcctgagggagagtgatcagccagggggagaggccagggactgctacctgcccagaaggcggcagggaggggaagagcagataaggaggtatagggtgtccctgggcaaggcagcaggggtaacgaagctctcagtgactcctcccagtagccaggggagagcagtgacagtctcaggtggccctgagcatgtgagctgctcatccacatcaggcaaaggcaaagccaggacctgaacttcccaccccaagccctacatccatgcaagccagaccagactgggtcagaggctagaagggagctcacaggattgcctggggaagcctcggcccaaaacctggccctcgctccagcccagagcacccacctgggcatgagactggcggcagccgtaggggtgccctgggtatatgccgggctcccagggtgccatacctgccagccagcccagggagtggtgatgggctgggcgctggctgtccctgcacatagcagtgccccgcggcagtaactacaactgctgcctgc

SEQ ID NO: 253481 - DNA, 1759 bp, Homo Sapiens
  misc_feature (346)..(346): n is a, c, g, or t
cggatggccactcatcagaaggactgctcgctgccatatgctacggaatccaaagaatgcaggatggtgcaggagcagtgctgccacagccagctggaggagctgcactgtgccacgggcatcagcctggccaacgagcaggacctgctgtgccacgccccacggtgacaacgccagcctggaggccacatttgtgaagaggtgctgccattgctgtctgctggggagggcggcccaggcccagggccagagctgcgagtacagcctcatggttggctaccagtgtggacaggtcttccgggcatgctgtgtcaagagccaggagaccggagatttggatgtcggnggcctccaagaaacggataagatcattgaggttgaggaggaacaagaggacccatatctgaatgaccgctgccgaggaggcgggccctgcaagcagcagtgccgagacacgggtgacgaggtggtctgctcctgcttcgtgggctaccagctgctgtctgatggtgtctcctgtgaagatgtcaatgaatgcatcacgggcagccacagctgccggcttggagaatcctgcatcaacacagtgggctctttccgctgccagcgggacagcagctgcgggactggctatgagctcacagaggacaatagctgcaaagatattgacgagtgtgagagtggtattcataactgcctccccgattttatctgtcagaatactctgggatccttccgctgccgacccaagctacagtgcaagagtggctttatacaagatgctctaggcaactgtattgatatcaatgagtgtttgagtatcagtgccccgtgccctatcgggcatacatgcatcaacacagagggctcctacacgtgccagaagaacgtgcccaactgtggccgtggctaccatctcaacgaggagggaacgcgctgtgttgatgtggacgagtgcgcgccacctgctgagccctgtgggaagggacatcgctgcgtgaactctcccggcagtttccgctgcgaatgcaagacgggttactattttgacggcatcagcaggatgtgtgtcgatgtcaacgagtgccagcgctaccccgggcgcctgtgtggccacaagtgcgagaacacgctgggctcctacctctgcagctgttccgtgggcttccggctctctgtggatggcaggtcatgtgaagacatcaatgagtgcagcagcagcccctgttagccaggagtgtgccaacgtctacggctcctaccagtgttactgccggcgaggctaccagctcagcgatgtggatggagtcacctgtgaagacatcgacgagtgcgccctgcccaccgggggccacatctgctcctaccgctgcatcaacatccctggaagcttccagtgcagctgcccctcgtctggctacaggctggcccccaatggccgcaactgccaagacattgatgagtgtgtgactggcatccacaactgctccatcaacgagacctgcttcaacatccagggcggcttccgctgcctggccttcgagtgccctgagaactaccgccgctccgcagccacccgctgtgagcgcttgccttgccatgagaatcgggagtgctccaagctgcctctgagaataacctactaccacctctctttccccaccaacatccacgcgccccgcggtgggttttccgcatggggccccctccagtgcctggtccccggggaacagccatggccagctgggcccatcacccg

SEQ ID NO: 253482 - DNA, 344 bp, Homo Sapiens
  misc_feature (322)..(322): n is a, c, g, or t
gacatcaatgagtgcagcagcagcccctgtagccaggagtgtgccaacgtctacggctcctaccagtgttactgccggcgaggtaccagctcagcgatgtggatggagtcacctgtgaagacatcgacgagtgtgccctgcccaccgggggccacatctgctcctaccgctgcatcaacatccctgggaagcttccagtgcagctgccccttcgtctgggcttacaggctgggcccccaatgggccgcaacttgccaaggacatttgatgagtgtgttgactgggcattccacaattggttccattcaacggaggaccttgntttcaacattcagggggcggtt

SEQ ID NO: 253483 - DNA, 843 bp, Homo Sapiens
  misc_feature (92)..(92): n is a, c, g, or t
  misc_feature (244)..(244): n is a, c, g, or t
atttcggcacaggctagcccatgagcttcaataccctgcatctgttatcttcactgttcctgctaccactgtgaagattgtgagccttgggnttggctgtaacatgatccagcctgtcaatgcggctgtggccagagtccccagactattcccatcgccaccctcttggttaaccctacttccttcccctgtccattgaaccagccccttgtggcctcctctgtctcacccttaattgtttctnggcaattctgtgaatcttcctataccatccacccctgaagataaggcccacatgaatgtggacattgcttgtgctgtggctgatggggaaaatgcctttcagggcctagaacccaaattagagccccaggaactatctcctctctctgctactgttttccccaaagtggaacatagcccagggcctccaccagtcgataaacagtgccaagaaggattgtcagagaacagtgcctatcgctggaccgttgtgaaaacagaggagggaaggcaagctctggagccgctccctcagggcatccaggagtctctaaacaactcttcccctggggatttagaggaagttgtcaagatggaacctgaagatgctacagaggaaatcagtggatttctttgagctaggagaataagagtctggagactgggagccttcacttcggcctccgattggtggcgcatagggtgtaaccaataggaaacccctaaagggtacttaaaccccagattttgcaactggggctcttgagcagcttgctttagcctgctaccactctgtggaatatacttttgcttcaataaatctgtgcttttattgcttca

SEQ ID NO: 253484 - DNA, 366 bp, Homo Sapiens
cccatctggcgcagggctgaaatgtcatcaagaggttctgaaaaagataggatcacacctgaaagcagtggtcccagctctgtgctgtgggacatcacaggtcctaaacagtgatagagaaagggctggggagtggcagctggaatctctgcttccgtctgaacatctggacacacatgtcagagaatcgcattaaatggactgcccgatctatttggtgattaaatggctgtgcggtgaggggagaaccctgggcagtctggagactgaggtgccattctcggctagagacaccacccaaagaagagatgggctggctactaaagacaagtgtcagttgaataaatgtctttaaacctaaaaaaa

SEQ ID NO: 253485 - DNA, 598 bp, Homo Sapiens
  misc_feature (21)..(22): n is a, c, g, or t
ccgagacaaaagaaatatcannccatgtggctcaggctgaccagatcaaagtggttcctaatccattctacatgtcaagtttaaatgaaccagactgcctgtgactttatgaatctgaaggtattacctgttgctgctttgagaatctgaatgctcattcacaaaagtatcccttctacccctatctggcgcagggctgaaatgtcatcattagaggttctgtcttctggggcttacaagttctatgtttcttaaaattcgctgattaaaaattttaaaaagataggatcacacctgaaagcagtggtcccagctctgtgctgtgggacatcacaggtcctaaacagtgatagagaaagggctggggagtggcagctggaatctctgcttccgtctgaacatctggacacacatgtcagagaatctttgcattaaatggactgcccgatctatttggtgattaaatggctgtgcggtgaggggagaaccctgggcagtctggagactgaggtgccattctcggctagagacaccacccaaagaagagatgggctggctactaaagacaagtgtcagttgaataaatgtctttaaacct

SEQ ID NO: 253486 - DNA, 875 bp, Homo Sapiens
  misc_feature (131)..(139): n is a, c, g, or t
  misc_feature (189)..(198): n is a, c, g, or t
cccctttccatgtggattagaatgggtgctgaacaacatgatctcagcagttgaagctgctacgtgtgtgaaagcaaattctccacttgagggtttgcccatcattcaaacactattccagaaaataatgnnnnnnnnntgtgggatttattttagcacctctgagtggactgtacttttctcaacggnnnnnnnnnntgcccttggtccttgagacaaaagatttaatatacaaccatgtcgcctcaggctgaccagatcaaagtggtttctaatccattctacatgtcaagtttaaatgaacaagactgcctgtgactttatgaatctgaaggtattacctgttgctgctttcttaaccaccatgagtaggtaaagcaaataatacctcacagagtgtggatgagaatctgaatgttttctcattcacaaaagtatcctttctacccctatctggcgcagggctgaaatgtcatcattagaggttctgtcttttggggctacaaagttctatgtttcttaaaattcgctgattaaaaattttaaaaagataggatcacacctgaaagcagtggtcccagctctgtgctgtgggacatcacaggtcctaaacagtgatagagaaagggctggggagtggcagctggaatctctgcttccgtctgaacatctggacacacatgtcagagaatctttgcattaaatggactgcccgatctatttggtgattaaatggctgtgcggtgaggggagaaccctgggcagtctggagactgaggtgccattctcggctagagacaccacccaaagaagagatgggctggctactaaagacaagtgtcagttgaataaatgtctttaaacctacaactttg

SEQ ID NO: 253487 - DNA, 755 bp, Homo Sapiens
  misc_feature (137)..(208): n is a, c, g, or t
  misc_feature (223)..(223): n is a, c, g, or t
  misc_feature (225)..(225): n is a, c, g, or t
  misc_feature (237)..(237): n is a, c, g, or t
  misc_feature (248)..(249): n is a, c, g, or t
acaaaataccctacaattcgcattcgcattcaggctgcgaactgttggaaggcaacggtgcggcccgctattcgccactggcaaaaggggatgtcctcaagccgattaagtgggtaccccagggtcccaatcccggnnnnnnnnnnnnnnnnnnnnnnnnnnnnnnnnnnnnnnnnnnnnnnnnnnnnnnnnnnnnnnnnnnnnnnnngaggatggggccttntntggggaggtganaacggttgtgnngtgtctacaaactacaacccacatctatgatgtgctctgtgtattaaaaatctgatttttcttctttaaattttttgataatactctgaaacctcagcaaatgtcttaagttccatggaataagcatcccaagcttttcatgctatttctcatgaactcctgaggtgcctccttttcccatatagtataccttaaaattaaaactccagaattaatgatctagatcataagaggtagggaaagacatgtgacaagatggtgctaatatggttaggagtaaagaaaggcccttctgatacgagtggcaaattcacatatccactggcacaatgttctaggcattgcaaatgtccatgtttggagtggcctctgtgtattcctgttttcagagggttaatacagatagaaatagagggtgccctgatagagaggcagatacctagatcaaaaataagaactcgagactagttctctcctcgtgccgaattcctgcagcccggggcatc

SEQ ID NO: 253488 - DNA, 711 bp, Homo Sapiens
  misc_feature (70)..(155): n is a, c, g, or t
  misc_feature (161)..(161): n is a, c, g, or t
  misc_feature (186)..(186): n is a, c, g, or t
  misc_feature (189)..(189): n is a, c, g, or t
aggcacggcatcaggttgcgcacctgttggaagggcgatcggtgcgggcttcttcgctaatacggcaacnnnnnnnnnnnnnnnnnnnnnnnnnnnnnnnnnnnnnnnnnnnnnnnnnnnnnnnnnnnnnnnnnnnnnnnnnnnnnnnnnnnnnnttaggnttatggtgagtatattgtttttttnttntttgtcgacaaactacaaaccacatctatgatgtgctctttgtattaaaaatctgatttttcttcttaaattttttgataatactctggaacctcagcaaatgtcttaagttccatggaataagcatcccaagcttttcatgctatttctcatgaactcctgaggtgcctccttttcccatatagtataccttaaaattaaaactccagaattaatgatctagatcataagaggtagggaaagacatgtgacaagatggtgctaatatggttaggagtaaagaaaggcccttctgatacagtggcaatgagcaagaaaacggaataatgtgcaggtgggggacagggaataattcattcacatatccactggcacaatgttctaggcattgcaaatgtccatgtttggagtggcctctgtgtattcctgttttcagagggttaatacagatagaaatagagggtgccctgatagagagggagataactagatcaaaaataagaactcgagactagttctctc

SEQ ID NO: 253489 - DNA, 576 bp, Homo Sapiens
  misc_feature (490)..(490): n is a, c, g, or t
ctgtcattggcgttatgttggcaccatttacagcagggctgagcctgagcattactgcagctggggtagggctgggaatagcatctgccacggctgggatcgcctccagcatcgtggagaacacatacacaaggtcagcagaactcacagccagcaggctgactgcaaccagcactgaccaattggaggcattaagggacattctgcatgacatcacacccaatgtgctttcctttgcacttgattttgacgaagccacaaaaatgattgcgaatgatgtccatacactcaggagatctaaagccactgttggacgccctttgattgcttggcgatatgtacctataaatgttgttgagacactgagaacacgtggggcccccacccggatagtgagagtagcccggaacctgggcaaggccacttcaggtgtcctcgttgtgctggatgtagtcaaccttgtgcaagactcactggacttgcacaaggnggatccgagtctgctgagttgctgaggcagtgggctcaggagctggaggagaatctcaatgagctcacccatatccatcagagtct

SEQ ID NO: 253490 - DNA, 955 bp, Homo Sapiens
  misc_feature (708)..(754): n is a, c, g, or t
cggtagccgcttttcgtcgactcttaccggttggctgggccagctgcgccgcggctcacagctgacgatgggggaccccagcaagcaggacatcttgaccatcttcaagcgccgccgctcggtgcccactaacaaggtgtgttttgattgtggtgccaaaaatcccagctgggcaagcataacctatggagtgttactttgcattgattgctcacggtcccaccggtcacttggtgttcacttgagttttattcgatctacagagttggattccaactggtcatggtttcagttgcgatgcatgcaagtcggaggaaacgctagtgcatcttccttttttcatcaacatgggtgttccaccaatgacaccaatgccaagtacaacagtcgtgctgctcagctctatagggagaaaatcaaatcgctcgcctctcaagcaacacggaagcatggcactgatctgtggcttgatagttgtgtggttccacctttgtcccctccaccaaaggaggaagatttttttgcctctcacgtttctcctgaggtgagtgacacagcgtgggcatcagcaatagcagaaccatcttctttaacatcaaggcctgtggaaaccactttggaaaataatgaaggtggacaagagcaaggaccaagtgtggaaggtcttaatgtaccaacaaaggctactttagaggtatcctctatcannnnnnnnnnnnnnnnnnnnnnnnnnnnnnnnnnnnnnnnnnnnnnnggaagtttgggagctcagaaactggcaaacacatgctttaatgaaattgaaaaacaagctcaagctgcggataaaatgaaggagcaggaagacctggccaaggtggtatctaaagaagaatcaattgtttcatcattacgattagcctataaggatcttgaaattcaaatgaagaaagacgaaaagatgaacattagtggc

SEQ ID NO: 253491 - DNA, 1618 bp, Homo Sapiens
  misc_feature (289)..(289): n is a, c, g, or t
actccagaacccattcttacacaggccctgtggaagaatccaagcaggaataattggattatttccagccagtgactttcaggaggaccacatatcttcaatgtcttcacattgtatctgaaaaatgtatctgaagcactcaaacaccaagtctactcaaatacgcttcccaagcagcttttctgtacatctctgctgcttccagacgatcagctgctgagattatgccacgacctacaatgatgatatcggaacctcgtttgccaataacttcttgtgggctattgtnctgttggccaagattatctcctcctgcttccaactgaactcctggagtcaagtgaagaaattctggtggcatgcttactcgggagccagaaataaaaccaacaacaaattcagagtgctcctcagccattctaaccgctgctctagtgtagtccccagtggccagggagccggtggagctcatttccgcaataaggaggcacccccgatgcaaaggcaggcccacttcttgcaggcctttcacaacaaatgagacctcgcaccacgtgagcatttactagatctgcccaggaagctattttaaagatacctccttcatactgctttttcactgtgtttcctatatctgcaaacttccggtcttcaaatatcaaaatatctcatggcattttgccagagttatcaactccttcatcacatccagagtaaaatcattcaaaatatctacatgagtcttcagcatgcagatactaggtcctaaagcatctgctagctgcaacagctctctggccagtgaaacatcagcagatagacacagattggtctccttcttttgcataagcctgagaagcttcgatgcaactgggtggatcctgggcagctctgcacgtgcaccgaagctgagttctttgggtgcttcctttatagaaaggggagaaccattatgattcgctgccacaaagacattctcctgaataaacctcttcactctcccaactgtctcagcatcaacttttttctgctgctcgagaatctccagcattttggacaatgtacacactgagtggaggcggatcccgtgcgcctgcaacttgtccttgcctccctgctctctgtccaacagcactatggcatcagtgaccttcaagccctccttctgaagaacctcaacagtttccaaaacactagatccactggtgacaacatcttcaatgattaaacaggtttctcctggattaatagttccttctacaagacgcttagttccataatcctttgtttctttccttctaataagcattggaatttgattggttgaacagataactgtagccaatggcaaagctgtataaggcactccacacacggtgtcaaaactgatgcctgcattttgggcagtttggaataaaatatctgcaacctgactcagaagacgcggtcgagacacgatgccccgcagatcgatgtagatgggggaggaaagcccgctcttcagcacgaagtccccaaacttgaaagcctgcacgtcgtacagacccgtcaccaatggccccaaagctgcacgagcgaccgccattgtcgcgcgctgcctgtttgcttcaaactcccc

SEQ ID NO: 253492 - DNA, 749 bp, Homo Sapiens
  misc_feature (598)..(598): n is a, c, g, or t
ctccttcaacagtgaaccaaccctcatgtctgtgtggatccagctgactcttgactagattatgaagaagctgtgctcttgctgttagaaggagctgcctgggaagaagctttgaggctggtatacaaatataacagactggatattatagaaaccaacgtaaagccttccattttagaagcccagaaaaattatatggcatttctggactctcagacagccacattcagtcgccacaagaaacgtttattggtagttcgagagctcaaggagcaagcccagcaggcaggtctggatgatgaggtaccccacgggcaagagtcagacctcttctctgaaactagcagtgtcgtgagtggcagtgagatgagtggcaaatactcccatagtaactccaggatatcagcgagatcatccaagaatcgccgaaaagcggagcagaagaagcacagcctcaaagaaggcagtccgatggaggacctggccctcctggaggcactgagtgaagtggtgcagaacactgaaaacctgaaagatgaagtataccatattttaaaggtactctttctctttgagtttgatgaacaaggaagggaanttacagaagggctttgaaagatacgctgcagttgatggaaggtcacttccagaaattgggactctttactttaccaacagaattcagctacccggttcctaggttcccattctactgccaatagtatcatgggctttttctagcacggaag

SEQ ID NO: 253493 - DNA, 1198 bp, Homo Sapiens
  misc_feature (277)..(277): n is a, c, g, or t
  misc_feature (1164)..(1164): n is a, c, g, or t
ccgattgagaaccgtgcagctcaatgtgtgcagcagcgaagaggtggagaaagtggtggagattgtgcgctcgagcctgaaggaccctgagaaaggcatgtggggcctcgttaacaatgccggcatctcaacgttcggggaggtggagttcaccagcctggagacctacaagcaggtggcagaagtgaacctttggggcacagtgcggatgacgaaatcctttctccccctcatccgaaggccaaaccgcgttcgtcaatatcagcagcatgctggngccgcatggacaacccggcccgctccccgtactgcatcaccaagttcggggtagaggctttctcggactgcctgcgctatgagatgtaccccctgggcgtgaaggtcagcgtggtggagcccggcaacttcatcgctgccaccagcctttacagccctgagagcattcaggccatcgccaagaagattgtggaaggagctgcctgaggtcgtgcgcaaggactacggcaagaagtactttgatgaaaagatcgccaagatggagacctactgcagcagtggctccacagacacgtcccctgtcatcgatgctgtcacacacgccctgaccgccaccaccccctacacccgctaccaccccatggactactactggtggctgcgaatgcagatcatgacccacttgcctggagccatctccgacatgatctacatccgctgaagagtctcgctgtggcctctgtcagggatccctggtggaaggggaggggagggaggaacccatatagtcaactcttgattatccacgtgtggattatccaccatgccaggaagacccataactggttttaacactaactagagggaatgacttctttgcatagtgagtgacttgggccttcacaaacagggtgtggagtggcaggcagaggcctctaaatctcagggcaaacatggtgaatctatctctccggagataatttcatacagagattttaagaaaacatctttatattaaaaacagatctcatttgatccttaagccagtctcatgaatgaaaaggacaggtttttttcttttgtaaatgaagcatttgcagcttaaagaggatgcatgaaataacccttttatcgcttataaatagtgccagttatgtgttccctgcnacggctgtggaaatacttcacatttgcattccaa

SEQ ID NO: 253494 - DNA, 446 bp, Homo Sapiens
  misc_feature (15)..(15): n is a, c, g, or t
  misc_feature (68)..(68): n is a, c, g, or t
  misc_feature (239)..(239): n is a, c, g, or t
  misc_feature (263)..(263): n is a, c, g, or t
ctaaaccggctaccnacccccttggacctacctactggtggcccccgaatgcaggatccatgaccccnacttgccccggagcccatctcccgaccatgatcctacatcccgcctgaagaagtcctcgcctgtggccctctgtccagggatcccccggtggaaggggaggggagggaggaaccccatatagtcaactcttgattatccacgtgtggattatccaccatgcccaggaagancccataactggttttaacactaanctagagggaatgacttctttgcatagtgagtgacttgggccttcacaaacagggtgtggagtggcaggcagaggcctctaaatctcagggcaaacatggtgaatctatctctccggagataatttcatacagagattttaagaaaacatctttatattaaaaacagatctcatttgatcctta

SEQ ID NO: 253495 - DNA, 1089 bp, Homo Sapiens
ctgtaatggggcaagagtatttgtgcagaaagaaattcttgataaatttacagaggaagtggtgaaacagacccaaaggattaaaattggagatccccttctggaagatacaaggatgggtccactcatcaaccgaccacacctggagcgagtccttgggtttgtcaaagtggcaaaggagcagggtgctaaagtgttatgtggtggagatatatatgtacctgaagatcccaaattaaaggatggatattacatgagaccttgtgtattaactaattgcagagacgacatgacctgtgtgaaggaagagatctttgggcctgttatgtccattttatcatttgacactgaagctgaggttctagaaagagccaatgataccacttttggactagcagctggcgtctttaccagggacatccaacgggctcatagagtggtagctgagcttcaggctgggacgtgcttcattaacaactataacgtcagcccagtggagttgccctttggtggatataagaagtcaggatttggcagagagaacggccgtgtgacaatcgaatattattcacagctgaagactgtgtgtgtggagatgggtgatgtggaatctgctttttgaaaacctgcagtgaaacctattgacatggccacgctgtggaatgatgtgaattggccctgtttacagaggcagtacaactgaatgttattttacatccagaattttggcgttcagtataagagaatggttcatgttactctttctctctccatcagcttcctcactgaaaatgtgcattaagtgccttgtagatactaatcaagaaagctgtgattctcctcaaagcgtatttttgtgaaatcttttaagagccagtaacatacttctagagaacaggaaaagagactaggataatacatcttccacacatttggcccactgataatgttaattctctggcgtatttcaaagaacttgttcctggctgatccaagtgcagtggtatttacaactaattgatcacaaccagtttgtagatttctttgttccttctccattcccactgcttcacttgcctagtcttgaag

SEQ ID NO: 253496 - DNA, 897 bp, Homo Sapiens
  misc_feature (16)..(16): n is a, c, g, or t
  misc_feature (22)..(22): n is a, c, g, or t
  misc_feature (38)..(38): n is a, c, g, or t
  misc_feature (51)..(51): n is a, c, g, or t
  misc_feature (60)..(60): n is a, c, g, or t
  misc_feature (72)..(72): n is a, c, g, or t
  misc_feature (83)..(83): n is a, c, g, or t
  misc_feature (127)..(127): n is a, c, g, or t
  misc_feature (132)..(132): n is a, c, g, or t
  misc_feature (136)..(136): n is a, c, g, or t
  misc_feature (156)..(156): n is a, c, g, or t
  misc_feature (172)..(172): n is a, c, g, or t
  misc_feature (174)..(174): n is a, c, g, or t
  misc_feature (176)..(176): n is a, c, g, or t
  misc_feature (179)..(180): n is a, c, g, or t
  misc_feature (237)..(237): n is a, c, g, or t
  misc_feature (255)..(255): n is a, c, g, or t
  misc_feature (279)..(280): n is a, c, g, or t
  misc_feature (282)..(282): n is a, c, g, or t
  misc_feature (309)..(309): n is a, c, g, or t
  misc_feature (322)..(322): n is a, c, g, or t
  misc_feature (428)..(523): n is a, c, g, or t
  misc_feature (533)..(557): n is a, c, g, or t
ctgaatataatacacngctgangactgtgtgtgttatnatttgtgatgttnaatctgctntttgaaaacctncattgaaaccnatttacatttccactctttttaattattttaattttcccttatnacatnttcntcacaacttaattttatttnacacccataatttttncntncannataatataattttccatttcactctttctctctccatcatcttcctcacttaaaatntgcattaattgccttttntatactaatcaagaaagctgtganncncctcaaagcgtatttttgtgaaatctnttaagagccagtnacatacttctagagaacaggaaaagagactaggataatacatcttccacacatttggcccactgataatgttaattctctggcgtatttcaaagaacttgttcctnnnnnnnnnnnnnnnnnnnnnnnnnnnnnnnnnnnnnnnnnnnnnnnnnnnnnnnnnnnnnnnnnnnnnnnnnnnnnnnnnnnnnnnnnnnnnnnngtcttgaagnnnnnnnnnnnnnnnnnnnnnnnnnccttgttcctttataggttcctggtagaatcagtagagatgatttcagctcattgacatttttttaagctatatccccttgtcattccattgagaaagctgacaactgggatagggaggggattagataatagatggggtcaaattctgtgtgaatgtgaacttgcctagtaagcactttgtctctgttcactactgcgatagaggaaatctatctccctatcttgggtccttgaactacagcctgctgtcttacaccagtggagctaccctttaaatgtacaaattatttgtatgctaatgtaatatggtgaaattaaaataaatcacactgttaaaaa

SEQ ID NO: 253497 - DNA, 641 bp, Homo Sapiens
aacctgttgtactattcttggttctagcacataagatgtcacctgaatatgaaatggtccctcccacaatactagaagaatgaccttaaagcaatatgtaggttcttttcaatattcggggggcaatctcaggagtagaacctggcaggcatcttaaatcagtggaacaacactgagaaatattaatatagcaataaaaagagaacagagtgggtcagcgatgaaccatccaaactgctctataagaactgtggatacgatcacaccaatgctgccaagtgtatctgccaaaacatgtagaaatacacccctcatgttagcattcatgcctccacccgcagatccgtggctgtgaccatgcccatggtcactgtgtccatgcatatggtgtgaatggctgtgatcagatgagtgacagcttccttgagaagctccatgggcatggctatgggcatggtgttaacatgtgagtgtctaattctggaggatcaatcaatctagccactgactccataaacacaaaaaacgctattactattagaaaaagtccattaataaatccagacagaatttctattcggccgtacccataggagaaaatccgagtggctttccacctactcatcagggcagcaaaaagt

SEQ ID NO: 253498 - DNA, 1296 bp, Homo Sapiens
  misc_feature (107)..(107): n is a, c, g, or t
  misc_feature (122)..(122): n is a, c, g, or t
gcataaatacagaacttttattcctattttatctttaggctatgcaaaaaatggactaaaaatttttcatttgggtctttgtaataaacatgtaaatacatattacnaatggagatgcttcntgatagaaagtaaacagaagtaattttggtcttcactagaatccatcatatctattttcgaagatgatgtaatacatcatgtttactcaaaatttgattccttttatacacataatttaaataattactccacttttaccattaatgtttcattctgtatttaaatttccttcaagaaagattccttgatccagtagtagggaactctgtttctgtacagttaatgtgtaatttttatccttctggcaatattacaaatactgagtcatttaatcttcattgtttattctccaggggtaattcttgagttatctcacatgatgtaagtaccatctttgcagtatttcatggattccatttggtcatagccagaacatcatgaaatccagtacttaggccagacatatgttgaaagtatgcctccttttccacttgaattgttaaattgtttactccagcatctttaagtattcctgtaacctgctgtactattctttgttctagcacatcagatgtcacctgtatatgaattgttcctgccacaatactagcagaatgacgccaaaaatgagggtctcggtatgatattaatccttcaattttctgtatcttttctaaagcaatatgtagttctttttcatattctggtggcaatctcaggagtagaacctggcaggcatctttaatcagtggaacaacactgagaaatattaatatagcaataaaaagagaacagagtgggtcagcgatgaaccatccaaactgctctataagaactgtggatacgatcacaccaatgctgccaagagtatctgccaaaacatgtagaaatacacccctcatgttagcattcatgcctccacccgcagatccgtggctgtgaccatgcccatggtcactgtgtccatgcatatgatgtgaatggctgtgatcagatgagtgacagcttccttgagaagctccatgggcatggctatgggcatggctaaaggcacagataccaataaggtttactatcagccctccaactgagactggtgttaacatgtgagtgtctaattctggaggatcaatcaatctagccactgactccataaacacaaaaaacgctattactattagaaaaagtccattaataaatccagacagaatttctattcggccgtacccatag

SEQ ID NO: 253499 - DNA, 710 bp, Homo Sapiens
agaaggcagctacaaagtctcttagaagatggcagtgggaaagaggaggtcaaaatcacaggcaaaccaactgttttcttgcagcaagcctgagcctccattctgtcagcgttaacctgaaagaggaggtccagccagccacaccgcacgtttagctcactcggacagccgtgaaacaccaggtgctgttacaaaatcaatatccagcatctcagtaggaacaagtgagcatcctgacaagacacacagcagtggttcgacttcctctcccattcaggatgaaccttgcctcacctctcaccctgctcatgtgttctgacttcaggttctctttgagagaagtaataggcaattaaacagactttgaaaaaatgggaaggcttcctgtctcctgtctcttctattggccagctggaggtccaaggtgcccagctagagtcatgggccccacactatggattcaactcttgatatttctagccaagttataaccattggctctatttttgcattgttgggtaaaggattcaaaacctttcagcactggttccaagaggaggccaaggtaatcagagaaaaaagtcaggcttgtcttgtaagctgcattcaggttccagagtcactgagagaaaaggaggtgaggagagggcaagaggcactagctagagactggttaccagggcagcttattcctaggatacagcatttct

SEQ ID NO: 253500 - DNA, 487 bp, Homo Sapiens
ggtgcatcttgcttctgagcaaggtagttttgatggtggggaccaaggcatactgagcacattttttagcagctgtgcaacaacagatatcagaaaacacactggcggttatttataacctaagcagcatctctatatacttctaccttccggcatttaaagtgtttggtgcaagtgccaaagttgtgcatttcctgggacgagtcaaaccatggaattatacttatgatcccaaaacagtgtctggaacatctttaccaccaacgttttacctctgcttcaacaatttggccttgtcaaagacacctgctcatatgtaaatgtggaagatgtctcaggagccatatcacatctgtcccttggggagatcccagctatggcacagccgtttgtatcctcggaagaacggaaggaacgatgggaacagggccaggctgattatatgggagcagattcctttgacaacatcgaggcttgacacttcctt

SEQ ID NO: 253501 - DNA, 1257 bp, Homo Sapiens
  misc_feature (1208)..(1208): n is a, c, g, or t
  misc_feature (1219)..(1219): n is a, c, g, or t
cctcgctggccgcgctccctcccggtgccggcttctctgagtcaccaacctgaggctgccccggccgcctgcgcacccggcagcaccatgacagatcaggcctttgtgacactaaccacaaacgatgcctacgccaaaggtgccctggtcctgggatcatctctgaaacagcacaggaccaccaggaggctggtcgtgctcgccacccctcaggtctcagactccatgagaaaagttttagagacagtctttgatgaagtcatcatggtagatgtcttggacagtggcgattctgctcatctaaccttaatgaagaggccagagttgggtgtcacgctgacaaagctccactgctggtcgcttacacagtattcaaaatgtgtattcatggatgcagatactctggtcctagcaaatattgatgatctttttgacagagaagaattgtcagcagcaccagacccagggtggcctgactgcttcaattccggagtcttcgtttatcagccttcagttgaaacatacaatcagctgttgcatcttgcttctgagcaaggtagttttgatggtggggaccaaggcatactgaacacattttttagcagctgggcaacaacagatatcagaaaacacctgccatttatttataacctaagcagcatctctatatactcctacctcccggcatttaaagtgtttggtgcaagtgccaaagttgtgcatttcctgggacgagtcaaaccatggaattatacttatgatcccaaaacaaaaagtgtcaaaagtgaggcccatgatcccaacatgactcatccagagtttctcatcctgtggtggaacatctttaccaccaacgttttacctctgcttcaacaatttggccttgtcaaagacacctgctcatatgtaaatgtggaagatgtctcaggagccatatcacatctgtcccttggggagatcccagctatggcacagccgtttgtatcctcggaagaacggaaggaacgatgggaacagggccaggctgattatatgggagcagattcctttgacaacatcaagaggaaacttgacacttacctccagtagaaacactgcattgttctgtgaacacatccacttcacaagccttgtttctgatacttagtatctagagctggggttgagaaaagtctgttacaggttgctagaggtgtcattaaacttancagatgagagntttttaggataagaggtgagactgggcaaaagttgtga

SEQ ID NO: 253502 - DNA, 433 bp, Homo Sapiens
gcacgcgaggtggcacccgaccccaggggagcagtacctggtcccccaccccctcctcccaaccacctccaaggccaagctgggtcccatagccagcacggcatggttctccccttccccccttcccaggtcaggggagttggacaagtagcaggtgtttgtttttaaagcacagccctttgggaaagcaacacattattgagactcactgtgattcccccgggagtcagactggctttgtcctcttcctctctggagggccatgggccatcagcaggagctccacatcgagccccaggccagaaccccctccctttcacagagagggaactttattgcacaattgggtgccttttagcttttgtgtgttgtgggcgttttggaagcgggtcaggggacagcttctggtgtgagtctctgacctgagctctgg

SEQ ID NO: 253503 - DNA, 1280 bp, Homo Sapiens
  misc_feature (47)..(47): n is a, c, g, or t
  misc_feature (850)..(865): n is a, c, g, or t
  misc_feature (956)..(956): n is a, c, g, or t
  misc_feature (965)..(965): n is a, c, g, or t
agatgaggtgaaggatgaggatagaagggtggatagataaatacagngatagataatcctaaaccgttaattcacctcagggaatgttctccttaaatgaacacctctcccagcatctccatattctctgcttttattccagataagcccaacctctcaacttgtctctgagaaaggtgaccacattcccagattcagagtcagaacttaaatccaatcagcacataacattcacattaagcctatttttggtccatgcctgggcataggacccaagtttgctggaacacaaaaatgaaaataatttttaatccaagcttgggatagagatttcccattttctcttgccagatgaggagaagagaacgcggaaccccagttttgccattgatagccatctgtgaccctggaaaggagggcaatgctgatggcagagggaggcttggaaaggacatgggtcttcgttcacattgaactgctaatgatagtgtgcctggagccctccatacttcctgtctcccagttaaaagagtttacaaatttacttcttgtttaatctactttgaatttgggtttctgtaactgtttagataggcgcttctcctttaaagaaaggcatgagaatatactcaaaatattctgctttctcatggcttgtttcattcctattgctttacactggaagatctttgaatatatatttgattttgaaaccatcttggaaaagtctacctagttatctaatgagacagataatttgatacatgcattgtttaaaaaaacaataactttgttacaaagtttaattcaaacttaagatgagtaaaaaccctcttatcctaccagaccnnnnnnnnnnnnnnnnctttccataaccaaagtttggacattattccttagccttcttagttcgtgaaatagagtttgacctattttgtagtccatttaaaacttcntggtctganttgcttggcaagatggccaaataggaacagctctggtctgcagctcccagtgagatcaacgcagaaggcgggtgatttctgcatttccaactgaggtacccagttcatatcagtgggactggttggacagtgggtgcagcccatggagggccagctgaaacagggtggggtgtcacctcacccaggaagcacaaggggtcagggaactacctcctctacccaagggaagccatgagggactgtacctgaggaacggtgcactccggcccagatactgcacttttcccatggtctttgaaacccgcagaccaggag

SEQ ID NO: 253504 - DNA, 1694 bp, Homo Sapiens
ggctggtaccggtccggaattcccgggatcgccaggaggagcgcgcgggcacagggtgccgctgaccgaggcgtgcaaagactccagaattggaggcatgatgaagactctgctgctgtttgtggggctgctgctgacctgggagagtgggcaggtcctgggggaccagacggtctcagacaatgagctccaggaaatgtccaatcagggaagtaagtacgtcaataaggaaattcaaaatgctgtcaacggggtgaaacagataaagactctcatagaaaaaacaaacgaagagcgcaagacactgctcagcaacctagaagaagccaagaagaagaaagaggatgccctaaatgagaccagggaatcagagacaaagctgaaggagctcccaggagtgtgcaatgagaccatgatggccctctgggaagagtgtaagccctgcctgaaacagacctgcatgaagttctacgcacgcgtctgcagaagtggctcaggcctggttggccgccagcttgaggagttcctgaaccagagctcgcccttctacttctggatgaatggtgaccgcatcgactccctgctggagaacgaccggcagcagacgcacatgctggatgtcatgcaggaccacttcagccgcgcgtccagcatcatagacgagctcttccaggacaggttcttcacccgggagccccaggatacctaccactacctgcccttcagcctgccccaccggaggcctcacttcttctttcccaagtcccgcatcgtccgcagcttgatgcccttctctccgtacgagcccctgaacttccacgccatgttccagcccttccttgagatgatacacgaggctcagcaggccatggacatccacttccacagcccggccttccagcacccgccaacagaattcatacgagaaggcgacgatgaccggactgtgtgccgggagatccgccacaactccacgggctgcctgcggatgaaggaccagtgtgacaagtgccgggagatcttgtctgtggactgttccaccaacaacccctcccaggctaagctgcggcgggagctcgacgaatccctccaggtcgctgagaggttgaccaggaaatacaacgagctgctaaagtcctaccagtggaagatgctcaacacctcctccttgctggagcagctgaacgagcagtttaactgggtgtcccggctggcaaacctcacgcaaggcgaagaccagtactatctgcgggtcaccacggtggcttcccacacttctgactcggacgttccttccggtgtcactgaggtggtcgtgaagctctttgactctgatcccatcactgtgacggtccctgtagaagtctccaggaagaaccctaaatttatggagaccgtggcggagaaagcgctgcaggaataccgcaaaaagcaccgggaggagtgagatgtggatgttgcttttgcacctacgggggcatctgagtccagctccccccaagatgagctgcagccccccagagagagctctgcacgtcaccaagtaaccaggccccagcctccaggcccccaactccgcccagcctctccccgctctggatcctgcactctaacactcgactctgctgctcatgggaagaacagaattgctcctgcatgcaactaattcaataaaactgtcttgtgagctgata

SEQ ID NO: 253505 - DNA, 441 bp, Homo Sapiens
  misc_feature (376)..(376): n is a, c, g, or t
  misc_feature (401)..(401): n is a, c, g, or t
tgtcgtggacaattccagtttgtggcccttcccttagggaagcactgcttttgttcccgctgcatgtgctaacttccattcattcatggttctatccctttgtagccttcccttcacacttctcacttgcgtttcttccatctctgggcagactgttccaccaacaacccctcccagggctaagctgcggcgggagctcgaacgaatccctccaggtcgctgagaggttgaccagggaaatacaacgagctgctaaagtcctaccagtggaagatgctcaacacctcctccttgctgggagcagctgaaacgagcagtttaactgggtgtcccggctggcaaacctcacgcaaggcgaaggaccagtaattatttngcggggtcaccacggtgaggttgtnttcccggccacatgttttggttcggggagcccgagttttt

SEQ ID NO: 253506 - DNA, 1062 bp, Homo Sapiens
  misc_feature (14)..(14): n is a, c, g, or t
  misc_feature (24)..(24): n is a, c, g, or t
  misc_feature (29)..(29): n is a, c, g, or t
  misc_feature (38)..(38): n is a, c, g, or t
  misc_feature (53)..(53): n is a, c, g, or t
  misc_feature (61)..(61): n is a, c, g, or t
  misc_feature (67)..(67): n is a, c, g, or t
  misc_feature (73)..(73): n is a, c, g, or t
  misc_feature (80)..(83): n is a, c, g, or t
  misc_feature (90)..(90): n is a, c, g, or t
  misc_feature (97)..(98): n is a, c, g, or t
  misc_feature (106)..(106): n is a, c, g, or t
  misc_feature (110)..(110): n is a, c, g, or t
  misc_feature (142)..(142): n is a, c, g, or t
  misc_feature (1046)..(1046): n is a, c, g, or t
ccctttactttganaatggaccgnacganccttgtganacgacggcagaaacnaaagctgnttcatnagacanttaaccnnnntccagcntataaannacttttcnaganagtcttcacccggaccccaagatactacaatncctgccctacagctgccccaccggagcctcacttttctttcccaagtcccgcatcgtccgcagcttgatgcccttctctccgtacgagcccctgaacttccacgccatgttccagcccttccttgagatgatacacgaggctcagcaggccatggacatccacttccacagcccggccttccagcacccgccaacagaattcatacgagaaggcgacgatgaccggactgtgtgccgggagatccgccacaactccacgggctgcctgcggatgaaggaccagtgtgacaagtgccgggagatcttgtctgtggactgttccaccaacaacccctcccaggctaagctgcggcgggagctcgacgaatccctccaggtcgctgagaggttgaccaggaaatacaacgagctgctaaagtcctaccagtggaagatgctcaacacctcctccttgctggagcagctgaacgagcagtttaactgggtgtcccggctggcaaacctcacgcaaggcgaagaccagtactatctgcgggtcaccacggtggcttcccacacttctgactcggacgttccttccggtgtcactgaggtggtcgtgaagctctttgactctgatcccatcactgtgacggtccctgtagaagtctccaggaagaaccctaaatttatggagaccgtggcggagaaagcgctgcaggaataccgcaaaaagcaccgggaggagtgagatgtggatgttgcttttgcacctacgggggcatctgagtccagctccccccgagatgagctgcagccccccggagagagctctgcacgtcaccaagtaaccaggccccagcctccaggcccccaactccgcccagcctctccctaatctggatcctgcactctaacactcgantctgctggtcatggga

SEQ ID NO: 253507 - DNA, 1053 bp, Homo Sapiens
  misc_feature (968)..(968): n is a, c, g, or t
  misc_feature (970)..(970): n is a, c, g, or t
  misc_feature (973)..(973): n is a, c, g, or t
  misc_feature (987)..(987): n is a, c, g, or t
  misc_feature (991)..(991): n is a, c, g, or t
  misc_feature (997)..(997): n is a, c, g, or t
  misc_feature (1005)..(1005): n is a, c, g, or t
  misc_feature (1007)..(1007): n is a, c, g, or t
gccaggaggagcgcgcgggcacagggtgccgctgaccgaggcgtgcaaagactccagaattggaggcatgatgaagactctgctgctgtttgtggggctgctgctgacctgggagagtgggcaggtcctgggggaccagacggtctcagacaatgagctccaggaaatgtccaatcagggaagtaagtacgtcaataaggaaattcaaaatgctgtcaacggggtgaaacagataaagactctcatagaaaaaacaaacgaagagcgcaagacactgctcagcaacctagaagaagccaagaagaagaaagaggatgccctaaatgagaccagggaatcagagacaaagctgaaggagctcccaggagtgtgcaatgagaccatgatggccctctgggaagagtgtaagccctgcctgaaacagacctgcatgaagttctacgcacgcgtctgcagaagtggctcaggcctggttggccgccagcttgaggagttcctgaaccagagctcgcccttctacttctggatgaatggtgaccgcatcgactccctgctggagaacgaccggcagcagacgcacatgctggatgtcatgcaggaccacttcagccgcgcgtccagcatcatagacgagctcttccaggacaggttcttcacccgggagccccaggatacctaccactacctgcccttcagcctgccccaccggaggcctcacttcttctttcccaagtcccgcatcgtccgcagcttgatgcccttctctccgtacgagcccctgaacttccacgccatgttccagcccttccttgagatgatacacgaggctcagcaggccatggacatccacttccacagcccggccttccagcaccccgccaacagaattcatacgagaaggcgacgatgaccggactgtgtgccgggagatccgcacaactcacgggctgcctgcggatgaaggacantntanaagtgccggagatntttntgtggntgttcacnanaaccctccaaggtaagctgggcgggagtcgacgaatcctcaggtcg

SEQ ID NO: 253508 - DNA, 776 bp, Homo Sapiens
  misc_feature (199)..(199): n is a, c, g, or t
gggagtgttacagctcttttagaatttgtctagtaggctttctggctttttaccggaaagcccctcttatgatgtttgttgccaatgatagattgttttcactgtgcaaaaattatgggtagttttggtggtcttgatgcagttgtaagcttggggtatgaaggtttgggccacgcctgggcgctttccggctgcgccngcatgctgtttcctttccgctcccaggggcgttgggaacggttgtaggacgtggctctttattcgtgagttttccatttacctccgctgaacctagagcttcagacgccctatggcgtccgcctcgacccaaccggcggccttgagcgctgagcaagcaaaggtggtcctcgcggaggtgatccaggcgttctccgccccggagaatgcagtgcgcatggacgaggctcgggataacgcctgcaacgacatgggtaagatgctgcaattcgtgctgcccgtggccacgcagatccagcaggaggttatcaaagcctatggcttcagctgcgacggggaaggtgtccttaagtttgctcgcttggtcaagtcctacgaagcccaggatcctgagatcgccagcctgtcaggcaagctgaaggcgctgtttctgccgcccatgaccctgccaccccatgggcctgctgctggtggcagcgtggccgcctcctgagagttggccctcccttgtgccactgccaggggaggaaaggccttgatgttccagacaataataaatgcgcctgtgacttaaaaaa

SEQ ID NO: 253509 - DNA, 706 bp, Homo Sapiens
  misc_feature (220)..(220): n is a, c, g, or t
aaatattccccacaagccccccctttggttccaccagggcccccaggggatttctctccttttggggaaagacccgggctattggagccccaggttttccccctttcccctaattgggggccccgccggggcccaaaaacgaaaatggttttttgaaaaagctttcttggagggggccgaaggcgggcccgacaagggggttgatggtgtgtttgggggnttggtggtacaatttcataagcatttattaatcagaggtacatgagcaggctcagcctaggggaataattgccaacaaacacttttgggaagcctgggaccatggctctgccaggaatctgtgacatctccagggcatcatttgagtcctgccttctcaaagtacttgtgacaggcagacgtgattgcagccacgaacacgatgaactcactgaagtccacctgggcatctccattggcgtccaggtccttgagcaatttatccacggcatccttgtcttttccactctgcaggaagcctggtagctccttctccatcagcaccttgagctcccccttggtcagggtctgcgtgctgccctcgctgcccgaatatcgggaaaagacgtctatgatcatgcccatggctgtctctagttccgtcatggtgctagattcagacccaccttcctcctgggggctggcagggccgagaaaaaatggtgga

SEQ ID NO: 253510 - DNA, 775 bp, Homo Sapiens
gatctggacgcttcattagatacatgttgcttgtatcgacgcatcaatggttttaaggcatgttagggccttgttcaagtaacgtgcccttgttaaccaaatgcttcgcaacgcagtatactctggtaaaagtcatcaccattctctcgtctcaataaaccaggggcacaatgcactgtggaaagccgtcagggacctctgcccttgaaagctgggtattggacaaagtttctccccatgtgatagtctgaaactatggcctcgtgggatgagaaagacctgacggtcccctagcccgacacccataaaaggtctgtgctgaggtggattagtcaaagaggaaagactcttgcagttgagatagaggaaggccactgtctcctgcctgccccctgggaactgaatgtctcggtataaaacacgattgtacatttgttcaattctgagatgggagaaaaaccgccctatggtgggaggtgagacatgtttacagcaatactgccttgatattctttactccactgagatgtttgggtggagagaaacataaatctggcttacatgcacgttcagtcatagtaccttcccttgaacttcattatgacatagattctattgctcacatgtttgttgctgaccttcttattatcaccctgccctcctactacattcctttttgctgaaataataaagatagtattcaataaaaaactgagggaactcagaggccagtgcccgtgcaagtcctggtgtgctgagtgccggtcccctggaa

SEQ ID NO: 253511 - DNA, 439 bp, Homo Sapiens
  misc_feature (36)..(36): n is a, c, g, or t
  misc_feature (52)..(52): n is a, c, g, or t
  misc_feature (62)..(62): n is a, c, g, or t
  misc_feature (84)..(84): n is a, c, g, or t
  misc_feature (103)..(103): n is a, c, g, or t
  misc_feature (128)..(128): n is a, c, g, or t
gccggccccccgggaaaccggaaagccccgggtaanaaaaaccccgaatggnaacaattggntccaaatccctgaagaataggnagaaaaaaccgccccctanggtgggaaggtgaagacatgttttnggagaaatgctgccttggttaattcctttaactcccactgagatgtttggggtggagagaaacataaatctggcttacgtgcacatcccagtcatagtactttccccttgaacttaattatgacatagattcttttgctcacatgttttttgctgaccttctattatcaccctgctctcctgctacattcctttttgctgaaataatgaaaataataatcaataaaaactgagggaactcagaggccggtgccagtgcaggtccttggtgtgctgtgtgccggtcccctgggcccactgttgtttctctaa

SEQ ID NO: 253512 - DNA, 614 bp, Homo Sapiens
  misc_feature (88)..(133): n is a, c, g, or t
cccccaggtccaaggactctctgtatataaagccgggcaccatgttgccagggtggtctcaaattcttgccttaagttaatcaactgnnnnnnnnnnnnnnnnnnnnnnnnnnnnnnnnnnnnnnnnnnnnnnggccttgtaggggcacattcttgatgaggtaagtaaaatcacttttttcttgctcatatgtcttttacattacatactgaatgtatgctaggcagcttggcaaagacacaggtaataatggggactgaagtttctttcatcaaatacgattgtggaaactaccaaattagatgcagataatgaatactgcaatctaagcaggcccagtggccattatgaaaactgatcattcctgaagtcaaaggaagcagtatgtggctataaattatcatgagggattcagaaaatactcaatgctgttcacttagcctgccctacctataattttaggttagaacagatactgtttgatcaataatgttttattccctaaaataagaaagtttaaatccaatttcatacagaggcctttggcctttattacatttaaattagtgtttaatatagaatatctatttaaacatgaaatatccaataggac

SEQ ID NO: 253513 - DNA, 424 bp, Homo Sapiens
  misc_feature (401)..(401): n is a, c, g, or t
cttgcacttctaatcttacatagcatccatacttagaatttggcatatcatctgggattttgccaatatacgtcaaagccctttaagagtcatggtaaggagatgggtgaaggaaaatttagcaacaggtaattgaagtcctattggatatttcatgtttaaatagatattctatattaaacactaatttaaatgtaataaaggccaaagctcctgttatgaaattgggatttaaactttcttattttagggaataaaacattattgatcaaacagtatctgttctaacctaaaattatagggtaggggcaggctaaggtgaacaggcattgaggtattttcctgaatccctcatggataatttataggccacatactggcttcccttggacttccggggntggtccgttttccatatgggccc

SEQ ID NO: 253514 - DNA, 623 bp, Homo Sapiens
  misc_feature (171)..(171): n is a, c, g, or t
aaagagccggagggccaaggtgaaactggtccccccccaggtaactttctcagaggcccaagttctcagtatcttttctctttggcggtctggaatataaacatgaccccaactaacactgtcctacctatgtggccaataagagtgttgtcttcgcagttggaacccaanaagccctatgggatgaaggatatgcactgtacttctttgtaaaagtgtcttgacaaagctgatgtccaatcaacatttaattaccagactgtccaagctagaaatgaaatacagttgatggcctgagtcctgataatcttgctaacaaaattataaaaggcctatagtatggccaatatattgggctaatggaaatgattttcttaaagccagaaaattcagctacccatagtgcttaaaaccagccttaaaagaacatgaacaggatggttcccaccttatcgagatcactggcattccatagtatccattcattcatatcctcctcctaggccgcatgaaacacctaccacatttccctacctcataaagcaaacaaaactcttttcctccctcttgctgcaaaaaggtttattaaaagccgtatgtagtgtataaagcctttcaaaaat

SEQ ID NO: 253515 - DNA, 597 bp, Homo Sapiens
  misc_feature (203)..(203): n is a, c, g, or t
ccactcctgggaagcaagtaaagcttataaaagccaaggttatatgcctaacggtctaaaatgtaagacagagtgaagcaagccaaaaacttgggcacacaattaggcccagtgagaagttaccctgcaagactggctcaaataaagaataagtatctcaaaatcctccaacaggcttgttgggaaggatcaactagctagcntctggtattcttccaaggaggtttcagtcttcaatccctccctaactccgaaaaaagtagtccgcaaacaccttcaaatgccaccaactcccaagaaaaaaaaggctgggggtggaagcctctttgaaccaagggagggatgcagcccttatcaccaatttctactgcagaaaagatgatgaggctggccttctggcctggcctgcaactaccttcctcaacctgcacaggcaggagacaaagttcctgaagaccacggggaggggtggggggagggaggttcctcagaccagagaggaggaagcatacggggctcacgggaggcgggggaaagaggagcagcccatctatcctgacctgtagacgcgaccccggggcctgctgttaaaaccac

SEQ ID NO: 253516 - DNA, 1618 bp, Homo Sapiens
ggagcctgggctgcggctgtcatggacgcctgggtccgcttcagtgctcagagccaagcccgggagcggctgtgtagggccgcccagtatgcttgctctcttcttggccatgcgctgcagaggcatggagccagtcctgagttacagaaacagattcgacaactggagagccacctgagccttggaagaaagcttctacgcctgggtaactcagcagatgcccttgagtcagccaaaagagctgttcacctatcagatgttgtcctgagattctgcatcactgttagtcacctcaatcgagccttgtacttcgcctgtgacaatgtcctgtgggctggaaagtctggactggctccccgtgtggatcaggagaagtgggcccagcgttcattcaggtactatttgttttccctcatcatgaatttgagccgtgatgcttatgagattcgcctactgatggagcaagagtcttctgcttgtagccggcgactgaaaggttctggaggaggagtcccaggaggaagtgaaactgggggacttgggggaccagggactccaggaggaggtctgccccaactggctctgaaacttcggctgcaagtcctgctcctggctcgagtccttaagaggtcatcccccacttctgctagacgtggtcagaaatgcctgtgatctcttcattcctctggacaaactaggcctctggcgctgtggccctgggattgtggggctttgtggcctcgtgtcctccatcctgtctattctcaccctaatctatccctggctacgactcaagccctgaccttccggtacaggataaggaggggacctgaattggtgagatggaatcttagatcgtcccccatgtgccagcctcattcgaattctactctttggttaaagttagaaattcagagatttaggggtggaggaagagctttggggaagatgaggtaaggaaagatgactcgtgaagttaataggatgtctctaatttctagatgtgcctgagcttctgttcttttcctctttctttgtgtctctcttgaatatatttactttgtgtctcttaactctgtttaaggttctgtgtctatgcatctctctctttcttttttcaaccttctcattctcctatccagggatttaatcagcagaattactttttgataggggaggtataaggtttggcctgtaaggttctaactgccttcttttttctcacagaggtggcttatggcagatttttcctccttcaaactccaaacataatttttaagactatgtgccagtggactcttcccttatatctctgcaccacaagttgttggatgtttcctcttcctcccttatgtctacctcaccaacctcgctcatcatttggcccttatccttccttgtacacctaccttcagatttctgcttacactttgatttcagagctttattccccagtctgttcttactcctttgtcgcttatccagaatgatgctatgtgtagcatcttgctgtaaatcctgtacaatgattctgtgtaaatagctgtggcctatgccaataatgaagagcaagcctttcaggtaagcaaattaaagttcagtttgctcatcgaaaaaa

SEQ ID NO: 253517 - DNA, 605 bp, Homo Sapiens
aaacagaagccacaacgtcattcaacaggaaagcttaaatccataggccagctggatcttcaatgtagctccttctgacactttacatgaagtgccttgtcagcacatctgtagccttgaccacagcttaaatgtttgtatactcctattaggacagcttcattgtgttcacacactgttctcatttctccagggaacaattccaaaatgatcttccagatgctatataactaagaacttttaaactactgacctcaaaggtcagcctgttcactggcatctgactgtgtagaacaggaagtctgtgttgcatcttgtgttcttaatgaaatccgacaacagaggactgaacgcattagtctcagaacaggaggcctaaggatggcaaagacccaagggtcaattattgaattaattgataaaaacctaagagcttggaggtcccatttctcctttcgggaagaggtttcattcatatatgcaaaaatcgtgaaaggcaaggagcagacggcgaaggtgatggtcatgatagccaggagaatgaggtggtccgtctcctccgccatggacaccctttcccctctcctgcgggccccggggccgcc

SEQ ID NO: 253518 - DNA, 315 bp, Homo Sapiens
gaaaacaaggtggggtggaatggctgcaaataaaggataatgactcctatcgacccaacatgatgtaactttctacatgaaaatgaagacgaagaagtggtagcttcagccccagataaatctttggaattggaagaggaagagattcaaatgaacgacagttcaaacctgagttgtgaacaggagaaaccaatgcacttggaaattatggaaactcaaatgctgccttagaaatcactcctagatgaaatgtttctcataataacttgtcaagaactagagttgttacataaaaataattgctgtgtagctttc

SEQ ID NO: 253519 - DNA, 844 bp, Homo Sapiens
ggggaggagcggagcggcaggaacccaataacctgcttcgcctcggagctgaagcccgtactcaagatggcggctccgggcgggcgtggccagtgactagaaggcgaggcgccgcgggaccatggcggcggcggcggacgagcggagtccagaggacggagaagacgaggaagaggaggagcagttggttctggtggaattatcaggaattattgattcagacttcctctcaaaatgtgaaaataaatgcaaggttttgggcattgacactgagaggcccattctgcaagtggacagctgtgtctttgctggggagtatgaagacactctagggacctgtgttatatttgaagaaaatgttgaacatgctgatacagaaggcaataataaaacagtgctaaaatataaatgccatacaatgaagaagctcagcatgacaagaactctcctgacagagaagaaggaaggagaagaaaacataggtggggtggaatggctgcaaataaaggataatgatttctcctatcgacccaacatgatttgtaactttctacatgaaaatgaagacgaagaagtggtagcttcagccccagataaatctttggaattggaagaggaagagattcaaatgaacgacagttcaaacctgagttgtgaacaggagaaaccaatgcacttggaaatagaagattctggtcctcttattgatataccttctgagacagaaggttctgtttttatggaaactcaaatgctgccttagaaatcactcctagatgaaatgtttctcataataacttgtcaagaactttttagagttgttacataaaaataattgctgtgt

SEQ ID NO: 253520 - DNA, 536 bp, Homo Sapiens
  misc_feature (418)..(418): n is a, c, g, or t
  misc_feature (488)..(488): n is a, c, g, or t
  misc_feature (524)..(524): n is a, c, g, or t
tttaataatattcaaccaatgggacacttttcatttattcaccagtgagcttttggccctggccacgtgccaggcagtgttcggggtgcttgggatacgtcagtgaacaaaccagacaatggctccctgccgttgtgcagctgacattgtaatgtgtgtctgtgtaggtgtgaatatattgcccgttttggggggggtgcggcataaaataaatggtcataatttgtgtagaggtctatattatgggaaccagcctcactgagatactagcatttgggccaagacctgtaggtagagagggagcatgctaactcctatggtgagcctggcagggacgtgctgtggtccagaacttcaaggtcttcaagctatttttgcacacccataagcataagcccagaatatattcaggcccagntcctacttcgctcgtggtcctctaagcactgtcttcagcctcaaacctgtcatgcagggacagaccctgngaagatgtcctttcatgcagtgatactccatgcagngcacctcggctt

SEQ ID NO: 253521 - DNA, 678 bp, Homo Sapiens
tgcaatgtgatctgaagtttctaattctggcccaactaaatttctagctctgtttccctaaacaaataatttggtttctctgtgcctgcattttccctttggagaaggtgctctctcttgagttgaccgagagtcccattagggatagggagacttaaatgcatccacaggggcacaggcagagttgagcacataaacggaggcccaccagaccacaagtcagcatgagttgctctatggcatcaaattgcaacttgagagtagatgggcagggtcactatcaaattaagcaatcagggcacacaagttgcagtaacacaacaagactaggccagctctggaatccagtaactcagtgtcagcaaggttttgggttatagttcaagaaagtctaaacagagccagtcacagcaccaaggaatgctcaagggagctattgcaggtttctctgctaagagatttatttcatcctgcgtgcagggttcgaccttcaaaggcctatcatcaccgtatcaatggatttcctgagggtaagctccgctatttcacaccttgaactccggagtctggatattcagggaagattgcattcctctactggatttgggctctagaggggcgttgtgggaaccaggccctcacagaatcaaatggtccaccaggagaagtgcttttttg

SEQ ID NO: 253522 - DNA, 646 bp, Homo Sapiens
ggcggcggagccaggataacctgagaggcggagggcagaagcagagaccgtgaggagcgtaggatggaaaagacgtgggaggggcaggatatcataaagcggggggtgatcgcagggaaggaagctcccatgaagggaatagccagtgactgtggggagcagcgggagacagtgtgaaacaagggaggccagaatgaatcaaggagaagtcttggattccaaatatgaaatatgtgcctattccagtcgctgctgaatctgataggaccaccagttctgccctcccctagtccccccatacacccccactgggcaccatcccacgcctctcaggactcacgtacagcaaggccaacccccagtgtgtgaagcagaactgggctacctccctgtgggcagagagccctgccacaaccaggctgggagccagcaccaggggcccacagtgggggaacacgtggccgggactccccagcagccccatcatgccctgcagcagcccagatactaccactgccccggacacctggtagaagagaggagaggatggagagaaaacattctgctcaatcaaactggcctcagcctggtcttcctaattctaagtatgggttcctcccaaaactcctttccaggagcatctcag

SEQ ID NO: 253523 - DNA, 1007 bp, Homo Sapiens
  misc_feature (122)..(390): n is a, c, g, or t
  misc_feature (645)..(688): n is a, c, g, or t
  misc_feature (947)..(947): n is a, c, g, or t
  misc_feature (972)..(972): n is a, c, g, or t
  misc_feature (984)..(984): n is a, c, g, or t
gttcaacctgcgcaacacagcaagaccttgtcttcaaaagaactactaggtcctttgccaaagaaaattctaggcacattcaaatatatatatttttttaattcaaacttgggcctggcatnnnnnnnnnnnnnnnnnnnnnnnnnnnnnnnnnnnnnnnnnnnnnnnnnnnnnnnnnnnnnnnnnnnnnnnnnnnnnnnnnnnnnnnnnnnnnnnnnnnnnnnnnnnnnnnnnnnnnnnnnnnnnnnnnnnnnnnnnnnnnnnnnnnnnnnnnnnnnnnnnnnnnnnnnnnnnnnnnnnnnnnnnnnnnnnnnnnnnnnnnnnnnnnnnnnnnnnnnnnnnnnnnnnnnnnnnnnnnnnnnnnnnnnnnnnnnnnnnnnnnnnnnnnnnaataataaaataaataattcaaactgtattaaccatgtttttgcgcctatactgcctctgtattaatagaggattagtacattggggaaaggatttgcagtaaaactgccggggagtaatatccctgctagcaatctgataaaatttatcatgtgcattaaaaatattcataatccttaacctagtagtcgttcatttggtctgcttggtatctttcctacagaaatagacaaagaaaccaaaatttatatatannnnnnnnnnnnnnnnnnnnnnnnnnnnnnnnnnnnnnnnnnnnatcactgtaactagactcagacacatctttattaatcaaaataggaaccactgcaatcaacacatttttgccactgagaaataagtttgtttattcctgtagcctaaaaatctatgcttcagggattcgacaaactcttgggaaaatattttctggcatcctgctgggttgtggggaaggcaccttcccctggttaaaaagttgttcaggtgcttggaggtgggtacccggggttggccgagagggtcagggtggaacngggccgggttgaggacggaaactcntgttggtccaantttgttttccggcagctttccgg

SEQ ID NO: 253524 - DNA, 1084 bp, Homo Sapiens
  misc_feature (974)..(974): n is a, c, g, or t
  misc_feature (986)..(986): n is a, c, g, or t
  misc_feature (995)..(995): n is a, c, g, or t
  misc_feature (1002)..(1003): n is a, c, g, or t
  misc_feature (1043)..(1044): n is a, c, g, or t
  misc_feature (1052)..(1052): n is a, c, g, or t
atttgatgaatcttcacccaaacaacctacaaatccttatgcatcatctaaagcagctgctgaatgtctttgtacagctcttacgtgggaacaatataagcttccagttgtcatcacaagaagcagtaatgtttatggaccacatcaatatccagaaaaggttattccaaaatttatatctttgctacagcacaacaggaaatgttgcatccatgggtcaggacttcaaacaagaaacttcctttatgctactgatgttgtagaagcatttctcactgtcctcaaaaaagggaaaccaggtgaaatttataacatcggaaccaattttgaaatgtcagttgtccagcttgccaaagaactaatacaactgatcaaagagaccaattcagagtctgaaatggaaaattgggttgattatgttaatgatagacccaccaatgacatgagatacccaatgaagtcagaaaaaatacatggcttaggatggagacctaaagtgccttggaaagaaggaataaagaaaacaattgaatggtacagagagaattttcacaactggaagaatgtggaaaaggcattagaaccctttccggtataatcaccatttatatagtcgagacagttgtcaaagaagaaagttatcctacctcgccaagtggtatgaaattaagtgaccaaatgaagtgcactcttttcttttggaattagattcatgactttctgtataaaattcaaatgcagaatgcctcaatctttgggagagtttcagtactggcatagaatttaaatgtcaaaattctttctgaaaccctttctcctagaaactaggaaataatatggtgtagaagactctccctaagggtagccaggaagaagtctacctgattcgacaccatgatgggtagtggtgctagggagaaagcaccttcactggtttgaactcagtgcctaagaaagctctgaatgtgtcgttnttaggcatatangatgtctangccctannttcacattcttttttagatctgaatgcttcattgccttanntatgacanatagagctatctacactcttaaatgatatttg

SEQ ID NO: 253525 - DNA, 870 bp, Homo Sapiens
  misc_feature (449)..(457): n is a, c, g, or t
  misc_feature (753)..(753): n is a, c, g, or t
gagatgaggtctcacccagactcgactcgaactcctgggcttaagggttcctcccaccactgagccccgctgagattctcttaatgtgtgctccaacatcttcaagaggaatgaaaaaagatataagtccttcattgcaatagaaagtagatccaataatagaaaaaaatcctaagtatatttgcttttatgaaattgtgattgtctttgttatttttcaagagaagtttatttttagtattaaatcagtccttgaactggtatcaaggaaaaagatatctcacagaagagttttctttctgcaagcaactggcagaaatgtgacatgtttgattatgtatccatttgtattccctatgtattttaatgtttcccaaactgttgttcatcataaaatgaaaaatatgtaaagctctgtttaattatgtctttgcatatccatgtactcnnnnnnnnnggcaggtggggaaggtagctttaaatactctattaatttgtgtaggctttcttgattttgtcatttaaaaaagatttcatacattgagatagatgtgtattatagacatcatctataggctcttaaaatgaaattgctgtttccacaattaaacaaattccttgcaagattagtcaggaagagaaacggaaatataccaaaatataacacagtatattttagtatcaaagcactataaataccaccctcttctcatcaggtgcagactgtgattcctccctaattatagatcttgngagtttgaaagacagaaggaatttgataacatttcattgcagcacagtttttgccaaccgcttttacgagcccttgttcttacatctcgttctggagccccagttgtactattattg

SEQ ID NO: 253526 - DNA, 410 bp, Homo Sapiens
aacacagtgaagctggactcctccaagagacccccgactcacacgaacattcagggaatccccaaaaaggcctgcacctgacagcacaatgtatggagtggggtccccaagacctcttctctaacctacacaggcaaaatgggaatcaaatggctgcaaccaacccagcctgtcccctcctaagtgtggtagcgagggcccctcccctgttgtgcctcaatcttcccacctgtgggatgaaaccatccatccccaccctgacttgcgagaatttcatctgaaaatcatttctccactttacaggtgaggacacgggctcagacgcgcgcggctcacagagctgacaagtcggccgagagggaagccggtacccagaccaacaccctggcgccagggatgcccgccgcgat

SEQ ID NO: 253527 - DNA, 428 bp, Homo Sapiens
gtcggacttgtagaagtagcccgaaagatatcaatgccacttccaaaggcagttccacagacatttttcctgtggttgcaatcatgctatgctgtgttccagcaggaattaatcctctgaaaggctggcttacttgtgcaggacgactcagactctgagcctgtgcttggggagtggtatgctgtaatgggggctgaagagtctgaggcaaagcaattagaggttgccctgtagatccaaaattaggcaaggaaagctgggatgctggtaaaggtactgtaacctgctggagagcacttggtgactgggcagtgttataaaaatttgtctgaccaggctgttgtacttgtccagaataaagatttgaggcctgggtaagatttgctctggcctggagaagatgtgtgctcgtgcagaattcctgcagc

SEQ ID NO: 253528 - DNA, 723 bp, Homo Sapiens
  misc_feature (61)..(61): n is a, c, g, or t
  misc_feature (67)..(67): n is a, c, g, or t
  misc_feature (110)..(110): n is a, c, g, or t
  misc_feature (170)..(170): n is a, c, g, or t
ctcaacctgcaagacaccagaggtcggtcagtgcaggagacttaaatcactgtccactttngggctntgcctcctcctatctgtttgctctgttgctgttcagagaaganccgttgcgtggactgaagaacctctgctctctgctttgcctggggtgcaaactgtgtagnaaatggttgtgtcattctcacagtggcagggtctgactggatctgcttctggtagacaatgctgttcattctgctggactggctgttcggacttgtagaagtagcccggaaggcactagatgttggtgtggtgcttctaccagcgattggaggtgtgcctggttttatatcaatgccacttccaaaggcttttagttccatttcagacatttttcctgtggttgcaatcatgctatgctgtgttccagcaggaattaatcctctgaaaggctggcttacttgtgcaggacgactcagactctgagcctgtgcttggggagtggtatgctgtaatgggggctgaagagtctgaggcaaagcaattagaggttgccctgtagatccaaaattaggcaaggaaagctgggatgctggtaaaggtactgtaacctgctggagagcacttggtgactgggcagtgttataaaaatttgtctgaccaggctgttgtacttgtccagaataaagatttgaggcctgggtaagatttgctctggcctgcagaagatgtgtg

SEQ ID NO: 253529 - DNA, 965 bp, Homo Sapiens
aggtagcgaggcctgggtggcgaattcggcacgagggctttgcctagcttgcaggcagcgcagggcagacggcggcaggagaagcaagatgaatgcaggctcagatcctgtggtcatcgtctcggcggcgcggaccatcataggttccttcaatggtgccttagctgctgttcctgtccaggacctgggctccactgtcatcaaagaagtcttgaagagggccactgtggctccggaagatgtgtctgaggtcatctttggacatgtcttggcagcaggctgtgggcagaatcctgttagacaagccagtgtgggtgcaggaattccctactctgttccagcatggagctgccagatgatctgtgggtcaggcctaaaagctgtgtgccttgcagtccagtcaatagggataggagactccagcattgtggttgcaggaggcatggaaaatatgagcaaggctcctcacttggcttacttgagaacaggagtaaagataggtgagatgccactgactgacagtatactctgtgatggtcttacagatgcatttcacaactgtcatatgggtattacagctgaaaatgtagccaaaaaatggcaagtgagtagagaagatcaggacaaggttgcagttctgtcccagaacaggacagagaatgcacagaaagctggccattttgacaaagagattgtaccagttttggtgtcaactagaagaggtcttattgaagttaaaacagatgagtttcctcgccatgggagcaacatagaagccatgtccaagctaaagccttactttcttactgatggaacgggaacagtcaccccagccaatgcttcaggaataaatgatggtggctgcagctgtcgtttcttatgaagaagtcagaaagctgataaaacgtgggacttacacctttaagcacggatagttttcgtggtccccaaggggggtggtggaa

SEQ ID NO: 253530 - DNA, 1331 bp, Homo Sapiens
ggcagtactccacggtgtaaggtagcgaggctgggtggcgaattcggcacgaggctggacagccgtgaaagaaattgggactgatctttggacaggaggatggctgtgtcccctcctgaggtcagagggggacactgcttccagacagggcctgcagctgagcttacagcctctcctgacatggccacgtgatgatttggtcatgccttctgatgaatggctatctgcttatgtgcctagatccaccagagttgtcacagttacaggccagttactaggaggcctcttctgaatgtgacatgggaggagggtctccccttttctcttggggagatactgaggtgaaataggcctgcaccagccaatacagaggcagcaagtagggtcctgaagacactcacttggctgcaggagagaccaggggtttcctccagctgcctggttggctgctgctctgagaagataccaggcctctgctctggtggcttcagggaggccaccctggacacagccagcagaagcaggtcatcgatggaggggtcagcctacaaggacacagccaagttcatgttctttgggaggtggcagccaaggacttggtgcactgcaaggaggtcagggaaacagagacagagaagctgcttctccaaacttcagtgaccacacctgtgttcctgcagctgagtgtctctcagaatgggtgtctcttagggacacactgctgtagctcaacacaggagcattgccaacactttgagctggagaataacacaaaccacagatgagcctcttggaatgaccactgtggggacctgaaggtgtgtactggaggctggacaagcgttgaggggctcccctggcgagcatctgtgacaggtttgatgaggcctgttcccagcagtggcagtgagactggcatgtctggatgacctctacccagaggcccagctttattgcaggctggctctgaatcccttcatctctggccgcagccgggacaaagtgccagagctgagcagctgcctcaattctccagcccctgtgctctgaaaagccacacaggggacagagatcagaggagccgacaccaaagtgatgcaactgccctcccaggaatgctgttctcaacagaggaaaaagagtggtgaaatgggagccatgggccctgtcggggcaggacaggcttctagacctcatcctcgtgtttaactcctttatttgacgtatggggaaactgaggcccaagaagggaagggagttgcctaaattcacaacagctggacacactttttcaaataactccacttatcttacagtagttttgcacttac

SEQ ID NO: 253531 - DNA, 1683 bp, Homo Sapiens
ggggcccgcggcaggcctgtgggctgcgaggaggagctttgcctagcttgcaggcagcgcagggcagacggcggcaggagaagcaagatgaatgcaggctcagatcctgtggtcatcgtctcggcggcgcggaccatcataggttccttcaatggtgccttagctgctgttcctgtccaggacctgggctccactgtcatcaaagaagtcttgaagagggccactgtggctccggaagatgtgtctgaggtcatctttggacatgtcttggcagcaggctgtgggcagaatcctgttagacaagccagtgtgggtgcaggaattccctactctgttccagcatggagctgccagatgatctgtgggtcaggcctaaaagctgtgtgccttgcagtccagtcaatagggataggagactccagcattgtggttgcaggaggcatggaaaatatgagcaaggctcctcacttggcttacttgagaacaggagtaaagataggtgagatgccactgactgacagtatactctgtgatggtcttacagatgcatttcacaactgtcatatgggtattacagctgaaaatgtagccaaaaaatggcaagtgagtagagaagatcaggacaaggttgcagttctgtcccagaacaggacagagaatgcacagaaagctggccattttgacaaagagattgtaccagttttggtgtcaactagaagaggtcttattgaagttaaaacagatgagtttcctcgccatgggagcaacatagaagccatgtccaagctaaagccttactttcttactgatggaacgggaacagtcaccccagccaatgcttcaggaataaatgatggtgctgcagctgtcgttcttatgaagaagtcagaagctgataaacgtgggcttacacctttagcacggatagtttcctggtcccaagtgggtgtggagccttccattatgggaataggaccaattccagccataaagcaagctgttacaaaagcaggttggtcactggaagatgttgacatatttgaaatcaatgaagcctttgcagctgtctctgctgcaatagttaaagaacttggattaaacccagagaaggtcaatattgaaggaggggctatagccttgggccaccctcttggagcatctggctgtcgaattcttgtgaccctgttacacacactggagagaatgggcagaagtcgtggtgttgcagccctgtgcattgggggtgggatgggaatagcaatgtgtgttcagagagaatgaattgcttaaactttgaacaacctcaatttctttttaaactaataaagtactaggttgcaatatgtgaaatcagaggaccaaagtacagatggaaaccatttcctacatcacaaaaacccaagtttacagcttgtactttactttaatgtgtaatactcaactcacggtacaagacaattgcatttaacattgttataaataaaaggaacatcagatcacatccaacaacaccaccccctctaaccctacaaccgatcatgccatcaaccacctttcctcattcaaccccatatacttaaacgacctccccgtcgcgacaacccaccctctcccgtcgacagcatactacgccctataatttatttgtggcgggcccctctccgccccctcaagaaaacttcc

SEQ ID NO: 253532 - DNA, 2394 bp, Homo Sapiens
gggccggggcagccgggaagcgggtggggtggtgtgttacccagtagctcctgggacatcgctcgggtacgctccacgccgtcgcagccactgctgtggtcgccggtcggccgaggggccgcgatactggttgcccgcggtgtaagcagaattcgacgtgtatcgctgccgtcaagatggaggggcctttgtccgtgttcggtgaccgcagcactggggaaacgatccgctcccaaaacgttatggctgcagcttcgattgccaatattgtaaaaagttctcttggtccagttggcttggataaaatgttggtggatgatattggtgatgtaaccattactaacgatggtgcaaccatcctgaagttactggaggtagaacatcctgcagctaaagttctttgtgagctggctgatctgcaagacaaagaagttggagatggaactacttcagtggttattattgcagcagaactcctaaaaaatgcagatgaattagtcaaacagaaaattcatcccacatcagttattagtggctatcgacttgcttgcaaggaagcagtgcgttatatcaatgaaaacctaattgttaacacagatgaactgggaagagattgcctgattaatgctgctaagacatccatgtcttccaaaatcattggaataaatggtgatttctttgctaacatggtagtagatgctgtacttgctattaaatacacagacataagaggccagccacgctatccagtcaactctgttaatattttgaaagcccatgggagaagtcaaatggagagtatgctcatcagtggctatgcactcaactgtgtggtgggatcccagggcatgcccaagagaatcgtaaatgcaaaaattgcttgccttgacttcagcctgcaaaaaacaaaaatgaagcttggtgtacaggtggtcattacagaccctgaaaaactggaccaaattagacagagagaatcagatatcaccaaggagagaattcagaagatcctggcaactggtgccaatgttattctaaccactggtggaattgatgatatgtgtctgaagtattttgtggaggctggtgctatggcagttagaagagttttaaaaagggaccttaaacgcattgccaaagcttctggagcaactattctgtcaaccctggccaatttggaaggtgaagaaacttttgaagctgcaatgttgggacaggcagaagaagtggtacaggagagaatttgtgatgatgagctgatcttaatcaaaaatactaaggctcgtacgtctgcatcgattatcttacgtggggcaaatgatttcatgtgtgatgagatggagcgctctttacatgatgcactttgtgtagtgaagagagttttggagtcaaaatctgtggttcccggtgggggtgctgtagaagcagccctttccatataccttgaaaactatgcaaccagcatggggtctcgggaacagcttgcgattgcagagtttgcaagatcacttcttgttattcccaatacactagcagttaatgctgcccaggactccacagatctggttgcaaaattaagagcttttcataatgaggcccaggttaacccagaacgtaaaaatctaaaatggattggtcttgatttgagcaatggtaaacctcgagacaacaaacaagcaggggtgtttgaaccaaccatagttaaagttaagagtttgaaatttgcaacagaagctgcaatcaccattcttcgaattgatgatcttattaaattacatccagaaagtaaagatgataaacatggaagttatgaagatgctgttcactctggagcccttaatgattgatctgatgttccttttatttataacaatgttaaatgcaattgtcttgtaccttgagttgagtattacacattaaagtaaagtacaagctgtaaacttgggtttttgtgatgtaggaaatggtttccatctgtactttggtcctctgatttcacatattgcaacctagtactttattagtttaaaaagaaattgaggttgttcaaagtttaagcaattcattctctctgaacacacattgctattcccatcccacccccaatgcacagggctgcaacaccacgacttctgccccattctctccagtgtgtgtaacagggtcacaagaattcgacagccagatgctccaagagggtggcccaaggctatagcccctccttcaatattgacctagcgggggagaaaagatttagattgtttattcttctgtggacacagtttaaaatcttaaacttgtctttttcctcttaatgtatcagcatgctaccctttcaaactcaaattttcattttaactgcttaggaataaatttacacctttgtgaaaattc

SEQ ID NO: 253533 - DNA, 559 bp, Homo Sapiens
gtcggccttcccaacatggcgcagtctattaacatcacggagctgaatctgccgcagctagaaatgctcaagaaccagctggaccaggaagtggagttcttgtccacgtccattgctcagctcaaagtggtacagaccaagtatgtggaagccaaggactgtctgaacgtgctgaacaagagcaacgagggtatggggtaggcgggtgagggtaacctaaagtggcgaacctgcttctctcgtcccacctcctaacccagtttttcttacctgaaacgagaaaatccattacatatcgtataccgcttcatgaaccctttgcatgttgcctgcctagaattgaaaagtacaggacattcctctgctcctattgcccctgtttccgttcttttcacactgtctgtggggtgctgtgccctgttgggaactctctttaaacgtcttacgttggagccgctaaccttccccaggtgtttgtcttcattgctttcacaggggatgtggaacacgtgctcatcgatgtggggaccgggtactatgtagagaagacagcttgtgc

SEQ ID NO: 253534 - DNA, 930 bp, Homo Sapiens
  misc_feature (616)..(644): n is a, c, g, or t
  misc_feature (656)..(694): n is a, c, g, or t
  misc_feature (741)..(813): n is a, c, g, or t
  misc_feature (855)..(863): n is a, c, g, or t
ggggctcgccgagagacttcctcttcgttaagtcggccttcccaacatggcgcagtctattaacatcacggagctgaatctgccgcagctagaaatgctcaagaaccagctggaccaggaagtggagttcttgtccacgtccattgctcagctcaaagtggtacagaccaagtatgtggaagccaaggactgtctgaacgtgctgaacaagagcaacgaggggaaagaattactcgtcccactgacgagttctatgtatgtccctgggaagctgcatgatgtggaacacgtgctcatcgatgtgggaactgggtactatgtagagaagacagctgaggatgccaaggacttcttcaagaggaagatagattttctaaccaagcagatggagaaaatccaaccagctcttcaggagaagcacgccatgaaacaggccgtcatggaaatgatgagtcagaagattcagcagctcacagccctgggggcagctcaggctactgctaaggcctgagagtttttgcagaaatggggcagagggacaccctttgggcgtggcttcctggtgatgggaagggtcttgtgttttaatgccaataaatgtgccagctgggcagannnnnnnnnnnnnnnnnnnnnnnnnnnnnaaactcgaggcnnnnnnnnnnnnnnnnnnnnnnnnnnnnnnnnnnnnnnncatggtcatagctgtttcctgacccagctttcttgtacaaagtggtnnnnnnnnnnnnnnnnnnnnnnnnnnnnnnnnnnnnnnnnnnnnnnnnnnnnnnnnnnnnnnnnnnnnnnnnntgcagtaaccggggaatttacccccgcctaatgagccgggcnnnnnnnnngggattccaaaggatcttcttggagaacccttttttttctgccaagaaatccgccggccttgcaaac

SEQ ID NO: 253535 - DNA, 480 bp, Homo Sapiens
gggctcttcgttaagtcggccttcccaacatggcgcagtctattaacatcacggagctgaatctgccgcagctagaaatgctcaagaaccagctggaccagatgtatgtccctgggaagctgcatgatgtggaacacgtgctcatcgatgtgggaactgggtactatgtagagaagacagctgaggatgccaaggacttcttcaagaggaagatagattttctaaccaagcagatggagaaaatccaaccagctcttcaggagaagcacgccatgaaacaggccgtcatggaaatgatgagtcagaagattcagcagctcacagccctgggggcagctcaggctactgctaaggcctgagagtttttgcagaaatggggcagagggacaccctttgggcgtggcttcctggtgatgggaagggtcttgtgttttaatgccaataaatgtgccagctgggcgcactattaactaacgaaag

SEQ ID NO: 253536 - DNA, 361 bp, Homo Sapiens
  misc_feature (334)..(334): n is a, c, g, or t
taaataaattcttgtaaatattcgtaatctttaatatccaattaggtagatagttgactaaactactcccttacatatgcacatatatattttgtttttactttattattattcatagttaatttgtctctgtgcatttgtccccatccttttgtgtgtgtttttgtttctgatacgttttctttggaaaggttctcagaagtagcatttggaaggattgtacacattcacttttcatggtgggagcatacttttcacccgcttatttatatatattcttgatccttaggaggttttcagaggcttagttggtctgtctatggcttatagtggngctctggtctcctgcttgttgctggcg

SEQ ID NO: 253537 - DNA, 1050 bp, Homo Sapiens
  misc_feature (824)..(824): n is a, c, g, or t
  misc_feature (852)..(852): n is a, c, g, or t
  misc_feature (904)..(905): n is a, c, g, or t
  misc_feature (907)..(907): n is a, c, g, or t
  misc_feature (924)..(924): n is a, c, g, or t
  misc_feature (951)..(951): n is a, c, g, or t
  misc_feature (959)..(959): n is a, c, g, or t
  misc_feature (971)..(971): n is a, c, g, or t
  misc_feature (981)..(981): n is a, c, g, or t
  misc_feature (986)..(986): n is a, c, g, or t
  misc_feature (1002)..(1003): n is a, c, g, or t
  misc_feature (1007)..(1007): n is a, c, g, or t
  misc_feature (1012)..(1012): n is a, c, g, or t
  misc_feature (1016)..(1016): n is a, c, g, or t
  misc_feature (1034)..(1034): n is a, c, g, or t
  misc_feature (1038)..(1038): n is a, c, g, or t
  misc_feature (1043)..(1043): n is a, c, g, or t
  misc_feature (1047)..(1047): n is a, c, g, or t
  misc_feature (1050)..(1050): n is a, c, g, or t
gtcggacgccgccgcggcgcgctctgcagactccgggtcgccgctccgccgggacgcgttggccggggcgcgcggtgcttggctgcggtgctcacactcatgaggagccggaagctcacaggtgcagtgcggtcttcagcgcgcttgaaagcacgaagttgttcggcagccaggttggcctctgcccaggaagttgctggttccacgtctgccaagacagcatgtctgacttcctcatcccacaaagccacagacaggcgaacgtccaagaagttcaaatgtgacggacatcttgtgaagtcagaattacagaagcttgtccctaagaatgacagcgcttctttgccgtgacacctgagaccccttgtgaaaatgagtttgctgaaggcagtgccttgcttccaggcagcgaggctggcgtttctgtgcagcagggggctgcaagtcttcctctcggtggctgcagagatgtgagtgactctcgcttagcaaagactagagatggcctgtccgtgccaaaacacagtgccgggtccggagcagaagaatccaacagcagctccactgtgcagaagcagaatgagccagggctacagacagaggatgtgcacaagccaccacttcagatggacaacagcgtctttctagatgacgacagcaatcagccaatgcccgtgagccggttctttggaaacgttgagctcatgcaggacctcccacctgcgtcttcatcttgtccttcaatgagcagacgagagttcagaaaaatgcatttcagagccaaagatgatgatgatgacgacgacgatgatgcagaaatgtanggggcatacaaaataatgtccttgagtntttagtaccattaacaatttgacaatttagcacattacaagatttatataanntntatctccaagagaatgntcttaatcaaacttcagaactggaccnatctaagnaatagtgcaagncccaatactngtggnggggtctcatgggaannaaantcaancatntttaggttgcaactgctntctntccanttcnttn

SEQ ID NO: 253538 - DNA, 1324 bp, Homo Sapiens
ggggagaccactagtgtgctgagggtggaagaaaaggggaaggcggagctaggtgggaagttcattggaatagacggtccagagaagagaatatgggtcagaagtcatgaggctttggcttagcatgggcagtgtggaaagctctagatccagtccccaaacttggccctagtccactgacttgttacataatcttgggcaaaacactgtaccttttgaacttcagctctttcacctgtgcacaaaagtgttagatctcctccacggccccctttagtcctcaagtctgtgctttagagtgttttcatgggagggaccctcccatcttcttctgccccagggtccccagttcaccttctcccaggaggacttcctgacttccatccttccctctctcacggaaatcgatactgtggtcttcattttcaccctggatgacaacctcacggaggtgcagactatagtggagcaggtgaaagagaagaccaaccacatccaggccctggcacacagcaccgtgggtcagaccttgccgatccctctgaagaagctctttccctccatcatcagcatcacatggccactgcttttctttgaatatgaagggaacttcatccagaagttccagcgtgagtaaagcaccaaatgggtgctgaatacagtgagtacaggtgctcatgtgcttcttggtaagatcctacaaaaccacatgttggaccttcggattagcaactccaagctcttctggcgggcgctggccatgctgcagcggttctctggacagtccaaggctcgatgcatcgagagcctcctccgagcgatccactttccccagccactgtcagatgatattcgggctgctcccatctcctgccatgtccaggttgcacatgagaaggaacaggtgatacccatcgccttgctgagcctcctattccggtgctcgatcactgaggctcaggcacacctggctgcagctccttctgtctgtgaggctgtcaggagtgctcttgctgggccaggtcagaagcgcactgcggaccccctcgagatcctagagcctgacgttcagtgaacccatgtttctgggtgggtgaaaggggcccaaccctgcccacttcagcccagcccgcccaaggggacttgtgccagcagaacatgtgggaggaagaagccccatttccagggcatccgcagcccagggtagggagaaatattctctccactttgggggagagttcttgctctcgacctagtggtttctactctcaccgacttattctgatttcagaaataaaatgaaatgtcttattttggaaaaaac

SEQ ID NO: 253539 - DNA, 728 bp, Homo Sapiens
aaaaacaaaaccaaaatgttaatcattaacatttaataaggccctattcccatagggcataccttcaattctaagaaaagatataaagaagaggcaaggctctttctctcatcaactgatactatcccacttttcacatgtgtacccaactctccataatacaatgctcctcaaactaactgtatcttatatttctatttagggctatcatacacagacgtaaacacaaaacacaataaacatctgatgaactgccacactgcaaatcaaaggtatttagtcaacaggctactatttagtcttttaagttacttcctaatttttttgttgttatacataaagtgatgaataatattatacttctattttggcatatgtatcttttctttagaaattctttcttaaaaagtatgcacatttaaaaataaaatcagaaattaaaaaggagactaaattactactgatactgcagaaatccaaaggatcattagtggctactatgagcaactgtatgccaataaattggaaaatctagaagaagggacaaattcctagacacatataacttaccaagactgaaccaggaagaaatccaaaacctgaacagaccaatagtaagtaatgagaccaaagccgtaacagaaagtctcccagtaaagaaaagccttggacccaatggcttcattgctgaagtctaccaaacatctgaagaactaatacaatcctac

SEQ ID NO: 253540 - DNA, 634 bp, Homo Sapiens
gcacgagaaaggatggggcgtagcctgctaaaatcaaaagatttgttaaaacaaaggtacttatttgcaaaagctggctatcctctaagaaggtctcagtctttaccaaccaccttattgagcccagtaagggttgtgtcctctgtcaatgttcgattatctccagggagaccagatgcagcccaccttccttcacctataagtacacacctgaagaggagcaggaattggtctctccatcatctgtgaagaaagaagaagccccccagagtgaggcgccgcgggtggaggaatgccatcatggaaggactcctacctgttcacggcttgctccaccaccaatgtctcagtctacctgttcccttcattccatccactctgagtggcaagaaaggcccctgtgtgagcacacaagaactctgagcactcacagtgttcccaacatatcaggggctacttgtagtgccttcgcttcccctttcgggtgtccttactcacatagacatgccacctacccttaccgagtgtgctctgtgaatcctccttcagccatagaaatgccagttgcgaagagtattacatgatattagctcactgcagaatctttcactaccctatgatgagaggacttgtt

SEQ ID NO: 253541 - DNA, 959 bp, Homo Sapiens
cccaccccggctgtggcctggactaggattcctgggtgggggcgcccagcctgtggtgcctcctccccgcccccccagggatgggatctgctggcaggtgcgccagctctatggagacacaggggtcctcggccgcttcctgcttcaaggtgaggcaggggctgcagggcatgtgggtgggggatgacgcagccactgtggctctctgacatggctactgtggctctgccccagcccgaggcgcccgaggggctgtgcacgtggttgtcgctgagaccgactaccagagtttcgctgtcctgtacctggagcgggcggggcagctgtcagtgaagctctacggtatgtgggggccagcctctgtgaccaggcaggcgctcaagctctgcacactcactgggccaccccgaggggctgggtgagcccatggggacacacttcctttctcccatcctgatcctcctgctaagcaggggcccagggagtagtgacagacaggcctggtgtgggagcagggagagggccccgagggggcaggggacacacagaccccgttcccagagccctccacgccgcctggtgccaggaccccaggccctgtctgccctgcgcccgctcgctccctgtgagcgactcgggcctgagtgggtttgagcagcgggtccaggaggcccacctgactgaggaccagatcttctacttccccaagtacggcttctgcgaggctgcagaccagttccacgtcctggacgaagtgaggaggtgaggccggcacacagctccagtgctgagaagtcagtgccccgagagacgaccccaccagtggggtgcccgctgcctgtcctccgtgaaaccagcctcagatcagggccctgtcacccagggcaggggatcttctgccggctgccccagaggacagtgggtggagtggtacctacttattaaatgtctcagacccc

SEQ ID NO: 253542 - DNA, 861 bp, Homo Sapiens
  misc_feature (192)..(267): n is a, c, g, or t
tggcccgatttacaagcgtgagagcttttgtgccccctaagtgaattcccaaaaagcccttttccatttccagggggggattcccccagaaaatttggggaacacctagtgttctgggccccaaattttaattttttcagcgccttaaccgggcaaccaaaaaccccaggggaaaaattatttttggattcnnnnnnnnnnnnnnnnnnnnnnnnnnnnnnnnnnnnnnnnnnnnnnnnnnnnnnnnnnnnnnnnnnnnnnnnnnnnggaggaggggcaactacgtaaggatgagccagagttcccaggagggcggcgggtagactcagtgccgccgcatcttcacctttcgggcagggctgcctgctgcctcagagcagtcctctgaggactcgtatgacttgcgccagtagttctcagagctgaagctacccctccgccggtgtgtgggcagcagcaccgagcgccggttctcttccttgtccatctccaggattccggggcctgtgggcagcatcaggggtctgccttgcggtggggaccgcttgggtttcagagcagggtccctgttgtttcctgacaggcgatctgaagcatagctgggtggtaacacggagctgctcagggactttgtttccaaccggggtgcatctaatcttgtcttcctgaggatgatgactgctcggcgctccttgatgtcctgaggccgtatgcagtgagtgatttcatcagcagcatatccactgagcacagtcacgcttcccctgcgcaccggcagggaaagcactggttccgacacccgaataggcttgaactgcgacgcgtgggtcgacgatatcccgggaattccgggccggtacc

SEQ ID NO: 253543 - DNA, 371 bp, Homo Sapiens
  misc_feature (357)..(357): n is a, c, g, or t
aggacatcaagcctatcaagacagaggtgcagggcgaggacggacaggtggtgctcatcaagcaggagaaagaccgagaagccaaattggcagagaatgcttgtaccctggctgacctgacagagggtcaggttggcaagctactcatccgcaagtctggaagggtgcaactcctcttgggcaaggtgactctggacgtgaccatgggaactgcctgctccttcctgcaggagctggtgtccgtgggccttggagacagtaggacaggggagatgacagtcctgggacacgtgaagcacaaacttgtatgttcccctgattttgtccctcttggatcaccaccggtagacattctgntcttgtctgtgagc

SEQ ID NO: 253544 - DNA, 520 bp, Homo Sapiens
tgagcaaattcttcctgctcttgctgccgggtcctgcttccaccctgcttttattttatcatgccgcttttcttctagaacccgagcaacttcccgagaagagaagaacctccaaggctttctggaacagcccaaggagaagtgggtggagagtgcctttgaagtggacgggccctactatttcacagtcttggcccttcacatcctgccccctgagcagtggagagccacacgtgtggaaatcttgcggaggctgttggtgacctcgcaggctcgggcagtggctccaggtggagccaccaggctgacagataaggcagtgaaggactattccgcttaccgttcttcccttctcttttgggccctcgtcgatctcatttacaacatgtttaagaaggtgcctaccagtaacacagagggaggctggtcctgctctctcgctgagtacatccgccacaacgacatgcccatctacgaagctgccgacaaagccctgaaaaccttccaggaggagttcatg

SEQ ID NO: 253545 - DNA, 1652 bp, Homo Sapiens
cccgggaagtagggatatgtcgaccacgcgtcgcaacccagtgtgctccaggcctgcttcgcatcatcccgtacctttcctttggagaggtggagaaaatgcagatcttggtggagcgattcaaaccatactgcaactttgataaatatgatgaagatcacagtggtgatgataaagtcttcctggactgcttctgtaaaatagctgctggcatcaagaacaacagcaatgggcaccagctgaaggatctgattctccagaaggggatcacccagaatgcacttgactacatgaaaaagcacatccctagcgccaagaatttggatgccgacatctggaaaaagttttgtctcgcccagccttgccatttatcctaaggctgcttcggggcctggccatccagcaccctggcacccaggttctgattggaactgattccatcccgaacctgcataagctggagcaggtgtccagtgatgagggcattgggaccttggcagagaacctgctggaagccctgcgggaacacccctgacgtaaacaagaaagattgacgcagcccgcagggagacccgggcagagaagaaacgcaatggccatggcaatgaggcagaaggccctgggcaccctgggcatgacgacaaatgaaaagggccaggtccggaccaagacagcactcctgaagcagatgggcaagagctgatcgaggagcctggcctcacgtgctgcatctgcagggagggatacaagttccagcccacaaaggtcctgggcatttataccttcacgaagcgggtagccttggaggagatggagaataagccccggaaacagcagggctacagcaccgtgtcccacttcaacattgtgcactacgactgccatctggctgccgtcaggttggctcgaggccgggaagagtgggagagtgccgccctgcagaatgccaacaccaagtgcaacgggctccttccggtctggggacctcatgtccctgaatcagcttttgccacttgcttggcaagacacaacacttacctccaggaatgtacaggccagcgggagcccacgtatcagctcaacatccacgacatcaaactgctcttcctgcgcttcgccatggagcagtcgttcagcgcagacactggcgggggcggccgggagagcaacatccacctgatcccgtacatcattcacactgtgctttacgtcctgaacacaacccgagcaacttcccgagaagagaagaacctccaaggctttctggaacagcccaaggagaagtgggtggagagtgcctttgaagtggacgggccctactatttcacagtcttggcccttcacatcctgccccctgagcagtggagagccacacgtgtggaaatcttgcggaggctgttggtgacctcgcaggctcgggcagtggctccaggtggagccaccaggctgacagataaggcagtgaaggactattccgcttaccgttcttcccttctcttttgggccctcgtcgatctcatttacaacatgtttaagaaggtgcctaccagtaacacagagggaaggctggtcctgctctctcgctgagtacatcccgccacaaacgacattgcccatctacgaaagctgccggacaaagcccctggaaaact

SEQ ID NO: 253546 - DNA, 631 bp, Homo Sapiens
acaaggaatgaggcaaaatatccagcttagcccaggtgggtgggggtggccttcagtgcgtggcacggagggggtgacaggaaggccacgttccgatgtcacagtcagcgcagaaagaggcttgcagcgggacaaacagatggaaagaacttattgcttgctaatccgaggccctggcccgatgcccctctaggtagcctggatcccaaatgctgcagcccacgtagcgctaatccatgtcaccaagcagccacggggaagccacagctgctccagagaagacagaactaggcttcagagccctcaatatctgagctggaccgatcctggtctttcaggtccatcagggtcccacatggtccaactgacacacacgtttccccgctgacggccacgttcacctgagagcctgagggcggccagtgtgggctcatggcactgggatggtatcactgtggcctggggggtggcactcagacccagccaaccccctcagcgaccacagtgcctcgcccgcttctctgccgccaccagggctgagggtctacgtgcggcgccgcttggcagcactgggactggaagggttgctgtttgcggtcaggactttgtcggtgacccggctgcgcttccg

SEQ ID NO: 253547 - DNA, 1319 bp, Homo Sapiens
aaaaattaatcctggaagtaaaaccaaattatatacattgttacagtacaagtgaatgaggcaaaatatccagttcttagtttcccaggtgggtgggggttggccttcagtgcgtggcacagagggggtgacaggaaggccacgttccgatgtcacaggcagcccagaaagaggcttgcagcgggacagaacagatggaaagaactgagtcacacagggaagaccagggctcctttgaggaagagtgaggtcatgtctttagtgctgtgctaatccgaggttgtccctggcccgatgcccctctaggtagcctggatcccaaatggctgcagcccacgtagcgctaatccatgtcaccaagcagccacggggaagccacagctgctccaggagaagacagaactaggcttcagagccctcaagtatactgagctggaccgatcctggtctttcaggtccatcagggtcccacatggtccaactgacacacacgtttccccgctgacggccacgttcacctgagagcctgaggtcgggcagtgtgggctcatggcactgggatggtatcactgtggcctggggggtggcactcagacccagccaaccccctcagcgaccacagtgcctcgcccgcttctctgccgccaccagggctgagggtctacgtgcggcgccgcttggcagcactgggactggaagggttgctgtttgcggtcaggactttgtcggtgacccggctgcgcttccgcttgtctgcgccttctttgcaccccaagtctgaggagttcttctctttgtctttgctggatttttctgatgctttccccaaactccctgaagatgaaaaaacatcgtcagccccattgtgggggtccacgtcttccttcatcttcctctttcatctcctcttctatccatcacttttccttctcggacctcctgaatgatctcttctggaaggacgaagttcctctctggattcgggaatggaagaatctcagactcatgcagcgcctgcatgtcgtacatggtgctcagatggtccccagatgaccttggatgggacctgccgcccgatgttctggctgaacttgtcccgaatacaaatcatgtggaagtgtcggttcacaccgacgggcttgtggcccagcatggcgtggaagaggcacacctccacctcggggctccacaccactgtctcctccgccgggctggtggccgcctcccccgggcccttgtcgcctgcggcgcccccgccgcccacctcggcctctcccatggccgcggcccggccgagcaaggagcccccggcgggaccc

SEQ ID NO: 253548 - DNA, 411 bp, Homo Sapiens
  misc_feature (198)..(242): n is a, c, g, or t
  misc_feature (251)..(368): n is a, c, g, or t
cctcagctccagggagggggctgtgctcagtcgctcacagtgacctcagcctgagcactcatgttcttgggagaatcctagggtggggaggcacatattcaggaccccagtaataactttattacttagtaactttactattagaaagcacccaaatccatagctgtgtgccaggcactgtgctaagtatcctacagnnnnnnnnnnnnnnnnnnnnnnnnnnnnnnnnnnnnnnnnnnnnngagacgaannnnnnnnnnnnnnnnnnnnnnnnnnnnnnnnnnnnnnnnnnnnnnnnnnnnnnnnnnnnnnnnnnnnnnnnnnnnnnnnnnnnnnnnnnnnnnnnnnnnnnnnnnnnnnnnnnnnnngcgcataccaccatgcccagcttttttgtatttttagtagagc

SEQ ID NO: 253549 - DNA, 646 bp, Homo Sapiens
  misc_feature (496)..(496): n is a, c, g, or t
gcacgagcacaaactgcggcctggcagaaacctgactgagcggcggtgatcaggttcccctctgctgattctgggccccgaaccccggtaaaggcctccgtgttccgtttcctgccgccctcctccgtagccttgcctagtgtaggagccccgaggcctccgtcctcttcccagaggtgtcggggcttggccccagcctccatcttcgtctctcaggatggcgagtagcagcggctccaaggctgaattcattgtcggagggaaatataaactggtacggaagatcgggtctggctccttcggggacatctatttggcgatcaacatcaccaacggcgaggaagtggcagtgaagctagaatctcagaaggccaggcatccccagttgctgtacgagagcaagctctataagattcttcaaggtggggttggcatcccccacatacggtggtatggtcaggacttcaatttctgttcaagaaggttcacaatgaanactgtacttatgttagctgaccagatgatcagtagaattgaatatgtgcatacaaggaatttatacacagagacattaaccagataacttcctaatgggtattgggcgtcactgtaataagttattccctattgattttggtttggccaa

SEQ ID NO: 253550 - DNA, 1264 bp, Homo Sapiens
atagtttaagtacatcgcaaattgtgcaggaaacccgttacataaaacttcaacaggcgtggacatcttcttttcactaatcttttcatatttttgtttctttgttgcagcctttagcccttgccatggcaggctggttctattaaaatacatcaaaacatatcctaatgattccatgtcatctcggcgactctgctcaataccaagatgtgcattgatgctagcatatcgggcagtgccagtgaggtttttatcttctctgtatggttatgtgttgccttgtcctgttgtctctgtactttttggccaaaccaaaatcaataaggaataacttattacagtgacgcccaatacccattaggaagttatctggtttaatgtctctgtgtataaaattctttgtatgcacatattcaattctactgatcatctggtcagctaacataagtacagtttcattgtgaaccttcttgaacagaaattgaagaggtcttcgaggctaggtcccagaagatccatgactagtacattgtagtctttttcctgaccataccaccgtatgtgggggatgccaaccccaccttgaagaatcttatagagcttgctctcgtacagcaactggggatgcctggccttctgagattctagcttcactgccacttcctcgccgttggtgatgttgatcgccaaatagatgtccccgaaggagccagacccgatcttccgtaccagtttatatttccctccgacaatgaattcagccttggagccgctgctactcgccatcctgagagacgaagatggaggctggggccaagccccgacacctctgggaagaggacggaggcctcggggctcctacactaggcaaggctacggaggagggcggcaggaaacggaacacggaggcctttaccggggttcggggcccagaatcagcagaggggaacctgatcaccgccgctcagtcaggtttctttttgccaggccgcagtttgtgaagggcttctcggcggttaccaggctgggccacttgtttctcggcggccgccgctgcctcgcttgcgcggcgacgtcgcgggctggaaaaggggcgcggtgagctagggcggcgataccgctgccaccactgccaccggctccggcccagagggacccctgtcactccgcggacgacgccatcttgtcactccagctccagccaacacaaaatgcccccagtccccgggagccgcttcttcacggcgcagagcactctggaaaa

SEQ ID NO: 253551 - DNA, 1183 bp, Homo Sapiens
ttggacaatgccagtaagaagccaggctgtccagaaaagctggtgcccaagttgctacaaagtggtgcctgcccttgccaagaaggctgtctcttagtcgccttggggtgtcctacaagtttcctccgaaaatgccaagaggaaacctccactttctggggtgaaacgaggaacacgaagagacccatggaggtcgaggcaggggcagcgttgagctttggtgagttattgctttctttcaatttgtcttgatgcctttcgagaggctggaggtcatttggactcacctatgaggaatctccgctccctgcccgaagccccacctctgtgctatgcgagtgactgcaagcaggaagctggcccaggaaggcaggcgtgagggggcccagctcctgcgggtgctccctggagtgatgtctgaggtgacggccatccaagctggtgatcttcatggtgtgtgctcaaggtgtgggtgacgggtgagttactaatggtttgtagcttagaaagtagccatgttttcaagtagtgccggcacaagagctgcctgtgcacgagggacttttctgctggagccaatctgggagaggaggaataaaaacgagcacatctcaggtctcgacgcatctgttagctgtgtactcacaaagctgtggcaacatgaccgctgctcaattaagatttctggtgaaatgtttaagctttttctccaagagcttccagcatcaagtacaaaaggatgatcctgaaggaaagatgaagctggttttaacggcgtctgtgagctgctttccctgcacacgaacagaagctcttaccttacaaacagaaagggaaaaaggaccttaaaaaaccatacacagactccagcaaaagccaaattcatgtacatttcactctgtctaaaatgcagtcccggaaacgctccacggtcctctcctgcctctgcacgcaggcaggcagcctggggggctcctgggtgctgccaggagccgtgtcccatctccccagagggaccggccatggccctggtcactgtggcatcttcccagagcaactgcgtctcgctgcccagggaggtgattccatttgtgatcagtgagagggagagggaataaagtgcttctcgtaaaaatgaccaaaataaatacacacatttaacggcagaaaagaaagtcttgaa

SEQ ID NO: 253552 - DNA, 962 bp, Homo Sapiens
ggggattgcatttgcggcctcgctgccgcatcccaggctaagcgccgcgcgcaaagccgtgcggagattggaggccgcgcgggtccctggtctgggccatgtctggctgtgatgctcgggagggagactgttgttcccggagatgcggcgcgcaggacaaggagcatccaagatacctgatcccagaactttgcaaacagttttaccatttaggctgggtcactgggactggaggaggaattagcttgaagcatggcgatgaaatctacattgctccttcaggagtgcaaaaggaacgaattcagcctgaagacatgtttgtttgtgatataaatgaaaaggacataagtggaccttcgccatcgaagaagctaaaaaaaagccagtgtactcctcttttcatgaatgcttacacaatgagaggagcaggtgcagtgattcatacccactctaaagctgctgtgatggccacaccttctctttccaggacgggagtttaaaattacaccatcaagagatgatcaacgggaataaagaaaatgtaccttccgggagggctattatagaataatgatgaacatggttagctggcgcaccccattaatttgaagaaatacaccccttgaaggatgaaaagtaacctctaaaggaaaacaaatggggccctcttgcccactggaattggaatacccccaaacgtccctgggtgcaacaacctgggtccaaaacgcccctgggaaacctttttgcggtggcgcggagccacacccgtgtgcacaagggccaaaaaacccatggtgtggaatgggttagcgcccactcttatttggaaacttgcgcgcatccaccttatgtaaactgcgggatttgttatccttccgcaggttcccaattttggaacaaatatggcaaattttttaagcccaaaaagaagctgtttcctattttacccgtgactcgac

SEQ ID NO: 253553 - DNA, 626 bp, Homo Sapiens
  misc_feature (472)..(472): n is a, c, g, or t
  misc_feature (538)..(538): n is a, c, g, or t
gcacgagaggaagcaaggaaggagtggggtgaggggaagaagaaggggtactgatttgaaccctggagtcctaaggataatctaggaaccctcagacccaatccgatacccctattctatgctcctagtgccctgtaccttcccctcataagccttcattatcattgtaatgatatgtttatgtaatattttgattaatgtctctccttcactgacctagcagttctagcagggcagtgattttgctgtgttgcatccccagcacctagtctggtatgtggcattcagcatatgtttattgaatgaatggccatgtggttattcagatcctccttgattattggggttaggattgtggcagaagtggccccaacacacatacacatacagagaattttgtctcaattagataattaacttctgcttggttgtaaaccaaaccactggttcttaaactttcattggatcattntattgaagaattaaatagtgtggttctggcctaatgtctggaaagccttgcagaggagtggattangtcttgtgataacaggcaggcttccctgctcctgtgctttattctattctggatagtcacccttctcaggctttaccagatatgtggg

SEQ ID NO: 253554 - DNA, 649 bp, Homo Sapiens
  misc_feature (301)..(310): n is a, c, g, or t
aggaagcaaggaaggagtggggtgaggggaagaagaaggggtactgatttacccctattctaaatgctcctagtgccctgtaccttcccctcataagccttcattatcattgtgaggagagggggatgtgaatatggtgattaatgtctgtccttcactgacctagcagttctagcagggcagggattttgctgggtggcatccccagcacctagtctggtatgtggcattcagcgtatgttgattgaatgaggggccatgtgggtattcagagcgtgcttgagtagtggggttgggattnnnnnnnnnnatggcaagagcaggggtagtagtccgtgtcccctcggtatctgatacactggccacactggcaacacacatacacgtacagagaattttggctcagttggataattaacgtgtgcttggttgtgaaccaaaccactggttcttagactttcattggatcaggggattgaagagttgatgaggggggtctggcctaatgtctgggccttggcgaggagtggatgagggcgtttgggatggagcaggcagccttcccctgctcctggggctgtgataaggcgagttgaactggagtggtgcacccgtgcgtgaggctgttgcagagaggaggtggtgggct

SEQ ID NO: 253555 - DNA, 1417 bp, Homo Sapiens
ggttttccctttttttacccctccttttgaaaatttgatgtggaattttgccacctgcagccagaagagttttaactaatcagtgccataaattttatatagttctccttgcaaaatgtggatcagcctttctcagcaaatcctttgtcataaagtgctgaattgtaagtttgtcatgagaatcacatgagatcatgcatgtgaagaacctggcattatcctcctcatagaaaaaaaccagtaaatattaactacaggaagcaaggaaggagtggggtgaggggaagaagaaggggtactgatttaaaagaaccctggagtcctaaggataatctaggaaccctcagacccaatccgatacccctattctaaatgctcctagtgccctgtaccttcccctcataagccttcattatcattgtaatgatatgtttatgtaatattttgattaatgtctctccttcactgacctagcagttctagcagggcagtgattttgctgtgttgcatccccagcacctagtctggtatgtggcattcagcatatgtttattgaatgaatggccatgtggttattcagatcctccttgattattggggttaggattgtggcagaagtggctcagggagagtagtccctgtcccctctgtatcttatacactgcccacactcccaacacacatacacatacagagaattttgtctcaattagataattaacttctgcttggttgtaaaccaaaccactggttcttaaactttcattggatcattttattgaagaattaaatagtgtggttctggcctaatgtctggaaagccttgcagaggagtggattaggtctttgtgataaacaggcagccttccctgctcctgtgtctttataagaatctatttaactggagtagtccaccctccctcaggctcttacaggaatatgttggaggctgtaggaaggtgggaaaccgagagggaaaggactgggccgctggaaacttcactcattcccctagcaagaaacaaaagcagtaaaaggtggcccgaggacaacctgaagctcactcccttcagcacttttggctggaggtcacttgttggagcccccactcagagctcagcacacccaccccacccagcagcctcctcctccccagctgaggctgcatttcatcccttcccccagcctgctttccctgagataggggagtgtttcccagggcccatgtgacttccactggcaagtgacgattaccaatggtttactagtcagtgaaactaccaaaggcttttgtgctgtagtaatccttttcctgtttaaaactctggggattttctaatgttgccaatagtttttcaagtcagcaattactgtgtggattatgtaatggctcggtattaaaaatagaaaagactgg

SEQ ID NO: 253556 - DNA, 817 bp, Homo Sapiens
ctctggagagagagcaggaaagtaatcccagctaaccctcatgcagccaccactctgtgtcagaatctcttctaggccatcgcattgaataagtcatttaatccatataaacctgcaaggagtaggtgatattgttgaccccattttatatgcgaggaaactgaggcatggtgaggttaagtgaccagcaaggtggaaatctgaggtttgacccatctcctggtgtggagtccagatctctcagcttcactgatccttcctgatttgtgctgagttagggaccccttgggaagcccccatgggcacggggtgctggtgctagcatttcctgtggattataggagggggatgtgtggaggacctgtgtctactgtgcctctagcctctgggggatatggagaacccactctgcccacagatgtaagtcatctttggatatagatgagactcgttccccctccccctgaataccagagcacagctctatggaataagctctagctggaactcgtaaagattggcccagccctccctgtgaggctaggaggtgggggaagagccacgagactctaagtggtggtggtagttaatgtctatgtgggtagacgataaccacctactctgtggtgccaggcactgtgctaggacgctataattatcattggctcctttggggcccccaaacagcccacaggcaagacaggtagcctcagtttacagatgcagcagtggaggcttgcacaacgaggaggtgggctttgttaaataacagacctacgcccaggattgcctaagtgggggtggttccaccctttgg

SEQ ID NO: 253557 - DNA, 743 bp, Homo Sapiens
  misc_feature (732)..(732): n is a, c, g, or t
atttacattcggcattagcaatatatccaatgctcagaattgaaaattactacttaaaatctttgcaaattgaataattacagaaaagggctacatttaaaatttgtatttgtttttcttacttagtgaaggttgtgttttttttcatattcattggccatgctatattcattcttttgagaatagctcattcatattttttctgttgcttgcttggagaatttgctctttttttggcatataagttcttaagaatgtccgtcctttgtcatatattgtaactttttttagccttatttgtcatttaacatagtttgtggtatttcagtatagaagttgttttctttaggagtctacctttgtgtatgtgcttgaaagtatttttgtaatccaagaatggataaatgtccttattttcttctagtattttcttatttcacttttacacctatctttggaatttaaattttgtttatatacattaactaaatcagaacaagtttggggtgggatttgattttatttcgaagaatttaccaattgggttcagtatgtgaaaccaccatttcccctctgattagtaatgctatttttatagaatattaaattcttatgtgtctttttgtggcttaggccaatttctgggccttctggggtttttctacactgtcaataattatcgctttaattggggttatatttggtagacacaagtctcccttgtcttttttngaatatactct

SEQ ID NO: 253558 - DNA, 840 bp, Homo Sapiens
taagtcaaaagtgagcaaaatgtaaaccatattgttatacacataactgggaaaataattcttaaaaggacagagggagaattaccatacgtcaggatagttagctctgggggaaacagtgagtgtcaagaggggacacacagagattttggagtgctggcaagacctcctctgcatctagtttgtgattacacagctgttgctttacccattaagctctgttttaagtacttatttgtaagttatatttcacaaaatttaaaagaacaagggagaacctgtgtactaccaaatattaacaccaattaaagcgataattattgacagtgtagaaaaaacccagaaggcccagaaattggcctaagacacaaaagacacataagaatttaatattctataaaaatagcattactaatcagaggggaaatggtggtttcacatactgaaccaattggtaaattcttcgaaataaaatcaaatccctaccttatataatataaccaaatacatttgagatggattaaaaatttccttttcaccccaaacttgtactgatttagttaatgtatataaacaaaatttaaattccttttaaagataggtgtaaaagtgaaataagaaaatactagaagaaaataaggacatttatccattcttggattacaaaaatactttcaagcacatacacaaaggtagactcctaaagaaaacaacttctatactgaaataccacaaactatgttaaatgacaaataaggctaaaaaaagttacaatatatgacaaaggacggacattcttaagaacttatatgccaaaaaaagagcaaattctccaagccc

SEQ ID NO: 253559 - DNA, 475 bp, Homo Sapiens
tgcatgcaagagtgctggagggcggcagcggcgaccggagcggtaggagcagcaatttatccgtgtgcagccccaaactggaaagaagatgctaattaaagtgaagacgctgaccggaaaggagattgagattgacattgaacctacagacaaggtggagcgaatcaaggagcgtgtggaggagaaagagggaatccccccacaacagcagaggctcatctacagtggcaagcagatgtgagtttggagtgagaatgacagcatggcgatcttatgtgaagatgagaagaggagagggggcacgtactgaggtggatcacgggtgcctcttgtttttggtgcctaagactctctggcaatctggtgaagcctctaagccccttctcagaataagatgttttcaggcataaaacaaaatatatagaattaaaggaaaactaattatattgaaatagttattaaaatactaaaacac

SEQ ID NO: 253560 - DNA, 1182 bp, Homo Sapiens
  misc_feature (671)..(693): n is a, c, g, or t
  misc_feature (704)..(742): n is a, c, g, or t
  misc_feature (789)..(861): n is a, c, g, or t
  misc_feature (885)..(885): n is a, c, g, or t
  misc_feature (900)..(908): n is a, c, g, or t
  misc_feature (937)..(1014): n is a, c, g, or t
cgcgcccgctccctactccctcccccgttccccaacttccgcccgaggcctgcgtggcccttgcaggcaagagtgctggagggcggcagcggcgaccggagcggtaggagcagcaatttatccgtgtgcagccccaaactggaaagaagatgctaattaaagtgaagacgctgaccggaaaggagattgagattgacattgaacctacagacaaggtggagcgaatcaaggagcgtgtggaggagaaagagggaatccccccacaacagcagaggctcatctacagtggcaagcagatgaatgatgagaagacagcagctgattacaagattttaggtggttcagtccttcacctggtgttggctctgagaggaggaggtggtcttaggcagtgatggaccctccattttacctctttaccctgtcgctcataatgaggcatcatatatcctctcactctctgggacaccatagccactgccccctcccctggatgcccagtaatgtatgtctactggtgggagactgtgaggatcccaggattcagtattcctggcccagagggcccttgctggctactgggtgttagtttgcagtcctgtgtgcttccctctcttatgactgtgtccctggttgtcaataaaatatttcctggcctcctggaaaaaaannnnnnnnnnnnnnnnnnnnnnnaactcgaggcnnnnnnnnnnnnnnnnnnnnnnnnnnnnnnnnnnnnnnncatggtcatagctgtttcctgacccagctttcttgtacaaagtggtnnnnnnnnnnnnnnnnnnnnnnnnnnnnnnnnnnnnnnnnnnnnnnnnnnnnnnnnnnnnnnnnnnnnnnnnntgcagtacccggggatttacccgncctaatgagcgggcnnnnnnnnngtgatccaaaagatctttctggaaatctnnnnnnnnnnnnnnnnnnnnnnnnnnnnnnnnnnnnnnnnnnnnnnnnnnnnnnnnnnnnnnnnnnnnnnnnnnnnnnataaagaacttaccacttccctttttcccagggttaactggctcttccccagagaccccagatacccaaataatgggtcttttcttaagggaaaccccctaaattaaagccccccacctttcaaaaaaattctgtgacaaccggccataaaaaaaccttgcgtttgga

SEQ ID NO: 253561 - DNA, 1821 bp, Homo Sapiens
ggggcgcctgcgcgcttgtggagctggtggcggcgctccgcaggggctcggctgttttccgcgcggcaggcgcggccatggcgcagctgggaaagctgctcaaggagcagaagtacgaccggcagctgaggttgtggggtgatcatgggcaagaggctttagaatctgctcatgtttgcctaataaatgcaacagccacaggaactgaaattcttaaaaacttggtactaccaggtattggttcgtttacaattattgatggaaatcaggtcagcggagaagatgctggaaacaatttcttccttcaaagaagcagtatcggcaagaaccgagctgaagctgccatggaattcttacaagaattaaatagcgatgtctctggaagttttgtggaagagagtccagaaaaccttctagacaatgatccctcatttttctgtaggtttactgttgtagttgcaactcagcttcctgaaagcacttcactacgcttagcagatgtcctctggaattcccagattcctcttttgatctgtaggacatatggactagttggttatatgaggatcattataaaagaacatccagtaatagaatctcatccagataatgcattagaggatctacgactagataagccatttcctgaactgagagaacattttcagtcctatgatttggatcatatggaaaaaaaggaccacagtcatactccatggattgtgatcatagctaaatatttagcacagtggtatagtgaaacaaatggacgaatacctaaaacgtataaagaaaaagaggacttcagagatttgattagacaaggaattctaaaaaatgaaaatggggctccagaagaatgaagagaattttgaagaaagctattaaaaatgggaacacagcactaaatacaactcagatcccaagcagtattgaagatatatttaatgatgatcgctgcataaatatcaccaaacagactccatcattttggattttagctcgtgccttaaaggaatttgtggccaaagagggtcaaggaaatttacctgttcgaggcacaattcctgatatgattgcagattcaggcaaatatataaaactgcaaaacgtttaccgtgaaaaagcaaagaaagatgctgccgctgtgggtaatcatgttgccaaattgctgcagtccattggccaggcaccagagtccatttcagagaaagaattaaaattactctgcagcaattctgcatttcttcgagtgggaagatgtcgatccttagctgaagaatatggtttggatacaattaacaaggatgaaattatttctagcatgggacaatccagataatggaaatagtgttgtacttaatgttacgggctgttgatagatttcataaacaacagggtagatatccaggagtatctaactatcaagttgaagaagatataggaaagttgaagtcttgtctcactggcttccttcaggaatatggtttatctgtaatggtgaaagatgattatgtccacgaattttgccgatatggagctgctgagccacataccattgctgcattcttggggggagctgctgctcaagaggtcatcaaaataatcaccaaacaatttgtaatttttaataatacttacatttacagtggcatgtcacaaacttcagcaactttccagttgtagagtaagcaagcaccttaagtagtgtgttaatgattgaaactgtaattgccttcgggttgtgctttagtctgtaaaattctaaaggagagctgctaaattgttttcttaataaacatttttctcatttgtcaaaaa

SEQ ID NO: 253562 - DNA, 2173 bp, Homo Sapiens
ggtccggaattctccgggatcagtcaccttccctggaaattctgctgtccagctgctccctgtgccgtgcctgtgattcgctggtgtatgatgaggaaatcatggctggctgggcacctgatgactctaacctcaacacaacctgccccttctgcgcctgcccctttgtgcccctgctcagtgtccagacccttgattcccggcccagtgtccccagccccaaatctgctggtgccagtggcagcaaagatgctcctgtccctggtggtcctggccctgtgctcagtgaccgaaggctctgccttgctctggatgagccccagctctgcaacgggcacatgggggtaagggctgggccaaaggggcatgaggaacgggaatgttgccctgtgtggggcctgtggggtgccagggagagatgggcacatctcttgcccttgagggcaaggggcatcccaaaagctgttggatgtggtggctcagtgggaggcaaggctctggggatgtacatgccctctactgccctccccctttgtgcctgatagggagcctcccggcgggttgagagtggggcatgggcatacctgagccccctggtgctgcgtaaggagctggagtcgctggtagagaacgagggcagtgaggtgctggcgttgcctgaactgccctctgcccaccccatcatcttctggaaccttttgtggtatttccaacggctacgcctgcccagtattctaccaggcctggggctggccctcctgtgatgggccttcgcactcccaggccccattctccttggctaacccctgatccagccctctgttcaggtacggctgctgtgggatgtactgacccctgaccccaatagctgcccacctctctatgtgctctggagggtccacagtgagtctggtatttggcctgggtggggaaggggtgggtcccatacccagagggctcagtgattctggtggccttctttcctttcatccaggccagatcccccagcgggtggtatggccaggccctgtacctgcatcccttagtttggcactgttggagtcagtgctgcgccatgttggactcaatgaagtgcacaaggctgtggggctcctgctggaaactctagggcccccacccactggcctgcacctgcagaggggaatctaccgtgagatattattcctgacaatggctgctctgggcaaggaccacgtggacatagtggccttcgataagaagtacaagtctgcctttaacaagctggccagcagcatgggcaaggaggagctgaggcaccggcgggcgcagatgcccactcccaaggccattgactgccgaaaatgttttggagcacctccagaatgctagagaccttaagcttccctctccagcctagggtggggaagtgaggaagaagggattctagagttaaactgcttccctgttgccttcatggagttgggaacaggctgggaaggatgcccagtcaaaggctccaagcgaggacaacaggaagagggatccactgttaccaaaattcctgattcccccatcaccaacctacccagtttgttcgtgctgatgttgggggagatctgggggggagttggtacagctctgttcttcccttgtcctataccgggaactcccctccagggtacccacagatctgcattgccctggtcattttagaagtttttgtttcaaaaaacaactggaaagatgcagagctactgagcctttgccctgaatgggaggtaggggatgtcattctccaccaaaatatggtccctcttccctgacgttgctgaaggagcccaaggctctccatgcctttctacctaagtgtttgtattttattttaaattatttattcctggagcccacagcccccttgccttatgaggttccttatggagagtgagaaagggaagggaaatagggcacccatggtccggtggtttgtagttccttcaaagtcaggcactgggagctagaggagtctcaagctccccttaggaagaactggtgccccctccagtcctaatttttcttgcctgccccgccttggggaatgcctcacccacccaggtcctgacctgtgcaataaggattgttccctgcgaagttttgttggatgtaaatatagtaaaagctgcttctgtctttt

SEQ ID NO: 253563 - DNA, 723 bp, Homo Sapiens
  misc_feature (59)..(59): n is a, c, g, or t
  misc_feature (125)..(125): n is a, c, g, or t
  misc_feature (140)..(140): n is a, c, g, or t
  misc_feature (149)..(149): n is a, c, g, or t
  misc_feature (152)..(153): n is a, c, g, or t
actgtagctaactaagtgtcaatatgacaagtcatagcagctattcacaataacaggtnttattacttcagagtagaagcaaaccagcacatcttcattctgtcatactcaataagcagatcacncaatgtcatataganacacgtgtnatnntctggaatagcagatgcatagaaatgcaggtttccaaaaattcacccaatttagtaactaattttgattctgatgcctgatagtagggtgtgaaaagctgtaaaacccaaatgtatcctgtgttctttcacaaggacaagggaagaggatgctctgccaaactgcccctgctgcgtcatagtggaccagtttcaatgatccagactgtcagtcaccccatccagcctcatcctcatctggacccatttctcaccacccaatcagtttcaatgatccagactgtcagtcaccccatccagcctcatcctcatctggacccatttctcaccacccaatcagtttcaatgatccagactgtcagtcaccccatccagccacatcctcatctggaccagtttctgaccacccaatcagtttcaatgatccagactgtcagtcaccccatccagccacatcctcatctggaccagtttctgaccacccaatcagtttcaatgatccatactgtcagtcaccccacccagcctcatctggaccagtttctgacgacccaatcagtttcaatgatcc

SEQ ID NO: 253564 - DNA, 486 bp, Homo Sapiens
  misc_feature (14)..(14): n is a, c, g, or t
  misc_feature (44)..(44): n is a, c, g, or t
cagctcccagagantgctagtagtaagtaccacacatagggcanaaccaggacaccttgaccaggcgctcaaaagtaacatcaatgaagagcagatggagagtatacttgagaagggcgttaagcatgaataaacaattcaaatgcaaaatgagtaacaaacaagaaaaattgccctgtactccaaaaaacatagaggtcatggaacacataaaggctaaggaactgttccacattaaagacaactgagaacaactaaattcaatgatcctgtactctagacggggggatctaaaacaagctaccaaggatactgggacaaactctagttatatgaaatattctagaacttggaacatatgccgaagtactaagcaaggggtaaggaagcacaaagtgtgcaacaaactcaaatagctcacaggtataagtgttcacactcaataaaaaaatgtggcaaaataataacactcagggtaaacattac

SEQ ID NO: 253565 - DNA, 492 bp, Homo Sapiens
gaaaggagaaatttgaaggtgtagaattgaatacagatgaacctccaatggtattcaaggctcagctgtttgcgttgactggagtccagcctgccagacagaaagttatggtgaaaggaggaacgctaaaggatgatgattggggaaacatcaaaataaaaaatggaatgactctactaatgatggggtcagcagatgctcttccagaagaaccctcagccaaaactgtcttcgtagaagacatgacagaagaacagttagcatctgctatggagttaccatgtggattgacaaaccttggtaacacttgttacatgaatgccacagttcagtgtattcgttctgtgcctgaactcaaagatgcccttggtatgcaggtgccttgagagcttcaggggaaatggcttcagcgcagtatattactgcagcccttagagatttgtttgattccatggatttcccacagtttgccgagggtgaacggacagttct

SEQ ID NO: 253566 - DNA, 709 bp, Homo Sapiens
gaaaggagaaatttgaaggtgtagaattgaatacagatgaacctccaatggtattcaaggctcagctgtttgcgttgactggagtccagcctgccagacagaaagttatggtgaaaggaggaacgctaaaggatgatgattggggaaacatcaaaataaaaaatggaatgactctactaatgatggggtcagcagatgctcttccagaagaaccctcagccctgtcttcgtagaagacatgacagaagaacagttagcatctgctatggagttaccatgtggattgacaaaccttggtaacacttgttacatgaatgccacagttcagtgtattcgttctgtgcctgctcgatgcccttattactgcagtccttagagattcaggggaatccatggctacagcgcagtatattactgcagaccttagagatttgtttgattccatggataaaacttcttccagtattccacctattattctactgcaatttttgcacatggctattcccacaggttgccgagaaaggtgaacaaggacaggatcttcaacaggatgctaaatgaatgtggcatacaaatgatgccagtattgcaacagaaatatggagccctagaggatgaatctgttaaagagacacgactgctcatctgcatcggctgcgacaccttctagtcagaatctggagaagaagaagtcaccataggggtt

SEQ ID NO: 253567 - DNA, 317 bp, Homo Sapiens
cagaacagaacataacatagcagatgactacttaataaaaatatagccaatgatgggcaaatgtatatataacatgaaaattaaaaacactgttatcttatgtatttactgtataccccagaatcagaactacaaggatcaattatcccaggtcaatgttagggttctacaactgggacaggaggcttctacccaccaggccctggttcgcagtgggcagcagcagagtgacctgcaataacttagagtagaacttgaatgcctgaatcaggcatcagagcctgcagctgccatggatagagctgacccagaccctc

SEQ ID NO: 253568 - DNA, 585 bp, Homo Sapiens
ggttctcggtgcctcccgtgcatgagtggctcactgaaggcaggtgtggaagccaaatgcctgcaagccgtgtgtcaggccacagcagtgcagtcatgcatcacgcactcaggtttgtaacagcaacaccagggccctgtctagattcaccctgtgggtgagcccgttctccagatgggcgtataaaggggctttctcctctacaccgttcctgtcaatgttccgtacaggcccacattcccaccactaagccaatggagtcaaccagatttctgccatggatatacgtggtcacggggccacatttctgcagctggctcagtggcaggcttgggccgtctctcagtaccatctaagacttctgtctaggttcctgtttttttagactcctgaactgccattctgattagacacaattttaatggaatttttggatttaatgatagttgataatcaccttatgtatttgcacaatctctttataattactcgctaagcttcacttgctactatctactatatagaattagagacattccattggattctaagcatcagacactcctggatctcaacactctgtat

SEQ ID NO: 253569 - DNA, 544 bp, Homo Sapiens
  misc_feature (44)..(44): n is a, c, g, or t
  misc_feature (72)..(72): n is a, c, g, or t
gtagatgatgggctccacgggaacagagcaaacgttcgctcctnctcctacacggtgtttcctctaaacctnaggctcagccatcttgtcatcacttaaaacccaattcagagcggggggcactgcagtgaatagttcatcaccgactcagtttccccatgtgtatgctgtggtattggatcagcaacgagataagaagatctctcccatttccaagcgtctatgatgattctgaggcacaaggtcacatttgacagtactaggaaacccagggaaacaagaagcaaagatgacaaaggctgttgtctccctgggcagacgatctatttggacaagataatagaccccaggcatggacatgctctccaagaaagatgccctgacagctgctcacactgaagctgaatcgaacattccaatccttagaggttccagcgaagatcttgaagtctccctgagccattgacacaatggccatgccatcccagtgataaaacacaaattgtggccttgttttggacagaaataaagagcccagtttgtt

SEQ ID NO: 253570 - DNA, 786 bp, Homo Sapiens
ctcattcccaccacgatctgttccgcgtggttcccgccaaacctccctcggtcgccgtgttctccgcaagcctcctgcagcgcccgcctgccaatgtgaggctggcaccaggctgcagcctccccaatcccagcccactttgctgtgtctctggcgggctgtcctccttggtgggagctgtcctgcacactgtaggatgcttaaaggtatccctggcctccacccacccctagccagcagctcccagtcagacaacagccagaaatgtctccagactctgcccagcctccccaggtagccaccctcgagacacgacctcagagtctctgtgtctcctagaagcctgacagagacccccagggcagtgggtgggtggcgggctagagacccttgcctgtgtccgggaccctggcgccgctctcccctcctgtggatccctccgcactaacagtgttctcagtgggcagacgcctgggcaccccttgggccctgcccagcatggccatggcgcaggctctcgaacccgcatggctttcccaggcctggtgattctgctctccagggacggttggcaccttcctcgggggcgggccccacgcaccccagaacacacagacccacctttctggcgttctttctacctcccttttcgttgcctgaggagctggtggtttcatgagttaatgatacatcttgcaaggtgtacacatagagaaaaaaacctaaaaatgtggaaaagcacgccaaagccttatttaaataataactattaaactattcaaaaaa

SEQ ID NO: 253571 - DNA, 959 bp, Homo Sapiens
ctcagaccatcctgatgtgaggtcgggttcacaggctccacagaggtgggcaagcacatcatgtcacccctcatcatctttgctgactgtgacctcaacaaggctgtgcagatggggatgagttctgttttcttcaacggagagaattgcattgcagcaggccgactctttgtggaggactccattcatgatgagttcgtgcggagagtggtagaagaggtgcggaagatgaaggtgggcaacccgctggacagggacaccgaccacgggccgcagaatcaccatgcccaccttgtgaagctgatggagtactgccagcatggcgtcgaaggaaggggccacactggtctgcggcgggaatcaggtccctcggccagggttcttctttgagccaactgttttcacagacgtggaagaccacatgttcatagccaaggaggagtccttcgggcctgtcatgatcatctctcggtttgctgatggggacttggatgccgtgctgtctcgggccaatgccacggaatttggcctggcttctggtgtcttcaccagggacatcaacaaggccctgtatgtcagtgacaagctccaggcaggcactgtgtttgtcaacacgtacaacaagaccgacgtggccgctcccttcggaggattcaaacagtctggatttggcaaagatctaggagaggcggctctgaacgagtacctgcgggtcaagacagtgaccttcgaatactgaagaaaggtctttgtgagaagaaagtccctgcccctccctcgtggctggggccccctccctcttgagcccgggtgcacagcacctcccacctggggggctagtggaagccctcctgcctgcacaccatgtctgcatcttggacgccctctgtccagtcagaagcagcccttggctgggtgaggtgtgcccctcccagggagaataaagcttctgaagagag

SEQ ID NO: 253572 - DNA, 349 bp, Homo Sapiens
cagagaaccccgcggagggataacctagaacgtcaaacgcctcctgaaacctgccctgagagacacctcaggcctgacagcccaacgaggggcctgtgaggcttcgggcaaacgcctgaggactcggacttcaaggcttatgtcaccgagagctgctcccacagggctgaggagaagcagctcagggaggaccgcagatctgctgggcaggggctgcactccttggggggcagactcacccctgccacctccttggcgtagttctggcactcggcgctggcggccgccatgtgcccagctctgcctccaaatgcgacgtgtgctccctcacctggacagatgcacagac

SEQ ID NO: 253573 - DNA, 561 bp, Homo Sapiens
cccttccaaagaagaagcttctccaaaagttcaaggctggaaggttcatcctcccattatctttacattctgtgtcatgccaaggaaaaaaaacatgccacctattaccttgagaagttcccgtaggtcccttactattcttaaactctcaaaagtgggtgtgacccccatccctgtgcaggctcctttgttaactttggccactcattcttcacattcttgaaagcgccagaacccaccaataaatggccgggtcctctgcttaaccagattgtttcctgcaaagcgacatgtcctccaagcttcaatctcacatgccatgttggatttggcctaattccacctccaatacaaaggaggcatggagatgtctgggttaatgtgccaggtcataacggcacgagagcgggtgggaccgggcaaccagttctcaaaggctgtggggccgactggaggccacagcccctcacccctagacgttgccaaccagaactgacgtgtgacctcctgggggttgatgccattaaaaccaacgttggtgccaggttaataaaaaaaaga

SEQ ID NO: 253574 - DNA, 2247 bp, Homo Sapiens
ggttaccacacttttggggcccctggacaagagggtggtttttgtggggttttttcctttggggcctttccccttttaaaaatttgggagagggcccccaggttccggaggggagggggccttcccgcgggggagcctgggccggggtgctttccagccaaggcgtgggggccctttcctccttttgaagatccctgccagcccaacttcggtgttaattttctgttggtgcccaaggacagaggagtttctgggagcaggagcccagcaggggccttcccatggttctgcgcctcaaatcagaccagagctgcttcctccgatttcctcctggcctggggtcagggagtgcagcttctcctggcaggcctgctcggccgtggccagtgcctccatggccttccagtctttctcccggaggtcattgttcttcactttctgctgctcgacggcctccctgagctcgatggcctccttctcccagacccgacacctgggactccagctccttgaggcgagtctgctgctggtcagcctccgcctggctggcctggacgtccatggaggcactggccacggccgagcaggcctgcaaggagaagctgcactccctgacccaggccaaggaggaatcggagaagcagctctgtctgattgaggcgcagaccatggaggccctgctggctctgctcccagaactctctgtcttggcacaacagaattacaccgagtggctgcaggatctcaaagagaaaggccccacgctgctgaagcacccgccagctcccgcggagccctcctcggacctggcctccaagttgagggaggccgaggagacgcagagcacactgcaggccgagtgtgaccagtaccgcagcatcctggcggagacggagggcatgctcagagacctgcagaagagcgtggaggaggaggagcaggtgtggagggccaaggtgggcgccgcagaggaggagctccagaagtcccgggtcacagtgaagcatctcgaagagattgtagagaagctaaaaggagaacttgaaagttcggaccaggtgagggagcacacgttgcatttggaggcagagctggaaaagcacatggcggccgccagcgccgagtgccagaactacgccaaggaggtggcagggctgaggcaacttctcctagaatctcaatctcagctcgatgccgccaagagcgaagcccagaaacagagcgatgagcttgccctggtcaggcagcagttgagtgaaatgaagagccacgtagaggatggtgacatagctggggccccagcttcctccccagaggcgcccccagccgagcaggaccccgttcagctgaagacgcagctggagtggacagaagccatcctggaggatgagcagacacagcggcagaagctcacggccgagtttgaggaggctcagacctcggcatgtcggttacaagaagaattggagaagctccgcacagccggccccctagagtcttcagaaacagaggaggcctcacagctgaaggagagactagaaaaagagaagaagttaacaagtgacctggggcgcgccgccacgagactgcaggagcttctgaagacgacccaggagcagctggcaagggagaaggacacggtgaagaagctgcaggaacagctggaaaaggcagaggacggcagcagctcaaaggagggcacctctgtctgagtttcctctttggaaaaagaagttactgttcaacttaccaaaatgccttacacattccttacaaataaaccaaccaacctacacagcgttatccaggcccaacttccggtagctccgagagaagccatgagagacaagtctcttagagccacagaagtagaccttccagagccccagtttgtaaatgaacctgtgtcacatttgataaacactatcctgggcgcagccccgggccaccgccgagtgacgccaaagccctggttgactctgacagccccgtgggtgtgtgggaggccgggcgctctggggtctgtctgtcagtgcaatcgtttagtgttttttcagtggggcggggcgggaagcgggtgggaccgggcagccagttctcaaaggctgtggggccgactggaggccacagcccctcacccctagacgttgccaaccagaactgacgtgtgacctcctgggtgttgatgccattaaaaccaacgttggtgcccggtaaaaaacaaacaaacaaaacctcacatcaagt

SEQ ID NO: 253575 - DNA, 559 bp, Homo Sapiens
  misc_feature (359)..(359): n is a, c, g, or t
  misc_feature (460)..(460): n is a, c, g, or t
  misc_feature (491)..(499): n is a, c, g, or t
  misc_feature (508)..(508): n is a, c, g, or t
  misc_feature (538)..(538): n is a, c, g, or t
caggagcttctgaagacgacccaggagcagctggcaagggagaaggacacggtgaagaagctgcaggaacagctggaaaaggcagaggacggcagcagctcaaaggagggcacctctgtctgagtttcctctttggaaaaagaagttactgttcaacttaccaaaatgccttacacattccttacaaataaaccaaccaacctacacagcgttatccaggcccaacttccggtagctccgagagaagccatgagagacaagtctcttagagccacagaagtaggaccttccagagccccagtttgttaaatggaacctgtgttcacatttggattaaacactattcctggggcgcaccncgggggtccaccgccggagttggacggccaaagcctggggttggattcttggacaggcccctggggtgttgttgggggagggccggggcgttttgggggtnttgttttgttcagtggcattcgttttagtgnnnnnnnnncattggggngcgggggccgggaagccgggttggggaccngggcagccatttttttaaaag

SEQ ID NO: 253576 - DNA, 626 bp, Homo Sapiens
  misc_feature (523)..(523): n is a, c, g, or t
  misc_feature (551)..(551): n is a, c, g, or t
ggtggcagtagtgtgcctagtgactgtgtgtgtcatttatagagttgacttggttctattttatagacatttaacgagaagagatgaaacattaacagatggaaaaacatatgatgcttttgtgtcttacctaaaagaatgccgacctgaaaatggagaggagcacacctttgctgtggagattttgcccagggtgttggagaaacattttgggtataagttatgcatatttgaaagggatgtagtgcctggaggagctgttgttgatgaaatccactcactgatagagaaaagccgaagactaatcattgtcctaagtaaaagttatatgtctaatgaggtcaggtatgaacttgaaagtggactccatgaagcattggtggaaagaaaaatttaatcttaattgaatttacacctgttactgacttcacattcttgccccaatcactaaagcttttgaaatctcacagagttctgaagtggaaggccgataaatctctttcttataactcaaggttctggnaagaaccttctttacttaatgcctgcanaaacagtcaagccaggtagagacgaaccggaagtcttgcctgttcttttcgagtcttaatcttcagcagtgcgcc

SEQ ID NO: 253577 - DNA, 408 bp, Homo Sapiens
  misc_feature (113)..(113): n is a, c, g, or t
  misc_feature (131)..(131): n is a, c, g, or t
ctagcaacttgggagactgagcaaaaggatgccttgagaccaggagtttgaggcctgcagtgagccatgatagcacccctgctatcatgctaaaggattctagcaggacaggnccactaacgggtttgtgnaggtcagttgagtcctggctttatcactagctcttcacacatccctggagaattacctaggcttctatgtttccaacatcacatctctaatatcagtggttccaggcattgtgtgtgtattatctataataattgaaacctcacaatagcccagcagggagtaggttatcctcactttataaattacaaaaccgaggcccaggaagggcgaatactctactgtaaggtcacactgctgtgcaaattgcagccagaggccgggcatggtggctcacac

SEQ ID NO: 253578 - DNA, 972 bp, Homo Sapiens
  misc_feature (783)..(783): n is a, c, g, or t
  misc_feature (849)..(849): n is a, c, g, or t
  misc_feature (881)..(881): n is a, c, g, or t
  misc_feature (895)..(895): n is a, c, g, or t
  misc_feature (901)..(901): n is a, c, g, or t
  misc_feature (917)..(917): n is a, c, g, or t
  misc_feature (920)..(920): n is a, c, g, or t
  misc_feature (925)..(925): n is a, c, g, or t
  misc_feature (944)..(944): n is a, c, g, or t
  misc_feature (950)..(951): n is a, c, g, or t
  misc_feature (954)..(954): n is a, c, g, or t
cgccgcggccatcaccactgtgggcagcctcacttggctgccgccccgagaccccagcccgtacctgggcttcgcgcccgccaagtgggcccagccctggctcctgcgccctgtggcggccacctccatcgccttgctttcccttcgggcactgggggtcgctcagggcgggacatgggtgaacggaagtggaagctgtgagcgtcgcagcccgaggcgccgaggcctgaggcgccgtcggggccaccgcgacgctcgcatggagagcgctgggcgctgggctgtgcaccgacggctaacctggacccacggtctctgcggggcgggagctttgcagaaccgactggccgactggggcgcgggaacatgaggcttggctaggagcccgctgcgggccaggcgcgcggtgcgcaggcatacccgggtcgcgggtgaacaccgcggagccccgggacttgcctgtcgttgctggtggcggcatggtcttctgtctgtcgagcgaagagccgcgccgcccgctgcgaagagacatgggtccacttccaggcctcggaagtccagcagctgctacacaacaagttcgtggtcatcttgggggactccattcagagggctgtgtacaaggacctggtgctcttgctccagaaagactcactgctcacagctgcccagctgaaagccaagatatggtcgctgctcaatggagagctaccgggagaacctggagcgggtgtttgtgcgcatggaccaagtattgccagactcctgcctgctggtgtgganatggcgatgcccctcggggaacgtatcactgggggtttctcctgccagagctccagcccctggcangctccctgcggcgggatgtggttgaagggaanttctacagtgctangctggncggggacactgctttnatntctanactccactttcacttccgnatgcanncanaacgtcatcggatgtgtc

SEQ ID NO: 253579 - DNA, 1733 bp, Homo Sapiens
  misc_feature (587)..(587): n is a, c, g, or t
tcgcatggagagcgctgggcgctgggctgtgcaccgacggctaacctggacccacggtctctgcggggcgggagctttgcagaaccgactggccgactggggcgcgggaacatgaggcttggctaggagcccgctgcgggccaggcgcgcggtgccaggcatacccgggtcgcgggtgaacaccgcggagccccgggacttgcctgtcgttgctggtggcggcatggtcttctgtctgtcgagcgaggagccgcgccgcccgctgcgaacgacatggtccacttccaggcctcggaagtccagcagctgctacacaacaagttcgtggtcatcttgggggactccattcagagggctgtgtacaaggacctggtgctcttgctccagaaagactcactgctcacagctgcccagctgaaagccaagggggagctgagctttgaacaggaccagctggtggctgggggccagctgggcgagctgcacaacgggacacagtatcgtgaggtccgccagttctgctcgggctctggccaccaccttgtgcgcttctacttcctcactcgtgtttactccgagtaccttgnaggatgttctggaagagctgacatatggacctgccccggacctggtgatcatcaactcctgcctctgggatctctccagatatggtcgctgctcaatggagagctaccgggagaacctggagcgggtgtttgtgcgcatggaccaagtattgccagactcctgcctgctggtgtggaacatggcgatgcccctcggggaacgtatcactgggggtttcctcctgccagagctccagcccctggcaggctccctgcggcgggatgtggttgaagggaacttctacagtgctacgctggccggggaccactgctttgatgtcctagacctccactttcacttccggcatgcagtacagcaccgtcatcgggatggtgtccactgggaccagcatgcacaccgccacctctcacacctgcttctgacccatgtggctgacgcctggggcgtggagctgcccaagcgtggctatccccctgacccgtggattgaggactgggcagagatgaatcatccattccagggaagccataggcagaccccagacttcggggagcacctggccttgctcccacccccaccttcttctttgcctcctcccatgccttttccctacccgcttcctcagccctcgccacctcccctcttcccacccctgccccaggataccccttttttcccaggccagcccttcccaccccatgaattcttcaactataatccagtggaggacttctcgatgccaccccacttaggatgtggccctggagtgaactttgtgcctggccctctgccacctccaatccctggccctaatccccatggtcagcactggggcccagtggtccaccgggggatgccacgctatgttcctaacagcccctaccatgtgcggagaatgggggggccctgcaggcagcggctcagacactcagagagactgatccacacatacaaactggacagacggcctcctgcccattcggggacatggcctgggtagactggatcttgggctgggactggatgtgccaatggcccttcagggcctgcctggcacctcaggtactgggctagggtgtctgctatgcctggtattgttcttgtccattgctgtcaccaataaaggcatggaagaacagagtgac

SEQ ID NO: 253580 - DNA, 373 bp, Homo Sapiens
aaaaaagccccctttcccccttggtcttgtttacacatgtccttcagctggaagccagcgctctgtcccggaccatgctctctggaattggcatctctgtacagcagtggctccctcacaggcaccaccaggaggtaccaagaatgtgaaactgaagccttaggcttaggcccagaaacaaaatccaaacacaggctcaaggttttgctctgcccagggagggtggctgcctctgacaggacctggcagaaaacagctggggagaacagctctgaagcccagacgtgcagatggtccagtcgcaacaaatctgtgctacactcacaaggaatcagtgggagctccctggcaataggtgtaccctgagcctggc

SEQ ID NO: 253581 - DNA, 404 bp, Homo Sapiens
aaaagaaaaggggtagggaaagcaattactctacaggagtgagggaaagagactaagttccacattgtaagtcctccttgttgctaaatagaaattctagatacttcctcttgaccaaaacaggggcagtacatacacatgcttgccaagactcccaatccaatgagcaacagaaggcacagaagagtcagaaacaaggctgctggacgccatacatgagagggagctggaggtgctccccaaatttgccaatttctgggattttttccatctcactggagttctggaattgaagatctgcataagtaacttcttcagacattgatgaatatgtaaagaaatctatccacatgcagaagtcaaatttgaaaggctgttcttccctcgtgccaattcctgcagcc

SEQ ID NO: 253582 - DNA, 1253 bp, Homo Sapiens
  misc_feature (281)..(289): n is a, c, g, or t
  misc_feature (427)..(437): n is a, c, g, or t
  misc_feature (530)..(568): n is a, c, g, or t
  misc_feature (1018)..(1018): n is a, c, g, or t
  misc_feature (1084)..(1084): n is a, c, g, or t
  misc_feature (1111)..(1111): n is a, c, g, or t
  misc_feature (1201)..(1201): n is a, c, g, or t
  misc_feature (1239)..(1239): n is a, c, g, or t
gagcgcggggttggctatgaatgggggcgggggtgttccccgagttttcgcaccctgcatgaggccccggcggatcgagtcgccaaaaagggttgccgccgagtggtcacgaagggagaggcggccataggggcggcgggtcatgttcgccaggcgctccctcttcggggaggcggagtgaagacggcctctttaaacaaggtttgtgtccggggagaaaaccaccagatcttgctgggggggagggcgcgaaaaaagaaagatggcccgggggggccttnnnnnnnnnacgagagagacgtcggtgtggaggggggtgagccccccacgcgacgggccggggatgtaatgtcctgaggcgcgctaaagtggtacccagtcgagagcgcccgtgggcgcgcccttcggttgggggagggcccccaannnnnnnnnnncttctggtgtgcccctagggatgcgccgcggggtttccgcacgaaggggggcgccttggtggggggggccttgagctcccagaacttgaaccnnnnnnnnnnnnnnnnnnnnnnnnnnnnnnnnnnnnnnntcctcgcccggagctccctccagaggaggctccccattctggccagggtgggttcagagggagggggtaaggagggccaggggctggatcccagtggctgtccttatccccaggagagggcaaaatctgccacgtgcagggcagcttttcgtggtgtcgatcagctgtcatacattctctccatgcgtggggcccgcgcttagccagatccccagaaatctcaggcaggtgctggctgagtcacctagagtctgtgcgtctgcatttctttggctgtaaacaggaagctgttcatagctacctgcctctacagccacactcagctgacaagtgcgtctgaattcccctctcctcatgggctcttgtcaaatggagaaggtgcggggggaagaggagcctaaagcaccaaacctgggctagggggtctgaggggagacaggggagaaggcncaatgcccctggggcagcagttttaccagctcccctccgtgtactcccccttacactccccagggntaagcccgcagggctgcaggcatcatnctgcttaccgcacccaggaaggggatgttgcagacattgcccaggaagccgaaggcgacagggaaaaagcccttaaagaggctgaagagntccgtaggtttccaggaacatgccgaggaggggccagngtaggagcacgata

SEQ ID NO: 253583 - DNA, 786 bp, Homo Sapiens
gggtcccgtgaccatgtaccagctgcgtcctctgggccacgctccacttgcccgcttccacccggaaagccccccaggctgagtgcggcatgatctccatcaccgaatggcagaagattggtgtggggatcaccggtttcggcatcttcttcatcctctttggaacactcctgtactttgattccgtgctcctggcctttggaaacctgctgttcctgacgggcctgtccctcatcattggcctgaggaagaccttttggttcttcttccaacggcacaaactcaagggaaccagcttcctcctggggggtgtggttatcgtgctcctacgctggcccctcctcggcatgttcctggaaacctacggattcttcagcctctttaagggctttttccctgtcgccttcggcttcctgggcaatgtctgcaacatccccttcctgggtgcgctgttccggagacttcaaggcactagctcgatggtctgaaaaacagagatgagctccttgaacttggatcattggttgagggggctagagggagaatgggaaccaccccctcagtcccctgcactgactcactccccgacatatccggacctccccaagtccagaaggaaggaatggagctgagcaactgacgtcaaatccccaagtcgactcaagaggctgccaggaagcagagatgcagaccccaaggagactgggctggggctggtatcacaccctcactctatatttatgggaggaaaagtgaagattaaattcccaagttgtgcgtgtgaaa

SEQ ID NO: 253584 - DNA, 444 bp, Homo Sapiens
  misc_feature (148)..(149): n is a, c, g, or t
tcacacgcacaacttgggaatttaatcttcacttttcctcccataaatatagagtgagggtgtgataccagccccagcccagtctccttggggtctgcatctctgcttcctggcagcctcttgagtcgacttggggatttgacgtcanntgctcagctccattccttccttctggacttggggaggtccggatatgtcggggagtgagtcagtgcaggggactgagggggtggttcccattctccctctaagccccctcaaccaatgatccaagttcaaggagctcatctctgtttttcagaccatccgagctagtgccttgaagtctccggaacagctgtggggagccaagaatcattactccacacaaagggtagagagcagatgcaatatctagttattacagagctggccttgagagccaggaagctgtgcaggcgcgat

SEQ ID NO: 253585 - DNA, 349 bp, Homo Sapiens
acgtaacattatatcatattatattataagtgattaaaacttggagaaaagtggagtgatcatgtcttaaaaggaaatgatgatgtgtaccatgggaaagtgtagtcaagcattcagtacaagtgggatttacacccagtataaatttatatgttcctgaatatggatcctcaaaacataaccagttctttggggttctgacactcaccctcacacctgcaccaacctggtgattatccagtggcctatatagtgagtacaaagtgcttacatttccatttctaataagtaaaaaccaagatagatatttttcatcagaaaaaaataccttggaactcatatactccag

SEQ ID NO: 253586 - DNA, 613 bp, Homo Sapiens
ctaccaagatgaatgaggctagtgaaggagaggagtcaaatacctgagagacaactttgaagtataaacatattgtaactaagcccatttgtatttggctctctgtattccacaaagtgaatgaagagggctctaagggaacctaaccttggaggaaaggcatttaccacataggttaggtggctgcctctcagttaaggggaaggcaaaacaggatccattccatgccttgctggagttgtctgccctgtgcctcaccccaggttcacttacaatgtcacacctcctgtagtctattctagttaacccaatataagaggccagtcagtgagagaacgatattccacagccaaaatactgagacaagccttatccctgtgcaaacaagtcaaggagatttagccatggtacacactacttcagaagaaaacaggaggcttagcagagaacaaaagttcagcagaaagttatatcagcaaaggtcatgaggactgccaagtggtaacaactaaccagctgagtaatggggccaccagagtctttggcacacgggtgggctctgccaagtgagcactaggtatatccagaaccttgggaaaagaacatggactgc

SEQ ID NO: 253587 - DNA, 554 bp, Homo Sapiens
  misc_feature (13)..(13): n is a, c, g, or t
tttaaatatgccnagtgaaggcccttgccttctcccttgtaaccaggatgcctaaggaggaattagtggtgcttccagcccagctccctcttgttttgggaacaacagtcatttcctcagaaacctcactttgcaaaggcagcccttcccaaaaacatgagagcttttagtttggagaaattatttaagctcacttttgctggagaggaaatgaatttaaactaggacacacagagaagcaacaaagagtgttaaagaagcaactgaaaaggtagtcaaagatctggcttaaggattagaagcactggctttctagactatggacaagtgtccattcaacagttatccagcctggcaggaagcagatatctttctgtgtatatctggatccaactaacatttatccaatgtctgttgcatgccaggtactgagcaaaaaccttcttcctattcagctgaggaaacaggagcacagtgaataactaactggctgggatttgtcctaggtcccctgaactccaagcacagtgctatctccactagaccaagctgcc

SEQ ID NO: 253588 - DNA, 477 bp, Homo Sapiens
  misc_feature (86)..(120): n is a, c, g, or t
agaacaagagaggaaaaaggagaggagtcgaagtatagataaagataggaaaaagaaagacaaagaaagggaacgtgaacaggatnnnnnnnnnnnnnnnnnnnnnnnnnnnnnnnnnnnttttaagttcagtagtcaggatgatagattaaaaaggaaacgagaaagtgaaagaacattttctaggagtggttctatatctgttaaaatcataagacatgattctagacaggatagtaagaaaagtactaccaaagatagtaaaaaacattcaggctctgattctagtggaaggagcagttctgagtctccaggaagtagcaaagaaaagaaggctaagaagcctaaacatagtcgatcgcgatccgtggagaaatctcaaaggtctggtaagaaggcaagccgcaaacacaagtctaagtcccgatcaaggtagtatactttttaaagtattttgtctgatttttctcgtttggt

SEQ ID NO: 253589 - DNA, 1218 bp, Homo Sapiens
tcccgggatctctggtgcagctggggtggaatctggccaggccctgcttaggcccccatcctggggtcaggaaatttggaggataaggcccttcagccccaaggttgtcctcgaccagtcccgtgccatggcagcccacctgcttcccatctgcgccctcttcctgaccttactcgatatggcccaaggctttaggggccccttgctacccaaccggcccttcaccaccgtctggaatgcaaacacccagtggtgcctggagaggcacggtgtggacgtggatgtcagtgtcttcgatgtggtagccaacccagggcagaccttccgcggccctgacatgacaattttctatagctcccagctgggcacctacccctactacacgcccactggggagcctgtgtttggtggtctgccccagaatgccagcctgattgcccacctggcccgcacattccaggacatcctggctgccatacctgctcctgacttctcagggctggcagtcatcgactgggaggcatggcgcccacgctgggccttcaactgggacaccggacatttaccggcagcgctcacgggcactggtacaggcacagcaccctgattggccagctcctcaggtggaggcagtagcccaggaccagttccagggagctgcacgggcctggatggcaggcaccctccagctggggcgggcactgcgtcctcgcggcctctggggcttctatggcttccctgactgctacaactatgactttctaagccccaactacaccggccagtgcccatcaggcatccgtgcccaaaatgaccagctagggtggctgtggggccagagccgtgccctctatcccagcatctacatgcccgcagtgctggagggcacagggaagtcacagatgtatgtgcaacaccgtgtggccgaggcattccgtgtggctgtggctgctggtgaccccaatctgccggtgctgccctatgtccagatcttctatgacacgacaaaccactttctgcccctggatgagctggagcacagcctgggggagagtgcggcccagggggcagctggagtggtgctctgggtgagctgggcactggggcccttcatcctgaacgtgaccagtggggcccttctctgcagtcaagccctgtgctccggccatggccgctgtgtccgccgcaccagccaccccaaagccctcctcctcctta

SEQ ID NO: 253590 - DNA, 1041 bp, Homo Sapiens
  misc_feature (54)..(160): n is a, c, g, or t
  misc_feature (214)..(214): n is a, c, g, or t
  misc_feature (326)..(326): n is a, c, g, or t
  misc_feature (341)..(341): n is a, c, g, or t
  misc_feature (964)..(964): n is a, c, g, or t
  misc_feature (998)..(998): n is a, c, g, or t
  misc_feature (1012)..(1012): n is a, c, g, or t
  misc_feature (1026)..(1026): n is a, c, g, or t
aggggtcgtgcagggctggttaccacaaactcagtaggagtgcaagggctgtannnnnnnnnnnnnnnnnnnnnnnnnnnnnnnnnnnnnnnnnnnnnnnnnnnnnnnnnnnnnnnnnnnnnnnnnnnnnnnnnnnnnnnnnnnnnnnnnnnnnnnnnnnagcctcattgtgaggaatgaataagtccacataaaacgcttagcacggggattngcaaagagtaggcactcagtgaatgtcagcctttgtgattgctgcagttcaaagactggctcagtgtctctggaggaattgtctatgaccttgccaagtagatgcatatggncatggaatgaatggngtctgctgtggttctaactccttatgccactattccagtctgtaagtatgcatgtgtgtgcagggaatatgcctgtgacagtggctgagtgtactctttactgtgaccatgacttgtatgactgtgcatgtatttgaggaagccctggccagacccagagtgcattaggttctcaatatgtgcaactcagtgtgtggccaatcaccacatgctcttccgctcacaccacggtgcctgccagccagggtagcatcgacatttgatctccacagccatctgtgcctgatcttcaagtgagagggcacccgcagctcaggggcccaccaccaggcgtgactggatggagaaactggcagggttaaggaggaggagggctttggggtggctggtgcggcggacacaacggccatggccggagcacagggcttgactgcagagaagggccccactggtcacgttcaggatgaagggccccagtgtagtgtccatatactccttgatggcctgacatgattccttggttcttgtattttcccagctcacccagagcaccactccagctgccccctgggccgcactctcccccaggctgtgctccagctcatccaggggcagaaagtggnttgtcgtgtatagaagatctggcatagggcagcncggcagattggggnacagcagcacagcncacggaatgctcggc

SEQ ID NO: 253591 - DNA, 1033 bp, Homo Sapiens
tagaccctgacttaccctttctacctgcaaagtcctggctgaccagcaggtgagtgcctcagtgccctgggtgggtccatacatggccatggtgtccctgacgctatcctcccttcccacctaggaatcatgtcaggccatcaaggagtatatggacactacactggggcccttcatcctgaacgtgaccagtggggcccttctctgcagtcaagccctgtgctccggccatggccgctgtgtccgccgcaccagccaccccaaagccctcctcctccttaaccctgccagtttctccatccagctcacgcctggtggtgggcccctgagcctgcggggtgccctctcacttgaagatcaggcacagatggctgtggagttcaaatgtcgatgctaccctggctggcaggcaccgtggtgtgagcggaagagcatgtggtgattggccacacactgagttgcacatattgagaacctaatgcactctgggtctggccagggcttcctcaaatacatgcacagtcatacaagtcatggtcacagtaaagagtacactcagccactgtcacaggcatattccctgcacacacatgcatacttacagactggaatagtggcataaggagttagaaccacagcagacaccattcattccatgtccatatgcatctacttggcaaggtcatagacaattcctccagagacactgagccagtctttgaactgcagcaatcacaaaggctgacattcactgagtgcctactctttgccaatccccgtgctaagcgttttatgtggacttattcattcctcacaatgaggctatgaggaaactgagtcactcacattgagagtaagcacgttgcccaaggttgcacgcaagaaaagggagaagttgagattcaaacccaggctgtctagctccgggggtacaacccttgcactcctactgaattttggggaaaccagccctgcacaacccctgaatctgctgagaggcacaagtccagcaaataaagcagtcatgatttaa

SEQ ID NO: 253592 - DNA, 458 bp, Homo Sapiens
cgagcacttcggctcctcgcgcgctcgcgtcccctcgtgcgggctccagccgcagccttagcttcggctcccggcttgagtggcgcggacgcgccctcgttttggcctccgaacgcggctcgaatggcaagccataagtattatggcgcccagaccgtgagatctacgatgaactttaagattggaggtgtgacagaacgcatgccaaccccagttattaaagcttttggcatcttgaagcgagcggccgctgaagtaaaccaggattatggtcttgatccaaagattgctaatgcaataatgaaggcagcagatgaggtagctgaaggtaaattaaatgatcattttcctctcgtggtatggcagactggatcaggaactcagacaaatatgaatgtaaatgaagtcattagcaatagagcaattgaaatgttaggaggtgaacttggcagcaagat

SEQ ID NO: 253593 - DNA, 915 bp, Homo Sapiens
  misc_feature (730)..(730): n is a, c, g, or t
aaggagcgaggcctgggtggcgaattcggcacgaggctcgcgcgctcgcgtcccctcgtgcgggctccagccgcagccttagcttcggctcccggcttgggtggcgcggccgtgccctcgttttggcctccgaacgcggctcgaatggcaagccaaaattccttccggatagaatatgatacctttggtgaactaaaggtgccaaatgataagtattatggcgcccagaccgtgagatctacgatgaactttaagattggaggtgtgacagaacgcatgccaaccccagttattaaagcttttggcatcttgaagcgagcggccgctgaagtaaaccaggattatggtcttgatccacagattgctaatgcaataatgaaggcagcagatgaggtagctgaaggtaaattaaatgatcattttcctctcgtggtatggcagactggatcaggaactcagacaaatatgaatgtaaatgaagtcattagcaatagagcaattgaaatgttaggaggtgaacttggcagcaagatacctgtgcatcccaacgatcatgttaataaaagccagagctcaaatgatacttttcccacagcaatgcacattgctgctgcaatagaagttcatgaagtactgttaccaggactacagaagttacatgatgctcttgatgcaaaatccaaagagtttgcacagatcatcaaagattgggacgtactcatacctcagngatgctggtcccacttactccttgggcaggaaattttattggttaaggttcaaccaggtaaaataatggccatggcaaaaaataaaaagctggcccttgccaagaaatctaatgaacttgccacctggaaggcacttgcttgttgggaaccgggttttaaatacactagaatttggctctttgcc

SEQ ID NO: 253594 - DNA, 1003 bp, Homo Sapiens
  misc_feature (749)..(749): n is a, c, g, or t
  misc_feature (763)..(763): n is a, c, g, or t
aggtagcgaggcctgggtggcgaattcggcacgaggctcgcgcgctcgcgtcccctcgtgcgggctccagccgcagccttagcttcggctcccggcttgggtggcgcggccgtgccctcgttttggcctccgaacgcggctcgaatggcaagccaaaattccttccggatagaatatgatacctttggtgaactaaaggtgccaaatgataagtattatggcgcccagaccgtgagatctacgatgaactttaagattggaggtgtgacagaacgcatgccaaccccagttattaaagcttttggcatcttgaagcgagcggccgctgaagtaaaccaggattatggtcttgatccaaagattgctaatgcaataatgaaggcagcagatgaggtagctgaaggtaaattaaatgatcattttcctctcgtggtatggcagactggatcaggaactcagacaaatatgaatgtaaatgaagtcattagcaatagagcaattgaaatgttaggaggtgaacttggcagcaagatacctgtgcatcccaacgatcatgttaataaaagccagagctcaaatgatacttttcccacagcaatgcacattgctgctgcaatagaagttcatgaagtactgttaccaggactacagaagttacatgatgctcttgatgcaaaatccaaagagtttgcacagatcatcaagattggacgtactcatactcaggatgctgttccacttactcttgngcagggaatttaantggttatgttcaacaagtaaaatatgcaatgacaagaataaaagctgccatgccaagaatctatgagctcgcagctggagggcactgcttgttttggtacaggttttaaatactagaaatgggcttttgcaggaaaaaggttgcctgccaaaagtgggctgcaacttacaggggcttgcccttttggtcactgcctcccgaatataaatttgaaagcctcttggctgcctcactggaacg

SEQ ID NO: 253595 - DNA, 1921 bp, Homo Sapiens
  misc_feature (1611)..(1611): n is a, c, g, or t
  misc_feature (1789)..(1797): n is a, c, g, or t
ggagcgaggcctgggtggcgaattcggcacgagggtaccgagcacttcggctcctcgcgcgctcgcgtcccctcgtgcgggctccagccgcagccttagcttcggctcccggcttgggtggcgcggccgtgccctcgttttggcctccgaacgcggctcgaatggcaagccaaaattccttccggatagaatatgatacctttggtgaactaaaggtgccaaatgataagtattatggcgcccagaccgtgagatctacgatgaactttaagattggaggtgtgacagaacgcatgccaaccccagttattaaagcttttggcatcttgaagcgagcggccgctgaagtaaaccaggattatggtcttgatccaaagattgctaatgcaataatgaaggcagcagatgaggtagctgaaggtaaattaaatgatcattttcctctcgtggtatggcagactggatcaggaactcagacaaatatgaatgtaaatgaagtcattagcaatagagcaattgaaatgttaggaggtgaacttggcagcaagatacctgtgcatcccaacgatcatgttaataaaagccagagctcaaatgatacttttcccacagcaatgcacattgctgctgcaatagaagttcatgaagtactgttaccaggactacagaagttacatgatgctcttgatgcaaaatccaaagagtttgcacagatcatcaagattggacgtactcatactcaggatgctgttccacttactcttgggcaggaatttagtggttatgttcaacaagtaaaatatgcaatgacaagaataaaagctgccatgccaagaatctatgagctcgcagctggaggcactgctgttggtacaggtttaaatactagaattggctttgcagaaaaggttgctgcaaaagtggctgcacttacaggcttgccttttgtcactgctccgaataaatttgaagctctggctgctcatgacgctctggttgagctcagtggagccatgaacactactgcctgcagtctgatgaagatagcaaatgatattcgatttttgggttctggtcctcggtcaggtctgggagaattgatcttgcctgaaaatgaaccaggaagcagtatcatgccaggcaaggtgaaccctactcagtgtgaagcaatgaccatggttgcagcccaagtcatggggaaccatgttgctgtcactgtcggaggcagcaatggacattttgagttgaatgttttcaagccaatgatgattaaaaatgtgttacactcagccaggctgctgggggatgcttcagtttcctttacagaaaactgcgtggtgggaatccaggccaatacagaaaggatcaacaagctgatgaatgagtctctaatgttggtgacagctctcaatcctcatatagggtatgacaaggcagcaaagattgctaagacagcacacaaaaatggatcaaccttaaaggaaactgctatcgaacttggctatctcacagcagagcagtttgacgaatgggtaaaacctaaggacatgctgggtccaaagtgatttacataaatttataatgaaaataaacatgtataaaatttaaaangggagcggaaccaaaccggggcgcgggcgggccccagcggaccggggagcgcgcgggcaggacggcgaggcagagaagggacagcggggaggagggcgctgcctccgcggggccgcggacgagaggctcagcaccgcgggcaaaaaatgttggtggcgcccccccttcgggccccttnnnnnnnnntcttttttaataacaccctttttttggtgggggggcgcggcggcccccccaaaaaacaggaagggagaaacacgggggcccaaaagggtggtttgtcccaaaagaaagaacacaccccgggggg

SEQ ID NO: 253596 - DNA, 370 bp, Homo Sapiens
gaacacatagtaatccccgtgattcagagttagatcatataaatcaaataccaattggataacaacaatatcataactgtcataaaacagatggtccacccccagaagcagataataccgggcagctctgtgaggaacaagacggggaaaacacctgttctaactgcccactagaacagtggtttcaactactacaattctcagtgtttgagaggtacaagggaagaaaggactatgtggatcccttgtggctatgcagatacctacctcacagagttgttgtagaagactggtggtttggttcaaaccttgtgattaaagagtttgtcaagcattttattcttttgaataaaagcaacatatctaacac

SEQ ID NO: 253597 - DNA, 517 bp, Homo Sapiens
cacgcgcaagtatgcatgagctggtggtgccatagtagatttccctgtatcgaaaagctacaattacataaggacagatctgtctgggtcgtcaataacggtgttgcctgaaagttcgtaaaagtaatactttggctggatcacccagagtggtaacagcactgctgccaacacggagtccacactgacataccaattttgcctgcttttcagtatcaaacagaagaaacccgtaagtgtcgaagttcttcctgagtataactacttgctttttgttggtaaaaagttttgtaccgtccttggcgtggccgccgcccccgaggacctgagatcccggctcggcctccttcccatgcttctctcgccgcgggcgctgacagggacgccgcggccgcccgcgctctgtctcccgtcagggtcacaggcaagaggcaaccccgggacgcccggcagcctgcgagaacatgtcgactttctctcgtgccgaattcctgcagcccgtctatcgttctccgat

SEQ ID NO: 253598 - DNA, 685 bp, Homo Sapiens
  misc_feature (279)..(355): n is a, c, g, or t
  misc_feature (470)..(512): n is a, c, g, or t
ttaggtcattaccagggtactatgtattgttccttgagctttaatatagttaagtatgaaatgcagaatcaagaagagatatgtacccacccaccctggcaatttacaaagaatcaagaggctgattgacaggtgaacgattcttcgcccttctatagtaccttttacagaaagccttataagtgtgttatcaaaaccacctgtcaccccttgttaaaaatgctctgccttttaaaagtggtaaattaaaactcaacgctgtgaataaaatcttgtgcnnnnnnnnnnnnnnnnnnnnnnnnnnnnnnnnnnnnnnnnnnnnnnnnnnnnnnnnnnnnnnnnnnnnnnnnnnnnnactgaggaaaaatgtaaagcttggcgaatgatggcatagcagttttctgtgtgaaatggatatgcgatgacaagtccatacacgattctagcctgaagtatgaagagtaaagaannnnnnnnnnnnnnnnnnnnnnnnnnnnnnnnnnnnnnnnnnnagtatactgcccggtgtccagttgggacacctgtcaagccggttgcatgaaggaatggtccacccgcggggagagggcggtggtgaatagaaagcttttcaatgaattgttactgacttgttgtcttggcataggcttgtccgagcagaatcaatttgttaatggctgaattt

SEQ ID NO: 253599 - DNA, 672 bp, Homo Sapiens
  misc_feature (572)..(589): n is a, c, g, or t
agactttaggggctggcacaaatctgatcagagacacatatccatacacaggtgaaacacatacagactcaacagcaatcatgcagttccagagacacatgaacctgacacaatctctcttatccttgaggccacagcttggaggagcctagaggcctcaggggaaagtcccaatcctgagggaccctcccaaacatttccatggtgctccagtccactgatcttgggtctggggtgatccaaataccaccccagctccagctgtcttctaccactagaagacccaagagaagcagaagtcgctcgcactggtcagtcggagggcaagatcagatcctggaggactttcctggcctgcccgccagccctgctcttgttgtggagaaggaagcagatgtgatcacatcaccccgtcattgggcaccgctgactccagcatggaggacaccagggagcagggcctgggcctgtttccccagctgtgatcttgcccagaacctctcttggcttcataaacagctgtgaaccctcccctgagggattaacagcaatgatgggcagtcgtggagttnnnnnnnnnnnnnnnnnnattgtgtcctctaaggggacgggttcatctgagtaaacataaaccccaacttgtgccattctttataaaatgattttaaaggc

SEQ ID NO: 253600 - DNA, 359 bp, Homo Sapiens
ctcatttgagcccaataatccatcaaaaataaaactgttgttatttcattttttagatgaggaaattgaagtccagagaataaaaatagtcaacttccagactaaattccaaattcagtgttgatcctttcacagcgagggtgggtctgtttctctccctgtctctatataaccacaaatccctccctaggtgatcctccctggggatggagtcctagaaagccaaagacagtcttctaaagagccaacagcctaaattggcatttaatccagtcaacatctagtacttttagatctagtttctcctttgcaaggaatacaggcgatagaggaaggttagaggacactagcagtctccg

SEQ ID NO: 253601 - DNA, 662 bp, Homo Sapiens
ggggtgtccgcgtgagaattggctatatcctggagcgagtgctgggaggtgctagtccgccgcgccttattcgagaggtgtcagggctgggagactaggatgtcggacacgtggagctctatccaggcccacaagaagcagctggactctctgcgggagaggctgcagcggaggcggaagcaggactcggggcacttggatctacggaatccagaggcagcattgtctccaaccttccgtagtgacagcccagtgcctactgcacccacctctggtggccctaagcccagcacagcttcagcagttcctgaattagctacagatcctgagttagagaagaagttgctacaccacctctctgatctggccttaacattgcccactgatgctgtgtccatctgtcttgccatctccacggtaatgacctgacagagttaggatttaccacttattttcagttcacggtcagtgtcttattgcccatacctcccctcgttctctagccagatgctcctgccactcaagatggggtagaaagcctcctgcagaagtttgcagctcaggagttgattgaggtaaagcgaggtctcctacaagatgatgcacatcctactcttgtaacctatgctgaccattccaagctctctgccatgatgggtgct

SEQ ID NO: 253602 - DNA, 1117 bp, Homo Sapiens
  misc_feature (901)..(901): n is a, c, g, or t
  misc_feature (932)..(932): n is a, c, g, or t
  misc_feature (938)..(938): n is a, c, g, or t
  misc_feature (1003)..(1003): n is a, c, g, or t
  misc_feature (1008)..(1008): n is a, c, g, or t
  misc_feature (1022)..(1022): n is a, c, g, or t
  misc_feature (1081)..(1081): n is a, c, g, or t
  misc_feature (1091)..(1091): n is a, c, g, or t
  misc_feature (1103)..(1103): n is a, c, g, or t
taggagcgaggcctgggtggcgaattcggcacgagggttagagaagaagttgctacaccacctctctgatctggccttaacattgcccactgatgctgtgtccatctgtcttgccatctccacgccagatgctcctgccactcaagatggggtagaaagcctcctgcagaagtttgcagctcaggagttgattgaggtaaagcgaggtctcctacaagatgatgcacatcctactcttgtaacctatgctgaccattccaagctctctgccatgatgggtgctgtggcagaaaagaagggccctggggaggtagcagggactgtcacagggcagaagcggcgtgcagaacaggactcgactacagtagctgcctttgccagttcgttagtctctggtctgaactcttcagcatcggaaccagcaaaggagccagccaagaaatcaaggaaacatgctgcctcagatgttgatctggagatagagagccttctgaaccaacagtccactaaggaacaacagagcaagaaggtcagtcaggagatcctagagctattaaatactacaacagccaaggaacaatccattgttgaaaaatttcgctctcgaggtcgggcccaagtgcaagaattctgtgactatggaaccaaggaggagtgcatgaaagccagtgatgctgatcgaccctgtcgcaagctgcacttcagacgaattatcaataaacacactgatgagtcttttaggtgactgctctttccttaatacatgtttccacatggatacctgcaagtatgttcactaatgaaatggatgctttgcatgggattctgagggcccctggcagccaaagaccacacgccaagccaggagcttgctcttacacagagtgttcggaggtgattncagtgcagacccgacttttcccacctcagtnggatcntgtttgttgatatccgctacctgggacgtcagtattctttgggcaagtttttgcaagttttgtgnatggnttgaacccaccctngggatatttcaacatgggaaccttgccccttatggggaccccttgaacaggatgaatgnagattgcggnaagggttcaaancattaacccgttaa

SEQ ID NO: 253603 - DNA, 1394 bp, Homo Sapiens
ccggtccggaattcccgggatggcggcggcgcgagtagctcgggagcgcggctgacccccaggctgtggtgagggtctgagagctggtaccacggagcctgggcaacctcctccgcccacccatgcccaccccgcatgaggctgagaagcagatcacagggccagaggaggcggaccggcccccttcaatgtccagtcatgatacagcctctccagcggcccccagccgcaacccctgctgcctgtgctggtgctgctgctgtagctgctcctggaaccaagagcggcggcgcgcgtggcaggcctcccgggagagcaagctgcagcccctccccagctgtgaagtatgtgccacgccaagtcctgaggaggtgcagagctgggcgcagtcttttgacaagctgatgcacagcccagcgggacgcagcgtgttccgggcgttcctgcggacagagtacagcgaggagaacatgctcttctggttggcctgcgaggagctgaaggccgaggccaaccagcatgtggtagacgagaaggcgaggctcatctacgaggactacgtatccatcctgtcccccaaggaggtgagcctggactcccgtgtgcgggagggcatcaacaagaagatgcaggagccgtccgcacacacgttcgacgacgcgcagctgcagatctacacgctcatgcaccgggactcctacccccgcttcctcagctctcccacctaccgtgccctgctgctgcaggggccatcacagtcctcctccgaggcctaggccgcccccagcagcacagaccccgccgcctcctacggccgactctgggttcccttcaggtgttgttgtcggcagggctgtcagggcacatgcctggccggctggggtccccacccgcggagacggtcctagacccagtggggagtgctgtgtctcctgggtctgcccacccgtggccaagcaggaactccaggtgcagggcgggcctccaggtgcagggcgggccagaagccccctcatcggcccgcagctggctggcccagtgctcctggctgggggctcttgcgtggtgagagtaggggtccccccaggagccatgctggacccatgagcctcgctggggcctcctccccaggcagccaatgggccccagacaagcctttggtggggaacagaacctccgcatcgtgtagttttgtgacataaggagacctcctacttgagctgtctgtaccccagaatcaaatacagaacctcagaaccagatttaggacctcagaatcctgcactcaaggtggcaggacccaatttctggtttatatggtcatgaaactttaaacctggaaaacatgtccctaactagggggttttaatccgaaaaagggtctccatatttaa

SEQ ID NO: 253604 - DNA, 1001 bp, Homo Sapiens
gccgtccgaacacacgttcgacaacgcgcagctgtagatctacacgatcatgcaccggaactcctacccccgcttcctcagttctcccacctaccgtgcccagctgctgcaggggccataacagtcctcctccgaggcctaggccgcccccagcacgaacagaccccgccgcctctacggccgactctggggttcccttcaggtgttgttgtcggcagggctgtcagggcacatgcctggccggctggggtccccacccgcggagacggtcctagacccagtggggagtgctgtgtctcctgggtctgcccacccgtggccaagcaggaactccaggtgcagggcgggcctccaggtgcagggcgggccagaagccccctcatcggcccgcagctggctggcccagtgctcctggctgggggctcttgcgtggtgagagtaggggtccccccaggagccatgctggacccatgagcctcgctggggcctcctccccaggcagccaatgggccccagacaagcctttggtggggaacagaacctccgcatcgtgtagttttgtgacataaggagacctcctacttgagctgtctgtaccccagaatcaaacacagaacctcagaaccagatttaggacctcagaatcctgcactcaaggtggcaggacccaatttctgttttatatgttcatgaactttaaacctggaaacatgtccttactaggtgttttatcaaaaaaaagttttcatatttatctctatccctaaccccccaaaaataggatgtcccattattgaagatatttttaccccccctttccccgactcacaccacccgtaaacccttgtcggccgccttcgcccccttcaaaaaagctttcaaaaccatttccctttggccccccgggaccccgctagggaaggtgaaccatgggcccaaccctgatctccgtacggaaaatcccgggtccattgcccaaggcgctgggcgactcccccacc

SEQ ID NO: 253605 - DNA, 354 bp, Homo Sapiens
cctgcatgagtgtgtgctctgtgtcactgtggattggagttgaggactctgagtctgtatggagtgacatcgagtgtgctgctctggttggtgaagaccagcctctttgcccagatcttcctgaacttgatctttctgaactagatgtgaacgacttggatacagacagctttctgggtggactcaagtggtgcagtgaccaatcagaaataatatccaatcagtacaacaatgagccttcaaacatatttgaggtaaggacatcctttggcattaatttttcattgagtttggcttgggccagactaacatggtaatagacctgaatgcattgagttcttactttgctatctc

SEQ ID NO: 253606 - DNA, 252 bp, Homo Sapiens
ccgaagcgaaaagatccagagaacactcgaagagataattagggactcggaaagacaaagactgaaggattggtggcaatgagttatggggaaaaactatgtgaacgaaccacagcgagccacagagtgagacatatttgagctcaatacgaatgctcaccagactatcatcacgaaggtgatctagatatgaaggtatgacacaatctctttcaccaggcactacattgcttgctctagccatgtaggctt

SEQ ID NO: 253607 - DNA, 1115 bp, Homo Sapiens
  misc_feature (403)..(431): n is a, c, g, or t
  misc_feature (472)..(488): n is a, c, g, or t
gcgggcgaaaatgagagtgcgagcaggtgcgggggcggggaccgccaacctcgcgacgggtgtgtgggctatatatggcgcgaggagagctgtgcggggcgggcgcacttctaatggggcgccacgtcttctcggcgggcggtctctggcttactcgtaacaggtggcgggcgcggggcgggataagaggtaaggggggtggagggcatatgcggggtggccaaggcggaccgtacgaggactgacggcgcgtgattatcggccgggcggttagcgcggggtaggaagggcgcgcgcagccggcgcggggcaacaaggtcggtagtatggggtgagtggggggatagccggcttataaatcgggcgggatggggggagcggccgggtgggcgggtgaaaacannnnnnnnnnnnnnnnnnnnnnnnnnnnnaatgcgcgtagcacgcggggggtagttcggcggcatgtaannnnnnnnnnnnnnnnntaaaggtcggggtggtggcgagcctcgagcgacgctccatgttggggggatggttgtggggaaatagtggaagagggttgcctggcgcgcagaaacatttccgcatcttcattggggccgttctgaacctgcgcgtccgcagccagctccttagcttcatcctccgtgtagcacacgcccaccaggtggcggtaggccacgaagtccatgctgtggcaggaggcgcacacctgcttatatacctggaaacccctccggatgctggtgtggtccaaggaagagaggaggccacggtgagaccacggatagctgggggggtgcagctccaggtcactggcactcacagccgaatgcagagccacggccagccccgcaccccctgccgccagcatgcccagcgctgacagcatcactttccggcctcgggaaaggccagacttcgacgacaaggccactgcctgaggtgtccgtagcgggagctgcccgggccgcgcgctgcacagcagaccccgggcacgcgcgcccgggagccccgcgccccgcgggcccaacactaccccgcgaagcgaagccgcagctgccgccatcttggccctcgtgccgaattcgccacccaggcctcgctcc

SEQ ID NO: 253608 - DNA, 1210 bp, Homo Sapiens
gctgggtggcgaattcggcacgagggcggaggaggccaagatggcggcagctgcggcttcgcttcgcggggtagtgttgggcccgcggggcgcggggctcccgggcgcgcgtgcccggggtctgctgtgcagcgcgcggcccgggcagctcccgctacggacacctcaggcagtggccttgtcgtcgaagtctggcctttcccgaggccggaaagtgatgctgtcagcgctgggcatgctggcggcagggggtgcggggctggccgtggctctgcattcggctgtgagtgccagtgacctggagctgcacccccccagctatccgtggtctcaccgtggcctcctctcttccttggaccacaccagcatccggaggggtttccaggtatataagcaggtgtgcgcctcctgccacagcatggacttcgtggcctaccgccacctggtgggcgtgtgctacacggaggatgaagctaaggagctggctgcggaggtggaggttcaagacggccccaatgaagatggggagatgttcatgcggccagggaagctgttcgactatttcccaaaaccataccccaacagtgaggctgctcgagctgccaacaacggagcattgccccctgacctcagctacatcgtgcgagctaggcatggtggtgaggactacgtcttctccctgctcacgggctactgcgagccacccaccggggtgtcactgcgggaaggtctctacttcaacccctactttcctggccaggccattgccatggcccctcccatctacacagatgtcttagagtttgacgatggcaccccagctaccatgtcccagatagccaaggatgtgtgcaccttcctgcgctgggcatctgagccagagcacgaccatcgaaaacgcatggggctcaagatgttgatgatgatggctctgctggtgcccctggtctacaccataaagcggcacaagtggtcagtcctgaagagtcggaagctggcatatcggccgcccaagtgaccctgtccagtgtctgcttgccatcctgccagaacaggccctcaagcccaagagccatcccaggcctgttcaggcctcagctaagcctctcttcatctggaagaagaggcaagggggcaggagaccaggctctagctctgggccctccttcagcccccatcatgggaataaattaattttctcaatgtaaaa

SEQ ID NO: 253609 - DNA, 901 bp, Homo Sapiens
cccagccagggcctggagagcagctcacagtcttccagttctggagttttgtggccttggacagccccaccatggaggcctacgtgactgagaccgctgaggaggtgctactggtgcggaatctgaactcggatgatcaggctgttgtgctgaaggccctgagattggcgcccgaggggcgtctgcgaagggacgggctgcgggccctcagctccctgctcgtccatggcaacaacaaggtcatggctgctgtcagcacccagctccggagcctgtcactgggccctaccttccgggagagggccctcctgtgcttcctggaccagctggaggatgaggacgtgcagactcgagtggctggctgcctggccctaggctgcatcggctcccgagggcattgagcccctggtgtacctcttgccaaactgacacagaagctgtgagggaagctgcccggcaaagcctacagcagtgtggagaagagggacagtctgcccatcgacggctggaggagtccctggacgccctgccccgcatctttgggcctggcagcatggccagcacagcattctaaactattcacccatgggttcctggtgcccctttccccccactttcagggctcaccaggcactggcagggagggtaagggctggctccagatacccctcccccacagattcctagcaatgaaaatctaatatattcttctgttgcccctggggttggagagtcagtgcctgcagtcaagtgcctcccagcctcggctcagcacatcccttgccacaaatcagtgtctggggcttggccaccctgccgctgcccagccacatcccttggttttgtattttatttacagagttttacagaaaataaaaaagcaaaatgtctttcctaaaaa

SEQ ID NO: 253610 - DNA, 736 bp, Homo Sapiens
gaaactgggcacatttgggcccctgcgctgccaggaggcatgggccctggagcggctgctgcgggaagcccgagtactggaggcagtatgcgagttcagcaggcggtgggagatcccggccagctctgcccaggaagtggtgcagttctcggcctctcggcctggcttcctgaccttctgggaccagtgcacagagagactcagctgcttcctctgcccggtggagcgggtgcttctcaccttctgcaaccagtatggtgcccgcctctccctgcgccagccaggcttggctgaggctgtgtgtgtgaagttcctggaggatgccctggggcagaagctgcccagaaagccccagccagggccctggagagcagctcacagttcttccagattctggagtttttgtggaaaaccttgggacagcccccaccatgggaaggcctacgtgaacttggaaaccccttgaaggaggggcctactggggggcgggaatcctggaaccccggggaggattccagggctggtttgggtttaagggcccctgaaaatgggcgcccccaaggggggttcttgccaaaggggaacggggcttggggggccccccaaagttcccctggtttgggcccggggggaaaaaaccaaggggcaatggggctggctggtaaagcgcccccccagttccggggaaacccggggaacctgggggcccctcccttttttccgggaaaaaaagggg

SEQ ID NO: 253611 - DNA, 658 bp, Homo Sapiens
tggagacctgagcctccggagagacgtggacgaatgtcagctcttccgagaccaggtgtgcaagagtggcgtgtgtgtgaacacggccccgggctactcatgctattgcagcaacggctactactaccacacacagcggctggagtgcatcgataatgacgagtgcgccgatgaggaaccggcctgtgagggcggccgctgtgtcaacactgtgggctcttatcactgtacctgcgagcccccactggtgctggatggctcgcagcgccgctgcgtctccaacgagagccagagcctcgatgacaatctgggagtgtgctggcagggtgggggctgacctcgtgtgcagccaccctcggctggaccgtcaggccacctacacagagtgctgctgcctgtatggagaggcctggggcatggactgcgccctctgccctgcgcaggactcagatgacttcgaggccctgtgcaatgtgctacgcccccccgcatatagccccccgcgaccaggtggcttttggactcccctacgagtacggcccagacttaggtccaccttaccaaggcctcccatatgggccttgagttgtaccaaccacctgcggtaccctacgacccctaccccgcctggccctttggccgcccggaggttcctttg

SEQ ID NO: 253612 - DNA, 686 bp, Homo Sapiens
gtggcagccgcctcggccgccgcaatgcagccctcctttctatgtgtcatactcgtttatctgggtgaccaacctgttcctattggtgcagagagaggagaagcagcttgaggcatcattagatgcactgctgagtcaagtggctgatctgaagaactctctggggagtttcatttgcaagttggagaacgagtatggccggctgacctggccatctgtcctggacagctttgccttgctttctggacagctgaacactctgaacaaggtcttgaagcatgaaaaaacaccgctgttccgtaaccaggtcatcattcctctggtgttgtctccagaccgagatgaagatctcatgcggcagactgaaggacgggtgcctgttttcagccatgaggtagtccctgaccatctgagaaccaagcctgaccctgaagtggaagaacaggagaagcaactgacgacagatgctgcccgcattggtgcagatgcagcccagaagcagatccagagcttgaattgtgttcaaaccttctggagcagacctttaaccctacagacactaatgccttggtggcagctgttgcctttgggaaggactatctaattggagacttcaggcagcagtggccttggcaggcaggccagccaggagctgggacgatcttggaggaaccttaggatacagc

SEQ ID NO: 253613 - DNA, 618 bp, Homo Sapiens
  misc_feature (466)..(466): n is a, c, g, or t
  misc_feature (491)..(491): n is a, c, g, or t
gtggcagccgcctcggccgccgcaatgcagccctcctttctatgtgtcatactcgtttatctgggtgaccaacctgttcctattggtgcagagagaggagaagcagcttgaggcatcattagatgcactgctgagtcaagtggctgatctgaagaactctctggggagtttcatttgcaagttggagaacgagtatggccggctgacctggccatctgtcctggacagctttgccttgctttctggacagctgaacactctgaacaaggtcttgaagcatgaacgagatgaagatctcatgcggcagactgaaggacgggtgcctgttttcagccatgaggtagtccctgaccatctgagaaccaagcctgaccctgaagtggaagaacaggagaagcaactgacgacagatgctgcccgcattggtgcagatgcagcccagaagcagatccagagcttgaataanatgtgttcaaaccttctggaagaanatcagcaaagaggagcgagaatcagagagtggagggtctcggccgaacaagcagacctttccctacagacacttatgccttggtggcaggctgtgcctttggggactatcttattggagaccttcgg

SEQ ID NO: 253614 - DNA, 997 bp, Homo Sapiens
gtggcagccgcctcggccgccgcaatgcagccctcctttctatgtgtcatactcgtttatctgggtgaccaacctgttcctattggtgcagagagaggagaagcagcttgaggcatcattagatgcactgctgagtcaagtggctgatctgaagaactctctggggagtttcatttgcaagttggagaacgagtatggccggctgacctggccatctgtcctggacagctttgccttgctttctggacagctgaacactctgaacaaggtcttgaagcatgaaaaaacaccgctgttccgtaaccaggtcatcattcctctggtgttgtctccagaccgagatgaagatctcatgcggcagactgaaggacgggtgcctgttttcagccatgaggtagtccctgaccatctgagaaccaagcctgaccctgaagtggaagaacaggagaagcaactgacgacagatgctgcccgcattggtgcagatgcagcccagaagcagatccagagcttgaataaaatgtggtcaaaccttctggagaaaatcagcaaagaggagcgagaatcagagagtggaggtctccagccgaacaagcagacctttaaccctacagacactaatgccctggtggcagctgttgcctttgggaaagactatctaattggagaccttcaggcagcaggggtcctgcccaggcaggccagcccaggagctgggacgatccttgcaggaacctcaggattacagcaggtgcagatggcaggagctccaagccagcagcagccaatgctcagtggggtacaaatggctcaggcaggtcaaccagggaaaatgccaagtggaataaaaaccaacatcaagtcggcttccatgcatccctaccagcggtgagtgtggctggcaacctcgactccctggtgctctttgcagagttgggcagtgaaattaccttttgctcaaggctcacctagatgggtacaataaaaagaacatggg

SEQ ID NO: 253615 - DNA, 1055 bp, Homo Sapiens
  misc_feature (125)..(244): n is a, c, g, or t
  misc_feature (496)..(505): n is a, c, g, or t
gggggaagtgaaatcgtggcagccgcctcggccgccgcaatgcagagagaggagaagcagcttgaggcatcattagatgcactgctgagtcaagtggctgatctgaagaactctctggggagttnnnnnnnnnnnnnnnnnnnnnnnnnnnnnnnnnnnnnnnnnnnnnnnnnnnnnnnnnnnnnnnnnnnnnnnnnnnnnnnnnnnnnnnnnnnnnnnnnnnnnnnnnnnnnnnnnnnnnnnntctacagatccttctccccaccaccctccacagtccttgatccagaacttaccctaatctgatactgcctcacgtcaatggtgagctgatggacacaagatcaaataaggctatgcttattttgtgctgccagaaactgtagcaacctctgtgttcttagaggcacactgtttttgcaggccctcctgcctgggtttcattctggctatccctctaaggcgcaaggtgaagaagcttctgggccaggaaggnnnnnnnnnntgcccacctgcagctctggtgaagcttgggcctgctctcctttccatcctctaaggagccaacttggcttttacctgtcaaatagtcataaagtcccctatcctttaccccaccttatacacacgaggctttctcaggaagtggctctgccaggcaggactatgtgggaaagggtttttccttagcacacgaaaaagccccttcccctggattcatgtttccttattttggagggagaagggaattgcacttcacactgccatcagggtttagttgacctcataatggtgcccactttctcgactttggccaggatttccttcaaagaaaacgactttccttcatttccctaagcctgtggcccaaatggtggaccagaatgatggtgggagggggcaacccccagtagctttgcctgcttttataaagttgaacaaattgaatttagacattcaggctaacctgcctttcttagtactcctttgttggcatgggcaggggttgagtcagcagaagtggaccaaaggattcctctgaataaagttattta

SEQ ID NO: 253616 - DNA, 357 bp, Homo Sapiens
ggagtttccacagctcagcccaggctccagtctggctagagagcatccagcccattccttgcctcagtgccacctttttctgggcaagtagccaagaagtgactttatatgcagtgagtacttcagataaacttacagctacagctgccgaagagtggagaaggttgaccaccatttatttaattctctagtgtacaattgagagcagtgtgcgtgagcccacagacacctgtgtttctgggagctctggcagtggcggattcataggcacttgggctgcactttgaatgacacacttggctttattagattcactagtttttaaataattttgtattttgacagcgttggtacttt

SEQ ID NO: 253617 - DNA, 394 bp, Homo Sapiens
ttttcactccttcatgactgtcacatggacaaaatgaaactaaacttaaatcataactaaaaaaaccaccaactatatttttgaagatttttctaattcttgccactcaaaggacaacattttccacaccggtttgtatgttatccttttggtcattgtcttctgaaccaatgaaatgttgattctccaagggatttgagttttcgtggcacacgtcacctattttctcctgctgacttgggcttttgaataagtgtttcttttggtgcattccaagggcagcagctgttttgcaaattttggggcactggaagcaggcatagcccttcccattatgctcccgaatatgcctctgctcgtgattccttttggtggagagatacaaaaatctctg

SEQ ID NO: 253618 - DNA, 599 bp, Homo Sapiens
  misc_feature (63)..(63): n is a, c, g, or t
  misc_feature (121)..(121): n is a, c, g, or t
  misc_feature (128)..(128): n is a, c, g, or t
  misc_feature (174)..(174): n is a, c, g, or t
cctcacaaaggtgcctagtaggctcaaggcaatcgggggtgtgacggctaggcaatttagaanatataaggataaataagattaactggtatataaaataagaaatatccctgaggggtgngggcggnagggccaggatctgcttcttgtcacatcccacgtggctgagctggnaggctccttcacttgcaatgaagaatccatgccctgtccacccccagcttggtgttcatgctggtgcctggttttagatattgccatcagcccctcaaaggacacagaattcaccaggagatggataagaatcagttctccgccattcacatggaagtcatccagggaggtattgtcagtggtcacattcaagtagacgtctttgtaagtcagagaggccaccatcaaggagttgacagacctgaccttcttcagttggaagaggggctcctcatccttctggtaatgaaggctaatgttgacttcctgggagaagtagcccttcagggagatgagataaaacccatcacagttgatgatgactgagttgttctgcaccttcatgatttcatcctccttttgggaagtgaggatgaaacctttct

SEQ ID NO: 253619 - DNA, 434 bp, Homo Sapiens
ggccccctgagtagcgaatgttcacaccttctcttaagagcttccagacaacagccatgtcttcattggtctctgcggaagccaagggagtgatcattacggcagtgtagccagctttgttctgatggtccacattgcagacgcctgtctccagcagcagcttcgcgatggagaagttggagtgggacacgctgtagtgaagggccgtgttcccgttgcgatcggccaagttgacaagcagcttcaggaagtgtggggagtgaggctggacctcgtggaggtaggaggccaccacggcagggctagacgacttccggctggagacgcggaaccactcttgactgatggtgttcaagctttgcctcaagagctggtctgtggcggtcccagtttctggcagatgctggctcagtgcccggcatgcattaagaaat

SEQ ID NO: 253620 - DNA, 735 bp, Homo Sapiens
  misc_feature (28)..(28): n is a, c, g, or t
  misc_feature (58)..(58): n is a, c, g, or t
  misc_feature (96)..(96): n is a, c, g, or t
  misc_feature (287)..(287): n is a, c, g, or t
  misc_feature (420)..(468): n is a, c, g, or t
ccttgggcttcttcaacccaagatttgnttaggttccccctctgcctctcacaagaanccctggccctggactgtcctgggggcagggacaacctntggcttggggaagggatggccaaaagcgggaagcaagtttgcgcctggtgcctgatgatggtgaaccacgtgacagattggagacgggagtcaggggacccttggggacccttccaggtccagtgaccttttcccagacaggcactctccaggcctaggacagacagggccccaaactcctcatcaccccnatgacttggcctggaggaacctggggtgggaaacaagtagtcccccaacctcagaggccagaaccacaggtgggggacagggacctcgacagagctgtgcctgctcaacgctcgagagcatcttaacctaagnnnnnnnnnnnnnnnnnnnnnnnnnnnnnnnnnnnnnnnnnnnnnnnnntacacccccaatcagagaggggaagtgggaaatgaagatagtagttaacagcacgtccaatgggcccagtgtctacactcgtacgagcagccccccaagctgggcgggggtcccaggcctatagttggggagccctgggcaggggcagagggctggctgctccccacaaaggcagggccccacagcagggtgggaagggtgtgggtggcggagaagccaggggctctggctggacccagaggctggcgacacgcggggtgaaggaac

SEQ ID NO: 253621 - DNA, 758 bp, Homo Sapiens
  misc_feature (198)..(250): n is a, c, g, or t
  misc_feature (648)..(676): n is a, c, g, or t
attctttccattttttattaagtggaaaaaatacactggctgtaataataggcctttaatttgctttccattggcgcagctcctttatgtcattatttgaaactaagctttgagagttacaagaggggggactaagcacacacagtgttcccctgttccaggtcattagaaatgatagaaacacacacatacgtgggnnnnnnnnnnnnnnnnnnnnnnnnnnnnnnnnnnnnnnnnnnnnnnnnnnnnngtatgtattcagagactagactaggaatcttcccatggaccataaactgggaggaatcctagcagggaaaaacagatagaatcagattgaagaagaagctccagagatgctcaaagaaggtactctttgttggaggtggaggtggaggactcttgaagcaggggagatttggaggcaactaacatgccatatgcccatctggtggaagatgatggttccagaagggaaacccgggcctttcctctctaatggccatatttctaccacagcttctagaataggcacaggaaactagcagggtctacacagcacaaagtgagtagaaatttggctgcatcttatcaatttgagcactgtactttagtaaagggtggaatccagggataatcacaatgagnnnnnnnnnnnnnnnnnnnnnnnnnnnnnggcttaaaaaacaacatttctggggtgtaattttattgcaagaaaaggcccaatttaagggggcaattccaaaagtcctcgg

SEQ ID NO: 253622 - DNA, 751 bp, Homo Sapiens
  misc_feature (29)..(29): n is a, c, g, or t
  misc_feature (31)..(32): n is a, c, g, or t
  misc_feature (316)..(316): n is a, c, g, or t
gtcccctgggcctggcctcagggttgggncnnggggtgtagtcccatcttgtagtcctgagaggctcggctacctcagtgtggaagtgggcagttctgggatggtgccagggccagagggggcaatgccggggcccaggtcggcaatgtacatgaggtcgttggcaatcccgggcaggtcaggcaggtaggatggaacatcaattctcaggcacctggcccaggtctggcacatagaagtagtcctctgggacaggttctcggtggtgttgaagagcagcaaggagctgacagagctgatgttgctgggaagaccnccaagtccctcttctgcatcgtcctcgggctccggcggtgctcacgcacacaggaaagtccttcagcttctcctgcagggcccgctcgtccaggggacggtgcttgctctggatcctgtggcgggggcgtctctgcaggccagggtcctgggcgcccgtgaagatggagccatattcctgcaggcgccctggagcagggtacttggcactggagaacaccttgatggccttcttgctgcccttgatcttctcaatcttggcctgggccaaggagaccttctctccaatggcctgcacctggctccggctctgctctacctgctgggagatcctgccatggagaagatcacagaggctgggctgctccccaccctctgcacacctcctgcttctaacagcagagctgccaggccaggccctcaggcaagggctctg

SEQ ID NO: 253623 - DNA, 1064 bp, Homo Sapiens
  misc_feature (16)..(17): n is a, c, g, or t
  misc_feature (48)..(48): n is a, c, g, or t
  misc_feature (70)..(70): n is a, c, g, or t
  misc_feature (73)..(73): n is a, c, g, or t
  misc_feature (80)..(80): n is a, c, g, or t
  misc_feature (163)..(163): n is a, c, g, or t
  misc_feature (224)..(262): n is a, c, g, or t
  misc_feature (462)..(462): n is a, c, g, or t
gcagtcacagagaatnnttctatgtgccagacctggccagtgcttganattgatttccctcctacctgcntgnctgcccngcatgccaacgacctcatgtacagtgccgacctgggccccggcattgccccctctgcccctggcaccattccggaactgcccnccttccacactgaggtagccgagcctctcaaggcagacctacaagatggggtactaacagnnnnnnnnnnnnnnnnnnnnnnnnnnnnnnnnnnnnnnnctcctgaggtgctggccagtgcatccccactcccaccctcaaccgcggcccctgtaggccaaggcgccaggcaggacgacggcagcagcagcgcgtctccttcagtccagggagctcccagggaagtggtcgacccctccggtggccgggccactctgctagagtccatccgccaagctgggggcatcggcaaggccaantgcgcagcgtgaaggagcgaaagctggagaagaagaagcagaaggagcaggagcaagtgagagccacgagccaaggtggggacttgatgtcggatctcttcaacaagctggtcatgaggcgcaagggcatctctgggaaaggacctggggctggtgaggggcccggaggagcctttgcccgcgtgtcagactccatccctcctctgccgccaccgcagcagccacaggcagaggaggacgaggacgactgggaatcctagggggctccatgacaccttcccccccagacccagacttgggccattgctctgacatggacacagccaggacaagctgctcagacctgcttccctgggagggggtgacggaaccagcactgtgcggagaccagcttcaaggagcggaaggctggcctgaggccacacagctggggcggggacttctgtctgcctgtactccatggggggacggctccacccagcctgcgccactgtgttcttctctaaagaggcttccagagaaaatggcacaccaatcaataaagaactgagcagaaaccaacagtgtgcttttaataaaggatctctagctgtgcaggatcc

SEQ ID NO: 253624 - DNA, 1606 bp, Homo Sapiens
  misc_feature (533)..(533): n is a, c, g, or t
  misc_feature (928)..(968): n is a, c, g, or t
  misc_feature (1545)..(1558): n is a, c, g, or t
ccgggatcggctcgcaggcaccatgactcctgtgaggatgcagcactccctggcaggtcagacctatgccgtgcccctcatccagccagacctgcggcgagaggaggccgtccagcagatggcggatgccctgcagtacctgcagaaggtctctggagacatcttcagcaggatctcccagcgggtagagcagagccggagccaggtgcaggccattggagagaaggtctccttggcccaggccaagattgagaagatcaagggcagcaagaaggccatcaaggtgttctccagtgccaagtaccctgctccagagcgcctgcaggaatatggctccatcttcacgggcgcccaggaccctggcctgcagagacgctcccgccacaggatccagagcaagcaccgccccctggacgagcgggccctgcaggagaagctgaagtactttcctgtgtgtgtgagcaccaagccggagcccgaggcacgatgcagaagagggacttgggggtcttcccagcaacatcagctctgtnagctccttgctgctcttcaacaccaccgagaacctgtacaagaagtatgtcttcctggaccccctggctggtgctgtaacaaagacccatgtgatgctgggggcagagacagaggagaagctgtttgatgcccccttgtccatcagcaagagagagcagctggaacagcaggtcccagagaactacttctatgtgccagacctgggccaggtgcctgagattgatgttccgtcctacctgcctgacctgcccggcattgccaacgacctcatgtacagtgccgacctgggccccggcattgccccctctgcccctggcaccattccggaactgcccaccttccacactgaggtagccgagccactcaaggcagacctacaagatggggtactaannnnnnnnnnnnnnnnnnnnnnnnnnnnnnnnnnnnnnnnngctcctgaggtgctggccagtgcatccccactcccaccctcaaccgcggcccctgtaggccaaggcgccaggcaggacgacggcagcagcagcgcgtctccttcagtccagggagctcccagggaagtggtcgacccctccggtggccgggccactctgctagagtccatccgccaagctgggggcatcggcaaggccaagctgcgcagcgtgaaggagcgaaagctggagaagaagaagcagaaggagcaggagcaagtgagagccacgagccaaaggtggggacttgatgtcggatctcttcaacaagctggtcatgaggcgcaagggcatctctgggaaaagaccctggggctggtgaggggccccggaggacctttgccccgcgtggcaaactccattcctcctctgcccgccacgcagcagcccacaggcagaaggaggaccaaggaacaactgggaaatccaaggggggctccatgaaaacctttccccccaaaacccgaacttggggccattggctctggacatgggacacaggccagggacaaacttgccttagaactggcgttccccnnnnnnnnnnnnnntggaaccggaaccacccccccggtggccgggggaacccagcctttcca

SEQ ID NO: 253625 - DNA, 946 bp, Homo Sapiens
  misc_feature (394)..(434): n is a, c, g, or t
ggcctgggtggcgaattcggcacgaggagaacctgtacaagaagtatgtcttcctggaccccctggctggtgctgtaacaaagacccatgtgatgctgggggcagagacagaggagaagctgtttgatgcccccttgtccatcagcaagagagagcagctggaacagcaggtcccagagaactacttctatgtgccagacctgggccaggtgcctgagattgatgttccgtcctacctgcctgacctgcccggcattgccaacgacctcatgtacagtgccgacctgggccccggcattgccccctctgcccctggcaccattccggaactgcccaccttccacactgaggtagccgagccactcaaggcagacctacaagatggggtactaannnnnnnnnnnnnnnnnnnnnnnnnnnnnnnnnnnnnnnnngctcctgaggtgctggccagtgcatccccactcccaccctcaaccgcggcccctgtaggccaaggcgccaggcaggacgacggcagcagcagcgcgtctccttcagtccagggagctcccagggaagtggtcgacccctccggtggccgggccactctgctagagtccatccgccaagctgggggcatcggcaaggccaagctgcgcagcgtggaaggagcgaaagctggagaagaagaagcagaaggagcaggagcaagtgagagccacgagccaagggtggggacttgatgtcggatctcttcaacaagctggtcatgaggcgcaagggcatctctgggaaaaggacctggggctgggtgaggggccccgaggagcctttgcccgcgtggcagaatccttcccttctctggcgccacggaagaagccccaggcaaagggaggacaaggacgacctgggaatcgtaggggggttccatggaaaccctttccccccagaacccaacttgggt

SEQ ID NO: 253626 - DNA, 616 bp, Homo Sapiens
  misc_feature (424)..(424): n is a, c, g, or t
  misc_feature (473)..(473): n is a, c, g, or t
aggaggtgaggaggtttcgacatggcggtgcagccgaaggagacgctgcagttggagagcgcggccgaggtcggcttcgtgcgcttctttcagggcatgccggagaagccgaccaccacagtgcgccttttcgaccggggcgacttctatacggcgcacggcgaggacgcgctgctggccgcccgggaggtgttcaagacccagggggtgatcaagtacatggggccggcaggagcaaagaatctgcagagtgttgtgcttagtaaaatgaattttgaatcttttgtgatcttcttctggttcgtcagtatagagttgaagtttataagaatagagctggaaataaggcatccaaggagaatgattggtatttggcatataaggcttctcctggcaatctctctcagtttgaagacattctctntggtaacaatgatatgtcagcttccattggtgttgtgggtgttatacanaggaaactaagactgggtgaattccctgtaatgatcaagtctccaactttgaggctctcctcatccagaatggaccaaaggaatgtgtttaacccggaggagagactggtggagacattggggaaactgccgattatttgagg

SEQ ID NO: 253627 - DNA, 476 bp, Homo Sapiens
tcttcaaccaggaggtgaggaggtttcgacatggcggtgcagccgaaggagacgctgcagttggagagcgcggccgaggtcggcttcgtgcgcttctttcagggcatgccggagaagccgaccaccacagtgcgccttttcgaccggggcgacttctatacggcgcacggcgaggacgcgctgctggccgcccgggaggtgttcaagacccagggggtgatcaagtacatggggccggcaggtgagggcggggacggcgcgtgctggggagggacccggggccttgtggcgcggctcctttcccgcctcagagagtgggcggtgagcagcctctccagcgcggaggcacgggggcggaacgttggtgcttgtgcggattccgcgtccccaggttctgcttggctccggaggacgcccccctcagccctgaaacccgtgcctctccagccgccccggatctgaacttgtgatcacgg

SEQ ID NO: 253628 - DNA, 938 bp, Homo Sapiens
  misc_feature (184)..(184): n is a, c, g, or t
  misc_feature (195)..(209): n is a, c, g, or t
  misc_feature (224)..(224): n is a, c, g, or t
  misc_feature (332)..(332): n is a, c, g, or t
  misc_feature (462)..(462): n is a, c, g, or t
  misc_feature (552)..(552): n is a, c, g, or t
  misc_feature (561)..(561): n is a, c, g, or t
  misc_feature (565)..(565): n is a, c, g, or t
  misc_feature (584)..(584): n is a, c, g, or t
  misc_feature (589)..(589): n is a, c, g, or t
  misc_feature (603)..(603): n is a, c, g, or t
  misc_feature (606)..(606): n is a, c, g, or t
  misc_feature (620)..(620): n is a, c, g, or t
  misc_feature (635)..(635): n is a, c, g, or t
  misc_feature (664)..(664): n is a, c, g, or t
  misc_feature (726)..(726): n is a, c, g, or t
  misc_feature (732)..(732): n is a, c, g, or t
  misc_feature (737)..(737): n is a, c, g, or t
  misc_feature (833)..(833): n is a, c, g, or t
  misc_feature (874)..(875): n is a, c, g, or t
  misc_feature (885)..(885): n is a, c, g, or t
cactgaaggttttctttgtggttacattggtttgcctttccctgcattagttgtttgtctaacttaatggcctcctcaatttatgttctgcctgccttctgtcttaaagtcttaaagtccgttcaggcctttatcagtgagcagatagtggtcacatgtgtatatgtgagggggtggtcttggntgctctatagnnnnnnnnnnnnnnncttgtggggggctgngtatggcgggatttgtacgactgtgcatgttgatgcgacgtcatgtcccaggatgcttgcaggcgggcatccgggcatgtagtgtcctggaacttgggctccatgcgncgaaagcctgaccatatcggcaatgcccttataccagggcagtgcttttggccaggtccaattcggaggggctactgcaatgagacatctacttacgtatatgtagcggcggtcagcataggatcttccngcgtcgatcactgatatatgcgacctatccgtgtcctctatcgctagcaaaggactacttcgcactgcactatctcattgcagcttggcngcagtcacntctntgtaccggtctgactgggncacantgggactgctggcntgnacgattgacactcnacgtagcgcgccatngtgtctaatagcatgtcgtgcggcactcntgtcgtactacatcgactaattcacgtggacagcagagctcaacgagtctcgcagctatatngtcctncgtgnttcgtgtatacattatcctgatacgactcctcttcgttctacctaagatctctggtcacactacgcgctagtctcgtcattcatctcactatcttntctatcatccgctcgagcacagtctctgcgtatgagcatannctacttcgtnttattgctggctcgttatcgtctatcctctgcgctgtcgtgctccgtcctctc

SEQ ID NO: 253629 - DNA, 313 bp, Homo Sapiens
cagttgtctggagttgacaggacagtcctgagtccagcaggctgtggctgtggcccctggggtgagtaggcagaatgaggtaggtggtaggaggggcagcctcactgtctcctgagaggccctggggtctccgctccagccccggccttgaggcttcggggtctacctgaaggtgtgttcctggggggacggttcggtccacggaggatccagaggccacccgcaggctgatgcagggccgccgtaccatcactgtccacacctcctcctgcctggtgtggcatccggtggtgcctgtcctcctgcgctcagc

SEQ ID NO: 253630 - DNA, 351 bp, Homo Sapiens
cagcttccaactacaaagacagactcggtccttttcaacggtgttcacagatccagtgacccacgctctgaagacagaattagctaactttcaaaaacatctggaaaaatgaagacttgggtaaaaatcgtatttggagttgccacctctgctgtgcttgccttattggtgatgtgcattgtcttacgcccttcaagagttcataactctgaagtacaatgagagcactcacactgaaggatattttaaatggaacattttcttatgataacaatataggactttataatattggaacaggacaatcatataccattttgaggatagaaccatgaaagtgtgtgcttttcc

SEQ ID NO: 253631 - DNA, 383 bp, Homo Sapiens
caggctattactcaaaatggtatatgattgtcctgcaatattataaagtactatattgttatctgcagattgatgaagatattcttgtcctgaaatccagtttggaaaaaatgataagaaaatgttccatttaaaatatccttcagtgtgagtgctctcattgtattttcttcagagttatgaactcttgaagggcgtaagacaatgcacatcaccaataaggcaagcacagcagaggtggcaactccaaatacgatttttacccaagtcttcatttttccagatgtttttgaaagttagctaattctgtcttcagagcgtgggtcactggatctgtgaaaaccgttgaaaaggaccaagtctgtctttgtagttgaaagctg

SEQ ID NO: 253632 - DNA, 983 bp, Homo Sapiens
ccgggctgcaggaattcggcacgagggcggctcggcggagcagttggacgcgctggtgaagaaggacaaggtggtggtcttcctcaaggggacgccggagcagccccagtgcggcttcagcaacgccgtggtgcagatcctgcggctgcacggcgtccgcgattacgcggcctacaacgtgctggacgacccggagctccgacaaggcattaaagactattccaactggcccaccatcccgcaagtgtacctcaatggcgagtttgtagggggctgtgacattcttctgcagatgcaccagaatggggacttggtggaagaactgaaaaagctggggatccactccgcccttttagatgaaaagaaagaccaagactccaagtgagggcggccaagtcctcgctgagcagagagggagccgttcatgtcagagactcactgccagaaaagccttacccattttggttttcactattgagaccgcaactgcttgcactgatcattttggttcgtgagcagttggtgattttagttggtctggtgttcgggctaagaatattttattgtggacttaattacaaccactgcactgtaatgattcaatgctgtattatgatattgctgtaaacaaaattcattcttatattgtcacttattctttgcctgattcagaagttaaataggagctttggaatcattattcatgacccctctgcaaatgtgtcagtctccaaagagagtatctccccccaaattttgtgtagcttcttttgttatggaaaatggtggacaaaaaaagaaactgtgataactggggcgttgttttttaaaataaactccagcacagggatgctgtgcatgcctgagttgattccgaagtgcatatgtctgtaaggatttggagtgcctgcagtgttttatgtgtgagaagtaaaggtgagtctcatattcttctattaaatttgccacaagaattgccgtcg

SEQ ID NO: 253633 - DNA, 1654 bp, Homo Sapiens
ccgaatccttccgctgccctccaagcgccctctggggacagaccaatctgcgtgtgtctgtgaccgcctgtctcagtggcacggccacttcctttctgtagctgggttagagcctgggtctgccttttgtccagatcagctgtttttttaaaatctctgactttttttgcatttctaaagaagcgtgagaaatgggctgggagtgcttctgtcctgctgacaccccgcggtgggtccctggagcgcggcctccagctgccgcaatttccatgccaggatatttttccgcaaatcagtcggttgaaattcagaggagtcagaatgactcgacctgtccttcaatgttgataataaatgtctcagccaaaaaccttccttgagctgccatgcttttccccttgacctgcacctcttcccctaaaatttctgcagggaagcccctggcggaggcgccattgaaagcatggtcttgccagtggctggcaaggcggttttgttctgctcagtttctggagagggttggatgcgtcccctgccatccagccctccccgcttgaggccagcactgagtctgggacactcagcgggaagggggctggcatcgccagcgacccacacattcctcacgtagcttctgctcccaggaaggtagtttaaatcctgtatatactttttagagactcttttaaactttctgaagtgctgatgtacatactttctcgtacacacttttgtgaagatttcaaggggaagggagtcgtctgccattcaatgtttacatttatgttctgcaagacgctgtcctcagggaccattaggggaccattctgttcagtgcgatcctgatggtccgggagatgagggtttccggggctagtgatcgtgatcccttttatttgcaactgtaatgagaatttttcacactaacacagcgagggactcaacacgctgattctcctcctgcctctcccgtgagtctccagcctgcccagcaccagcagctgtggaagcacgtggatgctgcctaccccggcgcccgcgtcttccacgggcacaggtgtgtggaggccgtggtcggaccctggtgtcctggttactgctgcccgggtgtcttttttttgagtaactgctctctgagttttgcacacgaagttgccctcatctgctggagatcgataaggaaggcacaagacgttctcctctgcccgtgaggagcttcccgcagccgcctggcccagcctgggcaacgttctccgaggcatgtgtctccctgcttcaccctcgtctgggcacctcagcatctgtggacttgagcgtccaaaaaccctgagtgtgattctgggcagccggcctggcttgaagtccgccatgaccctgggcacaggggaagcccagccgtgggcttaggagagagggaccagcgcccagcgttagggctggaagacggcagtgttcagaattccagccgctcatctgaacacagaaggtgtgaactgacctctaaagcagcgtgagatgggaatgatctagaaaactttggatttttgaagtaaattttaatgtttcatattaatttcttgaaaatgtattaaatgtcattgaaagccttattacgcttttcagatcctttcaataaacaagacttgtagaaaat

SEQ ID NO: 253634 - DNA, 507 bp, Homo Sapiens
  misc_feature (451)..(451): n is a, c, g, or t
  misc_feature (467)..(467): n is a, c, g, or t
  misc_feature (474)..(474): n is a, c, g, or t
tggaagacgctgtcctcagggaccattaggggaccattctgttcagtgcgatcctgatggtccgggagatgagggtttccggggctagtgatcgtgatcccttttatttgcaactgtaatgagaatttttcacactaacacagcgagggactcaacacgctgattctcctcctgcctctcccgtgagtctccagcctgcccagcaccagcagctgtggagcacgtggatgctgcctaccccggcgcccgcgtcttccacgggcacaggtgtgtggaggccgtggtcggaccctggtgtcctgggttactgctgcccgggtgtcttttttttgagtaactgctctctggagtttttgcacacgaagttgccctcatcttgctgggagatccgataaagggaagggcacaagaacgtttttccttttgcccgtggaggagctttccccgcagnccgcctggggcccagnctggggnaacgtttcttccgagggcatgttgttttccctg

SEQ ID NO: 253635 - DNA, 600 bp, Homo Sapiens
  misc_feature (98)..(136): n is a, c, g, or t
  misc_feature (159)..(196): n is a, c, g, or t
  misc_feature (294)..(305): n is a, c, g, or t
gacgtgtctggccacgtaccctaccacccactaaactgggtgaaattgccacagcgcaccttgatttcatacagataattccatgcgggtttcatacnnnnnnnnnnnnnnnnnnnnnnnnnnnnnnnnnnnnnnngtaaatgtgtatgtccatatgtnnnnnnnnnnnnnnnnnnnnnnnnnnnnnnnnnnnnnntttgggacagtgaaattgacaatgcagtttcttcaccaatcccagaaaatcaagagtggtgctttaaaaaatgcaattccaaaatccgctttcttccnnnnnnnnnnnnggttaacaaaactttccttccaaagtcgagagacttaattccatttgattgcacctctgcaaacgtgtaaaaaattttgaagtagactagaaaacgatgccataatatggctgtatgtcactgttccaatgtcaccacctccacagcttggccgtccatggtgactgcgctgtctgatatcctggtggtcacaggggccatggccacctgcactggtccgttgccctgggcgaggctggtcaccacagtctggtacatgctcacagggatctggaccaggccattagcatcttgg

SEQ ID NO: 253636 - DNA, 257 bp, Homo Sapiens
agtatgaaacgcgcatctccaaaacaaaagaaaagcctaattccccaagaactgtcagtctttcacctgtctgctagctcccagggagaccccacttgccagggctgtctacatttgtcctgagatctcttctggtgggaacagcactttcctcaggaaagtttgttggtcatcagatccatgattgtcgaagctgcctgtggtgatggatcagctggggttaggttttttgggtgggggatggggtcttgcttgtt

SEQ ID NO: 253637 - DNA, 723 bp, Homo Sapiens
acagcagcagtccaataaagcatgccaagacaccatttccccatatcatggcccagtcaccctgcaaaatacgtggtctgctgatcaacatttatcctcaaacctcagtactacagctatacaaactacacttctaaaatatttgaaacagatactgaatttattggttggctatgagtaggaaaatacatcggtaaagaaaaaagaccctgtatataaatataatgctagctaattacaatttgaccaagaaggttccactgaacagaacagtaaaagcccttgttactgccagtccgtatggtttattcagttcccatcaccctcatcaaagagctgtctgggcggatgtgacattctttgagcttatagtgcagataatgtgctgggttttgttacatgaatggtaaacaagagttagtccagtgcatcacacaatataatgtactgtgaataaagactagatacttttagacactacttcaacataccagttattaaaatgtatgtaaccaaaaagaagagcaaagtgaacatcttaaaatactgtttacgaatggtgaagaacacctgctgaaggagttcttggaattatctgcaacatctgtactggacattctgagagcttcactgaaaaaacggtgctgtcattgttttgcctagcttggctttagtccttatatatgaccccaaaaccttacaagtcagaatggaaactagttc

SEQ ID NO: 253638 - DNA, 370 bp, Homo Sapiens
agaaaaaagacccgtatataaatataatgctagctaaacaagaccaagaaggttccactgaacagaacagtaaaagcccttgttactgccagtccgtatggtttattcagttcccatcaccctcatcaaagagctgtgttacatgaatggtaaacaagagttagtccagtgcatcacacaatataatgtactgtgaataaagactagatacagacactacttcaacataccagttattaaaatgtatgtaaccaaaaagaagagcaaagtgaacatcttaaaatactgtttacgaatggtgaagaacacctgctgaaggagttcttggaattatctgcaacatctgtactggacattctgagagcttcac

SEQ ID NO: 253639 - DNA, 628 bp, Homo Sapiens
acattatctgcactataagctcaaagaatgtcacatccgcccagacagctctttgatgagggtgatgggaactgaataaaccatacggactggcagtaacaagggcttttactgttctgttcagtggaaccttcttggtcaaattgtaattagctagcattatatttatatacagggtcttttttctttaccgatgtattttcctactcatagccaaccaataaattcagtatctgtttcaaatattttagaagtgtagtttgtatagctgtagtactgaggtttgaagaaaaataaatgttgatcagcagaccacgtatttaaaattctgaatcttctgggacagggttgtaactcagccttccaaagggaagagtgcagggggacggggccatgatatggggaaatggtgtaaactaatgtatttctttattggctgttattctgtataacactcatatctttgccaaagttcaattttatatttaggcaactgatggtccttttgcatttaggattttcgttgttgttaccttatacctcatgatataaggaatgggctcatgtgtcttccgtcttttggaaggaggttgacatattttaaataaatgcttttaaatacagtagc

SEQ ID NO: 253640 - DNA, 1056 bp, Homo Sapiens
  misc_feature (325)..(378): n is a, c, g, or t
  misc_feature (383)..(391): n is a, c, g, or t
  misc_feature (509)..(509): n is a, c, g, or t
  misc_feature (524)..(524): n is a, c, g, or t
  misc_feature (535)..(535): n is a, c, g, or t
  misc_feature (575)..(575): n is a, c, g, or t
  misc_feature (580)..(580): n is a, c, g, or t
  misc_feature (649)..(649): n is a, c, g, or t
  misc_feature (666)..(666): n is a, c, g, or t
  misc_feature (693)..(693): n is a, c, g, or t
  misc_feature (713)..(713): n is a, c, g, or t
  misc_feature (769)..(770): n is a, c, g, or t
  misc_feature (844)..(844): n is a, c, g, or t
  misc_feature (959)..(960): n is a, c, g, or t
  misc_feature (1029)..(1029): n is a, c, g, or t
  misc_feature (1033)..(1033): n is a, c, g, or t
ccggctgcaggaattcggcacgagattacaggcatgagtcactgcacctggcctgggaataacagtttaaggccagcctcttaaaatgaaagttattgtggcaacttctaaaagatgggttgaaaagagaggaaactggggataacatcataaatagattattatattatccctggtgaaagaaaatgaaggcctgaaacaaggcagagaaggcaaagataaacttgatatctaatggaatatgggtaagtaaccatataagttatcagccaaaatgggacatgcttaagagtcaaagaaggcactattaataattactccagcnnnnnnnnnnnnnnnnnnnnnnnnnnnnnnnnnnnnnnnnnnnnnnnnnnnnnnataannnnnnnnnaattcatgaaaaagggggataagaagaagaaaaacattcctgcaggactagtctgggcagaagaggagttgtggaactagatatgaggagaaagagaggaaggaggcacagagcagtnggagcttgctgcctngaagaatgacngtatgataaagagatgggatgatgtgaaataatcacattngtaantatgaaagtgtgtttgatcacctcagtgtacccagaaacgacactcgtatcatgtcagatagggacaantgtgtttcagtatagantgagggaagggtgcagctaagggagtngcatctgcatcaataatagngcagactgacagattgtgatatgacttcttgtgcactgtgtgtaatggcatatatnngcatatgatatgactattaaatactggatatgattgtgactagctgtatgaaaaaggcaagtttgcactgcaangatagatctctgcttgcagcaccatatatattatatattattttttagtagcagtctgtcagtgtatcacagactgcgccagtgcaggcaacttcataagtgataatatacaaannttacattactttttatctatttttcggggggaatattgtgacattcttttgccggtgttatcactcttncttncattatggtccgtctttctcgct

SEQ ID NO: 253641 - DNA, 637 bp, Homo Sapiens
tcatattgattggtagttgtagcaactcctaattcatcagagcaagagttggcaaaccttgtaaagtgccagataataaatactgttggttatgtggaccataaggtccctgttgcagctattcaattctgccaccatagggtgaaagcagccacaaacaatatgcaaacaaatgagtgtggctgtgttctaataaaacttgattcataaaaacaggcagcaggccagatatgggccttgggctgtagttcccaaccccagcattagggaaattatcctctgagatataagctgcaactatttttctcacagtttagttttttacttgtcttatagtggctttgccatgcagagttttaaagatctcttattttacgtagtggaatttatccgtaatttatggcttctagtttttatgtcagagggaaagcaaagagttagtaaaaccacaggaaactcaaagaggaaagactgtaccttaagctagtcagaccatgctaccaccaagagtcttcttaatgagacaactactcatccttctaagacagaattatcaaaaactctttcttaaaaagcaaacgaacaaatgaaaactttcgacggaaggctgagacacaaaatggagcgagcatcctgg

SEQ ID NO: 253642 - DNA, 369 bp, Homo Sapiens
aaaacaaggcagcaggccacctgagatataagctgcaactatctcccagagttttacttgtcttatagtggctttgccatgcagagttttaaagatctcttattttacgtagtggaatttatccgtaatttatggcttctagtttttatgtcagagggaaagcaaagagttagtaaaaccacaggaaactcaaagaggaaagactgtaccttaagctagtcagaccatgctaccaccaagagtcttcttaatgagacaactactcatccttctaagacagaattatcaaaaactctttcttaaaaagcaaacgaacaaatgaaaactttcgacggaaggctgagacacaaaatggagcgagcatcctgg

SEQ ID NO: 253643 - DNA, 927 bp, Homo Sapiens; identical to SEQ ID NO: 74683

SEQ ID NO: 253644 - DNA, 587 bp, Homo Sapiens
  misc_feature (587)..(587): n is a, c, g, or t
tatcaactcccttctctcgcccccatatcaattgcctgttgatttgtctgtcagtgaattaaaataaaaggcttcttgtctaccactgacttctgaaagtgtgaatgtttaatgtaatgggagcatatgttaggattttatttaactcataagtgaggttactggcaggatggcaaagctggttcagcgcaggtatgagaaggtgggatgtatgtggatagtgccaaaataacaccattgtaagttaccctgtaactttccagaatcagcaaacttaactgtcattatccgagtgatcagaaaaattagggattatacagatgatgtaggaaaggtcatataatcatatatctgacaagttttggagtatttttcttgaataataagcacattgactgtcatagtaccagcagtactttctatcagtttgctatttctcttttcactttagtttttcctttcttaatatgaatattcattttaatgtattaaaaaagataattctttattattctccatttatatataaatatctcccctttgtagatgcctactattttgtattagttttggggggattattttcn

SEQ ID NO: 253645 - DNA, 1023 bp, Homo Sapiens
  misc_feature (44)..(44): n is a, c, g, or t
  misc_feature (105)..(190): n is a, c, g, or t
  misc_feature (667)..(891): n is a, c, g, or t
  misc_feature (915)..(930): n is a, c, g, or t
  misc_feature (1008)..(1008): n is a, c, g, or t
aaatacgccaaaacggtataacgcgtacatttgccatttgccantcagcatgggcagctgttggcaaggacgatcgggacgggcatattcgctattacgccagcnnnnnnnnnnnnnnnnnnnnnnnnnnnnnnnnnnnnnnnnnnnnnnnnnnnnnnnnnnnnnnnnnnnnnnnnnnnnnnnnnnnnnnccataatttcagttgcctttaaaaaaacacacatctacaaatgtgtgctcacaaatgctcaccgacttgctgatgccagtgtttgaaattagagaggcttactgaatttcaaatgaagtgattagagtgaataaggcagtttagttcatctcccataggatacagaaagtaagactgggacaaaattctctactaactcttaagaaaattaacaaagacataccaaagaatggtggttgctagtattgctagtatttacacacacacacagttagtagaaatccatttaaattacttataatagtgatccacggagtaaacacgattaatctggaaattattggtcttcagggaagtactaacagttcaacagtcgattatttcaagaaggtggctaagagagcagggtgtacaagaaaggaaaaatgtatggaaatattcatagaatagaaatgagactgggcgtggtggctcatnnnnnnnnnnnnnnnnnnnnnnnnnnnnnnnnnnnnnnnnnnnnnnnnnnnnnnnnnnnnnnnnnnnnnnnnnnnnnnnnnnnnnnnnnnnnnnnnnnnnnnnnnnnnnnnnnnnnnnnnnnnnnnnnnnnnnnnnnnnnnnnnnnnnnnnnnnnnnnnnnnnnnnnnnnnnnnnnnnnnnnnnnnnnnnnnnnnnnnnnnnnnnnnnnnnnnnnnnnnnnnnnncgacaagagcgaaactctgtctcnnnnnnnnnnnnnnnngacatgagaatttggaaaggcatttagagatatagtctaacctcttcctctatgaagaaatcattctcccaaatcccnactgtaggaacttag

SEQ ID NO: 253646 - DNA, 2304 bp, Homo Sapiens
  misc_feature (944)..(944): n is a, c, g, or t
  misc_feature (947)..(947): n is a, c, g, or t
  misc_feature (1571)..(1633): n is a, c, g, or t
gtgtttggaggcaccgccacccccacctttggtctgaacacccctgcgcctggagtgggcacatcaggcagcagcctctcctttggggcatcctcagcacccgcccaaggcttgttggtgtgcacctttcggatcggcggccccttcattttccattggtgcgggatccaagaccccaggggctcgacagcgactgcaggcccgaaggcagcacacccgcaaaaagtagcctttgtcccctgtccctgttccccccaccccttccctaaatctggaccttggcacctgctaggaagagccttggacccttccagttgcgtaaagcaaacctaccccggatctctggcttcagccgccagggggcagtggcagccctggggccctttcccttctggaggaagcacaagcctcagggaaggggaagcaggatgcggagggccaaagcccgggacctctacttgaacagttctactggggaggctggagaactaaggaaacacctgtacatagtgtccgctgccctgactcccgcttagcacacccttaggcaggcgccccttccacctttccccgagaccgtcgtcgctggagggggcagggtccagcccgcctggatcggtggtgtgcacctgatgggatttgggaaatgggctatccgtaaagctttatcttgcttggcttagctgtgagaagtggttctcttcctctggtcccttctggggactctgtttccccatttcttgctgctgtgtccctcaccggttccttgcaggattccctcctttttaaatgcccttgaatctagctttgccttggagaccccagtgggtggctgctcctgccgttttcttcctgccaagcctgaatcaatgtttcatctccaaccctctgccagtttggcccctcagagcttggtggctcaagactgttagcctggcagagcngcngttggaagggagaagctcttggagcaggcaggatgccaccgctgcttcagctgcctccacgcccagcttaccctttggccccattggccctcgtcttgcctctccagggattgtatgtttcaagcttgtcctgtgttcctttgtctgatgctctgtgtattgctctttgaatcgaagtttgggagggaagagttgagttgtatgaagtggcggcatgttgggtagtgccggacttcctgtttcaagttttctggggcctcgctaattgaatgtggaaagtagcacccacttgacggctacaagtgccgactcctgaattttcccatggtgttctgacttcaagggctggcagcccagggagaatgggcccaggggaagcaaagacctcttccctctgcggtttctgtcccacttaactgacctcactggaggctacatcacccaaagtagatgttagaaaacctaaattaatgaaccatatttttaaaatcctatttttcccaaacagggccctctgcagcccatcctttccttccgtccttctgaaaccacataccccaggcccaagcgccttgctgccacgcccaacctctttgggagaagtatgaatgcgtgtgtctaaannnnnnnnnnnnnnnnnnnnnnnnnnnnnnnnnnnnnnnnnnnnnnnnnnnnnnnnnnnnnnngccttttaaattccttcaagcttggttcattgaggtggttaagtataaatgctattaactaggaattagctgtatagttaagttatgcctgtgcaaagaagaggctcaaatgctgtccccggcagctttcctgggggactagagctccttctggccatgttatatgaaatgtaattcttattttataaataatgtgatgtaaatgtaactggtgccccctccccgatgtgactgagggtgagtgagtggtggcggggctgctccttcccacccctcagaacagctctgatcctcgttaatacctggctgcgtgtgcagctgaggagggagtgaacctcaagcctaaatacctgttaggattggagggtctgggtgggcctgggcctagcaatcaagcttctacctgtaccttatgtaaggtagaccctcctagtgtcagtacctgagctagtttacctcagttccgcaggcaggacagccggtccgggaaccctgagtgagaatgagtgtggatgtgtacagtacacgcactggacggcagcgggaggctgggactttccattacaaatagagacttcattcctgttgagtctagttggaatttttagtatgaatgtgagatttttctcctgcttgtgacattaagaataaaaaactgtgatctatcgtaa

SEQ ID NO: 253647 - DNA, 1182 bp, Homo Sapiens
  misc_feature (17)..(17): n is a, c, g, or t
  misc_feature (99)..(99): n is a, c, g, or t
  misc_feature (222)..(222): n is a, c, g, or t
  misc_feature (435)..(435): n is a, c, g, or t
  misc_feature (496)..(555): n is a, c, g, or t
aatttaaatacggactnaactaatagggaaattttggccctcgaaggccaaagaaatcgggcaacgaaggttgggtaagtgccggaacttccctgtttnaaaagttttccggggggcctcgcctaaattgaaatggtgggaaaaagtaagcacccacttgaagggctacaaagtgccgactccctgaattttccccatggtgttcctgacttccaagggctnggcagcccagggagaatgggccccaggggaagcaaagacctcttccctctgcggtttctgtccccacttaactgacctcactggaggctacgtcacccaaagtagatgttagaaaacctaaattaatgaaccatatttttaaaatcctatttttcccaaacagggccctctgcagcccatcctttccttccgtccttctgaaaccacataccnccagcccaagcgccttgctgtcacgcccagcctctttgggagaagtatgaatgcgtgtgtnnnnnnnnnnnnnnnnnnnnnnnnnnnnnnnnnnnnnnnnnnnnnnnnnnnnnnnnnnnngctaaattgccttttaaattccttcaagcttggttcattgaggtggttaagtataaatgctattaactaggaattagctgtatagttaagttatgcctgtgcaaagaagaggctcaaatgctgtccccggcagctttcctgggggactagagctccttctggccatgttatatgaaatgtaattcttattttataaataatgtgatgtagatgtaaccggtgccccctccccgttgtgactgagggcgagtgttatacctggctgcgtgtgcagctgaggagggagtgaacctcaagcctaaatacctgttaggattggagggtctgggtgggcctgggcctagcaatcaagcttctacctgtaccttatgtaaggtagaccctcctagtgtcagtacctgagcttgtttacctcagttccgcaggcaggacagccggtccgggaaccctgagtgagagtgagtgtggatgtgtacagtacacacactggacggcagcgggaggctgggactttccattacaaatagagacttcattcctgttgagtctagttggaatttttagtatgaatgtgagatttttctcctgcttgtgacattaagaataaaaaactgtgatctatcgtaa

SEQ ID NO: 253648 - DNA, 376 bp, Homo Sapiens
atcccccgggctgcaggaattcggcacaggattagtgctaggagccaaggagcaggactggattatctcatctgactgtgtgcagaatcctgttgaatgtccctgttttctttggttgggcagtcagagctctgctatggtgaacatccagactgtcaccactttctgtctgccgctcgaaagggatagtcctttccactcggtcccctttggatcttcttgacaacaggagcagtccttttattggtagaagtcagagaaagacctccagaatctcctgactttagggaatggtataggggaagatgggaagtaagagtcacatatcgggagccccgaggtgagcgggcggtgctgctttatttgtgttttcttc

SEQ ID NO: 253649 - DNA, 918 bp, Homo Sapiens
gggtggcgaattcggcacgagggcagggacctctgcaactatgcatgatttctcaaacttcaagattcatgtctggatgtattatgctgtggatataagtttagtagggcggtcatttcctactctgagttactggttacctagccagtccatgggtgtgacttggtccttaagtcaggtcactatctgcctcccaccctgggggcaggactgaagtatagaagagcatcatggctgtgcaggaggctgtggtttgaaaactgagcccagagggcactttcagctgccctcaataatgtgaatggattagtgctaggagccaaggagcaggactggattatctcatctgactgtgtgcagaatcctgttgaatgtccctgttttctttggttgggcagtcagagctctgctatggtgaacatccagactgtcaccactttctgtctgccgctcgaaagggatagtcctttccactcggtcccctttggatcttcttgacaacaggagcagtccttttattgttagaagtcagagaaagacctccagaatctcctgactttagggaatggtatagggggaagatgggaagtaagagtcacatatcaaaactaccctccactttattccctgagcgagggtttatgaagtataaaggggtgggagccccgaggtgagcgggaacggtgctgctttatttgaaatgttttcttacctcattctgtgccccagtagggggtccagcctcatctgtctggcttggccctgtgttcctcctgtcccctgctccactgcctatctggtgccccaggtgctgcttgcaactccagctgtcacatttgaacaggttcaattccacctctttaatgctcctgcttcccaaagctggccacatttcctttttccttgggcccccggctc

SEQ ID NO: 253650 - DNA, 1237 bp, Homo Sapiens
  misc_feature (1049)..(1049): n is a, c, g, or t
taggtagcgaggcctgggtggcgaattcggcacgaggggcggcggcggcggcagctgcttgggcgcggtgcggtggtgactgagctacgagcctggcggcgggtgtgcgccgagccccggcccggcccggccctcgcgtgcctcccaggctccgcacccctgatgctgcgcgggtgctgagcccgcttcggccgggacgatggtgaagtatttcctgggccagagcgtgctccggagttcctgggaccaagtgttcgccgccttctggcagcggtacccgaatccctatagcaaacatgtcttgacggaagacatagtacaccgggaggtgacccctgaccagaaactgctgtcccggcgactcctgaccaagaccaacaggatgccacgctgggccgagcgactatttcctgccaatgttgctcactcggtgtacgtcctggaggactctattgtggacccacagaatcagaccatgactaccttcacctggaacatcaaccacgcccggctgatggtggtggaggaacgatgtgtttactgtgtgaactctgacaacagtggctggactgaaatccgccgggaagcctgggtctcctctagcttatttggtgtctccagagctgtccaggaatttggtcttgcccggttcaaaagcaacgtgaccaagactatgaagggttttgaatatatcttggctaagctgcaaggcgaggccccttccaaaacacttgttgagacagccaaggaagccaaggagaaggcaaaggagacggcactggcagctacagagaaggccaaggacctcgccagcaaggcggccaccaagaagcagcagcagcagcaacagtttgtgtagccagtctaccaccaccacagcaccccagacagctaggcttagcccctctgccctcccttcattgtactttatcattaaaaatcaacttcccagccctgtctgctgtcctacgtggtgggttgtggggatgcagtttggcatctgcagtacaccaagcacatgattcatgtctgagcccaggtctgcttantctcccattgggcagctgaggaccgaggcacagaggtgcggtgacttgcccggggccccaggtagcctgcaggttaactggcggtaagtgctagactgtaagcccgacaagggcagggcttttggttttgttctctgatgtgtctcagtatctagcacataatagacactcaataaatacttgttgaa

SEQ ID NO: 253651 - DNA, 465 bp, Homo Sapiens
gtactccaagaccaaaagcactggaggaggccgcagaagaaactgtccagaaagaacagatggaaactaaggaattgcaaccattgactttaacagaaatgccgatcgaagtatagagagattttcacataatcctaatactacgaataacttttctttgacttgcaaaaatggaaacaataattggagtgaaaaaaatgtatctgaacaaatgactaatgaagacaaatcatttggttgtccatctgttagagaccaaaacaggagtattttttcagttcattgtaatgtacccttagcccatgattttacaaataaagaaaagaacttagagacagataataaaataaaacaaaccagcagttcagatagccattccttaaataataaaatattaaatagagaggtggtcaactatgtacagaaaaggagttcacaaatttctaatgaaaatgattgtaattt

SEQ ID NO: 253652 - DNA, 389 bp, Homo Sapiens
ggaacctgaagggccgagaagtcctgctgtgtttggtgccatcatctcttactttgaacagttttttgaaactgttggaatttctctggcaaatcaacagtacgtttcaggagacggcagcgaggctaccttgcatggtgtggtggacgagctggtgcggttccggcagaaggtccggcagtttgcgctggccatgcccgaggccacgggggacgcccggcggcagcagctcctagaaaggcagcccctgctggaagcatgcgacaccctgcgccggggcctgactgcccacggcatcaacatcaaggacagaagcagtacaacatccacgtgggaactgctggatcggacgaccacacccatgcttctcagggtcggcttttgttgct

SEQ ID NO: 253653 - DNA, 395 bp, Homo Sapiens
  misc_feature (359)..(359): n is a, c, g, or t
ccacggttggttgccttactttaatgctgacctagcagccccgacaggaagctttaacataaagccttgaccctgagaagcatgggtgcgtcttgtcgtgagcaggttcatggctgtgctccatcctcagcccgctgatttttggtcttttgtcctttgatccagcagttcccacgtggatgttgtactgcttctgtccttgatgttgatgccgtgggcagttcaggccccggcgcagggtgtcgcatgcttccagcaggggctgcctttctaggagctgctgccgccgggcgtcccccgtgggcctcgggcatggccaggcgcaaactgccgggaccttctgccggaaccgcaccagntcgtccaccacaccatgcaaggtaggcctcggttgc

SEQ ID NO: 253654 - DNA, 357 bp, Homo Sapiens
cccaagaactgcaatcctgaatgtcactgaaaaccaatgcacttctcagagaggacacttcctctaagtgtcattgtgtctgataatgacattccagaaaaagaaatgcttgggtcataccggcttgagaaaagacccatgaagtcggtgtcactgtttgcacagtttggcaagtttgatttaataacactttcaatatgattagccccatatcatcattcttcagttttgacaattcagaaaatttagtttctggcaagtgtaggttgcttcgtgaatccagatcttctttggttttctctttttgcgggtatttttccatgtggcttggacttttcaaactggagtgtgatgcac

SEQ ID NO: 253655 - DNA, 1692 bp, Homo Sapiens
gagggtctccgtctcacatatggccgaaacatggaagaggcaggggagggcatcataccttgggcacaggggcagaagagagcaaagtctgggactcagacagagggaagcttgtcctggcctcagggggcatagcaggcagtgctgcaggagactcaaaactctcacctccactgacccccagtggagggacacctggaactgtctgtaaaacagtggctggctgtattgggtgaggaatccggagcaccattttgctcggaggggcttctgaatgagttgattgggctggtgttttcccagggttgaagctgggctggagagaggggctgggttggataaggaggggtttcaggactgatgaacgcttctgtctccaagccttcttggggaaacggtcggcaactggcttcagtttcaggactacacccttaggcaatagcagtgggtaccgagtttcactccccaactctgagttgtctttttctaggccttgatctgagttgatctcagtggttccagtcatatttcctacctctctagcaccatcagccatgtgccgcagttcttcctggatggatggcagactggcctttaaccagaatgggagccggtgttcttctctctctataggtggcttccactgatgtggctggatctcttcacagcattttcctaggactggcagctgtttggtcttcttataaaatttaatgatgttgtcaggagctctgttcatgttgaggttcttgattctcactgtcagttggcgggcagtcttgcaggttagaaggtacttgttgtcctcagccttggtgaagaggatcttatcctggggattctttgccttcagggaacacactggaagtaactctggatacatgaaaaccttgcttgtggccaggatccaagccacttgctttggcaaacagggaaattcattggcagtcttcttgacagttttatgagggctgcagtcaatgctgacatgtgtgctgaagtcttcaatcagctgcatagctcccatcaagttacagggttggaacagggtctgaaaattggggttgtactgatggtgaagggcgatggagctttgagcaaaggttcccagctctttaagacatatcctggtgctactggcctccggattgagattggggttgcaggtggcaagaaggtggatttgtgtcaagagctgaacatgctgctgcatctgctgctggagtctcttcctttgtgctgggtccagaatcagggtctgatgaacttccttacactggggtttaaccttctctacctccttctgctgtttggctgaaggtttcttcatcttcagctgttcaaatagttccttcgctatctgatgttgttcatttagtaggttggccagtagttcctcaaaccgtagagcttgaggggtgttaaagttagcttgaggctcagccacacgctcctcctcttctgggccatcatcttccatgttggagaatcccatctcatcttggaaagtttcaaacagatcttccatcagctcatttgcttccttttcgtgtcggaggccgagagcgatgagagtacagggaagtgaggaagagggggtggccgccaggctcctccgcttccctgggtccaccgcggatccctcccgcttgtcaggaggcggccagcgggtaagccgactggcggaaatgc

SEQ ID NO: 253656 - DNA, 649 bp, Homo Sapiens
  misc_feature (595)..(595): n is a, c, g, or t
gagtagccagccaccatatgtggagtccatatgtggagtcctgtatcaggcaatgttgccagagaatgagaagtagagttacatagaagaaaaacaaataccttaccttcaaagtgcttaagtagagtctgtctgtctggtgctttgttccttaactaacatgtttcctgatcctttttcttccccaggaaggatttgatgccctggatccctttattcccatcctggtttccaactataacccaaaggaatttgaaagttgtattcagtattatttggaaaacaattggcttcaacatgagaaagctcctacagaagggaaaaaagagctgctgttcctaagtaacgcgaacccctcgctgctggagcggcactgtgcctacctctaagccaagatcacagcatgtgaggaagacagtggacatctgctttatgctggacccagtaagatgaggaagtcgggcagtacacaggaagaggagccaggcccttgtacctatgggattggacaggactgcagttggctctggacctgcattaaaatgggtttcactgtgaatgcgtgacaataagatattcccttgttcctaaaacntatatcagtttattggatgtggtttttcacatttaagataattatggctctttt

SEQ ID NO: 253657 - DNA, 367 bp, Homo Sapiens
ccactgtcttcctcacatgctgtgatcttggcttagaggtaggcattcccttctgtaggagctttctcatgttgaagccaattgttttccaaataatactgaatacaactttcaaattcctttgggttatagttggaaaccaggatgggaataaagggatccagggcatcaaatccttcctggggaagaaaaaggatcaggaaacatgttagttaaggaccaaagcaccagacagacagactctacttaagcactttgaaggtaaggtatttgtttttcttctatgtaactctacttctcattctctggcaacattgcctgatacaggactccacatatggactccacatatggtggctggctactc

SEQ ID NO: 253658 - DNA, 772 bp, Homo Sapiens
ggggcagtctcaggacgggcgctttggagccggccccaggcagcgtgtgccggtcgcctagtcaggagaactagtcctcgactcacggtgagggaatggaccgacacgggtattgtaccgctgagggaaaggagcgggactccggacctccaggagtgcaaggatgatgctgaaaggaataacaaggcttatctctaggatccataagttggaccctgggcgttttttacacatggggacccaggctcgccaaagcattgctgctcacctagataaccaggttccagttgagagtccgagagctatttcccgcaccaatgagaatgacccggccaagcatggggatcagcacgagggtcagcactacaacatctccccccaggatttggagactgtatttccccatggccttcctcctcgctttgtgatgcaggtgaagacattcagtgaagcttgcctgatggtaaggaaaccagccctagaacttctgcattacctgaaaaacaccagttttgcttatccagctatacgatatcttctgtatggagagaagggaacaggaaaaaccctaagtctttgccatgttattcatttctgtgcaaaacaggactggctgatactacatattccagatgctcatctttgggtgaaaaaatgtcgggatcttctgcagtccagctacaacaaacagcgcttttgatcaaacttttagaggcttcaccctgggctggaggaatttcaaaactaccaaatgagcggcttcctgaaccat

SEQ ID NO: 253659 - DNA, 1603 bp, Homo Sapiens
ggggacccttttttgcagtctcaggacgggcgctttggagccggccccaggcagcgtgtgtcggtcgcctagtctggagaactagtcctcgactcacgtgcaaggatgatgctgaaaggaataacaaggcttatctctaggatccataagttggaccctgggcgttttttacacatggggacccaggctcgccaaagcattgctgctcacctagataaccaggttccagttgagagtccgagagctatttcccgcaccaatgagaatgacccggccaagcatggggatcagcacgagggtcagcactacaacatctccccccaggatttggagactgtatttccccatggccttcctcctcgctttgtgatgcaggtgaagacattcagtgaagcttgcctgatggtaaggaaaccagccctagaacttctgcattacctgaaaaacaccagttttgcttatccagctatacgatatcttctgtatggagagaagggaacaggaaaaaccctaagtctttgccatgttattcatttctgtgcaaaacaggactggctgatactacatattccagatgctcatctttgggtgaaaaattgtcgggatcttctgcagtccagctacaacaaacagcgctttgatcaacctttagaggcttcaacctggctgaagaatttcaaaactacaaatgagcgcttcctgaaccagataaaagttcaagagaagtatgtctggaataagagagaaagcactgagaaagggagtcctctgggagaagtggttgaacagggcataacacgggtgaggaacgccacagatgcagttggaattgtgctgaaagagctaaagaggcaaagttctttgggtatgtttcacctcctagtggccgtggatggaatcaatgctctttggggaagaaccactctgaaaagagaagataaaagcccgattgcccccgaggaattagcacttgttcacaacttgaggaaaatgatgaaaaatgattggcatggaggcgccattgtgtcggctttgagccagactgggtctctctttaagccccggaaagcctatctgccccaggagttgctgggaaaggaaggatttgatgccctggatccctttattcccatcctggtttccaactataacccaaaggaatttgaaagttgtattcagtattatttggaaaacaattggcttcaacatgagaaagctcctacagaagaagggaaaaaagagctgctgttcctaagtaacgcgaacccctcgctgctggagcggcactgtgcctacctctaagccaagatcacagcatgtgaggaagacagtggacatctgctttatgctggacccagtaagatgaggaagtcgggcagtacacaggaagaggagccaggcccttgtacctatgggattggacaggactgcagttggctctggacctgcattaaaatgggtttcactgtgaatgcgtgacaataagatattcccttgttcctaaaactttatatcagtttattggatgtggtttttcacatttaagataattatggctcttttcctaaaaaataaaatatctttctaaagtgttgtgttagat

SEQ ID NO: 253660 - DNA, 616 bp, Homo Sapiens
gtgtccgttttgttttggaggaaccagctgaatttctgaaagtgtttccttacaatggtggtacctggctcagggatgggcaggggtagccaaaccctccccgtgctgcccagttcgctgagggtgggagtaggaacaaaagtttaaggctgaggccactgccatgccctggatgtaacaaccaggaaaatcatgttaatcaaggaaacaaaaattcctctagactctgcaatactgcactcttaacaaaaatcaaatgaaaacaagacgtgtctgccacaggtctcaggataacagatgccctgtccactgagagcggcagttctgcagtcagagttctttgatcagccctggacccatttatcacatgggggaggaagggagggtgccctctcgcctggtcccatgatcctggcatggtgcaggttccagcgatgtcccaggcagggtggcaaagggacacccggtaggatgaggcactcagtgaggaggagggaggcagagtctcctttctgactgcgggaggacgggaacacattcaccttccctaaagtcagggaagaacatagttctctagaaaaatcatttgtcaagaaaggggatgtgggtgctgatt

SEQ ID NO: 253661 - DNA, 421 bp, Homo Sapiens
ccgagaccacctctatagcacagcctacgcaaaggactgcgcatcggtgagtcatgcctggcgagtatatcggaacatggctctgagaacacactacagaagtaacactaactcagtagaaatggatgcacaacccgaagatctcactgagaggcctgacagtgactacaggcgtgtagtactacgctcattggcaagggtctctatataggtatgagtcatggcctggagaaagaacctgacatgaatgcactacggatgtggacagatttcaacgaagcatacacgagcaagacgaaagagtcagcactacaggagcattgaacacgctaactgaatgatgacggtctgagcgtatcagcggtacacttgcgctactgctacgctgattagtgctcacagacgaagtatcatggtgcct

SEQ ID NO: 253662 - DNA, 715 bp, Homo Sapiens
tgctatatgggaatgcaatattgtatttattctattcattaacaatacttgaacatttacaatattcattgaacataatctaagagaaggtcaacttacattttttacttctctattaataagagagatggtcaaattaatttatggtcaaaattataatggcaaaaacttataaataaatacgtgcttggtgttactatggttacacacagttcagtttttggtgtaaagttctttggctgcaagaaagaacatttggtttacttcactaatagaaatatctcttaaggctggaatggcctcctcttggtatttcttctgctgttgattttttgcatagttatctgtgattgtatggatggagtcgagtggagaggtactcatcatgttaatcccaaacaagagcacgtagccaattactatagcaataaggaggtagacaggtaatgcaactgcccaatatttttgaggccaataggttaaacctaaagagtttagccaagattcaggaataaaggcccacacgaggtaaagtatgaagccaaattgggagcttaagaaaagaacaaagccataaatcgctctttctggcaatggcgacggtgaattttccaccatttttcctggggctttagacaatctcagcgctgagttctccgcgcaagcgccgactggggagccgcagtggggaagaggaaaacctgagggaaaggcc

SEQ ID NO: 253663 - DNA, 409 bp, Homo Sapiens
  misc_feature (23)..(23): n is a, c, g, or t
  misc_feature (39)..(39): n is a, c, g, or t
  misc_feature (332)..(341): n is a, c, g, or t
ctgacttgaaatagccccttccncctaaggtgcattctnctcaagttttcagtattgctttaatttgcagtgattaaaagagatgagagactttggagacagacaacgtaagcaacacatacacacatgaaatactctagacagagatgaatataaatctggcctaataaccagttccatgtaacagtgattttgtgtttcgggctgaagcagtggttatattaaaagccactaattcccttatccctttaaaagatttttacaattctccaaccacaaacagcacttctaaaactaactttactttctgcccataatttgttctacatggnnnnnnnnnntattactttggccaggggtgtgtgtaaatgtggcagaattcctaggcaggctgaccttcacagtatgg

SEQ ID NO: 253664 - DNA, 406 bp, Homo Sapiens
aaagccaagaggaacccgaaaaaggaggggtgggggcccctcccggcacagagttcgagtccaagtgctcggtcgggcttgcagtctgcctagggcccatgtcaccccccccactcccgtgcccccagcaagggcgagatggcgaggggtgtcctccaacatctctgaaccgccttcccttcctcctcactggcgccctcttgcctcagtcgtcggagatggagaggcggctgaagattggcaggcggcggccagggtcgaggctgggagactcagagccgctgaggctgccggagctcagggagccgcttaggtagctgtcgcggtccgacagcgagtccggggggctggggggcgcgtcgaacacgggcgagtcggacaggcggcgcggcagctgagaactgct

SEQ ID NO: 253665 - DNA, 2560 bp, Homo Sapiens
  misc_feature (1950)..(1961): n is a, c, g, or t
  misc_feature (2109)..(2349): n is a, c, g, or t
  misc_feature (2351)..(2364): n is a, c, g, or t
  misc_feature (2418)..(2426): n is a, c, g, or t
  misc_feature (2443)..(2505): n is a, c, g, or t
aagtagcgaggcctgggtggcgaattccgcacgaggcgcggggagggcgctgaagatcggggccgctcggccgcaggccgcctccagcgccgcgggatgtagcgcgggggaccgcggcccccagcagagcccgcctgcccggcttgtctaccatcagagggagatctctgccccctggggctgagagaccccaacctttccccaagctgaagctgcagggtattgaggtaccagccagatgtcttcccacaaaggatctgtggtggcacaggggaatggggctcctgccagtaacagggaagctgacacggtggaactggctgaactgggacccctgctagaagagaagggcaaacgggtaatcgccaacccacccaaagctgaagaagagcaaacatgcccagtgccccaggaagaagaggaggaggtgcgggtactgacacttcccctgcaagcccaccacgccatggagaagatggaagagtttgtgtacaaggtctgggagggacgttggagggtcatcccatatgatgtgctccctgactggctaaaggacaacgactatctgctacatggtcatagacctcccatgccctcctttcgggcttgcttcaagagcatcttccgcattcatacagaaactggcaacatctggacccatctgcttggtttcgtgctgtttctctttttgggaatcttgaccatgctcagaccaaatatgtacttcatggcccctctacaggagaaggtggtttttgggatgttctttttgggggcagtgctctgcctcagcttctcctggctctttcacaccgtctattgacattccgagaaaagtctctcggactttttccaaactggacttattcaggggattgctccttctaattatggggagctttgtcccctggctctattattccttctactgctccccacagccacggctcatctacctctccatcgtctgtgtcctgggcatttctgccatcattgtggcgcagtgggaccggtttgccactcctaagcaccggcagacaagagcaggcgtgttcctgggacttggcttgagtggcgtcgtgcccaccatgcactttactatcgctgagggctttgtcaaggccaccacagtgggccagatgggctggttcttcctcatggctgtgatgtacatcactggagctggcctttatgctgctcgaattcctgagcgcttctttcctggaaaatttgacatatggttccagtctcatcagattttccatgtcctggtggtggcagcagcctttgtccacttctatggagtctccaaccttcaggaattccgttacggcctagaaggcggctgtactgatgacacccttctctgagccttcccacctgcggggtggaggaggaacttcccaagtgcttttaaaaataacttctttgctgaagtgagaggaagagtctgagttgtctgtttctagaagaaacctcttagagaattcagtaccaaccaagcttcagcccactttcacacccactgggcaataaactttccatttccattctcctagctggggatggggcatggtcaaacttagccatcccctcctcagcaaggcatctaccggcccctcacagagacagtactttgaaactcatgttgagattttaccctctcctccaaccattttgggaaaattatggactgggactcttcagaaattctgtcttttcttctggaagaaaatgtccctcccttacccccatccttaactttgtatcctggcttataacaggccatccatttttgtagcacacttttcaaaaacaattatataccctggtcccatctttctagggcctggatctgcttatagagcaggaagaataaagccaccaacttttacctagcccggctaatcatggaagtgtgtccaggcttcaagtaacttgagttttaannnnnnnnnnnncttggcagagtaatgtaaaatttaaatggggaaagatatttaatatttaatactaagctttaaaaagaaacctgctatcattgctatgtatcttgatgcaaagactatgatgttaataaaagaaagtacagaagagacttggcattcnnnnnnnnnnnnnnnnnnnnnnnnnnnnnnnnnnnnnnnnnnnnnnnnnnnnnnnnnnnnnnnnnnnnnnnnnnnnnnnnnnnnnnnnnnnnnnnnnnnnnnnnnnnnnnnnnnnnnnnnnnnnnnnnnnnnnnnnnnnnnnnnnnnnnnnnnnnnnnnnnnnnnnnnnnnnnnnnnnnnnnnnnnnnnnnnnnnnnnnnnnnnnnnnnnnnnnnnnnnnnnnnnnnnnnnnnnnnnnnnnannnnnnnnnnnnnnaaaaaaccccaaaaaaaacaccccaccggggggacgggggccccccagcagacnnnnnnnnnccgcgccccacgggccnnnnnnnnnnnnnnnnnnnnnnnnnnnnnnnnnnnnnnnnnnnnnnnnnnnnnnnnnnnnnnnccgccccgggggggaccacccgcggggccggaagaaaaaacaacaacgacccgcg

SEQ ID NO: 253666 - DNA, 821 bp, Homo Sapiens
  misc_feature (594)..(594): n is a, c, g, or t
  misc_feature (723)..(738): n is a, c, g, or t
ggtccatgtcctggtggtggcagcagcctttgtccacttctatggagtctccaaccttcaggaattccgttacggcctagaaggcggctgtactgatgacacccttctctgagccttcccacctgcggggtggaggaggaacttcccaagtgcttttaaaaataacttctttgctgaagtgagaggaagagtctgagttgtctgtttctagaagaaacctcttagagaattcagtaccaaccaagcttcagcccactttcacacccactgggcaataaactttccatttccattctcctagctggggatggggcatggtcaaacttagccatcccctcctcagcaaggcatctaccggcccctcacagagacagtactttgaaactcatgttgagattttaccctctcctccaaccattttgggaaaattatggactgggactcttcagaaattctgtcttttcttctggaagaaaatgtccctccccttacccccatccctaaactttgtatcctgggcttataaacaggccatcccatttttgtagcacaccttttcaaaaacaattatataaccctgggtcccaatctttnctaggggcctgggatccggcttataagacgagggaagaataaaggccaccaaactttttaccttagccccgggctaatccatggaaaggggggtccaaggccttccaagtaaccttggaggttttaaannnnnnnnnnnnnnnnccttggcgcaaagtaaatgggtaaaactttaaaaagggggggaagaagaacttttaataattctacagacctaaaccctttac

SEQ ID NO: 253667 - DNA, 486 bp, Homo Sapiens
  misc_feature (13)..(13): n is a, c, g, or t
aaaacctcaaacntgagtttcaaaagtactgtcctcctgtgaggggcccgggtaaaagcccttgcctgaggagggggatggcctaagtttgacccatgcccccatcccccacctaggagaaatggaaatggaaaagtttattgccccagtgggtgtgaaagtgggctgaagccttggttggtactgaattctcctaagaggtttcttctagaaacagacaactcagactcttcctctcacttcagcaaagaagttatttttaaaagcacttgggaagttcctcctccaccccgcaggtgggaaggctcagagaagggtgtcatcagtacagcccgccttctaggccgtaacggaattcctgaaggttggagactccatagaagtggacaaaggctgctgccaccaccaggacatggaaaatctgatgagactggaactgtaggaataaaaagaaaagagcctttaggataatgcaaggaggaataa

SEQ ID NO: 253668 - DNA, 549 bp, Homo Sapiens
  misc_feature (41)..(87): n is a, c, g, or t
  misc_feature (308)..(481): n is a, c, g, or t
ggctgcaggtactgtcagcctggagagaaactgctgcgctnnnnnnnnnnnnnnnnnnnnnnnnnnnnnnnnnnnnnnnnnnnnnnnatgagccactgcattgggtatgcacggaacacatcacttgcagtttaggcacatctcaatatgagaataacttacatcctctgttaaacccagttggggtgagataaacacagcctccttactgcacattcggtacaatgtgccagtgtcttatgtgcttcctgtatataatctcacttaatactgaaaagaagtcttggccaggcatggtggctcacgcnnnnnnnnnnnnnnnnnnnnnnnnnnnnnnnnnnnnnnnnnnnnnnnnnnnnnnnnnnnnnnnnnnnnnnnnnnnnnnnnnnnnnnnnnnnnnnnnnnnnnnnnnnnnnnnnnnnnnnnnnnnnnnnnnnnnnnnnnnnnnnnnnnnnnnnnnnnnnnnnnnnnnnnnnnnnnnctgaaccgggacccgggaggcataggtggaagcaattccactgagccgatgtacacctaaaaataaaa

SEQ ID NO: 253669 - DNA, 1206 bp, Homo Sapiens
  misc_feature (258)..(258): n is a, c, g, or t
  misc_feature (890)..(900): n is a, c, g, or t
  misc_feature (1080)..(1095): n is a, c, g, or t
gcctccctgggactaggtttcagcggccgctgcgatgacctaaaggcagatcccgacgggcccgaggctcaggcggaggcgtgttccggggagcgcacctaccaggagctgctggtcaaccagaaccccatcgcgcagcccctggcttctcgccgcctcacgcggaagctctacaaatgcatcaagaaagcggtgaagcagaagcagattcggcgcggggtgaaagaggttcagaaatttgtcaacaaaggagatctnccagtcatgtgtgaggaccgtttgccctatgtctatatcccctctaagacggacctgggtgcagccgcaggctccaagcgccccacctgtgtgataatggtcaagccccatgaggagtaccaggaggcttacgatgagtgcctggaggaggtgcagtccctgcccctacccctatgaggggctccggtagcacctgggcacctgccgctggaagctattgggctggcagcaggacgactggctgtcctcctgcccacccacactgacggcatcttcccagttccccaaggcacgccttcttcccaggcagctctaacagccctttcatgaaggtaatgctagtcttctgtccatcagtgccatttccctgtaaaactaaaggctgttccaagaatgtggggtggggaaagtaaatgctaagactggaaaaacaacccgaaaaccgaacaaaaaaaccttgtcgggccgccctccggccctccaagaagcttttctagacccatttgttttggccgccgcgggcccccgtaagggtaaagtgaaacatggggcccatagctctgtttctcccaaggaaaaatcccttggtccatggaccataggggcctttgggaatttcctccccccagatnnnnnnnnnnnccgccccccggggcggtgcaaaccccgaaacgcgttttcttgaaacaccaaatatccccgaagatgggggaggtttccctgggaggcgtccactttaacctggggggatctctattccaacaaggggggagctcccacaatcgccgagagccttcgcgattattctcacaatttatacgnnnnnnnnnnnnnnnntttggcccaactttcatttccgacaaaatacgcgggggtgggtcgaaattctactttatacagcgattttcttcgtgcccgcgacactgtggggaaaagccctcttttcac

SEQ ID NO: 253670 - DNA, 866 bp, Homo Sapiens; identical to SEQ ID NO: 7002
  misc_feature (785)..(785): n is a, c, g, or t
  misc_feature (788)..(818): n is a, c, g, or t

SEQ ID NO: 253671 - DNA, 613 bp, Homo Sapiens
  misc_feature (516)..(516): n is a, c, g, or t
gcgccgcggagggtcaggtcgtttctgcgcgggctcccggcgctgctactgctgctgctcttcctcgggccctggcccgctgcgagccacggcggcaagtactcgcgggagaagaaccagcccaagccgtccccgaaacgcgagtccggagaggagttccgcatggagaagttgaaccagctgtgggagaaggcccagcgactgcatcttcctcccgtgaggctggccgagctccacgctgatctgaagatacaggagagggacgaactcgcctggaagaaactaaagcttgacggcttggacgaagatggggagaaggaagcgagactcatacgcaacctcaatgtcatcttggccaagtatggtctggacggaaagaaggacgctcggcaggtgaccagcaactccctcagtggcacccaggaagacgggctggatgaccccaggctgggctgtggcacaaggcgaagacctctgggaaattctccggcgaagaactggacaagctctggcggnagttcctgcatcacgagccacgagaacgtcattagcccctcggacctgagcgacatcaagggcagcgtcctgcacagcaggcacacggagcctggag

SEQ ID NO: 253672 - DNA, 952 bp, Homo Sapiens
gttttctccgcgcagcgccagtcgcagaggaagatggcgccgcggagggtcaggtcgtttctgcgcgggctcccggcgctgctactgctgctgctcttcctcgggccctggcccgctgcgagccacggcggcaagtactcgcgggagaagaaccagcccaagccgtccccgaaacgcgagtccggagaggagttccgcatggagaagttgaaccagctgtgggagaaggcccagcgactgcatcttcctcccgtgaggctggccgagctccacgctgatctgaagatacaggagagggacgaactcgcctggaagaaactaaagcttgacggcttggacgaagatggggagaaggaagcgagactcatacgcaacctcaatgtcatcttggccaagtatggtctggacggaaagaaggacgctcggcaggtgaccagcaactccctcagtggcacccaggaagacgggctggatgaccccaggctggaaaagctgtggcacaaggcgaagacctctgggaaattctccggcgaagaactggacaagctctggcgggagttcctgcatcacaaagagaaagttcacgagtacaacgtcctgctggagaccctgagcaggaccgaagaaatccacgagaacgtcattagcccctcggacctgagcgacatcaagggcagcgtcctgcacagcaggcacacggagctgaaggagaagctgcgcagcatcaaaccagggcctgggaccgcctgcgcagggtcagccaccagggcttacagcacttgaggctgagttcgaggagcccagggtgattggacctgtgggacctgggcgcagtccgccaaccttacggacaagaaactggaggcggttccgggaggagctcaagcactttcgaagcccaaatcgagaaagcacaacactaccaaaggcagctgggagattgcgcaccaaa

SEQ ID NO: 253673 - DNA, 686 bp, Homo Sapiens
  misc_feature (517)..(517): n is a, c, g, or t
  misc_feature (567)..(567): n is a, c, g, or t
  misc_feature (648)..(648): n is a, c, g, or t
  misc_feature (666)..(666): n is a, c, g, or t
cttaggggccccacaacacagaggcacattcattctctccacgtcctggaggtcagaagccaagacggagctaaggccgaggtgcgggcagggccgtgcccttgtggctctacgggacaggtttctcctctcctttcacagcctctagaagctgcagtgtccccgggctcggggcccttcctccatcttggaagccgacagtgcagtgtcttctcggcctgactctgaccctcctgcctcactgtgacgcctcccgtgatgacactggcgcctcccagatgatcctggatcaccccccaccaaggtccctctccccaaccatgtctgctgccccctgcttgccacacaggatgccgttcagggcctggacagcagccgtggcagccccaggtgccatgtccccgctggccactggggggctcaccgcgtgtgcacaggcaggcagcggctcaccccgtgtgcgtgggtcaccccgtgtgcgtggacaggagggggctcaccgcgtgtgcacaggcangcagcggctcaccccgtgtgcgttggtcaccccgtgtgcatggacagganggggcttaccgcgtgtgcacgagcacagagtcctggtagaaccggtcatacattgccttcaggtccaagcttggctttcgnaacccgaaccgggacatngatgggcaccccccgccttg

SEQ ID NO: 253674 - DNA, 403 bp, Homo Sapiens
caggaagccagtcctctgtccaggcatctggctgcacaaccacaattgggtggacacctgtgccaagggtgaatgatgaaagctccttcaccacagaagcaccacacagctgtaccatccattccagttgatctgtgggcatgttggtgaagggcccatagcaacagactagccccctgaagatctttctgtcctgggattctcttgctcgctttggaccttggtggtttctttctttaatagactgggtcacccagaaatagctaactacccacctcccgcaattcctagaaaatatttcagtgtccgttcacacacaaactcagcatctgttttcataacaacatgagtagtctcttcagtaattagattagttaaagtgatgtggtgttttctctgcagc

SEQ ID NO: 253675 - DNA, 762 bp, Homo Sapiens
caacaaaagaatgtccatggtggtgtctggcctgaccccagaagaatttatgctcgtgtacaagtttgccagaaaacaccacatcactttaactaatctaattactgaagagactactcatgttgttatgaaaacagatgctgagtttgtgtgcgaacggacactgaaatattttctaggaattgcgggaggaaaatgggtagttagctatttctgggtgacccagtctattaaagaaagaaaaatgctgaatgagcatgattttgaagtcagaggagatgtggtcaatggaagaaaccaccaaggtccaaagcgagcaagagaatcccaggacagaaagatcttcagggggctagaaatctgttgctatgggcccttcaccaacatgcccacagatcaactggaatggatggtacagctgtgtggtgcttctgtggtgaaggagctttcatcattcacccttggcacaggtgtccacccaattgtggttgtgcagccagatgcctggacagaggacaatggcttccatgcaattgggcagatgtgtgaggcacctgtggtgacccgagagtgggtgttggacagtgtagcactctaccagtgccaggagctggacacctacctgataccccagatcccccacagccactactgactgcagccagccacaggtacagagccacaggaccccaagaatgagcttacaaagtggcctttccaggccctgggagctcctctcactcttcagtccttctactgtcc

SEQ ID NO: 253676 - DNA, 690 bp, Homo Sapiens
  misc_feature (476)..(490): n is a, c, g, or t
  misc_feature (562)..(562): n is a, c, g, or t
  misc_feature (583)..(583): n is a, c, g, or t
  misc_feature (661)..(661): n is a, c, g, or t
tatttataaaggttcagtgtatctttgcctgcctacatcaatctgcaagggagttgcagaaagcctcatgttcatcgagccgtgagtcacaaccaatttctaagctgttataacaaaaaagtgtttgctttttttcacaagtaactttaaaagtgtagtttagaaagaaaacattttcaataaaaagacactacattaatcctggatgcttgcaaatcctaaaatatatttctcctctagcgttgcacagctctgtgttgtatacacagactagctttaaaatttgtcacataccactttacctttacttttatgtatcattcccccgacttccttactgcaggtgtgggcaagaaaacttttcctttaacacttttcaacagcgggcataaaattctgcagctgaggtcttgaagaatgcagatgggtacagtatgtgttggagctcacagtgtgtattgactaacctagttccnnnnnnnnnnnnnnnggtattgtcttgttaaaagtgactcccaggtagcaactctcttttttaagggtgggaacgaaagggacgtangaagaatagatctagattatntaacagtcttcgatagagtttgaaagctttcttcttcattcaattttgggctactgcctctgcattggttcataacangattagattaatgtgcttttggttggtgg

SEQ ID NO: 253677 - DNA, 659 bp, Homo Sapiens
gcacgagaggagccttatgagtatagagtacgggcaactgtagccatcagtcagccttgagcatgcacggacacacttaggagagaagtttatgtgtagggactgtgggaaggctttagcaataatcaacatttaccagacatccaatgacagcctcaggggaaagcacccttgtctggggagtgttggggagcatcagttaggatgtatgggcgcttttgtgatcacacaccacagggagaatctgcatgtggggacactgtggagctctgcccagatgaccttttcaggggtaacaccccagctgcttgagagaacagtgttgctgctggcagagatgcattccagagatgcactccgctctggaactcactctcagccacagggagctgcatgcaccacaggggcaatgcacctttgcaggggtaccttctggccccaacccttgactcaacggggacaactccagaaggtcattccagatccagagatccccatcgaactgaaggatcactgggttgcagacacattgcaggtcagcttcttcctctgcccagtcctgccctcactccccagtgaatcctcaatggtctggctcgttggctgggagataaggagtgtgggcagtgtaggtatatggagggtggatgagggtgggc

SEQ ID NO: 253678 - DNA, 1361 bp, Homo Sapiens
  misc_feature (798)..(798): n is a, c, g, or t
  misc_feature (815)..(815): n is a, c, g, or t
  misc_feature (1326)..(1326): n is a, c, g, or t
gggtccggggatggaatccgaaatggaaacgcagagcgccagggcagaggagggctttacccaggtcacccgcaagggtggccgacgggcgaagaaacgacaggctgaacagctgtccgcagcaggagagggcggggatgcgggccgcatggacacagaggaggccaggccggcgaagaggcccgtcttcccacccctctgtggggacgggctcctgagtgggaaagaagaaacaaggaaaattccagtcccagctaacagatacacaccattgaaagaaaactggatgaagatatttactcctattgtggaacatttgggacttcagatacgctttaacctgaaatcaaggaatgtagaaatcaggacttgtaaagaaaccaaggatgttagtgctctgacaaaagcagctgattttgtgaaagcttttattctcggctttcaggtggaggatgcacttgccctcatcaggttggatgacctcttcctagagtcttttgaaattacagatgttaaacccctaaagggagaccatctatccagggcaataggaagaatcgctggcaaaggaggaaaaaccaaattcaccatagagaatgtgacacggacaaggatagttttggctgatgtgaaagttcacatccttggctccttccaaaatatcaagatggcaagaactgccatttgcaacctaatcttgggaaatcctccttccaaggtttatggcaatattcgagctgtggctagcagatcagcagatcgattctgatttcaagtcagagactttttatcttgccntttggactctggtgaanaaatactttacagtggtcggtcacaagaaaccatctgaacaatttcagtcatttgaagcctccgtcccttcttccattctcagccagaagcataaacagaaaagaaagatttaagaggattcacactcaacaggttttaggataatttaaatatcaaaaattgattgttatacttacacattaggtataatttatcatttatctgaaatcacatgtagcagattgcatagtctgtaatcctctcagagggaaacttcttgtttaaacagctctatatggatttatacttttatatttataaatttataacttcatacaaatttataaacatttctttataaattgtaatttaatagattatctcagaaaaacctctctgaatgatgacccttccttaatactgggtgatgtgtgaatatttgtttgttggcagacagggtctcactttgtcacccagggctaggagtgcagtgggtgcaatctcaggctcactgcagcctctgcctcctgngtttcaagtgatcctccagcttcagccttccctag

SEQ ID NO: 253679 - DNA, 1243 bp, Homo Sapiens
ccgccaattcctgtggtaatccttaccgtggcgagttccgcgctcaatggagacgtttgaccccaccgagctgcccgagctgcttaaactttattaccggaggctctttccctactctcagtactatcgctggctcaactacggtggagtgataaagaattactttcaacaccgtgaattttcattcacattgaaagatgatatttacattcgctaccaatccttcaacaaccagagtgatctggaaaaggagatgcagaaaatgaatccatacaagattgatataggcgcagtatattctcacagacccaatcaacacaatacagtgaagctgggagctttccaggctcaggaaaaagaactggtatttgacattgacatgacagactatgacgatgtgaggagatgttgtagttctgcagacatatgtcctaagtgctggaccctcatgacaatggccatacgcatcattgacagagcattgaaggaggactttggatttaagcatcgtctctgggtatattctggaaggagaggtgttcattgttgggtctgtgatgaatcagttagaaaactgtcttctgcagtacgttctgggatagttgagtatttgagccttgtaaagggtggtcaagacgttaaaaagaaagttcacctaagtgaaaaaattcaccccttttatcagaaaatctataaacataataaaaaaatactttgaagaatatgccttggttaatcaagatattctcgaaaataaagaaagctgggataagattttagcccttgttcctgaaacaattcatgatgaacttcaacaaagcttccaaaagtctcacaattcacttcagcgttgggagcacttgaagaaagtagccagcagatatcagaataacatcaaaaatgacaaatatggaccctggctggagtgggagattatgctccagtactgttttccacggctggatatcaatgtcagcaaaggaatcaatcatctactgaagagcccttttagtgttcatcctaaaacaggtcgcatctctgtgcctattgatttgcagaaagtggaccagtttgatccatttactgttccgaccataagcttcatctgccgtgaattggatgccatttccactaatgaagaggaaaaagaggagaatgaagctgaatctgatgtcaaacatagaaccagagattataagaagaccagtctagcaccttatgtgaaagttttttgacattttct

SEQ ID NO: 253680 - DNA, 1622 bp, Homo Sapiens
  misc_feature (1388)..(1388): n is a, c, g, or t
ggcgaattcggcacgaggggatacggggagccggcgcctgaggagccgcccccggcgccgcggcccagccgtgagcagaagtgtgtgaagtgcaaggaagcgcagcccgttgtggtgatacgagccggagatgccttctgcagggactgtttcaaggccttctacgtccacaagttcagagccatgctgggcaagaaccggctcatctttccaggcgagaaggtgctcttggcgtggtctggggggccttcgtccagctccatggtctggcaggttcttgagggcctgagccaagattctgccaaaagactgcgctttgtggcaggagtcatctttgttgacgagggagcagcctgtggccagagcctagaggagagatcaaagaccctggccgaagtgaagcccattctgcaagcaactgggttcccatggcatgtggtggccttagaggaggtgttcagcctgccaccgtcggtgctttggtgctctgcccaggagctggtgggatccgagggggcctacaaggcggccgtggacagcttcctccagcagcagcatgtgctgggggcccgggggtggtcctggcccgactcaaggggaggaacagccaccccagcccccgctggacccccagaacctggcaagaccgcctgccccctgcccagactgaggctctttccccaactgttctgctcagtgaggacactgactgccaaggaggagcttctgcaaaccctgcggacccacctgatcctccacagggcccaagcccacggctactccaaggtcatgaactggggacagctgcacacgcttggctatcaagctcatgaccaacctggcgctgggtcgaggggccttcctggcctgggatacgggcttctcggatgagcggcacggggacgtggtggtggtgcggcccatgcgggaccacaccctgaaggaggtcgctttctacaaccgcctgttctccgttccttctgtcttcacaccagccgtcgacaccaaggcccctgagttcccctccactgtcagcactgtgtacaggacaagtgagaagctggtggggcccccgggatggccctgctgctggcgactccggcccccgctgcctcctctgcatgtgtgccctggacgtcgacgccgctgacagtgccacggcttttggggctcagacctcctcgcgtctctcccggatgcagtcacccatccccctgactgagacccggacacccccggggccctgctgttctccaggggtgggctgggcccgcgctgcggccagggggcctgcaggagggaggacccccaagcctgcattgaggagcagctgtgctacagctgccgcgtgaacatgaaggacttgccctcactggaccccctgccgncgtacattcctgctgaggcccagctccgcacacagaggggcctgggcttgcgagatccgggactgtctgattgaggacagtgacgacgaggcgggccagagctgagcgtgaggacgtgcttgccgggacagcaggcagtggccacctggtacaccacactggagccggaaggcaaggacgggggactggcctctgattgtccatttgtataaataaaacattttttaattaacc

SEQ ID NO: 253681 - DNA, 366 bp, Homo Sapiens
gagatctgtggccggcggcagctggtgcggggggcagctgagagcgagaggtggatcggggcggtgtgtggccagggccatgacgggcaatgccggggagtggtgcctcatggaaagcgaccccggggtcttcaccgagctcattaaaggattcggttgccgaggagcccaagtagaagaaatatggagtttagagcctgagaattttgaagaaccagcaggctctgtggttcaggactcccgacttgacacgatattttttgctaagcaggtaattaataatgcttgtgctactcaagccatagtgagtgtgttactgctgtacccaccaggatgtccatttaggcgagacattatcaggtttgg

SEQ ID NO: 253682 - DNA, 727 bp, Homo Sapiens
actgcactgatccaatcatcttgattgcatgcacctaaatcaatcggtccttctcttaatccatctaattcatacagtctcccattaacaggaacataactgacaaagtgaaaagcatcttcttcttttgctgatgtcttcgtatcaaattcaaacatttgctgtctggcgaaactgttgtgtacttgtcgaatcacatctgaattgctcagtgccaagcctttcatagctgcatcaaaactttgtgaaaattctttaaactctgataatgtctcgcctaaatggacatcctggtgggtacagttcagtaacacactcactatggcttgagtagcacaagcattattaaattacctgcttagcaaaaaatatcgtgtcaagtcggggagtcctgaaccacagagcctgctggttcttctcctggctgccacttgaaaagaaaaattaacccatgaactggctttaatttttcaaaattctcaggctctaaactccatatttcttctacttgggctcctcggcaaccgaatcctttaatgagctcggtgaagaccccggggtcgctttccatgaggcaccactccccggcattgcccgtcatggccctggccacacaccgccccgatccacctctcgctctcagatgccccccgcaccagctgccgccggccacagatctcagcaaacccgccgccgagctcgtcaaccacacgtcaccccgcctccc

SEQ ID NO: 253683 - DNA, 593 bp, Homo Sapiens
  misc_feature (14)..(14): n is a, c, g, or t
  misc_feature (79)..(79): n is a, c, g, or t
tccattgtgaagantaaactaatgttaagtaaccttccctcacatgtgaaaggcccacgataataattactgaaagctnccgttccgccaggattccttctgaaaggatgaagaacaatgggtagcactcctttttctttatgtaactgggctcatagtggtccattaaaactgttcttgggtcaggactgcaacctgtatgatatgtttcaaaaggatctgagccatacacatttcccttcaaatacatagggcctgtggatcccaaaaacggacaaaggaacagatctgtggcagcttccacatcagcttcactgctattgtcaatatggcaggtcccactactgtcatgttgtggtaagaaaaatccagcacctgaagatgtgacaaactggtggtggcttccactttctgaagacacgtacccatcctgcctgtcagctaacgttccctgagatgacaaataactaggaatatctgctggcaagttggtctcatctgtgttggtaatgctgcaatcttcattcctccgccttgtgtggtatatgatgaccacccacacgagtgacgtgcccaccacaccccaaaccacg

SEQ ID NO: 253684 - DNA, 627 bp, Homo Sapiens
cgaataaaccgaggaaagcgaagggagatgcccgtcactatccaccaggccccgcgcagcagggtagatgggagagagggagaggtcagcgcacttcacctcccacacagcgctggggtccagccagtggtcgggaatcacagcgccatctatccgcacgtaagggcgtgggcagggcagcaccagggccttgaggctctggtgatgctcctccagctcctcgtcactgaagccagttccaagcttgcatatggcctgcagctcctcactgtcctcgtcgtaggaggccagcaggaagcccccgtaccggccggcccgcttcccccggcccaggtaggcgccgatcaccaccaggtccagggtgtcacccacgccatcaaggtagtccttcttcagcttgagccagttgtgcgatctcttggcgatctcgtaggtggcatcaacatccagggtcttcaccatcagcccctcgcaggagtctttcactgactgctccaggaactcggcgatctgctcgatgtccttggtgtccagggaggtggcgaagacaaactcgccctctgtctccacaaagttctcccggagcagctgccggcgccgggaaaggggctcacgtaccagggactc

SEQ ID NO: 253685 - DNA, 761 bp, Homo Sapiens
ggcacgagaactggaagtactttgttttcagggttgtatatgcccttaagcaatatggcaacaggacctgaatgcccgcacaagagttttcaagtgctgtgccccatagcacatagtgctgtgtcctgaaccagctccccgtggctgtgtggggaagttgttgccggctttgttctgatggcttggaactggcttcagtgacgaggagctggaggagcatcaccagagcctcaaggcgctggtgctgcccagcccacgcccttacgtgcggatagatggcgctgtgattcccgaccactggctggaccccagcgctgtgtgggaggtgaagtgcgctgacctctccctctctcccatctaccctgctgcgcggggcctggtggatagtgacaagggcatctcccttcgcttccctcggtttattcgagtccgtgaagacaagcagccggagcaggccaccaccagtgctcaggtggcctgtttgtaccggaagcaaagtcagattcagaaccaacaaggcgaggactcaggctctgaccctgaagatacctactaagccctcgccctcctagggcctgggtacagggcatgagttggacggaccccagggttattattgcctttgctttttagcaaatctgctgtggcaggctgtggattttgagagtcaggggaggggtgtgtgtgtgagggggtggcttactccggagtctgggattcatcccgtcatttctttcaataaataattatcggatagctaa

SEQ ID NO: 253686 - DNA, 408 bp, Homo Sapiens
gatcaacaggtacacaaatgagccaaacggaaaagacactatagttctctgctgagagccagcgagacatgggcccagacacaggccttcagcacacctgcttgggcaccagtcccaagcgacgggacccacggggtgctgggcagctggtctagagtggcagcccacgtccaggcagcagcagccgaaccacaccccaaaagagccagagcgccttgtgctgagaattcgacaagggtgtccaaagaatgacagggatgttcagggacacagcgccagcaccaaggggcctctgtcagccacatacaaagtgatggtcgggactttaagaataaggcagcaaaccacaagtctgtactgatagaataaacgagttacaggtgagcctgataagtaagaggtcatttg

SEQ ID NO: 253687 - DNA, 377 bp, Homo Sapiens
gtatctgaatccttcaaatatatttcccttcctcaactccctgactctgtactgctataagctaactccactttgaaacacggtgaagttagagcatataaataaataaggaagttacaagacttaagttctttgaaatccatatggggaaatgggagagtgctacatacactaaaatgggactacgacaaacctcaagttcctgtaaaatgagaaaacaggtgaaacacctatctacacatgtaaatgttaggcccccttatccttaattaatattaaaacgaaaaactggaattaacatttcttccctactgtgaccaaccatagtgcactaaccacttgtttacatctaatatttgggagctactgtttaaaac

SEQ ID NO: 253688 - DNA, 579 bp, Homo Sapiens
aatacagtgatattaattcatttgatggtctcctcctgtgtcttctaaatcaatatcaaaatctaaatcatcatcactttcttcatttcttctgcagcttcttctatggttggaacttagattattttcagtatgttctattttttctgtttctttattcaacggaataacaatgtcttctttctttccacattgtgcgcaaacttcaagttcacaggcacatggcctgcacattatgtgataagaatccttcactgtcttttgtaaacatttaacacactttttaggttttgataatggtttgtatttgctgtattttacacgccactcaagaacttctttacagcgctgacatactccatcatgaagttttgcattaattttcttggtctgcacacttttatcgaacttgtcatttttgaagctaaacgtattctggtgcttctgaggtctggaacgagccacgttgcctttctgggagctcatcgccgaaatcaaagccacccctcgccgggagcaggcaaaaggatgaggggaaagaaaaccaacgaactactcccaggaattgacgcttctccc

SEQ ID NO: 253689 - DNA, 635 bp, Homo Sapiens
gtcactactccgagcctgtgacgtttgcggcagccaggccgtcgacgatgcccagtgaaactctctgggaaattgcaaaagctgaagtggaaaaaaggggaattaatggaagtgaaggtgatggagctgaaattgcagaaaaatttgttttcttcattggcagtaaaaatgggggaaagactactattattctaaggtgtcttgacagagatgaaccaccaaaaccaaccttagctttggaatatacatatggaagaagagcaaaagggcacaacacaccaaaagatatcgctcacttttgggaactcggtggaggaacctctttattggacttaatcagcatacccatcacaggtgacaccttacggacgttttctcttggtctcgttctggatctttcaaaacctaatgatctctggcccaccatggtctcttgcaagccacagtttctgaaatgagacagaagatctggaataatatgccgaaggatcatcctgatcatgaattaattgacccatttccggtacctctggtcataattggaagttatgatgtttttcaggattttgagtctgagaagagaaggtaatatgcgacacttcgatttgtgcacattatatggagcatcatttgtt

SEQ ID NO: 253690 - DNA, 493 bp, Homo Sapiens
  misc_feature (396)..(396): n is a, c, g, or t
  misc_feature (432)..(432): n is a, c, g, or t
  misc_feature (460)..(460): n is a, c, g, or t
gtcactactccgagcctgtgacgtttgcggcagccaggccgtcgacgatgcccagtgaaactctctgggaaattgcaaaagctgaagtggaaaaaaggggaattaatggaagtgaaggtgatggagctgaaattgcagaaaaatttgttttcttcattggcagtaaaaatgggggaaagactactattattctaaggtgtcttgacagagatgaaccaccaaaaccaaccttagctttggaatatacatatggaagaagagcaaaagggcacaacacaccgatatcgctcacttttgggaactcggtggaggaacctctttattggactttcagcatacccatcacaggtgacaccttacggacgttttctcttgttctcgttctggatctttcanaacctaatgatctctggcccaccatgggaaagacanatgctaaagcagtttctgtgagacagangatctggaataatatgccgaaggatcatcctgt

SEQ ID NO: 253691 - DNA, 804 bp, Homo Sapiens
ccgtgtaaagagtgtacggtccggattccgggatatcgtcgaccacgcgtcgcctgattctaggctggtcactactccgagcctgtgacgtttgcggcagccaggccgtcgacgatgcccagtgaaactctctgggaaattgcaaaagctgaagtggaaaaaaggggaattaatggaagtgaaggtgatggagctgaaattgcagaaaaatttgttttcttcattggcagtaaaaatgggggaaagactactattattctaaggtgtcttgacagagatgaaccaccaaaaccaaccttagctttggaatatacatatggaagaagagcaaaagggcacaacacaccaaaagatatcgctcacttttgggaactcggtggaggaacctctttattggacttaatcagcatacccatcacaggtgacaccttacggacgttttctcttgttctcgttctggatctttcaaaacctaatgatctctggcccaccatggaaaatctcttgcaagccacaaaaagccatgtagacaaagtgataatgaaactgggaaagacaaatgctaaagcagtttctgaaatgagacagaagatctggaataatatgccgaaggatcatcctgatcatgaattaattgacccatttccggtacctctggtcataattggaagtaaatatgatgtttttcacgatttgagtctgagaagagaaaggtaatatgcaagacacttcgatttgttgcacattattatggagcatcattaatgttaccagtaaataagaagctctattataaaaattacg

SEQ ID NO: 253692 - DNA, 452 bp, Homo Sapiens
aaagttaaatattagaacaaattctatgtcaagcaaattaagtaaacatctatgaagagactgaaaatggaatgtttttggaagtaaatagaaattgctaagcacctagcaataaagaattacaacaactcaaggaaatatgtttattagcaggatcatgaattaattgacccatttccggtacctctggtcataattggaagtaaatatgatgtttttcaggtaagctcttccgcttctagctgagtttgttgtacatatatgggctgtgctttttatgaggggaggtacaaaaataatatcaaaataagaaaaataattattgaaggaatcggttaagtcatgcatcttaaagattttggaaaagacatagttgggacagaaaaaaataggtaaagaaaataaatgcagtgattagaatggggataaggcagatttagaaaatgaatctt

SEQ ID NO: 253693 - DNA, 291 bp, Homo Sapiens
  misc_feature (271)..(271): n is a, c, g, or t
tggcataagcactgtgcccggcaagattcattttctaaatctgccttatccccattctaatcactgcatttattttctttacctatttttttctgtcccaactatgtcttttccaaaatctttaaggatgcatgactttaacccgattccttcaataattatttttcttattttggatattatttttggtaccctcccctcataaaaaggcacaggccatatatgggtaccaaccaaactcaggctaggaaggggggagggggcttacccnggaaaaccatccataattta

SEQ ID NO: 253694 - DNA, 960 bp, Homo Sapiens
ggcctctgtcccctgccccccaccaccagacaattccccagccatggtaagatgccttctgaacctgcaatccctttcgcaaaagaccccagtctttgctcctccaggctcccaaggccggctggatcttcattcacagctctatgtgttctgtctggggtggcttctccactgccttcttggcaaagaggttggtccagaaagctacttctttgtccttcagcttctgggccgcctgggtgttggcaccaatctgcagatacccttccttctggttgtactctggccagtggggcagcccttccccattggggtttccattgcgagcaaagttggcccagaaaaatggggccccaaagacggagaagagctcatccccgtggtctcctatcaccgtcttgggtttcatgtctgatgagaagcttggacggtactgaaactcatacatgtaggtgggtgctccagcatctctgtggttccgggccacaatcacagatgggacaccaaacatcacatctgctatcaagtccaggaacaggtctttctttttgacagtgtcgtctgttcctcctaagtatttctcagtggcttctggaatcagttccttagcaatgcaaacaaggggataggacttccacaggagtgacatggctgtcttctggtccagttgcccttcggagagtggatagctcatcaactgcattggaatcaaccagccaaactcctgcttgttaattccgaccatgtaggggacagtgtggaaattcctttcagcttgaagctcttcaggtgttttcagcagcagcatcccatcaatcacagtgcccagaaggggttgactctctctggggtctccctcagccaagggcttgacatcacctttcttcaccagaacagaagtgagggccacgccactctcagaaatggcccggtggaagaggttcttggccaatggtaaca

SEQ ID NO: 253695 - DNA, 2007 bp, Homo Sapiens
agggcggtaactctgggcggggctgggcgccagggctggacagcacagtccctctgagctgcacggagacctcgcaggcccccggaactgtcgcccttccaggatgtggctccctgctcttgtcctggccactctcgctgcttccgcggcttgggcagggcatccgtcctcgccacctgtggtggacaccgtgcatggcaaagtgctggggaagttcgtcagcttagaaggatttgcacagcctgtggccattttcctgggaatcccttttgccaagccgcctcttggacccctgaggtttactccaccgcagcctgcagaaccatggagctttgtgaagaatgccacctcgtaccctcctatgtgcacccaagatcccaaggcggggcagttactctcagagctatttacaaaccgaaaggagaacattcctctcaagctttctgaagactgtctttacctcaatatttacactcctgctgacttgaccaagaaaaacaggctgccggtgatggtgtggatccacggaggggggctgatggtgggtgcggcatcaacctatgatgggctggcccttgctgcccatgaaaacgtggtggtggtgaccattcaatatcgcctgggcatctggggattcttcagcacaggggatgaacacagccgggggaactggggtcacctggaccaggtggctgccctgcgctgggtccaggacaacattgccagctttggagggaacccaggctctgtgaccatctttggagagtcagcgggaggagaaagtgtctctgttcttgttttgtctccattggccaagaacctcttccaccgggccatttctgagagtggcgtggccctcacttctgttctggtgaagaaaggtgatgtcaagcccttggctgagcaaattgctatcactgctgggtgcaaaaccaccacctctgctgtcatggttcactgcctgcgacagaagacggaagaggagctcttggagacgacattgaaaatgaaattcttatctctggacttacagggagaccccagagagagtcaaccccttctgggcactgtgattgatgggatgctgctgctgaaaacacctgaagagcttcaagctgaaaggaatttccacactgtcccctacatggtcggaattaacaagcaggagtttggctggttgattccaatgcagttgatgagctatccactctccgaagggcaactggaccagaagacagccatgtcactcctgtggaagtcctatccccttgtttgcattgctaaggaactgattccagaagccactgagaaatacttaggaggaacagacgacactgtcaaaaagaaagacctgttcctggacttgatagcagatgtgatgtttggtgtcccatctgtgattgtggcccggaaccacagagatgctggagcacccacctacatgtatgagtttcagtaccgtccaagcttctcatcagacatgaaacccaagacggtgataggagaccacggggatgagctcttctccgtctttggggccccatttttaaaagagggtgcctcagaagaggagatcagacttagcaagatggtgatgaaattctgggccaactttgctcgcaatggaaaccccaatggggaagggctgccccactggccagagtacaaccagaaggaagggtatctgcagattggtgccaacacccaggcggcccagaagctgaaggacaaagaagtagctttctggaccaacctctttgccaagaaggcagtggagaagccaccccagacagaacacatagagctgtgaatgaagatccagccggccttgggagcctggaggagcaaagactggggtcttttgcgaaagggattgcaggttcagaaggcatcttaccatggctggggaattgtctggtggtggggggcaggggacagaggccatgaaggagcaagttttgtatttgtgacctcagctttgggaataaaggatctttttgaaggcca

SEQ ID NO: 253696 - DNA, 651 bp, Homo Sapiens
cacaagctgagcgacacttccatgtatatatgaagggacaggtctcatacctgatatgtgggccacagagagttcacccaaacaccgggacgttataatcacaggcccaagacatcagaacaagattcatcataatgaggctctgactcctcttgatccttgcttatgcctacctttttcacttggcaggataatgctacattgccggaattgcacaatcagtagcttctacagagacttgatgaaaaaaacggatctgtcatgccaaacctagtcatgggatggtaggtaacagaaatgccaccttctagccgaacaggaaataatctgcacagttgctaatgcttcttgttgcacatggataaaccgaacaaacaggctgcttggctaaaacaggtagattccccatctggctcattatttgatctaaatgatttcagttggtttggttcatggggaccctggctaaggggcatactccaaactcttggtattatcatcctcatagtcattagccacaacagtagtctccctggtgcactgtatcctctcaaaaaagtcttaaatgtgcatatgcagccatctgctgaatggtaaatgttctctctctggctggaataatggaaactccaagaaatgcatgataatgag

SEQ ID NO: 253697 - DNA, 1902 bp, Homo Sapiens
ctgatttcaaaccactccttttcgatctctgagggagacattgcacctggccactgcagcccagagcaggtctggccacggccatgagcatgctgagccatcatgcccaccgtggatgacattctggagcaggttggggagtctggctggttccagaagcaagccttcctcatcttatgcctgctgtcggctgcctttgcgcccatctgtgtgggcatcgtcttcctgggtttcacacctgaccaccactgccagagtcctggggtggctgagctgagccagcgctgtggctggagccctgcggaggagctgaactatacagtgccaggcctggggcccgcgggcgaggccttccttggccagtgcaggcgctatgaagtggactggaaccagagcgccctcagctgtgtagaccccctggctagcctggccaccaacaggagccacctgccgctgggtccctgccaggatggctgggtgtatgacacgcccggctcttccatcgtcactgagttcaacctggtgtgtgctgactcctggaagctggacctctttcagtcctgtttgaatgcgggcttcttctttggctctctcggtgttggctactttgcagacaggtttggccgtaagctgtgtctcctgggaactgtgctggtcaacgcggtgtcgggcgtgctcatggccttctcgcccaactacatgtccatgctgctcttccgcctgctgcagggcctggtcagcaagggcaactggatggctggctacaccctaatcacagaatttgttggctcgggctccagaagaacggtggcgatcatgtaccagatggccttcacggtggggctggtggcgcttaccgggctggcctacgccctgcctcactggcgctggctgcagctggcagtctccctgcccaccttcctcttcctgctctactactggtgtgtgccggagtcccctcggtggctgttatcacaaaaaagaaacactgaagcaataaagataatggaccacatcgctcaaaagaatgggaagttgcctcctgctgatttaaagatgctttccctcgaagaggatgtcaccgaaaagctgagcccttcatttgcagacctgttccgcacgctgcgcctgaggaagcgcaccttcatcctgatgtacctgtggttcacggactctgtgctctatcaggggctcatcctgcacatgggcgccaccagcgggaacctctacctggatttcctttactccgctctggtcgaaatcccgggggccttcatagccctcatcaccattgaccgcgtgggccgcatctaccccatggccgtgtcaaatttgttggcgggggcagcctgcctcgtcatgatttttatctcacctgacctgcactggttaaacatcataatcatgtgtgttggccgaatgggaatcaccattgcaatacaaatgatctgcctggtgaatgctgagctgtaccccacattcgtcaggaacctcggagtgatggtgtgttcctccctgtgtgacataggtgggataatcacccccttcatagtcttcaggctgagggaggtctggcaagccttgcccctcattttgtttgcggtgttgggcctgcttgccgcgggagtgacgctacttcttccagagaccaagggggtcgctttgccagagaccatgaaggacgccgagaaccttgggagaaaagcaaagcccaaagaaaacacgatttaccttaaggtccaaacctcagaaccctcgggcacctgagagagatgttttgcggcgatgtcgtgttggagggatgaagatggagttatcctctgcagaaattcctagacgccttcacttctctgtattcttcctcatacttgcctacccccaaattaatatcagtcctaaaga

SEQ ID NO: 253698 - DNA, 1557 bp, Homo Sapiens
  misc_feature (1498)..(1498): n is a, c, g, or t
  misc_feature (1510)..(1510): n is a, c, g, or t
caccttttgctgtgatggccgcgtcatgatggcccggcaaaagggcattttctacctgacccttttcctcatcctggggacatgtacactcttcttcgcctttgagtgccgctacctggctgttcagctgtctcctgccatccctgtatttgctgccatgctcttccttttctccatggctacactgttgaggaccagcttcagtgaccctggagtgattcctcgggcgctaccagatgaagcagctttcatagaaatggagatagaagctaccaatggtgcggtgccccagggccagcgaccaccgcctcgtatcaagaatttccagataaacaaccagatagtgaaactggaaatactgttacacatgcaagatcttccggcctccccgggcctcccattgcagcatctgtgacaactgtgtggagcgcttcgaccatcactgcccctgggtggggaattgtgttggaaagaggaactaccgctacttctacctcttcatcctttctctctccctcctcacaatctatgtcttcgccttcaacatcgtctatgtggccctcaaatctttgaaaattggcttcttggagacattgaaagaaactcctggaactgttctagaagtcctcatttgcttctttacactctggtccgtcgtgggactgactggatttcatactttcctcgtggctctcaaccagacaaccaatgaagacatcaaaggatcatggacagggaaagaatcgcgtccagaatccctacagccatggcaaatattgtggaagaactgctgtgaagtgctgtgtggccccttgccccccagtgtgctggatcgaaggggtattttgccactggaggaaagtggaagtcgacctcccagtactcaagagaccagtagcagcctcttgccacagagcccagcccccacagaacacctgaactcaaatgagatgccggaggacagcagcactcccgaagagatgccacctccagagcccccagagccaccacaggaggcagctgaagctgagaagtagcctatctatggaagagacttttgtttgtgtttaattagggctatgagagatttcaggtgagaagttcctgagacagagagcaagtaagctgtcccttttctgtttttctttggtctttagtcacccagttgcacactggcattttcttgctgcaagcttttttaaatttctgaactcaaggcagtggcagaagatgtcagtcacctctgataactggaaaaatgggtctcttgggccctggcactggttctccatggcctcagccacagggtccccttggaccccctctcttccctccagatcccagccctcctgcttggggtcactggtctcattctggggctaaaagtttttgagactggctcaaatcctcccaagctgctgcacgtgcttgagttccagagggcagttcacagaggacctttgggccagggggattcctaactgggttcttgggggtntttcagggattnaaggagggagggagaatggggttcagaagattttcctggggccacca

SEQ ID NO: 253699 - DNA, 376 bp, Homo Sapiens
tcccccgggctgcaggaattcggcacagtcttggaacgggctgctccaggtctgtgttcgagggcttctggctccatgtcagtgttgtgaaactctccaggggtggcctggaggccaagcagatgtggcagttctgcagcagaagcatctgccactgcctttggcttggggacatggcaggtgaccggcatctggtgtgcgtaactctgggcccttgaccttgctgccatctgcttggccttatgctctgtcactgtaggtccagcgtcggaagtggaagctgcctgattgcagagttggagtccagagatctggctgagcctgtccctctgccagccgagtgagtgcatggctgcccccctagggcctgttttct

SEQ ID NO: 253700 - DNA, 1024 bp, Homo Sapiens
gctgggtggcgaattcggcacgagggcggtggctgcgttgcagctggggctgcgggcggcggggctgggacgggccccggccagcgccgcctggaggagcgtcctcagggtctccccgcgcccaggggtggcctggaggccaagcagatgtggcagttctgcagcagaagcatctgccacaaaagcggaagatgactcctttcttcagtgggtcctgctcctcatccctgtgactgcctttggcttggggacatggcaggtccagcgtcggaagtggaagctgaacctgattgcagagttggagtccagagttctggctgagcctgtccctctgccagccgacccaatggaactgaaaaatctggagtataggccagtgaaggtcagggggtgctttgaccattccaaggagctgtatatgatgccccggaccatggtggaccctgtccgggaggcccgggagggcggcctcatctcctcctcaactcagagtggggcctatgtggtcactcccttccactgcaccgacctgggagtcaccatcctggtaaatagagggttcgttcccaggaagaaagtgaatcctgaaacccggcagaaaggccagattgagggagaagtggacctcattgggatggtgaggctgacagaaaccaggcagccttttgtccctgagaacaatccagaaaggaaccactggcattatcgagacctggaagctatggccagaatcacaggcgcagagcccatcttcattgatgccaacttccagagcacagtccctggaggacccattggagggcaaaccagagttactctgaggaacgagcatctgcagtacatcgtgacctggtatggactctctgcagctacatcctacctgtggtttaagaaattcctacgtgggacacctggtgtgtgacagatcagctgctgaagccctgtccctggataatgcagtatttcaagactgcctttatgctggatcatgtgctactggtataaagttctggccttctacctt

SEQ ID NO: 253701 - DNA, 149 bp, Homo Sapiens
gccacaagtcctggaaaaagacagcaagtcataaaatatctaacaagcatctaccctagacaatgcatgccacagtgaaagacaggcctggggggacaatgacaatgtaagataatcacagaaacagggccgggcatggtggctcactc

SEQ ID NO: 253702 - DNA, 1001 bp, Homo Sapiens
  misc_feature (765)..(765): n is a, c, g, or t
  misc_feature (913)..(913): n is a, c, g, or t
ggatcaggggaaggtcaagcaagaacctgggactgaagatgaaatatgtagcttttcaggaggtgtaaaacaagaaaaaacagaggatggcaggaggagtgcttgcatgttgagcagtcctgagagtagcttgacaccacctctctcaaccaacctgcatctagaaagtgaattggatgcattggcaagcctggaaaaccatgtgaaaactgaacctgcagatatgaatgaaagctgcaaacagtcagggctcagcagccttgttaatggaaagtccccaattcgaagcctcatgcacaggtcggcaaggattggaggagatggcaacaataaagatgatgacccaaatgaagactggtgtgctgtctgccaaaacggaggagatctcttgtgctgcgaaaaatgtccaaagggctttcatctaacttgtcatgttccaacactacttagctttccaagggggggactggatatgcacattttggagagatattggaaagccagaagttggaatatgatttggggataattttgcaacataggaaagaaggggaaaactgcgcagggggttaagccccgtggaccaaaggaaatgtgaacgtcttctgctttacctctattgccatgaattaagtattgaattccaggagcctgttcctgcttcgataccaaactactataaaattataaagaaaccaatggatttatccaccgtgaaaaagaagcttcagaacattcccaacactaccaaatcccggatgactntgtggccgatgtccgtttgatcttcaagaactgtgaaagggttaatgaaatgatgaaagttgttcaagtttatgcagacacacaagagattaaattgaaggctgattcagaagtagctcaggcagggaaagcagttgcattgtacttntgagataaactcacagagatctactcagacaggaacctcgcacctttggcagagtttgagcagaagcgcttggcagatgagagaccgt

SEQ ID NO: 253703 - DNA, 615 bp, Homo Sapiens
tacaaaaaaagaaagaaaactacaagggaagccagacgacccaatatatataaatcctataacctcatattagaataaatagactcgctcataaataaagggcccattaatttatgggtggggtttgccaacgccttggcctacttgctttgtgaagggtaatttgagcaccaggattccccctcagaagaggttccagtcaccagaagacactgaaacctcagctctataaaacctggagggacagtgaaggcctattattcacagcacataagattctaggagacagatttggacattttcccccaagaacctcggaagacactccatcccccaccatcatgaatactgagcttgcacacttggggacctgccccagcgtgaggtcagggaagtgggttaatgcattctggaaaaggggattacttgattactgtcccccaagtccccacagccctggggtccatgcagagaccacagtgcaagagacgtggctccccgttgagatccagctgatctgaccgggcagtcactttgtcactcagaaacagagatgcgattgaagatggggagtcgccggggggctgccacggtctggggtggtgcaaaaactcc

SEQ ID NO: 253704 - DNA, 1081 bp, Homo Sapiens
  misc_feature (16)..(16): n is a, c, g, or t
  misc_feature (28)..(28): n is a, c, g, or t
  misc_feature (50)..(50): n is a, c, g, or t
  misc_feature (53)..(53): n is a, c, g, or t
  misc_feature (77)..(77): n is a, c, g, or t
  misc_feature (97)..(97): n is a, c, g, or t
  misc_feature (179)..(179): n is a, c, g, or t
  misc_feature (194)..(194): n is a, c, g, or t
caattatcaaaacccnagaaaaacgtgngccccggccaccctcctttttngcnaaaaatcagttttcggcttccttntgccgcggacctaacaacancaaccaggcttgccggcccttccctgtcctccagctccttttcgccctccagctccccaccaccacctgggaccttccactntcaccctctgccttntctgctgcccctggcacccccctggctcgaagagaccccaccccagtctgttgcccctcctgccgaagggccactcctatcagcgtctgggggcccttgggtggcctggttcggaccccctctgtacagtccctgggatccgaccctgatgaatatgccagcagcggcagcagcctggggggctctgactctcccgtcttcgaggcgggagattttgcaccaccccagcccgtggcagccccccggcgactccccatcttcaatcgcatctctgtttctgagtgacaaagtgactgcccggtcagatcagctggatctcagcggggagccacgtatcttgcactgtggtctctgcatggaccccagggctgtggggacttgggggacagtaatcaagtaatccccttttccagaatgcattaacccactcccctgacctcacgctggggcaggtccccaagtgtgcaagctcagtattcatgatggtgggggatggagtgtcttccgaggttcttgggggaaaaaaaattgtagcatatttaagggaggcaatgaaccctctcccccacctcttccctgcccaaatctgtctcctagaatcttatgtgctgtgaataataggccttcactgcccctccagtttttatagacctgaggttccagtgtctcctggtaactggaacgtctcctgagggggaatcctggtgctcaaattaccctccaaaagcaagtagccaaacccgttgccaaaccccacccataaatcaatgggccctttatttatgacgactttatttattctaatatgattttatagtatttatatatattgggtcgtctgcttcccttgtatttttcttcctttttttgtaatattgaaaacgacg

SEQ ID NO: 253705 - DNA, 950 bp, Homo Sapiens
  misc_feature (892)..(892): n is a, c, g, or t
  misc_feature (898)..(898): n is a, c, g, or t
  misc_feature (901)..(901): n is a, c, g, or t
  misc_feature (905)..(905): n is a, c, g, or t
  misc_feature (916)..(916): n is a, c, g, or t
  misc_feature (921)..(921): n is a, c, g, or t
  misc_feature (933)..(933): n is a, c, g, or t
  misc_feature (936)..(936): n is a, c, g, or t
  misc_feature (941)..(941): n is a, c, g, or t
  misc_feature (945)..(945): n is a, c, g, or t
agcgctcccactctcggccgacacccctcatggccaaccgttacaccatggatctgactgccatctacgagagcctcctgtcgctgagccctgacgtgcccgtgccatccgaccatggagggactgagtccagcccaggctggggctcctcgggaccctggagcctgagcccctccgactccagcccgtctggggtcacctcccgcctgcctggccgctccaccagcctagtggagggccgcagctgtggctgggtgcccccaccccctggcttcgcaccgctggctccccgcctgggccctgagctgtcaccctcacccacttcgcccactgcaacctccaccaccccctcgcgctacaagactgagctatgtcggaccttctcagagagtgggcgctgccgctacggggccaagtgccagtttgcccatggcctgggcgagctgcgccaggccaatcgccaccccaaatacaagacggaactctgtcacaagttctacctccagggccgctgcccctacggctctcgctgccacttcatccacaaccctagcgaagacctggcggccccgggccaccctcctgtgcttcgccagagcatcagcttctccggcctgccctctggccgccggacctcaccaccaccaccaggcctggccggcccttccctgtcctccagctccttctcgccctccagctccccaccaccacctggggaccttccactgtcaccctctgccttctctgctgcccctggcacccccctggctcgaagagaccccaccccagtctgttgcccctcctgccgaagggccactcctatcagcgtctgggggcccttgggtggcctggttcggacccctctgtacagtcctgggatcgacctgatganatgcanagngganagctggggggntgatntccgtctcgagnggnttttnacanccacc

SEQ ID NO: 253706 - DNA, 507 bp, Homo Sapiens
gacctggcgcccgtgccaccctcctgcgttgccagagcatcagcttctcggcctgccctctggccgccggacctctcccccacctcttccctgcccaaatctgtctcctagaatcttatgtgctgtgaataataggccttcactgcccctccagtttttatagacctgaggttccagtgtctcctggtaactggaacctctcctgagggggaatcctggtgctcaaattaccctccaaaagcaagtagccaaagccgttgccaaaccccacccataaatcaatgggccctttatttatgacgactttatttattctaatatgattttatagtatttatatatattgggtcgtctgcttcccttgtatttttcttcctttttttgtaatattgaaaacgacgatataattattataagtagactataatatatttagtaatatatattattaccttaaaagtctatttttgtgttttgggcatttttaaataaacaatctgagtgtaa

SEQ ID NO: 253707 - DNA, 618 bp, Homo Sapiens
  misc_feature (576)..(576): n is a, c, g, or t
  misc_feature (582)..(582): n is a, c, g, or t
ggtggaccctgccggatcttgcgaagttgccaaggggtcaatgcccaggcgcgagtaattactgcattaatcccagaccccatcccgattcttgtcggggactgaagggtctccgcctggggctccgaagtcgatcatttcacattcacgcttcccaaaacgagacacaataaattccgctctggcctggagccttgaattcccgttacggtcccgccccgccgaggcccgtcgccttgtttctctgagtcagtttccccaacggtgaaagggaggacgctgacacctgcctgcccctccctatctgccgaggccgtggagatcagcagcagcggcgctctgggcttagaagaggaaaagggctgcgtgagcccaagagcttgcatcggaaggctccaggaagagcatctgcaaaaaagaggattccacgggatgacccccgacaactcttggaattctaaaatcctatacccttgcccgcacccattcgtgtagtgaaggggcgcgcgttaggcgcagaggccacacgctccgcaagtgaacccgggcacctctctgaacctattccgggctganggcggngagcgggtggctgcccgatttaaaaacatgtatatg

SEQ ID NO: 253708 - DNA, 615 bp, Homo Sapiens
  misc_feature (76)..(76): n is a, c, g, or t
ctcagaatattaaagggaacattaatcatctgaaaaggtcgtgagcccaacagccctaatgaggtagataccatanagttcatgcaactcagactactatagaagaaaatcttaaacaatctaacaagcttgttaacaatatttggtttctcattcatccaacaaataaatattgaacagttatgttccaggcatgcggttaagagctagggacacactggtaaacaagcatacatggtctcttacattcttttgtggggaacaaataaagcaattacatattgtggtaagacctatgacacaaacaaaaggctgagatagagaatatgggcacaaggatctactacagacaggatgaataagaaaggtctctctgaaatgacatttaaactaagcctgacagcaataggagatagccaagtcaaaacaatgaggaagaaagccccagtggagagaaaagtattgcaaagtgtgttaaggcacaaaagtttggtatgcatctgaaagcagcatgtgaaagactagtttcagtggaatccagcgagcaaaaaagaatgtcagagaatgaaactgaaagattttaaggaaggaatccgtgccgaattcctgcagccc

SEQ ID NO: 253709 - DNA, 818 bp, Homo Sapiens
  misc_feature (693)..(693): n is a, c, g, or t
  misc_feature (725)..(725): n is a, c, g, or t
  misc_feature (749)..(749): n is a, c, g, or t
  misc_feature (767)..(767): n is a, c, g, or t
  misc_feature (796)..(796): n is a, c, g, or t
ctgcaggaattcggcacggattccttcctttctttcagtttcattctctgacattcttttttgctcgctggattccactgaaactagtctttcacatgctgctttcagatgcataccaaacttttgtgccttaacacactttgcaatacttttctctccactggggctttcttcctcattgttttgacttggctatctcctattgctgtcaggcttagtttaaatgtcatttcagagagacctttcttattcatcctgtctgtagtagatccttgtgcccatattctctatctcagccttttgtttgtgtcataggtcttaccacaatatgtaattgctttatttgttccccacaccgcatgcctggaacataactgttcaatatttatttgttggatgaatgagaaaccaaatattgttaacaagcttgttagattgtttaagattttcttctatagtagtctgagttgcatgaactttatgatatctacctcattagggctgtcgggctcacgaccttttcagatgattaatgttcccaaaatttaatattcaaataagagaaaaacaatacaaaagcaccattggggttgaggcatgggtgggctccatgcctgttaatcctaggcactttgggggaaggctggagggtgggacggatccactttgaggttcaggaagttttgaggaccngggggcccgggccaccagtgggcttcacggcntgttaattccccagccactttttngaggagggcccgagtttnggggagggttccacggaggttccaggganttccgagaccttcctggggttt

SEQ ID NO: 253710 - DNA, 742 bp, Homo Sapiens
ccggcactcgatggtgacccggcttgcacgacagctgaccttctaccctgacgatttcctgagagctctccttgaagatctggaggactaaatcagccccaatctccttggctttggacaatcgggtagcagacagatcagtcaccactacttgagctgctcccattgctttggccacgagcaaagtgaccatcccgattggcccagctccacacacaaggaccttgtgtcacagggtaactccgcctctcctgcaggcatggatccccacagaaagtggctcgatcagggcgccttcctcaaaggtgacattgtcaggaagcttgtaacaaaaggctgcattgtgcttatagaaccggcagaggttcccgtcatcggggggcgtggcacagactcggggagcaccaggctcgatggcaacacgatcacctggttttaggtgctttaccgatgatcccactttttcgactgttcccgaagcttcatgtcccagcaccatgggctttttcacaataaaattcccaattcgaccatactcccagtagtggacatctgagccacagattccaacagaatgcatcctcagcaagacctcatttgggcctggttcagggataggatagttctccaggcgcaagtcccccggtccgtgcaccaccagggaaaggttgttgggcttggccgccgccgccatggagctcttttggctctggagtgcggcctggaaggcgcgggacgtttg

SEQ ID NO: 253711 - DNA, 959 bp, Homo Sapiens
  misc_feature (899)..(899): n is a, c, g, or t
  misc_feature (906)..(906): n is a, c, g, or t
  misc_feature (936)..(936): n is a, c, g, or t
ttgggtagcgccaccagagcgaccaaactgtcccgcgccttccaggccgcactccagagccaaaagagctccatggcggcggcggccaagcccaacaacctttccctggtggtgcacggaccgggggacttgcgcctggagaactatcctatccctgaaccaggcccaaatgaggtcttgctgaggatgcattctgttggaatctgtggctcagatgtccactactgggagtatggtcgaattgggaattttattgtgaaaaagcccatggtgctgggacatgaagcttcgggaacagtcgaaaaagtgggatcatcggtaaagcacctaaaaccaggtgatcgtgttgccatcgagcctggtgctccccgagaaaatgatgaattctgcaagatgggccgatacaatctgtcaccttccatcttcttctgtgccacgccccccgatgacgggaacctctgccggttctataagcacaatgcagccttttgttacaagcttcctgacaatgtcacctttgaggaaggcgccctgatcgagccactttctgtggggatccatgcctgcaggagaggcggagttaccctgggacacaaggtccttgtgtgtggagctgggccaatcggggatggtcactttgctcgtggccaaagcaatgggagcagctcaagtagtggtgactgatctgtctgctacccgattgtccaaagccaaggagattggggctgatttagtcctccagatctccaaggagagccctcaggaaatcgccagggaaagtagaaggtctgctggggtgcaagccggaagtcaccatcgagtgcacgggggcagaggcctccatccaggcgggcatctacgccactcgctctggtggggaccctcgtgcttgtgggggntgggctnttgagatgacccacccttaccccttacttncattgcagcccttcccggaagtt

SEQ ID NO: 253712 - DNA, 279 bp, Homo Sapiens
aaggtttaacatcagtctttactgctatttttgcaaaatccagcatacattaaatatgagacatggcagaagaaaaaagacatgaaatatagtaaagagaaatagtaaatacaaggagaaacacagaagacctaaccattgaaatttgcaggcaagtgttttaaatgactattataaatataataaagatttttttatattttaaatataagtcgaatcaatgaactcagaaatttctgtaaagaaagtggacactctaggccagacatggtggctcat

SEQ ID NO: 253713 - DNA, 414 bp, Homo Sapiens
gagacccaaatgtctcagaatgtatgtcccagaaacctgtggctgcttcaaccattgacagttttgctgctgctggcttctgcagacagtcaagctgcagctcccccaaaggctgtgctgaaacttgagcccccgtggatcaacgtgctccagggaggactctgtgactctgacatgccagggggctccgcagcccggaggagcgactccattcagtggttccacaatggggaatctcattcccacccacacgcagcccagcttacaggttcaaggccaacaacaattgacagcggggagtacacgttgccagactggccagaccagcctcagcgaccctgtgcatctgactgtgctttccgtggctggtgctccagacccctcacctggagttccaggagggagccatctgcc

SEQ ID NO: 253714 - DNA, 744 bp, Homo Sapiens
  misc_feature (698)..(698): n is a, c, g, or t
  misc_feature (714)..(714): n is a, c, g, or t
gtagaatccgccaagctttgagagaaggctgtgactgctgtgctctgggcgccagctcgctccagggagtcatgggaatcctgtcattcttacctgtccttgccactgagagtgactcggctgactgcaagtccccccagccttggggtcatatgcttctgtggacagctgtgctattcctggctcctgttgctgggacacctgcagctcccccaaaggctgtgctgaaactcgagccccagtggatcaacgtgctccaggaggactctgtgactctgacatgccgggggactcacagccctgagagcgactccattcagtggttccacaatgggaatctcattcccacccacacgcagcccagctacaggttcaaggccaacaacaatgacagcggggagtacacgtgccagactggccagaccagcctcagcgaccctgtgcatctgactgtgctttctgagttggctggtgctccagacccctcacctggagttccaggagggagaaaccatcgtgcttgaggtgccacagctgggaaggacaagcctctggtcaaggtcacattcttccagaatggaaaatccaagaaattttcccgttcggatcccaacttctccatcccacaagcaaaccacagtcacagtggtgattaccacttgcacagggaaacataggctacacgctgtactcatccnaagcttgtggaccatnaatggtccaagcttccagtttttcaccgat

SEQ ID NO: 253715 - DNA, 577 bp, Homo Sapiens
  misc_feature (384)..(384): n is a, c, g, or t
  misc_feature (418)..(418): n is a, c, g, or t
  misc_feature (439)..(439): n is a, c, g, or t
  misc_feature (457)..(457): n is a, c, g, or t
  misc_feature (502)..(502): n is a, c, g, or t
  misc_feature (514)..(514): n is a, c, g, or t
  misc_feature (524)..(524): n is a, c, g, or t
  misc_feature (549)..(549): n is a, c, g, or t
  misc_feature (561)..(561): n is a, c, g, or t
ggtagaatccgccaagctttgagagaaggctgtgactgctgtgctctgggcgccactcgctccagggagtgatgggaatcctgtcattcttacctgtccttgccactgagagtgactgggctgactgcaagtccccccagccttggggtcatatgcttctgtggacagctgtgctattcctggctcctgttgctgggacacctgcagctcccccaaaggctgtgctgaaactcgagccccagtggatcaacgtgctccaggaggactctgtgactctggacatgccgggggactcacagccctggagagcgactccattcagtggttccacaatggggaatctcattcccacccacacgcagcccagctacaggtttcaagggncaacaacaatggacagcggggagttacacgtggncagattgggccagaaccaggnttcagcgaacctgtggcnttggaatgtggttttttgagtggggtggtggttccagaacccttnaattggaatttncaggaagggngaaaacatcgtggtgaggttggcanagtgggaagganaagcttttggttaagg

SEQ ID NO: 253716 - DNA, 1847 bp, Homo Sapiens
  misc_feature (1695)..(1695): n is a, c, g, or t
ggtgtgctgggtgcctttgagagcagcttctggcacatgcaggagaagctgggcattgtgcagggcatcgtaggtgcccgcaacacctcagccgcctccactgcacagcttgtggaggccacagaggagctgcggcgtgaaattggggaggccactgagcacctgactcagctcgaggcagacctgacagatgtgcaagatgagaacttcaatgccaaccatgcactaagtggtctggagcgagataggcttgcacttaatctcacactgcggcagctcgaccagcatcttgacttgctcaaacattccttcctgggtgcctatgacagcatccggcatgcccatagccagtctgcagaggcagaacgtcgtgccaatacctcagccctggcagtacctagccctgtgagcaactcggcaagtgctcggcatcggacagaggcactgatggatgctcagaaggaggacttcaacagcaaacacatggccaaccagcgggcacttggcaagctctctgcccatacccacaccctgagcctgacagacataaatgagctggtgtgtggggcaccaggggatgcaccctgtgctacaagcccttgtgggggtgccggctgtcgagatgaggatgggcagccgcgctgtgggggcctcagctgcaatggggcagcggctacagaagacctagcactgggccgggcccggcacacacaggcagagctgcagcgggcactggcagaaggtggtagcatcctcagcagagtggctgagactcgtcggcaggcaagcgaggcacagcagcgggcccaggcagccctggacaaggctaatgcttccaggggacaggtggaacaggccaaccaggaacttcaagaacttatccagagtgtgaaggacttcctcaaccaggagggggctgatcctgatagcattgaaatggtggccacacgggtgctagagctctccatcccagcttcagctgagcagatccagcacctggcgggtgcgattgcagagcgagtccggagcctggcagatgtggatgcgatcctggcacgtactgtaggagatgtgcgtcgtgccgagcagctactgcaggatgcacggcgggcaaggagctgggctgaggatgagaaacagaaggcagagacagtacaggcagcactggaggaggcccagcgggcacagggtattgcccagggtgccatccggggggcagtggctgacacacgggacacagagcagaccctgtaccaggtacaggagaggatggcaggtgcagagcgggcactgagctctgcaggtgaaagggctcggcagttggatgctctcctggaggctctgaaattgaaacgggcaggaaatagtctggcagcctctacagcagaagaaacggcaggcagtgcccagggtcgtgcccaggaggctgagcagctgctacgcggtcctctgggtgatcagtaccagacggtgaaggccctagctgagcgcaaggcccaaaggtgtgctggctgcacaggcaagggcagaacaactgcggggatgaggctcgggacctgttgcaagccgctcaggacaagctgcagcggctacaggaattggaaggcacctatgaggaaaatgagcgggcactggagagtaaggcagcccagttggacgggttggaggccaggatgcgcagcgtgcttcaagccnatcaacttgcaggtgcagatctacaacacctgccagtgacccctgcccaaggcctaccccagttcctagcactgccccacatgcatgtctgcctatgcactgaagagctcgtggcccggcagggcccccaataaaccagtgtgaaccccaaa

SEQ ID NO: 253717 - DNA, 816 bp, Homo Sapiens
aaaaactgcttctctgcatggggtttatgagttgagacagacatttatgtgaaagagataacaacagagggaggagcaagtcttcaatatcaggttatcctgaatacatgtctaacaattttccttgcaacgttagctgttgtttttcactgtttccaaaggatcaaaattgcttcagaaattggagacatatttgatttaaaaggaaaaacttgaacaaatggacaatatgtctattacgaatacaccaacaagtaatgatgcctgtctgagcattgtgcatagtttgatgtgccatagacaaggtggagagagtgaaacatttgcaaaaagagcaattgaaagtttggtaaagaagctgaaggagaaaaaagatgaattggattctttaataacagctataactacaaatggagctcatcctagtaaatgtgttaccatacagagaacattggatgggaggcttcaggtggctggtcggaaaggatttcctcatgtgatctatgcccgtctctggaggtggcctgatcttcacaaaaatgagactcatgtgtaaatattgtcagtatgcgtttgactttggaattgatctctcaagattaacactgcagagtaatgctccatcaagtatgaaggtgaaggatgaatatgtgcatgactttgagggacagccatcggtgtccactgaaggacattcaattcccatccagcatccaccaagtaatcgtgcatcgacagagacatacagcaccccaactctgttagccccatctgaggctaatgctaccagaactgtcaacttttcccttcctgtgg

SEQ ID NO: 253718 - DNA, 1253 bp, Homo Sapiens
  misc_feature (72)..(98): n is a, c, g, or t
  misc_feature (393)..(417): n is a, c, g, or t
  misc_feature (1165)..(1165): n is a, c, g, or t
  misc_feature (1213)..(1213): n is a, c, g, or t
  misc_feature (1235)..(1235): n is a, c, g, or t
gtacggtccgcgaatccttgggatatcgtcgacccacgcgtcgcctggatgacagagtgagacttcatctcnnnnnnnnnnnnnnnnnnnnnnnnnnncaacccgggtagctttggtcccttccccactgacaaacttatcaaatccagaagcttcagaagtttcgtctctaactaatttttctcctgaacaaaattacccaagtcaaaacaaaatgtatttttagaattacggcagcatacgacctgaatttggtgagtttcgaggctttatctcaaatcaccattctccctaaaaacggcctcttcctccttacaaacgctggtgccaacttgatgaaaaagccaaatgcaccaggcaggtcactttcccattacactgattccacaattnnnnnnnnnnnnnnnnnnnnnnnnnctcattgagatagctacagttctataggttaatttaaagcctcctttttctactcatttttgaaagcaaaattacattttactattttacataaccagtgaaaagacgttgaaagcctacagctcactgttttgggtgctctggaaatgttgagggtgggtttttaaccagtgatttttaacgtgcagtgaatttgttagacttttaaacaccagctaaggtagtcaaactgtgatccccattaaaaatcaaggaattaggggtcgggggagggtttaggagtgatccagaatgacctcccagaattactgtgcgtacaactttatttttcagagtttccattgcaatggtaagagttttatgaaagacagttttaaaacttattctgagttaaatattaatactttaaaaaaattattgtactaggacttatcgcagccttttgaaagtagcagaagtttcatcataccacatatataacagagcatttttctataatcaggcaccttttgctgcttttgagtaagactgttttcctgtttaagtgttgcatcgccagacatatctattctctcctctcgattgtagcatagcctgacagctctagatacagcatttctatgatgaaaaatgagtatccatcaggaaatctagaagactagccgtgttttctcagactccacctttgtttgcactctgttgcctgtgaggagctttctggcatgtgattatttacttcaaaactagngttccaaggcacctacattaattattttatattgtgtgcaggataggnattatccttttaatggtcaggntatggattacactcgcac

SEQ ID NO: 253719 - DNA, 425 bp, Homo Sapiens
gagtcatctgcagaactggttgctgaaagcatgggagaggagtgcagaggtattccagggtctgtgttcaagaggaccagcccgttcctcacccatcaagtgttcaacagctaccactctgaaacaaacattgtccggtacatgaagaaactggtgaaactgaacagttcgtctgaactcgcacctatcacatggaaagaatttgcaaacatccacccctttgtgcctctggatcaagctcaaggatatcagcagcttttccgagagcttgagaaggatttgtgtgaactcacaggttatgaccaggtctgtttccagccaaacagcggagcccagggagaatatgctggactggccactatccgagcctacttaaaccagaaaggagaggggcacagaacggtttgcctcattccgaaatcagc

SEQ ID NO: 253720 - DNA, 409 bp, Homo Sapiens
cgatgtatcaaggagccaaatgaaccttgaccattagaggatcatatggaagaatgaagcctggcagtgaattaataaagctacagactccatgaaaactacaggaattcctggccttaaataatttattacttaccaatgtagctcaagatttaaaggattcaggatacaagtggcttagtttaaagcattaagattaaagaaatactaacttagccgggagtggtggctcacgcgtgtaatcccagcagcactatgggaggctgaggcaggcagatcacatgaggtcaggagttcatgaccagcgtgatcaacatggagaaataccgtctgtactaaaaatacaaaattagccgggctaattacatggtggcacatgcctgtaatccgagctactcaggaggatgag

SEQ ID NO: 253721 - DNA, 965 bp, Homo Sapiens
  misc_feature (889)..(889): n is a, c, g, or t
gggggatcatggcgactttggtcgaactgccggactcggtcctgctcgagatcttctcttacctcccggtacgggaccggatccgcatctccagggtctgtcaccgctggaagaggctggtggacgaccggtggctgtggcgacatgtcgacctgacgctctacacgatgcgacctgtcatgtggcacctccttcgaaggtacatggcatcccggctccattccctgcggatgggtggctacctgttctctggctcccaggccccccagttgtcccctgctctgttgagagccctgggccagaagtgccccaacctggcgcctctgcctgcacgtggccgacctgagcatggtgcccatcaccagcctgcccagcaccttgaggaccctggagctgcacagctgcgagatctccatggcctggctccacaagcagcaggaccccaccgtgctgcccctgcttgaatgcatcgtgctggaccgcgtccccgccttccgtgacgagcacctgcagggcctgacgcgcttccgggccttgcgctcgctggtgctgggtggtacctaccgtgtgaccgagacagggctggatgctggcctgcaggagctcagctatctgcagaggctttgaggtgctgggctgcaccctgtctgccgacagcaccctgctggccatcagccgccaccctccgagatgtgcgcaagatccggctgaccgtgagggcctctctgcccctggcctggctgtgctggagggaatgccggccctgggagagtctgtgcctgcagggtccccttcgtcaccccagaaatgccctcccccactgaaatcctctcctcctgcctcactatgcccaagcttcagagtccttgagctgcaggggctgggggtngggagggtcaggagggcggagaagatcctgtgtaaagggggcttgccccactgttattggttcattcgttcagggg

SEQ ID NO: 253722 - DNA, 627 bp, Homo Sapiens
aggccctgccttactgctagcatggggacatctcgtcttctgctcttggattgggatagcagcttccttagtattcaggctttcggattcagactgaaccacaccgctatctggggtttccatcttgcagatggcatatggtaggacttaccagcttccataatctgtggcagccaattcctcataataagtctccttttatagatacagatatagacatagttacagatatataatccattggttctatttctctggagaaccatgactaaaacaggagtattttcttgtcttagtcatggaaagtcttgaaaagtaatatttctcatactattttttcctctccatgtgggccactcagagaacctgtaagttgggagcataggggattgttgtctgactccagccctggaaacctacagatcaggagagagggattggtgagcctctttggcgagtgaagaggctgcacggttggtaggattggtctgcactttgagtttattagagcaaaataggtgttgagtgtccctatggaccaaatgtgggacacacagaagagaacgatcctggagcccctttaaatcctgctcaagaagacagctggggtgtgggtggaagataaat

SEQ ID NO: 253723 - DNA, 881 bp, Homo Sapiens
gtttccgagagtgccgcgcggtcggcgggtcagggcagcccggggcctgacgccatgtcccggaacctgcgcaccgcgctcattttcggcggcttcatctccctgatcggcgccgccttctatcccatctacttccggcccctaatgagattggaggagtacaagaaggaacaagctataaatcgggctggaattgttcaagaggatgtgcagccaccagggttaaaagtgtggtctgatccatttggcaggaaatgagagggctgtcatcagctctgattaagaaaggagatttcttcatgctttcgattctgcatggggtacagccagtcacctcaccagagaatgacggctggagaagaaaactctgtaataccataaataagagtgcttgtaataaaagactgtgcacaaggattaatatttcccttcttaagtatcaaaagaactctggaacaaattataccattaggaaggttttcatgattcagttgattttccaaaaatgaagctatctcacccagctgggtttggaggagcaatctgcttattattctgtcgttaccacttactcaagcgagctgtgatatgaatacaagcaaccagtgggctcgggaaggtccgggtctcttctgccatcttccagataagagatttcagtaaaaaactgccatgctgagctgccttatagagctcttcgaaaatgttcgagttgataaagctctttgaggacaaggtacttcgtgcacctcatgctgaagattgcaccatgttggaaaataaatatgaagcaagtcaaactagatgcatacacttgtgtagaaatcaataatcaattaatagaagtgaaaaaatagacattaaaatgatttagttgtcta

SEQ ID NO: 253724 - DNA, 621 bp, Homo Sapiens
cccactggggaagggtgagactccatctaaaaaatataatatagatggcaacccctggtctaagataagagataacacatcaggtggtcaggttgaggtttggggcttggtagcagttgccccagtcatgagatgactcacttaacccgtctcctttaagtgagctggtctggaaggcttcctttccttgtcccatcctggggtcaataaaactgaatgttgcatattctagcacttgtctagttttttgttccatagaaggcagtttagggtatatcatggagagaatagactttagagtgttatacaacatgtgaatcctggttggttccttccctgcttgatttttgtgcctggttctgccttttactagctatgagacttattaggataagttacccctctaaacctcaacctgattatctgtaaaaatggggatctccacagggtatgttcacagagcaggcatacctagtgggtgctcaattaagtattaattttccttccttgcctatggtcctatgacctgccttcaacatgctgggaaatttaaggcaagaggagaattcaaatacctaggacttaatataagaaattctggccaggcatggtggctcacac

SEQ ID NO: 253725 - DNA, 1730 bp, Homo Sapiens
  misc_feature (271)..(271): n is a, c, g, or t
ggaaaagggattaaaactggtattgtcccccaatccattatttttatcccagacctatatttcaaggatccaagtggggttccccttccctatgtttggcagggtcctcaaggttcccaataagcccctccaagtgcctaaggttatttatgcacccccatcttccttcctccgaacatcgcaaacgtcgcaggtcttccaacaagtcgaaggcaggggctaggggtgaaggccagggttccaaggaaaaggcccagggagttgggaaggncgccaaccaacaccaccacccactgcctgcagcaggctcaaaaagcaacagcgcaagttccagtatgggaattattgcaaatactatgggtaccgcaatccttcctgtgaggatgggcgccttcgggtgttgaagcctgagtggtttcggggccgggacgtcctagatctgggctgcaatgtgggccatctgaccctgagcattgcctgcaagtggggcccgtcccgcatggtgggcctggatatcgattcccggctcatccattctgcccgccaaaacatccgacactacctttccgaggagctgcgtctcccaccccagactttggaaggggacccgggggcagagggtgaggaagggaccaccaccgttcgaaagaggagctgcttcccagcctcgctgactgccagccggggtcccatcgctgccccccaagtgcccttggatggagcggacacatcagtcttccccaacaatgttgtcttcgtcacgggtaattatgtgctggatcgagatgacctggtggaggcccaaacacctgagtatgatgtggtgctctgcctcagcctcaccaagtgggtgcatctgaactggggagacgagggcctgaagcgcatgtttcgccggatctaccggcacctacgccctgggggcatcctggtcctagagccccaaccctggtcgtcgtatggcaagagaaagactcttacagaaacgatctacaagaactactaccgaatccaattgaagccagagcagttcagttcctacctgacatccccagacgtgggcttctccagctatgagcttgtggccacaccccacaacacctctaaaggcttccagcgtcctgtgtacctgttccacaaggcccgatcccccagccactaagtggccccctaaacagaaagtgtgaagaggctgccctcgctgctcataaggacctgggggaagaggaaagtgtcccaaggtctttcctttctgactccaaaaatagtttcctttcttggatctgcaaagaaagcttttcttccgtcgctgcctcagcctcctccctatgcctctggcacctgcgcagcaaggctggctgtgctggagtcaccatcatcttcctctcccccagcctcccaggctggatggcatggactgtttgctgacctctgttctcttagggcatgggaggtgggaggatatcaaattctctagccctttcctcctattctcccaaggagagagattcccatttctcctcggccattgtacctagctcttgtccctagctgcatttcagtggaccatggatagagggactgagggttagacggggaagactggcagggaggcacgcaggtactgtgaaaatccttccctttgccctcccccagtgggagagggggttgggttttcaatgtgagaacagcacaataaacttgatgtcatagcagtggcccccaaaaaa

SEQ ID NO: 253726 - DNA, 595 bp, Homo Sapiens
  misc_feature (419)..(419): n is a, c, g, or t
cgccactgggagaacccaactcaaaatcaacctgtacctttttcatttggtggctcctctcattcctccaactgaacatctttgtggaaagatgatggctgcctgcacccactgctggcgaatggtgagaaggtagagcaagggggccaagttgctgctggtgggcacctggggttcaggccgccccaactgtggctgagccgatctgtagctgagctgagtgtcaaccagctgtgtccacaccctgcctgaggcctgccctctcctccctggctggggtggaaccttgaagaggaatatcttcccactaggtgaggaggaacaagagcctcactccccttctccctcttcccttcacagttgaggcagagctaatgggaggagtcactatggaagtgatggacctgggctttggtctncagtgtttggcaggggcgaccttattactgagctggggagggcagctgccatgagtcattttaagtctctgagctccacccaagttctaggggacaagggctggagagggatactcctaattacctgctggggagcccgagtgggtttcgccttgcttctgttttgggagttgggg

SEQ ID NO: 253727 - DNA, 949 bp, Homo Sapiens
  misc_feature (601)..(601): n is a, c, g, or t
atctgaagctgcaacctggcctttggtgttgaaataggaaggtttaaggagaatctaagcattttagacttttttttataaatagacttattttcctttgtaatgtattggccttttagtgagtaaggctgggcagagggtgcttacaaccttgactccctttctccctggacttgatctgctgtttcagaggctaggttgtttctgtgggtgccttatcagggctgggatacttctgattctggcttccttcctgccccacccttccgaccccagtccccctgatcctgctagaggcatgtctccttgcgtgtctaaaggtccctcatcctgtttgttttaggaatcctggtctcaggacctcatggaagaagagggggagagagttacaggttggacatgatgcacacttatggggccccagcgacgtgtctggttgagctcagggaatatgggtcttagccagtttcttggtgatatccagtggcacttgtaatggcgtcttcattcagttcatgcagggcaaaggcttactgataaacttgagtctgccctcgtatgagggggtatacctggcctccctctgagggctggtgactcnctccctgctggggccccacaggtgaggcagaacagctagagggcctccccgcctgcccgccttgggtggctagcttgcctctcctgtgcgtatgggaacacctagcacgtgctggatgggctgcctctgactcagaagcatggcccgatttgggcaactcaaaaccacccttgcctccagctgaatcagagtttcctggggaaattcctgtttgtttaaatcaaattaaccctggtctcctgaattaaaggggggaaaacccaccctccctctaaagaatggaacacgggtttcgccccccaagttcctcccctgggcccggggaaaaaccaattgggatccttgcct

SEQ ID NO: 253728 - DNA, 920 bp, Homo Sapiens
  misc_feature (853)..(874): n is a, c, g, or t
gagcgaggcctgggtggcgattcggcacgaggggcttactgataaacttgagtctgccctcgtatgagggtgtatacctggcctccctctgaggctggtgactcctccctgctggggccccacaggtgaggcagaacagctagagggcctccccgcctgcccgccttggctggctagcttgcctctcctgtgcgtatgggaacacctagcacgtgctggatgggctgcctctgactcagaggcatggccggatttggcaactcaaaaccaccttgcctcagctgatcagagtttctgtggaattctgtttgttaaatcaaattagctggtctctgaattaagggggagacgaccttctctaagatgaacagggttcgccccagtcctcctgcctggagacagttgatgtgtcatgcagagctcttacttctccagcaacactcttcagtacataataagcttaactgataaacagaatatttagaaaggtgagacttgggcttaccattgggtttaaatcatagggacctagggcgagggttcagggcttctctggagcagatattgtcaagttcatggccttaggtagcatgtatctggtcttaactctgattgtagcaaaagttctgagaggagctgagccctgttgtggcccattaaagaacagggtcctcaggccctgcccgcttcctgtccactgccccctccccatccccagcccagccgagggaatcccgtgggttgcttacctacctataaggtgggttataagctgctgtcctggccactgcattcaattccaatgggtaactcatagtggaaaaatttatattattgggaagggttttggccnnnnnnnnnnnnnnnnnnnnnngggaaattggcggaaatcaactttaaccttccccaaaataaaccgt

SEQ ID NO: 253729 - DNA, 561 bp, Homo Sapiens
gggaaaattgcctaagaattatgacccaaaagttaccccagatccagaaagatggctgccaatgcgagaacgttcttactaccggggaagaaagaagggtaaaaagaaggatcagattggaaaagggacccagggagcaactgcaggagcttcatctgaactggatgccagtaaaactgtgagcagcccacccacctccccaagacctggcagtgctgcaacagtatctgcctctacaagtaacatcatacccccaagacaccagaaacctgcaggggctccagcaacaaaaaagaaacagcaacagaaaaagaagaaaggtggaaaaggtggctggtgatgagaatattcttgttgcaggctgtttttaaactagtgtcagtgacactaggaatataataaaggtaacacagcaagaagcacagaactactccctcttcatctccatattttcataatttcttgtgtttcaaatagggaaacatcttcctcaaagtctgcctagtgagatatggcctactggttgcctcatagctttgtacagattatgaggactgaaaa

SEQ ID NO: 253730 - DNA, 1677 bp, Homo Sapiens
ggggccccgcccctcgtctcctccaagatggcgagcggcggcagcgggggggtgtcagtacctgcgctgtggagtgaagtgaaccggtatggccagaacggcgacttcacgcgcgctctcaagaccgtcaataagatactacagatcaacaaagatgacgtaactgccctgcattgtaaagtggtatgccttatccagaatggaagtttcaaggaagctttgaatgtcatcaatactcacaccaaagtgttagccaataactctctctcctttgaaaaggcatattgcgagtacaggctgaacagaattgagaatgccttgaagacaatagaaagtgccaaccagcagacagacaaactgaaggagctttatggacaagtgttataccgtttggaacgctatgatgaatgcttagcagtgtatagagatctcgtccgaaactcccaagatgattatgatgaggagaggaaaacaaacctttcagcagttgttgcagctcaaagcaattgggaaaaagtggttccagagaacctgggcctccaagaaggcacacatgagctgtgctacaacactgcatgtgcactgataggccaaggccagctgaaccaggccatgaaaatcctacaaaaagctgaagatctttgccgccgttcattatcagaagacactgatgggactgaggaagacccacaggcagaactggccatcattcatggtcagatggcttatattctgcagcttcaaggtcgaacaagagaaggctttgcaacttttacaatcaaataataaaactaaaaccaacagatgtgggattactagctgtaattgcaaataacatcattaccattaacaaggaccaaaatgtctttgactccaagaagaaagtgaaattaaccaatgcggaaggagtagagtttaagctttccaagaaacaactacaagctatagaatttaacaaagctttacttgctatgtacacaaaccaggctgaacaatgccgcaaaatatctgccagtttacagtcccaaagtcccgagcatctcttacctgtgttaatccaagctgcccagctctgccgtgaaaagcagcacacaaaagcaatagagctgcttcaggaattttcagatcagcatccagaaaatgcagctgaaattaagctgaccatggcacagttgaaaatttctcaaggtaatatttctaaagcatgtctaatattgagaagcatagaggagttaaagcataaaccaggcatggtatctgcattagttaccatgtatagccatgaagaagatattgatagtgccattgaggtcttcacacaagctatccagtggtatcaaaaccatcagccaaaatctcctgctcatttgtccttgataagagaagctgcaaacttcaaactcaaatatgggcggaagaaggaggcaattagtgacctacaacagctgtggaaacaaaatccaaaagatattcacaccctggcacagcttatttctgcttactcacttgtagatccagagaaagccaaagctcttagtaaacacttgccatcgtcagatagtatgtctctaaaagtagatgttgaggctcttgaaaattctgctggtgctacatacattcggaagaagggtggaaaagttactggagatagtcaaccaaaggaacaaggacagggaa

SEQ ID NO: 253731 - DNA, 366 bp, Homo Sapiens
agaagacaaacagaaagagggtgaatgtaataatgtgtaggaagatgatgctgggagcctccccacatggctgccagccccatagaggacaacacagtacctaggtcccacatctgcactcaaagcaataccagtgccacggtggcagatggacatcgccatgggaagagaccaactgtagatagtaatgtggggagacagagcacggtttgaacctatattcttattccagaaccgctccatctcttctttggccgtggttcccaaaggaacagcatttctgatacagagctgagggctaaagtgggctcggaggcaatgacgaccaacgtgtctcagcaacagcgcagccatcttgggttccgg

SEQ ID NO: 253732 - DNA, 614 bp, Homo Sapiens
aaaaaagccttaagccagcaacccacaggcagggcacccaaagcctcaccaacccaccccccaacccggcccatccccagggcagaagccacagagctggcattgccactgtctcaggaagaaggagccaaaagctgaccctcagcacaaatcaaagcccaatatggagagagatgcagccacctcatctttagaaacaaggggaaaactagacccccactattatggtctaccaggtactctactgctccaaggagatctgaaaatacaaaaggatctaaacaaataaggagaacttttcccaggctggagataagaatgacaaacagaaagatgggtgaatgtaataatgtgtaggaagatgatgctgggagcctcctttcttcacatggctgccagccccatagaggacaacacagtaagaaccaggacaaccactccagactggtatagctggggaatcttcaggccttttcctaggtcccacatcaagtgtcggatcccattccaggtatgatacatgagagggaagacaagtgcaaacttagctgtgtggatcagtgctggccccagacacagggacttcacaagttccaaataagactcaaagttcc

SEQ ID NO: 253733 - DNA, 834 bp, Homo Sapiens
  misc_feature (14)..(14): n is a, c, g, or t
cctcaccaatgaanagagtcccaagccagcaaccacagccagtggcaccaaagccttcaccaccccaccccccaacccgggccaatcccaagggcaagaagccacagagctggcattgtttccactgtctcagaaagaaggagcacaaaagctgaccctcagcacaaatcaaagcccaatatggagagagatgcagccacctcatctttagaaacaaggggaaaactagacccccactattatggtctaccaggtactctactgctccaaggagatctgaaaatacaaaaggatctaaacaaataaggagaacttttcccaggctggagataagaatgacaaacagaaagatgggtgaatgtaataatgtgtaggaagatgatgctgggagcctcctttcttcacatggctgccagccccatagaggacaacacagtaagaaccaggacaaccactccagactggtatagctggggaatcttcaggccttttcctaggtcccacatcaagtgtcggatcccattccaggtatgatacatgagagggaagacaagtgcaaacttagctgtgtggatcagtgctggccccagacacagggacttcacaagttccaaataagactcaaagttcccagggagtaacagggccgacatgccaaaaagagagacccctgcactcaaagcaataccagtgccacggtggcagatggacatcgccatgggaagagaccaatttctgatacagagctgagggctaaagtgggctcggaggcaatgacgaccaacgtgtctcagcaacagcgcagccatcttgggtgccggtttggacggaagt

SEQ ID NO: 253734 - DNA, 1277 bp, Homo Sapiens
gttagttttattaaacagagagacggtacatagctttcacagggaggcatgggttccgagcgttttgtgggaagccagattatttaatcaccctttaaactgtctaaggcaggaaatatggatgttgctaagatgctaccctatgtagaaactcctacaatgcacatgtttcaagtcctaaggaaccctggtaatgtcccttaagctgtgactaattataaccctgccaccccaaggtatatgatacaagtaccactgggattgtgcaaatggcctgtactctgaaccgggattgggaccgtcctttaggcctgctgcccacaggcaggggggctcatagcctcactttccgacccacaacacgggcccatccccagggcagaagccacagagctggcattgtttccactgtctcaggaagaaggagccaaaagctgaccctcagcacaaatcaaagcccaatatggagagagaataactgcttctaggccgagagtaggcaagctgtgggcaaaaaaggggagtttttgcagccacctcatctttagaaacaaggggaaaactagacccttttccactattatggtctaccaggtactctactgctccaaggagatctgaaaatacaaaaggatctaaacaaataaggagaacttttcccaggctggagataagaatgacaaacagaaagatgggtgaatgtaataatgtgtaggaagatgatgctgggagcctcctttcttcacatggctgccagccccatagaggacaacacagtaagaaccaggacaaccactccagactggtatagctggggaatcttcaggccttttcctaggtcccacatcaagtgtcggatcccattccaggtatgatacatgagagggaagacaagtgcaaacttagctgtgtggatcagtgctggccccagacacagggacttcacaagttccaaataagactcaaagttcccagggagtaacagggccgacatgccaaaaagagagacccctgcactcaaagcaataccagtgccacggtggcagatggacatcgccatgggaagagaccaactgtagatagtaatgtggggagacagaggacggtttgaacctatattcttattccagaaccgctccatctcttctttggccgtggttcccaaaggaacagcatttctgatacagagctgagggctaaagtgggctcggaggcaatgacgaccaacgtgtctcagcaacagcgcagccatcttgggttccggtctggacggaagt

SEQ ID NO: 253735 - DNA, 1099 bp, Homo Sapiens
  misc_feature (61)..(61): n is a, c, g, or t
  misc_feature (882)..(891): n is a, c, g, or t
  misc_feature (987)..(987): n is a, c, g, or t
  misc_feature (1023)..(1023): n is a, c, g, or t
  misc_feature (1031)..(1031): n is a, c, g, or t
  misc_feature (1054)..(1054): n is a, c, g, or t
ctttggcctccctccttcccgagaccagtggaaaacaatgcccaactcctgtgccttcctnccccggggatgggcccgggttggggggtgggttggtgaggctttgggtgccactgcctgtgggttgctggcttaaaggacaattctcttcattggtgagagccccaggccattaacacctacacagtgttattgaaagaagagaggtgggggtggaggggaattagtctgtcccagctagagggagataaagagggctagttagttcttggagcagctgcttttgaggagaaaatatatagctttggacacgaggaagatctagaaaattatcattgaacatattaatggttatttctttttcttggatttccagaaaagcctcttaattttatgctttctcatcgaagtaatgtaccctttttttctgaaactgaattaaatactcattttatctttgactctccttgaaatctagagaaaccaagaaaatggctgttgggaaggaaccaatttcctcctcttccctcgggtctcaggcatttacatcctccctctccccgcaatctgacctttaccaggagggaaacagttctcctacatctcatcattggaaaagttttcagggaatcagatagaacttagccagagatttaaatatcacagaaaagcctcagagaaggaaggagaaaaagaaaagaagtgacgcatgtagagtgcttttgggttataggcaccaaaatcccattaaggactgattataagcttcatggtacagttcagcaaattatgattcattgaggggcacagaggaccagtgttggtgacagctaggggatgatgacctgaggttataggcttggggtgaatgaagcatagagnnnnnnnnnnaaaaaagaagggattgttgaaaaccctggcaaaaatgtataatttaatggagaaaacttgctgcttttaaaatccctatagggccagctttagcangcatgctggttttgatagttttttgggaactctggnaatagagnacttatctcatctgtcactttcnagttgttggcccagccagttaaagctggggggtcgaagaagggga

SEQ ID NO: 253736 - DNA, 958 bp, Homo Sapiens
  misc_feature (88)..(88): n is a, c, g, or t
gtttattgtacttcattccagttggtaatatagttttcatcacactaaactttttatactaaatttctgtagaagcttgttgggtttnccttcaccagaaggtactttaaatacctaccatagctgatttgttataaagaaacaaaatgggtgttcttctgtttccttttgattatgtttactgtaattatttcattttggatttatacatttacaattgaataaggattataggttgataagctgtttattgtgaaaagatgtgttttgttacaaatacttgttttaaaaattaataagcccccagggaagtacagcattgactggcacaactgcccatagtgagcttcccaactaactgccttcagtgggattcgggcaagtgcaaagtctttggcctattgtgtgacaaagaggtatatattaaaggaaaagaaaaatgacatgaataagaaaattccgtcaacaaggttggagtagggagttgttgaggggtttagtttgttttaaaaggtatgtgagggagtggtggggtggatttgtgtttctgactttttttctttaagcaaattccatatgttaccaaaagcacatgctgtatattttcttccccttttgtgtgtatatagtattttgaaagataaatgaattgggtatttgtatgtgggatgtacaaaattgtggccgctctctttgtggaaggaaaaaacataaatgaagttaatgcacttcttttcctagcccaaaagtcactgtgattatatttttttaatgaagtttagaaaaaaagctgttgtcttctcaattgtaaaattagtttcaaaatgctgcttctcttatcattagtctagtaattgttgaacttttctgcaaactgcattttacaaaattgaaacttggaagctgtattaacttttatagttaaacattgtattaaataaactatactataataaac

SEQ ID NO: 253737 - DNA, 369 bp, Homo Sapiens
gccaggcggaatgcagagcaagactctgcctccaaaaataaataagtaaagaaaatcctagcccccacaaaccaggcagccctagagaaattcaacaaataattataaaagtattcaaccacagttgaaaagcaaagggtgcgaaatgttccctgggaaagtgactttactaagtgagcaagaaacaaacaggcttaggtgggaagaaaaagaattgcaggcagaggaaacagctcagaggcagagaggactgaaactgtctcctggatttagcaactctgaagtcaccggtgattctggagagagtacagtgatggcaacagaaaaaaaggttcaggagaaaatgagaaacaaaaatgtaagaggcgc

SEQ ID NO: 253738 - DNA, 433 bp, Homo Sapiens
cctcgctccctctctttctctcctccctctgccttcccagtgcataaagtctctgtcgctcccggaacttgttggcaatgcctattttttggctttcccccgcgttctctaaactaactatttaaaggtctgcggtcgcaaatggtttgactaaacgtaggatgggacttaagttgaacggcagatatatttcactgatcctcgcggtgctagcgtatctggtgcaggccgtgagagcagcgggcaagtgcgatgcggtcttcaagggcttttcggactgtttgctcaagctgggcgacagcatggccaactacccgcagggcctggacgacaagacgaacatcaagaccgtgtgcacatactgggaggatttccacagctgcacggtcacagcccttacggattgccaggaaggggcgagatatgtgggtct

SEQ ID NO: 253739 - DNA, 361 bp, Homo Sapiens
acctgatggttgataaagaaatacagctggtctgatccagtctttgaaaacaaatgctagaactccggcagtgagctccaggaagaaaataattcccaggaactattgtttgtcaaacttgagaaggaaagtgcccgtagcgctccaatgcaccctgcaaatcccaaaatgaacatcactcctcccaccacaaggaagagccaaactgggtcaaagccgccgagatcggtgatggaagagatgttggacagaactcctttttcattccatgcccacagtccaattccaagaaatgttattcccaaaaaccaaaatatgacattgaagccaaatatgaagtatttgatgcaacaactgactt

SEQ ID NO: 253740 - DNA, 1010 bp, Homo Sapiens
  misc_feature (655)..(655): n is a, c, g, or t
  misc_feature (666)..(690): n is a, c, g, or t
gccggcatcaaaccccactgagtggatgccatcttctcgggaatcttaagtgcagcagaagaatggaccgccacatcgctctcgactggcattgaaatctgtgcaattgaagtaaataaggttccaatcatcagctccaaaagccccacagcactgccaatattcctgggtgaagtctatgagggcaaatcaatgtcatcccgatatgctctgatgttgttgtttataaagaaatacagctggtctttgatccagtctttgaaaacaaatgctagaactccggcagtgagctccaggaagaaaataattcccaggaacacagaaaatacttatctcataccttctgttcgaagattattccaggcaagtttttattgtttgtcaaacttgagaaggaaagtgttttcccgtagcgctccaatgcaccctgcaaatcccaaaatgaacatcactcctcccaccacaaggaagagccaaactgggtcaaagccgccgagatcggtgatggaagagatgttggacagaactcccctttcattccatgcccacagtccaattcaaagaaatgttattcccaaaaaccaaaatatgacattgaagccaaatatgaagtatttgatgcaacaactgacttcaggacccttgtagtgcttcncgacactcctnnnnnnnnnnnnnnnnnnnnnnnnngccagcccgagtctggagctccgaagcaccgttgctcggagcagcccggcggggagcaggagctcagggacaccgcacgcggccgcggcgctggcggcctgggctcagccgcacgcggaccgaccggcggagagcggtcccgcacctccagcccctcgcgcgccgaggccgccggagccggggtggccgcgagaaagcagggaagccgcgcgctgcaagctcaagcctcgccgacgctagccccgaacacaaagcgaggcccgcgtccgtgcgccaggcggtcggtccgtcggttcgtccccgggcttcgggcaaaggcg

SEQ ID NO: 253741 - DNA, 1926 bp, Homo Sapiens
  misc_feature (1028)..(1041): n is a, c, g, or t
  misc_feature (1115)..(1125): n is a, c, g, or t
aataaaagcaaactaaaactggaggaagaaaaagaaaccattagaagcttttgactgggtcaatgttgtttccaaattgggtttaattccattcaaagagaaagaaggggagggtgcagaaaaggccactcagatcgactctggaagagatcatcaagaccagggaagcatttggatggtacagctggtctcttcccagccagactgggaggacatgccacaacctcccaaggctgtgaacctaggaaataagtgctgaccaaataacatatttcaatgtttgtagaaaagctggcaggaaagggagatgatggattcagattcacaggtcatgcagattaagacttaatcaaaaattaatgcttgagctgagtaagaaaacactaaaatttaagtggaactgtatcatagctttcacctttggaagacgaaaaacaacaaacatacaaaacaaaatgacccagaatattccagagtttccaaaaatccaactgctaattttggcagggtgagaagaaggggatatttaactgatacctcttcattaacctcattttctccttgaatttcactgataaacaaagctcaggtctacttagaaaaacgatcagtcctgctaaaatacagcctcatgacgtcttccaatgcccttgctcggtgcacatgaaatacacaacttctcttataaggagactttccaggatagaccaagtgtgctcgcccaagtgacttgctgaataccatcacaaaatctgaacccaaagatgagttgttttcttcttcagatgagagttgcaagtgtttcctaaaatgtacatggagggatgcccacaaaccactgccctcccaggtgaggggctgagtctttgaggagatgcactccttcaggccatggaacagaaagaaggtggtccgtccaaggtgtggtgaagagcaaagctgcctctcccagccctccaattacggaagatgaggacaagaatgtattttctgcacattcaagtacatctgggtcccctaccctcccnnnnnnnnnnnnnnggtaagcatctaactgtccataaattcatggctacagtagagattcacggcgcaacgactttcatactggttannnnnnnnnnnaattctgtcagtgagcagcatttcccagttttacactcccctaatggcagctccattaggcgagactgcaggctgcatctgtgattaggtccatgcagctcgaagatcagttcggcacgcgggagggtcccgaaagctgggtctgtccagtgtcttgcagcagcggttgcaggggctctaccagctcgccctgacagcttcgatatcgctaaccaaattctgggccaggcatatcccaaaaatctgcagcaatgcaatgcctatgaaaataccagcaacgatggttaaattgtcctgcaaccacttctcaaactggggcacacagcctttcgtgtagattacaatctgctggtcaacttctggtttttgcctggcatcatagccacactgagtgttgatgacatcctctgcgggatctttagtgcagcaggagaatggaacgccacatcgctctcgacttgcattggaatctgtgcaattgaagtaaatatttaggttccaatcatcagctccaaaagccccacagcactgccaatattcctgggtgaagtctatgaggttttgcaaatcaatgtcatcccgatatgctctgatgttgttgtttataaagaaatacagctggtctttgatccagtctttgaaaacaaatgctagaactccggcagtgagctccaggaagaaaataattcccaggaacacagaaaatttttcattccatgcccacagtccaattccaagaaatgttattcccaaaaaccaaaatatgacattgaagccaaatatgaagtatttgatgcaaca

SEQ ID NO: 253742 - DNA, 1156 bp, Homo Sapiens
  misc_feature (198)..(198): n is a, c, g, or t
acttgctggtgacttacaactccatcaaaggggcatggtgaaataagggcctgggctcctgacttctgggctagggctcttccggcagagtctggagaggcctggctgtggccagaccatggggcaagtggctagaggggcgagtagacagcagaggcagctgtggcccccgggattagcactgggggaccggatggnggagggaggcctcactttgttctatctgagcagcttcctcggcagtcatgggactgattgagaccacgcgagggctcctcccgggggcaggtaatcgcaactacagcacccgcccaattccaccccatccagggtccttcgctgctttccttttttgccctctgttctgggctctgccctcccacctgaaccctgctcctctgagaagtcttggctgagtcccaggctgagccttctctgggttcccacttcccatgctgattcccaccctgctccctccatcctggtaggagggactcagaggctgccccgttgtctgggggtggccctggcgaaggagctcatcttcacgggccgacgactgagtggaactgaggcccacgtactggggctggtgaatcacgctgtggcccagaacgaggagggggacgccgcctaccagcgggcacgagcactggcccaggagatcctgccccaggcccccattgccgtgcggctgggcaaagtagccattgaccgaggaacggaggtggacattgcatctgggatggccattgaagggatgtgctatgcccagaatattccaacccgggaccggctagagggcatggcagccttcagggagaagcggactcccaaatttgttggcaaatgacccccattttaaccttcagcatgggagatgcatgccctgaagagcaggatccagaaggaagatttgtggccagattgccttcatcatttcacctctccagacttccatttcttcacaaggatgatgatggaaataaaatgactggcgtgatgcctggaaccaaggtgctgatcctaccacctactgctaccttccttagcttcaccctggctagaaataatcacgagggttgggtttgctttggaaaatgcctgtctctctacttgaatgataaagaattaaattagatctctctgaaaaaaa

SEQ ID NO: 253743 - DNA, 853 bp, Homo Sapiens
  misc_feature (685)..(685): n is a, c, g, or t
  misc_feature (805)..(805): n is a, c, g, or t
  misc_feature (811)..(811): n is a, c, g, or t
gatgaatatggagggagttgtaaaattaaagaaggtacatgggtgcatgtgtgcttgtgtgtgtgcgtgtctgtctgtctaacaacagcagaagcaggcaagggctactgtggtagtcactgttgttcctctccccattttgcttcacagtttacaagtccttccactttctctctgaggcagaaagagcaagggtttttctctccattttatggttgggaaaattgaggcctgcctgagtgtgtgacttgtggcaagtcactctggtcatctagggcagaggctccccagatcccaggcctcctgcctccagtccccagcccgcagcccaggattaggcagagccagctgctttcccgtggctgccctgactccttacagggatcactgagattctgatgaacagaccttctgcccgcaatgccttggggaatgtcttcgtcagtgagctgctggaaactctggcccagctgcgggaggaccggcaagtgcgtgtcctgctcttcagaagtggagtgaagggcgtgttctgtgcaggtgcagacctgaaggagcgggaacagatgagtgaagcagaggtgggggtgtttgtccagcgactccggggcctgatgaatgacatcgcagccttccctgcacccaccattgcggctatggatgggtttgccttgggcggaggccaagnagcttgccctggcctgtgacctccgagtggcagcttcctcggcagtcatgggactgattgagaccacgcgagggctcctcccgggggcaggagggactcagaggctgccccgttgtcttnggggtngccctggcgaaaggaagcttcatctttcacggggccgacgaa

SEQ ID NO: 253744 - DNA, 587 bp, Homo Sapiens
  misc_feature (216)..(464): n is a, c, g, or t
atattgatctgtccccgtgattgtgcagttagcaaaacccaggctttgagaaaccctgtaggtcaaataccccaggctcctccacagataatctctgagggaaagacagagttgtggggagcatgtgggggttgtaccaggatttaaaagatacacggcaattttagaaattagcaagtctaaactatgatacctaaggatgcacacctgggtgannnnnnnnnnnnnnnnnnnnnnnnnnnnnnnnnnnnnnnnnnnnnnnnnnnnnnnnnnnnnnnnnnnnnnnnnnnnnnnnnnnnnnnnnnnnnnnnnnnnnnnnnnnnnnnnnnnnnnnnnnnnnnnnnnnnnnnnnnnnnnnnnnnnnnnnnnnnnnnnnnnnnnnnnnnnnnnnnnnnnnnnnnnnnnnnnnnnnnnnnnnnnnnnnnnnnnnnnnnnnnnnnnnnnnnnnnnnnnnnnnnnnnnnnggatcactgagattctgatgaacagaccttctgcccgcaatgccttggggaatgtcttcgtcagtgagctgctggaaactctggcccagctgcgggaggaccggcaagtgcgtgtcctgctct

SEQ ID NO: 253745 - DNA, 626 bp, Homo Sapiens
  misc_feature (422)..(422): n is a, c, g, or t
  misc_feature (473)..(473): n is a, c, g, or t
  misc_feature (600)..(600): n is a, c, g, or t
ggacgactgtagcaggagcaggagtcactgacattctaggccaggccagggctaagccagagaacctattaatagtaatccacaaatagatatggggcacctcctaggaactctccttgttccaagcgtcgtacctcgtgtgatccttagcggctctctgaagcagacagaagagggccagccatctttcttccacctttgaggcttgggaagggtgagacttgctggtgacttacaactccatcaaaggggcatggtgaaataagggcctgggctcctgacttctgggctagggctcttccaaaggcagagtctggagaggcctggctgtggcaaaaccatggggcaagtggctagaggggcgagtagacagcagaggcagctgtggcccccgggatttagcactgggggaccggatgggntggagggaggcctcactttgttctatctgagcagcttcctcggcagtcatngggactgatttgagaccacgcgagggctcctcccgggggcaggagggactcagaggctgccccgttgtctgggggtggcctgcgaaggagctcatcttcacgggccgacgactgagtggactgaagnccacgtaattggggctggtgaatcac

SEQ ID NO: 253746 - DNA, 560 bp, Homo Sapiens
  misc_feature (25)..(25): n is a, c, g, or t
  misc_feature (42)..(42): n is a, c, g, or t
  misc_feature (62)..(62): n is a, c, g, or t
ggcccagaaccgaggagggggaacncccctttaccagcgggncacgagcactggccccaggnagattccttcccccaggccccccattcccgtgcggctgggccaaagtagcccattgacccgaggaacggaggtggacaattgcatctggggatggcccattgaaagggatgtgctatgccccaagaatattccaaacccgggaccggctagagggcatggcagccttcagggagaagcggactccccaaatttgttggcaaatgaccccccattttaaccttcagcatgggagatgcatgccctgaagagcaggatccagaaggaagatttgtggccagattgccttcatcatttcacctctccagacttccatttcttcacaaggatgatgatggaaataaaatgactggcgtgatgcctggaaccaaggtgctgatcctaccacctactgctaccttccttagcttcaccctggctagaaataatcacgagggttgggtttgctttggaaaatgcctgtctctctacttgaatgataaagaattaaattttattta

SEQ ID NO: 253747 - DNA, 1231 bp, Homo Sapiens
  misc_feature (56)..(56): n is a, c, g, or t
  misc_feature (1024)..(1024): n is a, c, g, or t
  misc_feature (1179)..(1179): n is a, c, g, or t
ggcgctctccagggtgtgctgggctcggtcggctgtgtggggctcggcagtcaccnctggacattttgtcacccggagctgcaacttggtcgctctggcctggcttggggggcccctcggtcttcaaagcttcacctttctccaaaggcagatgtgaagaacttgatgtcttatgtggtaaccaagacaaaagcgattaatgggaaataccatcgtttcttgggtcgtcatttcccccgcttctatgtcctgtacacaatcttcatgaaagaaagccttgagccgggccatgcttctcacatcttacctgcctcctcccttgttgagacatcgtttgaagactcatacaactgtgattcaccaactggacaaggctttggcaaagctggggattggccagctgactgctcaggaagtaaaatcgaagctgagctgtctctcttgctgcacaacgtggtcctgctctccaccaactaccttgggacaaggcgctgaatgaaccatggagcggatggcattgtcctgcagtcgtatagtatagcagtgcaggaacaaacagcacttgccagcaaagtctgtgtgtactgttaagtgtgtgggaggcagagagaggagcaggggccatgggcttcacagcatggcacacctgtgggaactgcagacattcctctcacagctagaactgaaacaaaccctcttgctaggggtggtccgtgtgaggtgtcatcctgtccccctcataattactaatagctggaactggcagcagcctctactgggcttttactgtgatgtgttcagttcatgtcctaggaagtcagcttttgccccaggtgggaatccttatttggcttaggactgatccacttccatgttacttacatctgtgggtttttgttgttgctgttagaaaatttgtggctggtgaaaacagcactcctttggctggagcacttgtgtccgtgcatgtacttgggtgtttccctccatcctttctgatatgaccatcaagttgttttgtttntttgtcaccttcactggcatgggctaaaccacttctttttcccctctgaacacctttttctgatgggtaacttgcaggaatattctattggcttcactctccattgtcttttctgggctgtattacagccctctgtggatcttcaactctgctgnctccactgtgatgcagcagtccaactgtctgacgtggctgcctttctctggg

SEQ ID NO: 253748 - DNA, 773 bp, Homo Sapiens
cgctgtgaagatggcgctctccagggtgtgctgggctcggtcggctgtgtggggctcggcagtcacccctggacattttgtcacccggaggctgcaacttggtcgctctggcctggcttggggggcccctcggtcttcaaagcttcacctttctccaaaggcagatgtgaagaacttgatgtcttatgtggtaaccaagacaaaagcgattaatgggaaataccatcgtttcttgggtcgtcatttcccccgcttctatgtcctgtacacaatcttcatgaaaggattgcagatgttatgggctgatgccaaaaaggctagaagaataaagacaaatatgtggaagcacaatataaagtttcatcaacttccataccgggagatggagcatttgagacagaaagccttgagccgggccatgcttctcacatcttacctgcctcctcccttggtgagacatcgtttgaagactcatacaactgtgattcaccaactggacaaggctttggcaaagctggggattggccagctgactgctcaggaagtaaaatcggcttgttatctccgtggcctgaattctacgcatattggtgaagataggtgtcgaacttggctgggagaatggctgcagatttcctgcagcctgaaagaagctgagctgtctctcttgctgcacaacgtggtcctgctctccaccaactaccttgggacaaggcgctgaatggaaccatggagcggatggcattgtcctgcagtcgtatagtatagcagtg

SEQ ID NO: 253749 - DNA, 453 bp, Homo Sapiens
gtcaccttcactggcatgggctaaccacttctttttcaaaccctctgaacacctttttctgatgggtaacttgcaggaatattctattggaaaagataacaggaagtacaagtgcttcttgaccccttcctcaatgtttctagccttcactctccattgtcttttcctggctgtattacagccctctgtggatcttcaactctgctgcctccactgtgatgcagcagtccaactgtaactgacagtggctgccttctctgggccatggatcacacctgtaaggtactaattactgcccagcctggggagatcaggagaggtctgcatagttagtaagttgggtttagcttttgtgtgtgcatcagtgacttagagttctgtaataacttattgtaaatgcatgaagcactgtttttaaacccaagtaaagactgcttgaaacctgttgatgga

SEQ ID NO: 253750 - DNA, 499 bp, Homo Sapiens
ggcctggcacacaaggcccaagcaccaccgtcaacacagcccagtccatacagaaatgggtttcatgcctgaaaagctttttacagaaagatgccgcctgtagccagtgacagccgcaaccctacaggcctcagttccttgcagaggtgaggggtagagagtcagcctccctcccttccagcagcgacccacgttcgctccacttccaggtggtgctgggctcaccgagggagcactggtgggtgctctgaaaacccacaggatcccacctccaggcccacctgggtcccatctcactctcttcttctttcaccaattgctaacatagaccttgttgggatcacgatggcttcacaagccagctgttgggtttgctatgtcactgtggctcagtcacatccctgcgtgtatactgtctgcggggcacatatgtatccatttagagctaaaggaatcagtgtacactacagctaatcctaataaatccgatgttttcgga

SEQ ID NO: 253751 - DNA, 2448 bp, Homo Sapiens
  misc_feature (2263)..(2263): n is a, c, g, or t
  misc_feature (2309)..(2309): n is a, c, g, or t
  misc_feature (2314)..(2314): n is a, c, g, or t
  misc_feature (2330)..(2330): n is a, c, g, or t
  misc_feature (2349)..(2349): n is a, c, g, or t
aaattaccgaccaaaatatataatcggtggaaatattccaaaattccatattttgggatttatacacaaaagataaacaaattagaagccaagaggctgccggaaggaaaaacggggcctggaaagcgtatgtgaggaatgagctgggcctaaagaggcactggaggcagtagctggacctgccgaagtggccgaaacaaggagctttggacgggggaggccgcagtgaggcgagactagctgggcgtggagagtccactgtgaggccaaggccaaggccgggcccgtgcaggcctttgagaggcaggaggccgggcctgcaaagcccgactggagatcaagttctgcgcctgaagaggctgccaaaagtcaaaagcggggcctgggaaggccgccgagagccatgaactgggctgggccgaaagaggccactggaaggcaggaagagctgggcctggagaggctcactcgaggaagttttgcacctgaagaggccgccgagaggacggagctgggcccagggaggccgacttgctgctcttccaggcccaattccaggccgacttgaggacgacttgggcctgcagagactgccgggaggctggagctgggcctggagaggccgacttcgggacgatttggacctgcagaggccgccgggaggcccaagctgggcctagaggagcccaccgaccggaggccatttggggcctgcagatgccatcggagggcaggagctgagcctggagaggccaccgtgaggcctgagctgggcctggggagcttggcttggggaagctgtgggccgaccaaggccgccaggagatgggtaggcactgagtccaaagaggttgttgagaggcaggaatcgggcctggagacgcaaccaggaagaagagctgggcccggagaggacgcccggagggtgcaagtggctctggagaggccgacttgaggaggttctgggcccggagaggccgccggaagggaaaaactgggcctggaaaggccgttgtgaggaacgagccccatgggcctgaagaggccactggcaggtgggagctgggcctgccgaagcggccgagaggcaggagctttggactcgggaggccgcaatgaggcgacagctagctgggcgtggagagtccgctgtgaggcagaggctgggcctgtgcaggccttcgggaggcaggaggctgggccttgtcgaggcctgcagaggccaccgaaagtcaaaagcggggcttgggaaggccgctgggaggcatgagctgggctgggccgaaagaggccactgggaggcaggaggagctggccccggagaggctgccgaaaggcaggagcttcaactgaggatgccacagtgagacaccatctgggtccgcagggtccactgtgaggcagaggccggcctgtagagtccgacagtagacacaagttgggcaaaaggctgatttgaggaagttttgggcttcaagagtcagccacgaggcaggcactaggcctggaaatggcccgacagtcatgagttgggcctaaatgggccaccgtgagggaggagctgtgcctgttgaggctgctggcaggcaggaagaaatttggcctgaggcagctgccatgaggcaagagctgggcttggaaaagcccctgggaggcaagagcaggccatgcagaggctgttctcaagtcaaagctgggcctgttcatgccaccgggaagcagaaggtgggcctggagagtatgacttgaggaagttttgggcctacattggctgccatgagctggacaggaactgggccaaaaaaggctgttgtgaggcagcagttgtgcctgtagactcagccaagaggaagagctgggcctggagaagcccccatgaggcagaggttgggcctgtagacgctgacaggaggcaggagctgggccgggagaggtcaacttgaggagattttgggccttcataggccaccaggaggcagcagttgggactagagaggctgacttgagtaagttttgggcccggagatgacgttctgggacaggagctgtgcctggagaggtcactgtgaggcatgagctggatgtagagaggccagtgtgaggcaagacctgggcctgtctaggctgctgggagacacgcaggaatctggccagggaaggttgccatgagacgaaagttgggcctggaaaggcccttgtgaagcatgagcttggcctaaagaggccactgggtggcaggagctgggtgtgtagaagctgctanaggttgggagcttggcttggggggtccacagtgaggcagatgctgngcctncagaatctgctatgangcagatgttgggactgtanaggccgaccgggagcaaagctggggcctggaggggcacccagatgcaggagctgggcctggagaggctgcaaaaagcatgagctgggcctggggaggtc

SEQ ID NO: 253752 - DNA, 399 bp, Homo Sapiens
ttaatggtggaaatattccaaaattccatattttgggatttatacacaaaagataaacaaattagaagccaagaggctgccagaagggaaaaacggggcctggaaaggccgttgtgaggaatgagctgggcctaaagaggccactggcaggcagtagctggacctgccgaagtggctgaaaggcaggagctttggactggggaggccgcagtgaggcgagagctagctgggcgtggagagtccgctgtgaggcagaggctgggcctgtgcaggccttcgggaggcaggaggctgggccttgtcgaggcctgcagaggccaccaaaagtcaaaagcggggcttgggaaggccgccgggaggcatgagctgggctgggccgaaagaggccactgggaggca

SEQ ID NO: 253753 - DNA, 426 bp, Homo Sapiens
cagcagccctcctccctggtcggcctggaagcacatgccggagtcgctctcgtcgtcactgtcaatgagcaccatgttgtcccggtcctgaggccgctcctcctcaatgacagagaaggtgccggggggctcctcacgcagcacaccctgctgcagccacacggacatccgccgccgcagcagcgccacgggcatcttcaccgccttgctcagttcctccagggtccagctggcttggtcctgaaaatacagcaagatcaccgcctgtactggggtgaccgccacagacagcgtgcggtcggccagctccacgtccatggtcaccaggcacagggtgtgcttccaactgagggtccgcatggccttgagctgctcatacttcttgcagtaagcctccagggctgccctgatatcctcggggacctc

SEQ ID NO: 253754 - DNA, 398 bp, Homo Sapiens
cataaaaaaggaagccgtcatgacccgaagggtgggggaaaactcaaatgactatagggatgtggagggttctgcggatgaggtaagtgggcctggcaagggctgtgcaagctggacagcccaggtgtagcccccagggcagcccccagctccactgaggttgtctgaagagcactggagtcgtgggttctagtctcagggctgctaactcttctaatgaggagacagaaatccagattatgtgagctctcctgagtttaaatgttagcaactaattaaaaataatcgctgcgggtggaggggtgttcggggagggcagctgaaatatctcaggcaagggagggaggaggttgtccaacattcattgcgtttgtcccatcagtgtttttttgaggccc

SEQ ID NO: 253755 - DNA, 1235 bp, Homo Sapiens
  misc_feature (740)..(753): n is a, c, g, or t
cggcacgaggaggaaaataagaggattggagaatttaaagaatctataccaaaaatgtgctcacagttgcgaatattgacccatttctaccagggtatcgtgcagcagtttttggtgttactgacgaccagctctgacgagagtcttcggtttcttagcttcaggctggacttcaacgagcattacaaagccagggagcccaggctccgtgtgtctctgggtaccagggggcggcgcagctcccacacgtgaagctcgcggtcctcccagggagctgcgggtgatgttcgttgcactgctagacacgaaattcccattgacgtcctgcaggaactgcatgctgcaggtgtcctgcccttccgcccacgagtgcgccatgtttcagcggagcggcgtgtgggagaagccacgtcgtgtttcacatgtcggagtcgaatgcatttgtaaatccctaagtcaagtaggctggctgcactgttcacatttgtctctaaaagtcttcatcgctaaaagataccataatttgctgaggcttcttaagctttctatgttataatttatatttgtcactttaaaaaatccatttcttttagaaaaaattagggtgataggatattcattagttaagatggtaacgtcattgctatttttttaacatcctctttagaggtaatttttgttaacataaccaaaaattaaattgaaacaaaatgtcccaactaagaaaatatatagagcannnnnnnnnnnnnnagtgttgtaaaatattaacctctgtgagatcctttgtatcttaatgcattacctttacacatatttattcttattttctctcctttcagagtttacatttttatatttaatttactatttcagatttttaaaatagtatagaaaaaagtaggagtgatagagaacaaaaatactcttatacagtgcaacccaaataccgcgaatgcatcagctaaagcagcgtgtaaataggagtgacgagaaagttaatggagtattttattttcaaagttcctgataagcattggaaagaaatcgacatggataatgaagatttcctttttccttgcctattttttcattgtaaatatttatatactactgaccaagatgttggggtgggggggattgttttttgtaaaaatgtcattatcaggtcacataaatctgcctttatgttgcataagtgaaaatttagaaaattaaaagcaattatctttcag

SEQ ID NO: 253756 - DNA, 416 bp, Homo Sapiens
gctgcacacacgtggtcataaatccatctgttggcacatcagggatcccttccttggcccactgtatggatgaagggactgaggcttaacatgcccaaggtcacacagccagcagctggccatgctggagtttgaacctagtcctctgacatcccagtcaggagaggcgtgagcaggctgccgaggccaaatgcagcccagggcctcaaccccccagaggggcctcaggagccagttaggtgccccacagccaacgtgggctccagggtgaaggggaaagtgatgaatcaaacagagcagcagacgcagactgagctctctccctgtcggcccgggtgccagattttcacgcccacagcggggccaggcagagcgctaggtgtggggcaggagagggcagcggtggctgccctgcc

SEQ ID NO: 253757 - DNA, 1171 bp, Homo Sapiens
  misc_feature (46)..(58): n is a, c, g, or t
  misc_feature (338)..(365): n is a, c, g, or t
ccgaacatccggaaattccaaagaaaacatcatgaaacagcttacnnnnnnnnnnnnntatatgccctagttattcaccctgcttcaacactgtcaacgtaaaggcagaaataaagcaagctatcaatacctcagaactactgatataagacatcaaatttctaaatcagtgtattaaaaaagtgaacacttcctctttcttctctcttctacatttaactagaatcatgtttaaaaaaaactgatattaaatgtgacacttcagagctactactggaaggagtaattcataacttccctaccctccttccatccctgctgattcaggagaagggggnnnnnnnnnnnnnnnnnnnnnnnnnnnncaaccagggtctcttgtagatttgctgctattccacaaaatgttggcatttgctgccatgccacaatgttggtccactgaaataggatttctgcggaaactgtcaacagtagtaattcaccatatgcaagtaccatccttatcatgcgagaataatcacaggttctgtagaaatgtacaatgtacttaagataatgaaaattgtagcgctgcatttgagatttatttctctacttagctagtaaaacttgtcatttttgctcacttaagtatgatcatttgtgattcctttaaatagcaaaaatgcacagtcctctttaggcctctactcaataatagtttacattactcttaacaaaatcattctacataaacagatagctccttaaaaatagtactctctcattaaatctaatttgacagaaagaagtttaagggaaaaaggagtgctttgtaagtgaaaaagtacaaatctttggcctttctcttgacattttcgtatgtcaaaaagcaaaaaaccttcatgtatttcaatctagtgattactttttgcaccataatttgttttttacaccacaaaaggaggcactttcagtatctgtaaaaaggtatttaatcctaaaacatacttacctagagaataattaaaacagaattcaatacaatctagtatctattaggaaattaagagttatcacttctaaaagtcatttgaaagtcaatgatgttatctggtcaatggcaggaaatgggaactggaacaaatataagaacttatgggatttcctacacggagacaaaaaaaga

SEQ ID NO: 253758 - DNA, 373 bp, Homo Sapiens
aaccggtccacagtagtaattcaccatatgcaagtaccatccttatcatgcgagaatactcacaggttctgtaaaaatgcacaagtgtacttaagataatgaaaattatggctcacttaagtatgatcattgtgtgattcctttaaatagcaaaaatgcacagtcctctttaggcctataatcaataatagttcacattactcataacaaaatcattctacatacacagatagctccttaaaaatagaactctctcattaatatctaattggacagaaagaagtataagggaaaaaggagtgctgtgtaagtgaaaaagcacaaatctgaggcctttctcgtcacattttcgtatgtcaaagagcaaaaaccc

SEQ ID NO: 253759 - DNA, 608 bp, Homo Sapiens
  misc_feature (342)..(342): n is a, c, g, or t
  misc_feature (360)..(360): n is a, c, g, or t
  misc_feature (367)..(367): n is a, c, g, or t
  misc_feature (370)..(370): n is a, c, g, or t
  misc_feature (387)..(387): n is a, c, g, or t
ctcctcttgactcagtgttctccagcagcgagcgtgcccaccaggtgctgcggatccgcaaacgtgccaactccttcctggaggagctccgtcacagcagcctggagcgggagtgcatagaggagatctgtgacttcgaggaggccaaggaaattttcctgtggatgacacactggccttctggtccaagcacgtcgacggtgaccagtgcttggtcttgcccttggagcacccgtgcgccagcctgtgctgcgggcacggcacgtgcatcgacggcatcggcagcttcagctgcgactgccgcagcggctgggagggccgcttctgccagcgcggtgaggnggagaggtggatgctggngggcggnggngcgtggctggttccggnctgggaccatgctgaccgtcttatgtcatgccatggttggcccctcgttcagtctgttcccgcccgtctctgaagagcttcgaaccaacaaggccacactgtcgagtatactaacggacgtctacctcgcatatcgatcagagtactggcaggctagttatcatccccgctaagtgcgcagtgtatacgcccactagttctggggaggtctactcctctgc

SEQ ID NO: 253760 - DNA, 999 bp, Homo Sapiens
  misc_feature (483)..(525): n is a, c, g, or t
cgggggtaggcactgcccggagctcagaagtcctcctcagacaggtgccagtgcctccagaatgtggcagctcacaagcctcctgctgttcgtggccacctggggaatttccggcacaccagctcctcttgactcagtgttctccagcagcgagcgtgcccaccaggtgctgcggatccgcaaacgtgccaactccttcctggaggagctccgtcacagcagcctggagcgggagtgcatagaggagatctgtgacttcgaggaggccaaggaaattttccaaaatgtggatgacacactggccttctggtccaagcacgtcgacggtgaccagtgcttggtcttgcccttggagcacccgtgcgccagcctgtgctgcgggcacggcacgtgaatcgacggcatcggcagcttcagctggactgccgcagcggctgggagggccgcttctgccagcgcggtgagggggagaggtggatgctnnnnnnnnnnnnnnnnnnnnnnnnnnnnnnnnnnnnnnnnnnnaccagcaccagctgcccgcgccctcccctgcccgcagaggtgagcttcctcaattgctctctggacaacggcggctgcacgcattactgcctagaggaggtgggctggcggcgctgtagctgtgcgcctggctacaagctgggggacgacctcctgcagtgtcaccccgcagtgaagttcccttgtgggaggccctggaagcggatggagaagaagcgcagtcacctgaaacgagacacagaagaccaagaagaccaagtagatccgcggctcattgatgggaagatgaccaggcggggagacagcccctggcaggtggtcctgctggactcaaagaagaagctggcctgcggggcagtgctcatccacccctcctgggtgctgacagcggcccactgcatggatgagtccaaaagctccttgtcaggcttggagagtatgacctgcggcgctgggagaagtgggagctggacc

SEQ ID NO: 253761 - DNA, 968 bp, Homo Sapiens
gagaggctagggatgaggtgccagcacaggattcccttccggatgcaggcgaggccgcggccccagagtccccgcaccaggcagagccgtacctgtcaccctccccaagcgcctgcaccgcggtgcaagagcccagcccaggggcgctggacgtgaccatcatgtacaagggccgcacggtgctgcagaaggtggtgggacacccgagctgcacgttcctatacggccccccagacccagctgtccgggccacagacccccagcaggtagcattccccagccctgccgagctcccggaccagaagcagctgcgctacacggaggaactgctgcggcacgtggcccctgggttgcacctggagcttcgggggccacagctgtgggcccggcgcatgggcaagtgcaaggtgtactgggaggtgggcggacccccaggctccgccagcccctccaccccagcctgcctgctgcctcggaactgtgacacccccatcttcgacttcagagtcttcttccaaggtcagtgaggcccttgcctggggggctgtctccaggggtccttgggagcacctgcctgccaggtactcagcagagtccccttcttcagagctggtggaattccgggcacggcagcgccgtggctccccacgctataccatctacctgggcttcgggcaggacctgtcagctgggaggcccaaggagaagagcctggtcctggtgaagctggaaccctggctgtgccgagtgcacctagagggcacgcagcgtgagggtgtgtcttccctggatagcagcagcctcagcctctgcctgtccagcgccaacagcctctatgacgacatcgagtgcttccttatggagctggagcagcccgcctagaacccagtctaatgagaactccagaaagctggagcagcccacctagagctggccgcggccgcccagtctaataaaaagaactccag

SEQ ID NO: 253762 - DNA, 670 bp, Homo Sapiens
  misc_feature (476)..(476): n is a, c, g, or t
  misc_feature (552)..(552): n is a, c, g, or t
  misc_feature (586)..(586): n is a, c, g, or t
cagactcccaaagtgttgggattataggcatgagccattgcacctggccccaaatagaccaaatcttttgattagaaccaaattattcttcttctgcttatgggtggttggtatccacaaattgcaaatgcctagtcttcactcctctcagtttttctttttgtttctgtaataaacactctgggaagtttttcaaaagttatttcttttgatagtaattattgttaaattaaatgcttttatatctttagcaatgttgccaaaaacaatgagcaaaatcatgttttcttctaaagaagtgatgcaatatgaaataaagatgtgtgtgcttttcagaaagaaatgaaagaaattctagaaaattgtggttgggctggcattaatagctgaggcaataaaaaaattctctggtctgcagaaatcaatcttaagggcaaaggtagtctatagtatgggttatcaagtaaatgaatcanattcactttagtactttatttttgtcaaggattttgtctctaatgtgtgttaagcaatacctcattccttcacatnctgcaccagtccaggctgcagtgggaaaagacanatgcagcagatgccaactaaggaagctctcagggcacatgtaatgtttggctgaatctattatccggatattctcatgaggcgg

SEQ ID NO: 253763 - DNA, 574 bp, Homo Sapiens
aggccctaatagtaaggcattcagtatatctcttgactagaatattagtatgtatataaattaatgggaggaaaatagagaaatccttatataacaacatttgattctgataacctgttacttattgatccttatataacatttacatttgattctgataacctgttactgattatcataatttatcatagttataatattgattatgaaatatgcttctgttgaaaatcaatgaaattgaacaaatttatttaccagttcttaggtgtatatagaatttatcaatcagaaacccttatgctttgactcaaatgtttaagtcaatgtgaaacattcaaatgtgataaaactgttacattcaaggagcatggtacatgtcattaacatgttgttaatttcaaaagaaactgtatttaagctccagacctctgcttcccattccacagcagcttgccacaaatggatatatacacaacaaattaatttctatagttcaacacaatctactatcataatgaaacaacttatgaaaggaatgttgcaacttagggtgggttatggttgtccttccctg

SEQ ID NO: 253764 - DNA, 318 bp, Homo Sapiens
gaatgaaatatgcttctgttgaaaatcaatgaaattgaacaaaatttaccagttcttaggtgtatatagaatttatcaataaatgtgataaaactgttacattcaaggagcatggtacatgtcattaacatgttgttaatttcaaaagaaactgtatttaagctccagacctctgcttcccattccacagcagcttgccacaaatggatatatacacaacaaattaatttctatagttcaacacaatctactatcataatgaaacaacttatgaaaggaatgttgcaacttagggtgggttatggttgtccttccctg

SEQ ID NO: 253765 - DNA, 351 bp, Homo Sapiens
agaacagggagggggcagctgtctacccagcagcctcagaaggaaccagccctgccagcaccttcctctcagacttctggtctccaaagccacgtggcagtacctcgctgtctatgccactgggtctgcgaactcagttacagcagccctagctgattcccactgccgatcaatccacatggggcccaacctgggtttccagtaggatagaagctctccaaagaaacctccagatgacctgccagaattcaccgaaccacaatggtttacactgaagcacatcaaacagtgcctgatatatcaagactaagggtagggccgggcatggtggctcacgcgtatggtgtggct

SEQ ID NO: 253766 - DNA, 1296 bp, Homo Sapiens
  misc_feature (158)..(159): n is a, c, g, or t
  misc_feature (163)..(164): n is a, c, g, or t
  misc_feature (166)..(166): n is a, c, g, or t
  misc_feature (169)..(169): n is a, c, g, or t
  misc_feature (171)..(171): n is a, c, g, or t
  misc_feature (174)..(174): n is a, c, g, or t
  misc_feature (179)..(180): n is a, c, g, or t
  misc_feature (240)..(240): n is a, c, g, or t
  misc_feature (261)..(262): n is a, c, g, or t
  misc_feature (265)..(266): n is a, c, g, or t
  misc_feature (273)..(273): n is a, c, g, or t
  misc_feature (298)..(298): n is a, c, g, or t
  misc_feature (307)..(307): n is a, c, g, or t
  misc_feature (312)..(312): n is a, c, g, or t
  misc_feature (320)..(320): n is a, c, g, or t
  misc_feature (332)..(332): n is a, c, g, or t
  misc_feature (339)..(339): n is a, c, g, or t
  misc_feature (342)..(342): n is a, c, g, or t
  misc_feature (344)..(344): n is a, c, g, or t
  misc_feature (358)..(358): n is a, c, g, or t
  misc_feature (374)..(374): n is a, c, g, or t
  misc_feature (376)..(376): n is a, c, g, or t
  misc_feature (401)..(401): n is a, c, g, or t
  misc_feature (415)..(415): n is a, c, g, or t
  misc_feature (438)..(438): n is a, c, g, or t
  misc_feature (441)..(441): n is a, c, g, or t
  misc_feature (446)..(446): n is a, c, g, or t
  misc_feature (458)..(458): n is a, c, g, or t
  misc_feature (463)..(463): n is a, c, g, or t
  misc_feature (466)..(466): n is a, c, g, or t
cacgcctgagcaccccaggacctgcgctcagggaggaggcaggcgtggggctgtggagagattggcaggggagagcacagccccttgtgctctggcctggacccgggggccacgtctggaaggctggactgaggccaggactgtgcccccacccttgnnggtnntnagnancanccttnnttcattcttccttccattacttataattttccctcctatttctcccacaaactttttatntttttatctcttttttacatnnttnnttctttnttattttacacaatcatttatcttnttttttttntattncatatatntcaacaactttncccaatntcntntcatattttctatnatctttttttaatttncncttaaatgttcaccttttattattnatatttaatacggntattatttggtcttatacatttntcnttttnttctccattttnttttnttntccctgagcccctgggctctagacccaggcagccaaacctcattccctgggcggcagcaggacggagggctgccccctacctggtcctgacggccctgctgatcttcactggggccttcctactgggctacgtcgccttccgagggtcctgccaggcgtgcggagactctgtgttggtggtcagtgaggatgtcaactatgagcctgacctggatttccaccagggcagactctactggagcgacctccaggccatgttcctgcagttcctgggggaggggcgcctggaggacaccatcaggcaaacaagccttcgggaacgggtggcaggctcggccgggatggcggctctgactcaaggacaatcgcgcggcgctctcccgccagaagctggacaacgtgtggaccgacacgcactacgtggggctgcaattcccggatccggctcaccccaacaccctgcactgggtcgatgaggccgggaaggtcggagagcagctgccgctggaggaccctgacgtctactgcccctacagcgccatcggcaacgtcacgggagagctggtgtacgcccactacgggcggcccgaagacctgcaggacctgcgggccaggggcgtggatccagtgggccgcctgctgctggtgcgcgtgggggtgatcagcttcgcccagaaggtaagtgtccctggacagagggagggcttgagcccgggaaccggagggtcggactgccagtgagaatcgttcagggtgctgtgagagggagacaggaaagaaccatgtggctggatggtaagaaaatataagctgggcacgatggttctcac

SEQ ID NO: 253767 - DNA, 570 bp, Homo Sapiens
gccgctgctgactcaggacattcgcgcggcctctcccgccagaagctggaccacgtgtggaccgacacgcactacgtggggctgcaattcccggatccggctcaccccaacaccctgcactgggtcgatgaggccgggaaggtcggagagcagctgccgctggaggaccctgacgtctactgccccctacagcgccatcggcaacgtcacgggagagctggtgtacgcccactacgggcggcccgaagacctgcaggacctgcgggccaggggcgtggatccagtgggccgcctgctgctggtgcgcgtgggggtgatcagttcgcccagaaggtgaccaatgctcaggacttcggggctcaaggagtgctcatatacccagagccagcggacttctcccaggacccacccaagccaagcctgtccagccagcaggcagtgtatggacatgtgcacctgggaactggagacccctacacacctggcttcccttccttcaatcaaacccagttccctccagttgcatcatcaggccttcccagcatcccacgccgagccctatggagtctc

SEQ ID NO: 253768 - DNA, 485 bp, Homo Sapiens
cctgcagaggatcaagacagcacgtggacctcgcacagcctctcccacaggtaccatgaaggtctccgcggcagccctcgctgtcatcctcattgctactgccctctgcgctcctgcatctgcctccccatattcctcggacaccacaccctgctgctttgcctacattgcccgcccactgccccgtgcccacatcaaggagtatttctacaccagtggcaagtgctccaacccagcagtcgtctttgtcacccgaaagaaccgccaagtgtgtgccaacccagagaagaaatgggttcgggagtacatcaactctttggagatgagctaggatggagagtccttgaacctgaacttacacaaatttgcctgtttctgcttgctcttgtcctagcttgggaggcttcccctcactatcctaccccacccgctccttgaagggcccagattctaccacacagcagcagttacaaaaaccttcccca

SEQ ID NO: 253769 - DNA, 637 bp, Homo Sapiens
acgtcggtaagacaccaaggtctcttgttgcagtgaggcaccatctttgtgcagttggccgaggttatgaccttacaatgggtctttaagggcgatctattgatgagaaggtcttctgggtgggatgatcaggttatgctgaaatccacactaaacacttttctggttttaacatttgatcccaaattatggataagttgccaaagagaacattcaaaatagtttccttcatgtgcttgttaaggcgtagactgtctctgaaggtcctcagattggcattggaagacttaacttctttcccttaaggactttggtcacatacaagtagaagaagtcacagtagaagatggtttgtactactccagacacgactgcaatttggtcatagaaattctcagtctggtaccgcctgatccagttagccaggtagagtgcccggtacagacccagaaagaacaggtagtgagtagttatggtctcagcctctccagtcttgctgatcatgaagagctggggcaggatagccactgattccagatagatagagaaagtccagaggatctccagcagagtgaaactgtagttttcaaggaaggaaaggccaatgactgggaccagaagaaactccaggcggaat

SEQ ID NO: 253770 - DNA, 602 bp, Homo Sapiens
caaactcaaacctcaacgtattcaaaaaacgtcaactgaatgtcaataaggttctcttgggacaattttcctcgagttattcttgaaaaagtagtcttatgttgtgctcaatataagttgctatagaaattcttaattcagggacatagttataaaatcaaaagttatcttcccacccaaagactaagagtgtttctaaagcaggatgaacaatttcatcgaagttccttatgatcttgtaatgtcccttaaaactcaagagctcactgattcaattggttgtcatttttcctttccagaaatattaccaaccagaacatcattgcacaaactttcttgaattcagactcaggtatacagtgtatgggataagaagggccactggagaaaggtagattcaggatatttacctttgcttgaagaagtagagctctgcctcttcctacagtctataagaaaaacacattatcccataaaatctgtgtttatatatacgcaggcagaaaatggtataataggaggctatgttaattaaaacaattcactgtagacatagcaatgagtcaactgttcattcaagtataatgactccaatattcttc

SEQ ID NO: 253771 - DNA, 1271 bp, Homo Sapiens
aatttttctgtgggagaccacggtgttggccccgttgcaattttcttattgtggcccgcgggtcccaaaccaagtggttatgaaagcttttttggggagcggggggcggcggagcccggttttggtcgtcttccctttcctgttttttccagagtggagcgcctttattgccctgggagcccgcgctctcggaggctgtcttccgtcgccaagggtcccggaccgagtacacagtgccagctggcttagttggtggacggcttggcccactcgacgttgaggatgaggtggtcgtagccaaaaccggacaccccggcaatggcacgcgcagcatcctcgcggcggtggaagctgatgaaggcaaagcccttggattggccagtggtcttgtccttagccaggtagatgcgggagatggagccgaaaggccggaagagctcctgcaggtcggtctcacgcgtgtcctctgacaagttggtgacacggatggtggcgttgtcgtcggctctgcggttgggctgcatggactccccgcggcggctggccccgtcgcgcaggctcggcggcacatacttccctgtcttgttctgcgtggcctgcaccggctctagctctcccggcagcttctccttctcgccagtagacaggcccagctgctcggccagctccttctgcatgggccccagcgtatccttgtaggggcagcgggtggtccagtggtcgcccttgcagatgcggcaggacacgatcttctggcccttgagtttgttcatagggtcctcctcctcctggcagttcaggtcctctttgctggtgatgaacgtcatagagacatcgtcactgacagtggtggtggccacattgggtccgggggggtcaaactctgagttcccgaacttcttccagttcttcctccttgcgacagcctttgaagccttccgggtctcaatcctgaaggtgcggacaatcttgaacttcttgccatcctcatctatcttgtactctgtcactgtctttatgtttccgttgatgacctccttgggaggcggcagtggagctcccggcagtagctctggctctgggctggtgtcacctgtggccagagggatccccttgaggagctcgctggtgacacatttgtcgtcctccccctcctcctccacctggtcggcccaactgggcttcgaatcaaagtctccagtaggcatcgcaaaaagtattctccacgcagcccaagcccctcgtgccgattcgccacccaggcctcgctc

SEQ ID NO: 253772 - DNA, 1979 bp, Homo Sapiens
  misc_feature (1859)..(1888): n is a, c, g, or t
gctgggtggcgaattcggcacgaggcgtccgggccctgctgtttgacatctccttcctcatgctgtgccatgtggcccagacctatggttcagaggtgattctgtccgagtcgcgcacaggagctgaggtgcccttcttcgagacctggatgcagacctgcatgcctgaggagggcaagatcctgaaccctgaccacccctgcttccgccccgactccaccaaagtggagtccctggtggccctgctcaacaactcctcggagatgaagctagtgcagatgaagtggcatgaggcctgtctcagcatctcagccgccatcttggaaatcctcaatgcctgggagaatggggtcctggccttcgagtccatccagaaaatcactgataacatcaaagggaaggtatgcagtctggcggtgtgtgctgtggcttggcttgtggcccacgtccggatgctggggctggatgagcgtgagaagtcgctgcagatgatccgccagctggcagggccactgtttagtgagaacaccctgcagttctacaatgagagggtggtgatcatgaactcgatcctggagcgcatgtgtgccgacgtgctgcagcagacagccacgcagatcaagtttccctccaccggggtggacacaatgccctactggaacctgctgccccccaagcggcccatcaaagaggtgctgacggacatttttgccaaggtgctggagaagggctgggtggacagccgctccatccacatctttgacaccctgctgcacatgggcggcgtctactggttctgcaacaacctgattaaggagctgctgaaggagacgcggaaggagcacacgctgcgggcagtggagctgctctactccatcttctgcctggacatgcagcaagtgaccctggtcctgctgggccacatcctacctggcctgctcactgactcctccaagtggcacagcctcatggaccccccgggcactgctcttgccaagctggccgtgtggtgtgccctcagttcctactcctcccacaaaggacaggcgtccacccgccagaagaagagacaccgcgaagacattgaggattatatcagcctcttccccctggacgatgtgcagccttcgaagttgatgcgactgctgagctctaatgaggacgatgccaacatcctttcggagccccaacccgatccatgagcagctccctctcagcctctcagctccacacggtcaacatgcgggaccctctgaaccgagtcctggccaacctgttcctgctcatctcctccatctggggttctcgcaccgctggcccccacacccagttcgtgcagtggttcatggaggagtgtgtggactgcctggagcagggtggccgtggcagcgtcctgcagttcatgcccttcaccaccgtgtcggaactggtgaaggtgtcagccatgtccagccccaaggtggttctggccatcacggacctcagcctgcccctgggccgccaggtggctgctaaagccattgctgcactctgaggggcttggcatggccgcagtgggggctggggactggcgcagccccaggcgcctccaagggaagcagtgaggaaagatgaggcatcgtgcctcacatccgctccacatggtgcaagagcctctagcggcttccagttccccgctcctgactcctgacctccaggatgtctcccggtttcttctttcaaaatttcctctccatctgctggcacctgaggagagtgagcagcctggaccacaagcccagtggtcacccctgtgtgcgcccgccccagcccaggagtagtcttacctctgaggaactttctagatgcaaagtatgtannnnnnnnnnnnnnnnnnnnnnnnnnnnnncgtgtttgggtggattttggaaatatgtgatggaaaattaactttcggtcatgtataaaataaagcttctagtggcttccttaaaaaattc

SEQ ID NO: 253773 - DNA, 745 bp, Homo Sapiens
acccaccaacaggcccgaccggtagcttgaagaattgatcacatcgtcgttcttcccatgaaccaaaagtagccatccttgtccatgcgagctcggtcccctgtgatgtaaaagtccccttgttctgatgcagctgtcttctcaggattgtccaaatagcaattgaagaaacagaagggccgagtgggtctgatacggacggcaacattcccctcttctccaggaggcaggacgttgccctcatcatccaccatgccttttggattggcacagatgacaaccgtttcagactggccatagccttcgtacagctccacaccggtctggtgtttccacttctccctcacgtcacggttgagggcctctcctccggtcagacagtgcctcaggctctgaaactggtacctggtcagatcctcctgcacaagcagccgaaagatggttgggacacagcagagggtggttatcgggaatttggagagagtattcaggataactttggcatcaactcggggcagctcatgcacaaaaatgcaagatccattaggccaggcagagaagaaagtccaggctgccttcacacagccagtgtcagtcgtgttccagaagatgtcagattcggtcaaggccacccaccgtcttccgctggccacaaaacccagtccgtagctgctctgggagtgctcgaccatcttgggggccccggtggttccgctggtaaagtagatggccagcgggtctcgac

SEQ ID NO: 253774 - DNA, 1283 bp, Homo Sapiens
gtatgtgatcaggcccaatgataccgctctgtccagcattgcacagtgatcctggggatcccgtttggaagctgcacacctttgacatctttagggtcaaagagatgatgctccccatggggactgaccagtgatccattagtctcttgtggagtcttcggaggtctacggggccttcctggggtgcacctcatttcccccactcctgacttcgcaatttactcctttggatctttccagaaaccgtctttggcagcacatgctcctggagttcccgcgttagtgcctctgggtcatgagaggagtaggctggagtaaggactataaatgcctttaccacctctcccctgatggggtctgggctgctgaccacagccgactccaggacagcaggatgctctgccagggcactttccacttcaacaggcccgatccggtagcttgaagaattgatcacatcgtcgtttcttcccatgaaccaaaagtagccatccttgtccatgcgagctcggtcccctgtgatgtaaaagtccccttgttctgatgcagctgtcttctcaggattgtccaaatagcaattgaagacacagaaggcccgagtgggtctgatacggacggcaacattcccttcttctccaggagccaggacggtgccctcatcatccacaatgctgcacatcgtagcgtgggaacgccttcaccatgggatccagacttgatttcaatgcctcttggattggcacagatgacaaccgtttcagactggccatagccttcgtacagctccacaccggtctggtgttaccacttctacctcacgtcacggttgagggcctctcctccggtcagacagtgcctcaggctctgaaactggtaactggtcagatcctcctgcacaagcagccgaaagatggttgggacacagcagagggtggttatcgggaatctggagagagtattcaggataactttggcatcaactcggggcagctcatgcacgaaaatgcaagatccattaggtcaggcagagaagagagtccagactgccttcactcagtcagtgtcagtcgtgttccagaagatgtcagattcggtcaagaccacacaccgtcttccgctgtccgcaaaacccagtccgtagcagctctgggagtgctcgaacatcttgagggccccggtggttccgctggtaaagtagatggccagcgggtctcgactctgtgtcctcatgcagttgtgctctgtagaagcctcccggaggagttccctgaagttcaagcagc

SEQ ID NO: 253775 - DNA, 699 bp, Homo Sapiens
ctcctctcatgacccagaggcactaacgcgggaactccaggagcatgtgaaaagggtgactgctccatacaaataccccaggaaggtggcctttgtttcagaactgccaaagacggtttctggaaagatccaaaggagtaaattgcgaagtcaggagtgggggaaatgaggtgcaccccaggaaggccccgtagacctccgaagactccacaagaaactaatggatcactggtcagtccccatggggagcatcatctcttcgaccctaaagatgtcaaaggtgtgcagcttccaaacggcatccccaggatcactgggcaatgctggaaagagcaaaagaatatcattggccctgatcacatagatgctgcgccgcctagcaaatgcttggtggttcgacttctccctctgtctgggggcaggctcagcatctgcccactggtctcactaagagctttcagatttccctccataggacaggttaccatagacttggggcacttgtgggtactcattctctgccagtgggaatgtaaaggcttcatcctttgtatgtaaccatttggcaaaagtatgcaggaacataaaataaaatatcctttagctcagaaattctatcttcgggagtcaccacaaaagaaaaaatcaaaatgcagaaaatggtgtggtgcactaagatgatcacacagcattaaaact

SEQ ID NO: 253776 - DNA, 1074 bp, Homo Sapiens
  misc_feature (97)..(150): n is a, c, g, or t
caggattcggcacgagggcggacggggcgcggcgggggacacggcggccgccgcggggctcgatcgggcaacggcggcgacggcggcagcgacggannnnnnnnnnnnnnnnnnnnnnnnnnnnnnnnnnnnnnnnnnnnnnnnnnnnnnggccgggcctcgtccactttccctaacggcggcctcgatcctacgtaaaggcatgacttcctggcaccacagggaaaatcgggtgcaagcccagaaactatttccccaccaccacttgttgaaaaactgatttgaaggcatctccggggttgaacaaacggaaagtgccaggatttgatgcgtctctggtttcgctctggagaccattccctgctaagtatcaagacgaaaaaaactggaaactaatccgaaccatatttatttagagtcagaatggagcgatttgtagtaacagcaccacctgctcgaaaccgttctaagactgctttgtatgtgactcccctggatcgagtcactgagtttggaggtgagctgcatgaagatggaggaaaactcttctgcacttcttgcaatgtggttctgaatcatgttcgcaagtctgccattagtgaccacctcaagtcaaagactcataccaagaggaaggccagaatttgaagagcagaatgtgagaaagaagcagaggcccctaactgcatctcttcagtgcaacagtactgcgcaaacagagaaagtcagtgttatccaggactttgtgaaaatgtgcctgggaagccaacatcccactttgagaaggctgatcacccagcagtccgtgctttcctatctcgccatgtgaagaatggaggctccatacctaagtcagaccagctacggagggcatatcttcctgatggatatgagaatgagaatcaactcctcaactcacaagattgttgactaggaggttaccaccattgtgatcaagataaatgtggagtattaaagttatgtgttgattgtgtggttcatttttgtatttatttcatttaaaatcatgtgacgcagaatagttttgcaatgtgtatatagttgcaggcaaaa

SEQ ID NO: 253777 - DNA, 628 bp, Homo Sapiens
  misc_feature (43)..(43): n is a, c, g, or t
  misc_feature (61)..(61): n is a, c, g, or t
aaactcatcatcggctattctcatcacgaaccgagggtggttntgcatacttaaaataacnagttcgtgagtgaatactgcaaattaaaaaactgtcaaaacacagcaaatgataaggactaaacatcccattatccacaaactcatttgaaactactaccatggatttgagagaagccctagcaatacaaagtccccaaataagtaaaatacagataaaagtggaagagcctacatcagctcaaagtaacatacttcctttaacttatgccttcagtttaataatactgtttataccactacattgtataataacgaaataatgtaaacataccattagagggcaggagagggatgggtttcaccatatacaaagagtttaagtttgccctgctacctctttttaaccttgggtgcagctgtacattgttctataggggtattgttctatagtttaaaaacactaagctaaatctctggtaaattaacctaatttagcacataaaatatgttttcattaaacatatgggataggaagggataggaagatggcccggtgttatgttgatgcatggcataattaaaaacacagctaagaccaggcactgtggctcatgcctgtgattcc

SEQ ID NO: 253778 - DNA, 622 bp, Homo Sapiens
  misc_feature (414)..(414): n is a, c, g, or t
  misc_feature (588)..(588): n is a, c, g, or t
ggaatcacaggcatgagccacagtgcctggtcttagctgtgtttttaattatgccatgcatcaacataacaccgggccatcttcctatcccttcctatcccatatgtttaatgaaaacatattttatgtgctaaattaggttaatttaccagagatttagcttagtgtttttaaactatagaacaatacccctatagaacaatgtacagctgcacccaaggttagaggtagcagggaatggtatgtttacattatttcgttattatacaatgtagtggtataaacagtattattaaactgaaggcataagttaaaggaagtatgttactttgagctgatgtaggctcttccacttttatctgtattttacttatttggggactctgtattgctagggcttcagaatactaactntgacacagctcccagagaggtttgcaaacttttggtttccctctcaaatccatggtagtagtttcaaatgagtttgtggataatggatgtttagtccttatcatttgctgtgttttgacagtttttaatttgcagtattcactcacgaactgttttattttaggaataatgcanaaccaaccttcgtccgtgatgagttagccgatgt

SEQ ID NO: 253779 - DNA, 720 bp, Homo Sapiens
tcatttaaagcacgatgagcaaattctcttatcatacggttattctcatcaccggaggaaggttggttttgcattattcataaaataaaacagttcgtgagtgaatactgcaaattaaaaactgtcaaaacacagcaaatgataaggactaaacatccattatccacaaactcatttgaaactactaccatggatttgagagggaaaccaaaagtttgcaaacctctctgggagctgtgtcaaagttagtattctgaagccctagcaatacaaagtccccaaataagtaaaatacagataaaagtggaagagcctacatcagctcaaagtaacatacttcctttaacttatgccttcagtttaataatactgtttataccactacattgtataataacgaaataatgtaaacataccattagagggcaggagagggatgggtttcaccatatacaaagagtttaagtttgccctgctacctctttttaaccttgggtgcagctgtacattgttctataggggtattgttctatagtttaaaaacactaagctaaatctctggtaaattaacctaatttagcacataaaatatgttttcattaaacatatgggataggaagggataggaagatggcccggtgttatgttgatgcatggcataattaaaaacacagctaagaccaggcactgtggctcatgcctgtgattccctcgtgccga

SEQ ID NO: 253780 - DNA, 548 bp, Homo Sapiens
cccaagagggcctagaggccttgttctctcactccatttggaaacatctcggatgccctcatatatcatgctgtcttcgtcagtggcagcagcaatgagtgcggttatgcccccatcactccaccccagcagagaaaccttcttaaacttcagcgccttcatcaaatcaacagcatcgcatccctttcaaaaaagtctgctgggaaatcgcgatctgggggcctggaatgtccatagcctcgaggatcccaggcgaccaccgtgaagagcttcttattgaggttcttgagctgaggtccaaaatcagtctctccacttcctaacatcccaggaagtagcaggactgcgtgatctccctctccagtctgctggtaatgcagctgaacgccattcacagccactttggcagaggttaccgaggtgccgaacgcggccgcgggtccggcccgtgggacgtggatcccgggcttcagcgctgagagaagcagccgcaggcgcaacacgccccggccgcccagcacagccaccaggtcacaggtcgcgtagct

SEQ ID NO: 253781 - DNA, 646 bp, Homo Sapiens
acagggggttttgtgtaagggcggggggtggacgaattcatactagtttatttaggagttccattttcactcctcaatagattttatgtatttctcatatgcttcttcactcataagttcatctagttctgaagggttactcagtgtcatcttgatcagccaaccatcttcataacaagatttgtttacaagtcctggattttctgcaagagcttcattaatttcagttacttctcctgataaaggagaatagagttcactagcagctttcacactttccaaagcaccaaactcatcttgtttgttcaattttgtcccaacttcagggagactacaataaacaacatctcccaacgcttcctgtgcaaaattgctgattcccactgttccaatgccattttctgttgttacccattcgtgtttctctgtgaatttacgcaccgagagcagagcgggtccagtgcgcagcgtacggacggcgcccacccccagctgccagggcctcggcgggcagggcgcggcgggtaacgggaccgcgcgcagggtgcagagcagggcccgcacgctccgcaccactcgcagcgccatgttcgcaggggtgcgggggtcgcagcgctacgcctcggccacccgcgccgggaggcgg

SEQ ID NO: 253782 - DNA, 950 bp, Homo Sapiens
  misc_feature (313)..(313): n is a, c, g, or t
tagtgaacctctatttcccccctttaccaggagaagtaactgaaattaatgaagctcttgcagaaaatccaggacttgtaaacaaatcttgttatgaagatggttggctgatcaagatgacactgagtaacccttcagaactagatgaacttatgagtgaagaagcatatgagaaatacataaaatctattgaggagtgaaaatggaactcctaaataaactagtatgaaataacgcaacccagcagagttgtcctaaattagtggtggatagaagacttagaatagaaacttttagtattaccgatgggaanaaaaaaactactgttaacactgctaatgaaagaaaatgccctttaactttctaatgattatagataaatataatatgtgtctttttcacaatatcctatgatttttagactaggctctagtgttcagaattcatgaaattatccatggtaaaaactagttataaaaattacataattcaaagataacattgttattcttaagccttatataatattgtaacttgcatgtatccatacctggatttgggatgaaatacttaatgatctttccattggaaataactggaagtgaagaggttttgttgcttgtacagtgtcagatgaggaacaccactatcttaattttgcgatacactgcatttgctggtgctatttttatacagtgaagcaacagctttgcagcaaaataataaaatacttcttcgttaatcatgtttgttttgatgttaatatttcatttagtaactctgctagtatttgtgaaagtgctaactttaacttacggaaagttactttttaaaaggaaatttaagccagaacaatgcaaagctccaagaaaatgttttctttagtcacaaatctggtttttcttaagccaagatctgtcacctttaacataataaaaaataaatcacca

SEQ ID NO: 253783 - DNA, 667 bp, Homo Sapiens
agtggatcccccgggctgcaggattcggcacgagtaacagagctcactaatgaagatcttttggatcagcttgtgaaatacggagtgaatcctggtcctattgtgggaacaaccaggaagctatatgagaaaaagcttttgaaactgagggaacaaggaacagaatcaagatcttctactcctctgccaacaatttcttcttcagcagaaaatacaaggcagaatggaagtaatgattctgacagatacagtgacaatgaagaaggaaagaagaaagaacacaagaaagtgaagtccactagggatattgttcctttttctgaacttggaactactccctctggtggtggattttttcagggtatttcttttcctgaaatctccacccgtcctcctttgggcagtaccgaactacaggcagctaagaaagtacatacttctaagggagacctacctagggagcctcttgttgccacaaacttgcctggcaggggacagttgcagaagttagcctctgaaaagaatttgtttatttcatgcaagtctagccatgataggtgtttagagggtcttcgtcatcttctcagcctgaacacagttgccatgtggtctctactgcaagttctcctcactgattaaagaaacaccacttgttactatgactgtg

SEQ ID NO: 253784 - DNA, 827 bp, Homo Sapiens
ggggcctcctgcctgtagtgtgtgggctggggttggtgcgagcttccagcttggccgcagttggttcgtagttcagctctggggtcttttgtgtccgggtctggcttagctttgtgtccgcgaagtttttgttcccctccccagcgctcttcccgggcaggagccgtgaggctcggaggcggcagcgcggtccccggccaggagcaagcgcgccggcgtgagcggcggcggcaaaggctgtggggagggggcttcgcagatccccgagatgccggagttcctggaagacccctcggtcctgacaaaagacaagttgaagagtgagttggtcgccaacaatgtgacgctgccggccggggagcagcgcaaagacgtgtacgtccagctctacctgcagcacctcacggctcgcaaccaggccgccgctccccgccggcaccaacagcaaggggcccccggacttctccagtgacgaagagcgcgagcccaccccggtcctcggctctgggggcgccccgcgggccggagccgagcagccgtcggcaggaaagccacaaaaaaaactgataaacccagacaagaagataaagatgatctagatgtaacagagctcactaatgaagatcttttggatcagcttgtgaaatacggagtgaatcctggtcctattgtgggaacaaccaggaagctatatgagaaaaagcttttgaaactgagggaacaaggaacagaatcaagatcttctactcctctgccaacaatttcttcttcagcagaaaatacaaggcagaatggaagtaatgattctgacagatacagtgacaatg

SEQ ID NO: 253785 - DNA, 366 bp, Homo Sapiens
gcacgaggttcaattgggaggaattactggactctggaagttgaagactgtccatataattaaaatgtacaataactacccaggtttaccttgcaagtttcaacatacacaaaattaactttatatgactcttcaaaaacagtttgccatcatacctaataatctggtttaaattttaaaaactcatccattttactttttaaatcaacataaatattttgttaaatgatagatgatgaatgctctcactgtccaatcttcacacatcttatagactaagtataaagaatccaagatttatagtgctgagtagtttttatatgtttacgcattattgtcattactgcattttttttgcccattctc

SEQ ID NO: 253786 - DNA, 1068 bp, Homo Sapiens
  misc_feature (381)..(381): n is a, c, g, or t
gcgactcggacgacgcggccccctcgggctctggcacgctctcctccaccccgccgtccgcatctcctgcggccaaggaggcctcacccaccccgccctcctccccgtcggtgagcggaggcctgtcctcccccagccagggtgtcggcgccgagctgatggggctgcaggtggactactggacggcagcacagcctgcggacaggaagagggacgccgagaagaaggacctgcctgtcaccaaaaacacgctcaagtgcactttccggtccctccaggtcagcaggctgcccagcagcggcgaggctgcagccacgcccaccatgtccatgaccgtggtcaccaaggagaagaacaagaaggtgatgtttctgcccaagnaaagcgaaggacaaggacgtggagtctaagagccagtgcattgagggcatcagccggctcatctgcactgccaggcagcagcagaacatgctgcgggtcctcatcgacggcgtggagtgcagcgacgtcaagttcttccagctggccgcgcagtggtcctcgcacgtgaagcacttccccatctgcatcttcggacactccaaggccaccttctagccccacccaccagggggcccacctcctgccccatgctgtgaggggcccagctgcatttctgttaacatttcagtttactacagagacagacgcttaaaacacaaagagaaacagtcttaagtatgaatgtgctcacaacgtggaaactaacggggggagctcctgccagggagccgaataactgcctctgcttattaaccccgaacgttccggcccggggctgggaagccagaaggacgatgctgagccatggatcgcggaaggcgtcctctggcctcaggagccacccagagcctcacaggctgagttcttgcctctgtgtcctgtccttcctggaagtcaggactctgcttcctcagggagcccggggaaggcggagctcagtggccacaggccgagggccatggggccgctcagtcccgttgggggttgtcctgagttgagcctgggggggccgtcctgcccgcctaa

SEQ ID NO: 253787 - DNA, 433 bp, Homo Sapiens
gctgcagccacgcccaccatgtccatgaccgtggtcaccaaggagaagaacaagaaggtgatgtttctgcccaagaaagcgaaggacaaggacgtggagtctaagagccagtgcattgagggcatcagcggctcatctgcactgccaggcagcagcagaacatgctgcggggtcctcatcgacggcgtggagtgcagcgacgtcaagttcttccagctggccgcgcagtggtccctcgcacgtgaagcacttccccatctgcatctttcgggacactccaaggccaccttcttaggccccacccaccaggggggccccaccttccttgccccattgctgttgagggggcccagctggcattttcttgtttaaacattttcagttttaattacaggaggacaggacgctttaaaaacacaaaggaggaaacagt

SEQ ID NO: 253788 - DNA, 428 bp, Homo Sapiens
  misc_feature (93)..(93): n is a, c, g, or t
  misc_feature (104)..(104): n is a, c, g, or t
  misc_feature (363)..(363): n is a, c, g, or t
ttgcccagaacccgaaataactgctctgcttaattaaacccgaaacgttacggcccggggctgggaaagccaacaaggacgatgctgaagccnatgggatcgcnggaaaggcgtcctctggcctcagggagccaccccagagcctcacaggctgagttcttgcctctgtgtcctgtccttccctggaagtcaggactctgcttcctcagggagcccggggaaggcggagctcaagtgccaccagccgaggccatggggccgctcagatccgttggggttgtcctgagttgagcctgggggggccgtcctgcccgcctaagagatgcccccagcaccgcacactcgtggttcccaataagacancccctgcggctggaggttttatagcagcagatatttttaatgcttttcaatacatgttctaattt

SEQ ID NO: 253789 - DNA, 1703 bp, Homo Sapiens
  misc_feature (161)..(224): n is a, c, g, or t
  misc_feature (1629)..(1647): n is a, c, g, or t
acagcgcctttcctctggtttccaaatcagttacgccccttctcgcacgcttccatcaagctcctccttcagctccgccttactcccggccgcctttgcgctgcgcgcctgcgcccgcgccggcttccagcgggtgtcggacctgagagctggaggggcgnnnnnnnnnnnnnnnnnnnnnnnnnnnnnnnnnnnnnnnnnnnnnnnnnnnnnnnnnnnnnnnnacgggacccggagccgagggccattgagtggcgatggcggcgacggcgagtgccggggccggcgggatagacgggaagccccgtacctcccctaagtccgtcaagttcctgtttgggggcctggccgggatgggagctacagtttttgtccagcccctggacctggtgaagaaccggatgcagttgagcggggaaggggccaagactcgagagtacaaaaccagcttccatgccctcaccagtatcctgaaggcagaaggcctgaggggcatttacactgggctgtcggctggcctgctgcgtcaggccacctacaccactacccgccttggcatctataccgtgctgtttgagcgcctgactggggctgatggtactccccctggctttctgctgaaggctgtgattggcatgaccgcaggtgccactggtgcctttgtgggaacaccagccgaagtggctcttatccgcatgactgccgatggccggcttccagctgaccagcgccgtggctacaaaaatgtgtttaacgccctgattcgaatcacccgggaagagggtgtcctcacactgtggcggggctgcatccctaccatggctcgggccgtcgtcgtcaatgctgcccagctcgcctcctactcccaatccaagcagttcttactggactcaggctacttctctgacaacatcttgtgccacttctgtgccagcatgatcagcggtcttgtcaccactgctgcctccatgcctgtggacattgccaagacccgaatccagaacatgcggatgattgatgggaagccggaatacaagaacgggctggacgtgctgttcaaagttgtccgctacgagggcttcttcagcctgtggaagggcttcacgccgtactatgcccgcctgggcccccacaccgtcctcaccttcatcttcttggagcagatgaacaaggcctacaagcgtctcttcctcagtggctgaagcggccgggggctcccactcgcctgctgcgcctatagccactgcgccctgggggcctgggctctgctgccctggacccctctatttatttcccttccacagtgtggtttcttcctctgcggtaaaggacttggtctgttctaccccctgcttcagcttgccctgctcgtcctgatcctgtgatttctctgtccttggctattcttgcagggagctggaaaacttcctgaggatttctggcctccccctgggttttagtttcagggcacacaggacagcagaagatcccctttgtcagtggggaaaccaaggcagagctgaggggacagggaggagcagaagccatcaagatggtcaaagggcctgcagagggagatgtggcccttcctccccctcattgaggacttaataaattggattgatgacnnnnnnnnnnnnnnnnnnnctcgagactattctctctccctcgtgccgaattcgccacccaggcctcgctacctt

SEQ ID NO: 253790 - DNA, 959 bp, Homo Sapiens
  misc_feature (884)..(902): n is a, c, g, or t
ggggtgttcccttccaccactgttgggggggagggttggcatcaccttaaccaaaggggctggggccgggtctttcgtccaaatgttgccccagtttccccctccttactccccaatcccaaggcagttctttactgaactcagggctacttctctggacaacattcttgtgccacttctgtgccagcatgatcaacggtcttgtcacccctgctgcctccatgcctgtggacattgccaaagaccggaatcccagaccatgcggatgattgatgggaagccggaatacaagaacgggctggacgtgctgttcaaagttgtccgctacgagggcttcttcagcctgtggaagggcttcacgccgtactatgcccgcctgggcccccacaccgtcctcaccttcatcttcttggagcagatgaacaaggcctacaagcgtctcttcctcagtggctgaagcggccgggggctcccactcgcctgctgcgcctatagccactgcgccctgggggcctgggctctgctgccctggacccctctatttatttcccttccacagtgtggtttcttcctctgcggtaaaggacttggtctgttctaccccctgctccagcttgccctgctcgtcctgatcctgtgatttctctgtccttggctattcttgcagggagctggaaaacttcctgaggatttctggcctccccctgggttttagtttcagggcacacaggacagcagaagatcccctttgtcagtggggaaaccaaggcagagctgaggggacagggaggagcagaagccatcaagatggtcaaagggcctgcagagggagatgtggcccttcctccccctcattgaggacttaataaattggattgatgacnnnnnnnnnnnnnnnnnnnctcgagactagttctctctccctcgtgccgaattcgccactcgaacaatgatagaaa

SEQ ID NO: 253791 - DNA, 441 bp, Homo Sapiens
  misc_feature (42)..(42): n is a, c, g, or t
  misc_feature (47)..(47): n is a, c, g, or t
  misc_feature (431)..(431): n is a, c, g, or t
ggcatttacactgggctgtcggctggcctgctgcgtcaagancctancaccactacccgccttggattctataccgtgctgtttgagcgcctgactggggctgatggtactccccctggctttctgctgaaggctgtgattggcatgaccgcagtgccactggtgcctttgtgggaacaccagccgaagtggctcttatccgcatgactgccgatggccggcttccagctgaccagcgccgtggctaacaaaaatgtgtttaacgccctgattcgaatcacccgggaagagggtgttcctcacactgtgggcggggctgcattccctaccatgggttcgggccgttcgttcgttcaattgcttgcccagcttcggcctcctaactccccaattccaaggcagtttcttaattgggatttcagggttatttnttttgaacaa

SEQ ID NO: 253792 - DNA, 376 bp, Homo Sapiens
agacaggtcactccatgaaccagaatgtgcataaagcagacactgaatctgctagtgccttgatattggacttgccagcttctaggttatggcaacctgaaataactgagacattgatcccctcagcaggagagcataacctattctccttaggtctctgatcttagagcctgcataagcgtagagacacagtgtaggtgggtttcagatgattaatatcttgaatgaataagtgggaaaaatcagtcacagtacttttaaagatgttaaatataaaaatgagttgtactattatatgatatacatcaaaaagtataaaatggtataactcacttataagtgggagctaaatgatgaggacatatggacacataga

SEQ ID NO: 253793 - DNA, 854 bp, Homo Sapiens
  misc_feature (50)..(50): n is a, c, g, or t
gataatcaactacacagaattacccacacacaaatcacacccgtataccngatccccatattcacggacttagtagactgttggccgccaccaacccaaaacatctttccttgcctcgaatccaaccctcccaggctaaatgcaaatcgcgcttcttaacatcaacacatgttcgaaaagaaagtgataaccacaggagacaaccccgaacatgactctccttgcatagtgttacacaaaggcctgatatcacagacactatcacataataggacccatgcagggatagacatactccacaaataagaactgtttggggctgtagtcagaatgagaaaatttccacaagacagaaaaaaataacatagtgttggcaggctaatgtaccctcctcttctagaaaagtgcaagtcaccaggtctcttggtccaggtcctaaggcactgtaacacctgagtaaagcctgggcttctcctgtgcttttatgacactccatgcactaaatgcctattcttctcctgacccctatatgtcctgagaccttctgatgtcttcttaccctaggttctcttctcctggctacctttaaataagtgactgagctatagggctccttttcctggtagggtagaaaaacacctcagtggctctcattttatataaatgaatctccctttggctcccataaatacccattttacaaagaactataaagaaagaggctgtgacacaggatagtgttatgatttttagctttataaaaaataataaatatgggttaccctacttaggttaaggacacactatgtgcttctacgggcccatgaccataatgtcttcatggactaatagag

SEQ ID NO: 253794 - DNA, 833 bp, Homo Sapiens
  misc_feature (30)..(30): n is a, c, g, or t
  misc_feature (67)..(67): n is a, c, g, or t
tatccccaccctcaaatcaccgtcacgcanattacatatctaccttccctgcctcccccctcctctnccagctgccaggaggcggaggcggccatggctgctgtggtggcggcggcttgcgggtggcgcgggaccggcggtcctgcaggtggccggactctaccggggcctgagcgcggtgcgcagccgagccctgggcctggggctcgtgtcacccgcgcagctgcgcgtcttcacagagcgccccggctcgggccggcccgaggggggcgccgacggcagcggggtcggggccgaggccgagctccaggccaacccttactacgaccgctaccgagacaagatccagctgctgcgcaggtcagacccagctgcgttaagagtcccgcctggagaaacgcagtgaatttcggaagcagccagtggggcattccaggcaaggtgattttatcaaaagggtggaacagaagacagatgccttggggaaacagtctgtgaacagaggattcactaaggacaagactctcagttcaatctttaacattgagatggtaaaagaaaaaactgcagaagaaataaaacagatttggcagcaatattttgcagcaaaagatacagtctacgcagttattcctgcagaaaagtttgatttgatctggaaccgggctcagtcctgcccaacatctctatgggctctgccaagaaaggaaggttatgagctttttggagggacaagggacagggaccgaactccacttcactgcaccaataatcagaccccgggggaaaccggcagccacccggctgatcttatatcactacccccgactttg

SEQ ID NO: 253795 - DNA, 872 bp, Homo Sapiens
  misc_feature (383)..(402): n is a, c, g, or t
  misc_feature (665)..(665): n is a, c, g, or t
  misc_feature (848)..(848): n is a, c, g, or t
gggccatccctacaccacagtatataaagccccccttaaggccatggatggagtcacccgtgggcccatttgggtgacaacccagtgaccttgggaagccacatagatacatcttacaagttgaatagagttgataactattttcagttttgagaataccagttcaggtgcagctcttaaacacattgccttatgactattagaatatgcctctcttttcataaataaaaatacatggtctatatccattttcttttatttctctctcttaagcttaaaaaggcaatgagagaggttaggagtgggttcatacacggagaatgagaaaacatgcattaaccaatattcagattttgatcaggggaaattctacacttgttgcnnnnnnnnnnnnnnnnnnnngcaaagggcctctaaagaatcagcctctttggtccctttgtgctgtcacctttttgccatgtttaacagcatcttggttggcactctagtcttaatcttgctccttaactttgaatatgcagtctaaaatgtcagtagtcaacatgtaattttcctttgaaattctgaatattccagtgctggaacttatccaaaaagaagacctcagaaacttagattggtagatctctagtgcatattatcatgtgggcaccttctcttanggtggaatgaggcagtctggatgcagcatagttaaaaggagctgtttaatattctctgtagtctggcctctttactaggaagtaaagctaaatcagaagcctgtatttaacccatgtgaacagggagggaatttagtggttctgatgggctggattactaagaacagcctaggataacttaanagccatgaccgttggggaatgggg

SEQ ID NO: 253796 - DNA, 245 bp, Homo Sapiens
agggcagcaggaacctccccatgctgcccccagggaagtctactcaaatgcgaagaaggggatagtagaggcaatggacgcaaccgctgcctggtaatgccaaacactgaggtggtccctgtggacagatgagcacaggctcctgccggtccaacccagaattggacaagtggccacacagagacagtctagggggctctcctctaaaatccagtctgaggtgctcattcttttataactactta

SEQ ID NO: 253797 - DNA, 777 bp, Homo Sapiens
  misc_feature (41)..(54): n is a, c, g, or t
  misc_feature (74)..(87): n is a, c, g, or t
taaaaaattaatagagctgtgcaaaccctgttatttttgtnnnnnnnnnnnnnntacatatctatatataatannnnnnnnnnnnnnacatatgcacacgtctctgtgtatgtgaagtaggggaggccctgggggatgacctcccagcctttatgatgcttttctctatgctgctggacttcattcttactggtccacgcagatgcaggcggcctgaggccagtgctgtaccaagtagaagacggttcctaaggacagagtttgtctgttttctaacaaagaaaaattctacaaaggagaggttgggcgttacaaaggcattgtgaatctaataaaaggaaagtgtcgctttctgtggcgttttctttcattttctcccgctgaggcatttcagtctaatttcatgtggttttgtgctgtctcagctctaatgtttgcagcctgctgagcctaacaaggcagtggtctcaagaacattcctttgtgcctttttaaagtactccattttatttttatgatagttatgtatttatttcacagatatatttaagtacccactttgtgtcaggtacagtacaagcaatgaagataaaacagaaaccaaaacacactcccttacagggaaaactgacaccacgttgccacaaaatgttgagtatagtcaactctgctgtgtggatcggagggcctgcatttatcctacaaataattgaatgtaatcctacattcatgtattcattggcagtacggagtaataaatgcagcaatgccataaaa

SEQ ID NO: 253798 - DNA, 1254 bp, Homo Sapiens
  misc_feature (937)..(951): n is a, c, g, or t
  misc_feature (971)..(984): n is a, c, g, or t
  misc_feature (1107)..(1107): n is a, c, g, or t
gggcgacacaaacacatcagacactccgtcctcacactggcaggacggtgttcatcgcattctcttctgtgaccagcctctaggtagcggctgcattcgtggtctgtgcaaacacttcgtggttctatatatcagcagcaagtgtgcaaaataaaggacctgttaactcagatttctggatattttggtggtagcttctagtcccagaatctgtgtttttaaaatactacatgacattctgtctattcaatcacctggtggtcatctttcttgaacaaattaacggttgatgagcatttgggatattctaggagaaagcctataatttcacatagtttctctttttcatgtaactgtaacctaaatgtattacttctgataaaactatatatcaaatgtcactgcaaattagttttatatctgtcatgtgagatttgtcttacttatttttcttttggttgccatgaaagttatggccctgaaaatcgtctccctccccttctcttgctgtacagcatgcgttctctttttgtggttgctggctgggtactgtatttaatgaagtagagaatagcacttgcaaaaatacagtcttggtacctagagactgtcatgcagatagtataatttggtatatgtgctaatgcattgagtagaggattattttaacacactattttgcttttgtattttagttaaaataatcgatggggatgtgtagcccccccgtgtgaggatgacatcaccacatttctagtttcatggagctcaagatgtcttgtgtctgtgtggctagatggcctctgcttggtaatcttatttttaggcctaaaattcccacttaaatccaaagtaaaaatggttatactgaagcataaaccttgcctgtgtaattttaaaaaattaatagagctgtgcaaaccctgttatttttgtnnnnnnnnnnnnnnntacatatctatatataatannnnnnnnnnnnnnacatatgcacacgtctctgtgtatgtgaagtaggggaggccctgggggatgacctcccagcctttatgatgcttttctctatgctgctggacttcattcttactggtccacgcagatgcaggncgcctgaggccagtgctgtaccaagtagaagacggttcctaaggacagagtttgtctgttttctaacaaagaaaaattctacaaaggagaggttgggcgttacaaaggcattgtgaatctaataaaaggaaagtgtcgctttcaaaa

SEQ ID NO: 253799 - DNA, 637 bp, Homo Sapiens
gaatgctattccaagttcagatcaaattcgagtagcaccatctttaaaaagccaaagaggctcagtgtggacaaagacaaaagcggcctttgagaactgggaagttgaggtgacatttcgagtgactggaagaggtcgaattggagctgatggcctagcaatttggtatgcagaaaatcaaggcttggagggccctgtgtttggatcagctgatctgtggaatggtgttggaatattttttgattcttttgacaatgatggaaagaaaaataatcctgctatagtaattataggcaacaatggacaaatccattatgaccatcaaaatgacggggctagtcaagctttggcaagttgccagagggacttccgcaacaaaccctatcctgtccgagcaaagattacctattaccagaacacactgacagtaatgatcaataatggctttacaccagataaaaatgattatgaattttgtgccaaagtggaaaatatgattatccctgcacaagggcattttggaatatctgctgcaactggaggtcttgcagatgaccatgatgtcctttcctttctgactttccagttgactgaaccctgaaaagaagccgccacaccagattgatattcggcgtgg

SEQ ID NO: 253800 - DNA, 664 bp, Homo Sapiens
cttgcttacctgcatgtagcaaagcccagacatcaagcatggtgggtgcagactgtccgtgtgacccaacaccgtgagctgtgagccctggcagcactccaaaacaatagccttgcaaaacgtactccccagaaagggttccacaattgatgagattggtcactactctgcatattagcacattaaagatttctttatgaaggatcctttataaagaaaggataaataaacctttattagacctcacatttcccagactgacttaactatggaattttttttcacctaatgtctatgagtgatcatgggagctagtgttttcaggtacacgttttgaagagactggctggacacgtgactgctacttattggttttcacctctctgtacatctcagtctggtaatgatcaataatggctttacaccagataaaaatgattatgaattttgtgccaaagtggaaaatatgattatccctgcacaagggcattttggaatatctgctgcaactggaggtcttgcagatgaccatgatgtcctttcttttctgactttccagttgactgaacctggaaaagagccgcccacaccagataaagaaatttcggaaaaggaaaaagaaaagtatcaggaggaatttgagcactttcaacaagaattggat

SEQ ID NO: 253801 - DNA, 617 bp, Homo Sapiens
ctaatttcctagattagacgttggtagggaggccgataagtcaaagtggcaagtgtcagtgtcacaccaaagggagcgaccagaacagagtaaagcccataaaccgagtacaaacaacaccacagtccctcaaagctgtaggccacgtagtatgagggaaacagcaccaccgctggggcagtgtgtcatcagaagagcattaggaagaggtccgtatcttgcagtttatgttgaagtttctggtaaagatggtcagaagcgggaacctgacacttcaaagtggaagcttcagttacctgggcgcccaaggggaggtgttctccccagtgatgccgggcaaatgaaccaacagctggatcatacttctcatttgacatgctttttgggggacctacgtggggttcagcactgcgccgggccacagatttgcagggccaatgaggatgtggtccctgccccggagcctgatgctctaagtgctgacggtggagggcttcccggaggaggtgttctctgaggagagtgcatgtggcttggtgtgagctctgagcacagaagtcacttggggatcatagcagttttgcttgtgaaggacagtgtggtggagagccccccct

SEQ ID NO: 253802 - DNA, 637 bp, Homo Sapiens
ctaatttcctagattagacgttggtagggaggccgataagtcaaagtggcaagtgtcagtgtcacaccaaagggagcgaccagaacagagtaaagcccataaaccgagtaaaaacaaacaacaccacagtccctcaaagctgtaggccacgtagtatgagggaaacagcaccaccgctggggcagtgtgtcatcagaagagcattaggaagaggtccgtatcttgcagtttatgttgaagtttctggtaaagatggtcagaagcgggaacctgacacttcaaagtggaagcttcagttacctgggcgcccaaggggaggtgttctccccagtgatgccgggcaaatgaaccaacagctggatcatacttctcatttgacatgctttttgggggacctacgtggggttcagcactgcgccgggccacagatttgcagggccaatgaggatgtggtccctgccccggagcctgatgctctaaatgctgagggtggagggcttccccgaggaggtggtctctgaggagagtggtacccggcagagtggtgctgaagagcctcttaacagagagacttggtgtcatgtggcttggtgtgagctctgagcacaggtcacttggggatcatagcagttttgtt

SEQ ID NO: 253803 - DNA, 626 bp, Homo Sapiens
  misc_feature (434)..(434): n is a, c, g, or t
ctaatttcctagattagacgttggtagggaggccgataagtcaaagtggcaagtgtcagtgtcacaccaaagggagcgaccagaacagagtaaagcccataaaccgagtaacagcaccaccgctggggcagtgtgtcatcagaagagcattaggaagaggtccgtatcttgcagtttatgttgaagtttctggtaaagatggtcagaagcgggaacctgacacttcaaagtggaagcttcagttacctgggcgcccaaggggaggtgttctccccagtgatgccgggcaaatgaaccaacagctggatcatacttctcatttgacatgctttttgggggacctacgtggggttcagcactgcgccgggccacagatttgcagggccaatgaggatgtggtccctgccccggagcctgatgctctaagtgctganggtggagggctttccggaggaggtgttctctgaggagagtgataagtacccggcagagtggtgctgatgagcctctgagcagagagactgggtgtcatgtggcttggtgtgagctctgaacacagaagtcactttgggatcatagcagttttgtttgtgagggacagtgttggggatagaggcccccgctgc

SEQ ID NO: 253804 - DNA, 1744 bp, Homo Sapiens
  misc_feature (524)..(524): n is a, c, g, or t
  misc_feature (1650)..(1650): n is a, c, g, or t
  misc_feature (1703)..(1703): n is a, c, g, or t
  misc_feature (1733)..(1733): n is a, c, g, or t
agttcacggtccggtcttcctggcctccagggaattaaaggtgatcaaggcgatcaaggcgtcccgggagctaaaggtcttccgcgtcctcctggcccaccaggtccttacgacatcatcaaaggggagcccgggctccctggtcctgagggccccccagggctgaaagggcttcagggactgccaggcccgaaaggccagcaaggtgttacaggattggtgggtatacctggaccttcaggtattcctgggtttgacggtgcccctggccagaaaggagagatgggacctgccgggcctactggaccaagaggatttccaggtacaccaggccccgatgggttgccaggatccatggggcccccatgcaccctatctgtcgatcacggcttacttgtgaccaggcatagtcaaacaatagatgacccacagagtccttctgggaccataattctgtaccacgggtactctctgctctacgtgcaaggcaatgaacgggcccatggacaggacttgagcacggncgggagctgcctgcgcaagatcagcacaatgccctttctgttctgcaatattaacaacgtgtgcaactttgcatcacgaaatgactactcgtactggctgtccacccctgagcccatgcccatgtcaatggcacccatcacgggggtgatggccgtgcacagacagaccattcagatcccaccgtgccccagcgggtggtcctcgctgtggatcggctactcttttgtgatgcacaccagcgctggtgcagaaggctctggccaagccctggcgtcccccggctcctgcctggaggagtttagaagtgcgccattcatcgagtgtcacggccgtgggacctgcaattactacgcaaacgcttacagcttttggctcgccaccatagagaggagcgagatgttcaagaagcctacgccgtccaccttgaaggcaggggagctgcgcacgcacgtcagccgctgccaagtctgtatgagaagaacataatgaagcctgactcagctaatgtcacaacatggtgctacttcttcttctttttgttaacagcaacgaaccctagaaatatatcctgtgtacctcactgtccaatatgaaaaccgtaaagtgccttataggaatttgcgtaactaacacaccctgcttcattgacctctacttgctgaaggagaaaaagacagcgataagctttcaatagtggcataccaaatggcacttttgatgaaataaaatatcaatattttctgcaatccaatgcactgatgtgtgaagtgagaactccatcagaaaaccaaagggtgctaggaggtgtgggtgccttccatactgtttgcccattttcattcttgtattataattaattttctacccccagagataaatgtttgtttatatcactgtctagctgtttcaaaatttaggtcccttggtctgtacaaataatagcaatgtaaaaatggttttttgaacctccaaatggaattacagactcagtagccatatcttccaaccccccagtataaatttctgtctttctgctatgtgtgggtactttgcagctgcttttgcaggaaatcacaattttcctgtgggaataaagatgggtccaaaaatagttcaaaaattaantatatatatatattcggtaatttcatatagggtgtccggcattagggcaggtncaggggtttaggtttaacttcccaccgttnaaattaaggct

SEQ ID NO: 253805 - DNA, 1028 bp, Homo Sapiens
  misc_feature (260)..(273): n is a, c, g, or t
tctacccccagagataaatgtttgtttatatcactgtctagctgtttcaaaatttaggtcccttggtctgtacaaataatagcaatgtaaaaatggttttttgaacctccaaatggaattacagactcagtagccatatcttccaaccccccagtataaatttctgtctttctgctatgtgtggtactttgcagctgcttttgcagaaatcacaattttcctgtggaataaagatggtccaaaaatagtcaaaaattaannnnnnnnnnnnnntagtaatttatatagatgtcagcaattaggcagatcaaggtttagtttaacttccactgttaaaataaagcttacatagttttcttcctttgaaagactgtgctgtcctttaacataggtttttaaagactaggatattgaatgtgaaacatccgttttcattgttcacttctaaaccaaaaattatgtgttgccaaaaccaaacccaggttcatgaatatggtgtctattatagtgaaacatgtactttgagcttattgtttttattctgtattaaatattttcagggttttaaacactaatcacaaactgaatgacttgacttcaaaagcaacaaccttaaaggccgtcatttcattagtattcctcattctgcatcctggcttgaaaaacagctctgttgaatcacagtatcagtattttcacacgtaagcacattcgggccatttccgtggtttctcatgagctgtgttcacagacctcagcagggcatcgcatggaccgcaggagggcagattcggaccactaggcctgaaatgacatttcactaaaagtctccaaaacatttctaagactactaaggccttttatgtaatttctttaaatgtgtatttcttaagaattcaaatttgtaataaaactatttgtataaaaattaagcttttattaatttgttgctagtattgccacagacgcattaaaagaaacttactgcacaagctgctaataaatttgtaagctttgcataccttaaa

SEQ ID NO: 253806 - DNA, 363 bp, Homo Sapiens
  misc_feature (11)..(11): n is a, c, g, or t
aacccgggggnaccccaggacttggcccacagccttcctgcaacccaccgctggtgtgccatccacaaaagagtcagccgatcccacagcgaaggacccaaccgctggggcacggtgggatccgaaatggtctggctgtgcacggccatcaccatggcaggcgcctcacacacagcacacctactaataaatggtcttatgttttcccccgtgatgggtgccattgacatgggcatgggctcaggggtggacagccagtacgagtagtcatttcgtgatgcaaagttgcacacgttgttaatattgcagaacaggaagggcattgtgctgaaccttgcgcagcagctgccgccgtgcccaagt

SEQ ID NO: 253807 - DNA, 1534 bp, Homo Sapiens
  misc_feature (149)..(149): n is a, c, g, or t
  misc_feature (349)..(349): n is a, c, g, or t
attaatttgtcaatcaaaaagttccaagtttcaaagctgggatgaaaagccaggtcttctgacttgcactctgtcacactggatttttcctctgatccagctgcagcctcccataagaagttcactcttaattccatgtcccatgcttntgtcttggtccctgtgaggaaaggggtcagctaaaggcaactgttctataaggatgggtaggtatcctggcaagatatttcctctgaaatagtaaacgtgaccttagaagttactgtctagggcactctcagctgaataaaagtctcccaaggaaacaactcgaggtagagcagtctgcacagtgcaaaagcacaccttntgcagattcccttacaaagtggggtcccatgaaagggggcaatgttaaaaggtaaacaaagcaggaatcaggagggcaaacaggagtagtgtcaaaactaccatggcaggttgcaagacagttcaacagatcaaagaatacgtgtcccagcgaccagggtgcacagaaggaccttttgctccagtccagcagatgtgttgtcatcagattggccaagaatgacttcgaggtcttgaatgtgtcccatgcaaggccccaagggcactcatttcaacagcaagtggcagcagccccagctcattcaatctttccttggccactgcctcccagcccttgttggcctgtgggttacggggagagggatgcaggagcccttccacctggacctctggcatcaggcctgccagagcccgtcgtgcccgctgctctgccagtcgcccaactcccaccaccagccgcacccccagcagctgcacctgccggcagagggctgcatcacagatcccaagaagctgttctcgctgcttggcaggcagctcagcaggagtaaggttgcgcccgctgggagccaggaaaagcagagggcatagattgtggacaaaacagtgatggaagaagacctcaggctgtccacagaggttccggaaaaagccccagaatcgggcaccactcacttctgactgtgggcactccagtcccagcactggtcgtttaggatgctcttggggaggggtcagcacaggccccacaatgcccaaccagtcccggaccatgcttacttccccaaagggcaccccagtctgggccatgccaaaaggtccagggttcatgcccaggaagagtacttccttggggccctggcagtagcgagtcacgtagttgcgatgtggctcccatgcatactccacgggattgtagatgatgcccacaggctccgaaaactgcagctggctcagctcagcattgagccgaagctcctcctccaggaagctctcagccaagcttccagggcagggctggggctccatgagggcacctgcaggctcatggatggaccccagcaggaaagcctggggcatatgtccatgccgctgtcacatgacaggcaccgcagcagtctcttgatgaggaagaaatccaaaaagagtaaaatgtaggccaggctttctgtaagctcataatctg

SEQ ID NO: 253808 - DNA, 643 bp, Homo Sapiens
ggggggatggggagctggaccaggtgacagcggcatggacatatgccccaggctttcctgctggggtccatccatgagcctgcaggtgccctcatggagccccagccctgccctggaagcttggctgagagcttcctggaggaggagcttcggctcaatgctgagctgagccagctgcagttttcggagcctgtgggcatcatctacaatcccgtggagtatgcatgggagccacatcgcaactacgtgactcgctactgccagggccccaaggaagtactcttcctgggcatgaaccctggaccttttggcatggcccagactggggtgccctttggggaagtaagcatggtccgggactggttgggcattgtggggcctgtgctgacccctccccaagagcatcctaaacgaccagtgctgggactggagtgcccacagtcagaaggaccaagacaaagcatgggacatgaaattaagagtgaacttcttatgggaggctgcagctggatcagaggaaaaatccagtgtgacagagtgcaagtcagaagacctggcttttcatcccagctttgaaacttggaactttttgattgacaaattaataaacctctctatgcctcaggctcatcatctgtaaaaa

SEQ ID NO: 253809 - DNA, 375 bp, Homo Sapiens
  misc_feature (202)..(202): n is a, c, g, or t
caagaaggcaggctaatgagaccatcaaagaggtaatcatatgctgcaagtaataggcacatcatcattcatatagggagtccaaagaagccagcctagcaggtaaccatagcagagcagaatgcaatgtagaagaggcacacagagtctaagtgatttctccagacaaaagagaagcaaagacagaaagaagcaaaagaanaggaaaagtgaaagacagccttctgcagaacaaattgttacaaagaaaaatctatttgcaggcaattgattaaacataatagaaaagagttctttgatatgggatcatagaagtaaagatattaaaaattatatgctggtaagcctaaactggcagattgggccatttttcca

SEQ ID NO: 253810 - DNA, 1450 bp, Homo Sapiens
  misc_feature (217)..(260): n is a, c, g, or t
atgaggaaaacttatgtgatagtatctttccttttcaaaaataacattatgctaatgagaacatcaaagaagtaatactatgctgcaagtaatttaggttttcacatcatcaatcatatagggagtccaaagaagccagcctagcaggtaacatagcagagcagaatgcaatgtagaagaggcacacagagtctaagtgatttctccagacaaaagnnnnnnnnnnnnnnnnnnnnnnnnnnnnnnnnnnnnnnnnnnnncagccttctgcagaacaaattgttacaaagaaaaatctatttgcttgcaattgattaaacataatagagaagagttctttgatttgggatgatagaagtaaagatattaaaaattatatgctggtaagcctaaactggcagattgggccatttttcctgtggttgtatttgagatgttgagctctcacagggagaatttttgcttttgccaaggaagggccagatttaacccaaaaggacaaccttgagaacattttttctttgttaacttgggcatgtggctaacattcgttctctctctggtaaaaagatattattcatctctgatgagatggttcaaaatatgacagtgaccaagacgtggtttattcacaggaggcacataattggatatctgcatatggcatgaattaaaaagttaagcaacaaggaagagaaagaggagaaaaaaacttttgcaaatttctgacataaaataatcaaataaaagggaaagatagtggttaaggatgttttcattttctcagaggtttctcacttccatctgatacgggggaaatgaaatgaatgaaagtaattctctttaggtcaccaacataaggaataatttgactgcaaacatagaagtgagcagagcaagacttgaagtgatacttcttaatctctttgattcttaatcttaaacaacaagccacaggcaatacaggaaaggtggagatgactaggaagtgtgataacgtgcctggatcagttaccattcattggaaagtaccgtttcccctgcctgttaataggctgattcctgcaggtttgagtaaaggaatcatctcttccttcagtgccgcattgttctttgtaagagatccgtgtcagttcaaagttgtgtaatttaaaggctagagaagaaagaagtttaaattggatcccacagtaaatattcacggatatttcaaagtagaattgtccactgtctggggttgggttcaagcatcaaggtgatcgcttcctgaacatgttcattgaccatgaggagctgtttactctggctcatattagactaccagtaattattttcagacatgatgtctcttttgaaagaaatgactttgctgggactagggataactgcaggggtagaagactggaaatacggtgagtcagggtaggtggaaacagaaatgagtagaagg

SEQ ID NO: 253811 - DNA, 962 bp, Homo Sapiens
  misc_feature (108)..(156): n is a, c, g, or t
  misc_feature (182)..(182): n is a, c, g, or t
  misc_feature (184)..(184): n is a, c, g, or t
  misc_feature (186)..(186): n is a, c, g, or t
atatctttacttctatcatcccaaatcaaagaactcttctctattatgtttaatcaattgcaagcaaatagatttttctttgtaacaatttgttctgcagaaggctgnnnnnnnnnnnnnnnnnnnnnnnnnnnnnnnnnnnnnnnnnnnnnnnnngtctggagaaatcactctagagaccngngngcctcttctacattgcattctgctctgctatgttacctgctaggctggcttctttggactccctatatgattgatgatgtgaaaacctaaattacttgcagcatagtattacttctttgatgttctcattagcataatgttatttttgaaaaggaaagatactatcacataagtttttccgcatctgttgtgatatacaccaatggataaactaacggaaactggctttttgacattaaaagacaggagaaattatatttaactaagtaaaagttaagtcagaattacctgggtgatgtgattcaatttagttaaaggatgatatagagaaaatacattatttagcattatttcttcagctataatgaattgctatagaaatcaggcagatctttctaatgtgtattgattggtcttttcagctactctgaacagattactaaggccatctcctcatctctaagggagaaaaatagtctgtagatgaataatgtaaggtaaagagttgcatgtcagtctttgtaattatttacactttaactttctccagaactcagacatgatttcaacatggtgttagatttgtgcattttattttcctgaccacctcattccagccaatgtatggttatccactctgtgtgccaaaaccaatcatgcctttcacggccctttagttcagagaagttctgcactgatttttagtctcttgatgtctcaatcttacatgtataccaatcacaatggaataaagtgttgagttgtactgtgaaaac

SEQ ID NO: 253812 - DNA, 1298 bp, Homo Sapiens
gggcctccggcttgccgtcctcgcagccatggcggccgccgcgctcccagcatggctgtctctgcagtcgagggcaaggactctgcgtgcattctccactgccgtctactcggccactccggtcccgacacctagcctgccggaaagaacacccggaaatgaaaggccaccaagaagaaaggcactacctcctaggacagagaaaatggctgttgaccaggactggcctagtgtttacccagttgcagcaccatttaaaccctctgcagtacctcttcctgttcgaatgggttatccagtaaaaaagggcgtgcccatggcaaaggagggaaatctagaacttttaaagattcccaattttctgcatttgactcctgtagcaattaaaaagcactgtgaagcccttaaagatttttgcactgagtggccagccgcactggacagtgacgagaaatgtgagaagcattttccaattgaaattgacagcactgattatgtttcatcaggaccatctgttcggaaccccagagcacgagtagtagtcttaagagtaaagctttccagtttgaatttagatgatcacgcaaagaagaaattaattaaacttgtaggagagcgatactgcaagaccacagatgtgcttaccatcaaaacagataggtgccctttaaggaggcagaattacgattatgcagtgtatctactaacagtgttataccatgagtcttggaatactgaagaatgggaaaaaagtaagactgaagcagacatggaagagtatatatgggaaaatagctcatcagaaagaaatatcctggaaacgcttctccagatgaaagctgctgagaaaaatatggaaataaataaagaagagctccttggtactaaagaaattgaagagtacaaaaagtctgttgttagtcttaaaaatgaggaggaaaatgaaaattccatttctcagtacaaagaatccgtgaagagactattaaatgtgacatgaattatggagtagaaaaatctgcttgatttattaattttatgatatatgtgatccagtatctaatttgatataaaattgaaaatgttaaaaaatcattttttttcctcagagttaaaattatttccctcatactaatgcttaatggcaatgattactccagagttttttaatttttacactggggcaatagactaggaggtctctgatttcttcttgggtctgaagtgttttgattttatttctacataatagctttggtattcatgtatatacatgccatttaattgtgattttatca

SEQ ID NO: 253813 - DNA, 601 bp, Homo Sapiens
ctgagaggaaaaacggaagagggaatgttggggaaagcttcctagagggcagagcctgagatgagactctaagaaaaagacatgtcatgctgcccaaggacatagccaagctggtccctaaaacccatctgatgtctgaatctgaatggaggaatcttggcgttcagcagagtcagggatgggtccattatatgatccatgaaccagaacctcacatcttgctgttccggcgcccactacccaagaaaccaaagaaatgaagctggcaagctacttttcagcctcaagctttacacagctgtccttacttcctaacatctttctgataacattattatgttgccttcttgtttctcactttgatatttaaaagatgttcaatacactgtttgaatgtgctggtaactgctttgcttcttgagtagagccaccaccaccatagcccagccagatgagtgctctgtggacccacagcctaagctgagtgtgaccccagaagccacgatgtgctctgtatccaaaacacactttggcagatggaagaagcatctggatttgagaaccatggcgtttacagggatcatggtaaacttgctggttt

SEQ ID NO: 253814 - DNA, 1324 bp, Homo Sapiens
  misc_feature (776)..(914): n is a, c, g, or t
  misc_feature (924)..(938): n is a, c, g, or t
  misc_feature (982)..(1031): n is a, c, g, or t
  misc_feature (1049)..(1057): n is a, c, g, or t
  misc_feature (1159)..(1167): n is a, c, g, or t
  misc_feature (1208)..(1216): n is a, c, g, or t
ggggcgtgctgttgggagttgcttggaggttggcggcgcggggctgaaggctagcaaaccgagcgatcatgtcgcacaaacaaatttactattcggacaaatacgacgacgaggagtttgagtatcgacatgtcatgctgcccaaggacatagccaagctggtccctaaaacccatctgatgtctgaatctgaatggaggaatcttggcgttcagcagagtcagggatgggtccattatatgatccatgaaccagaacctcacatcttgctgttccggcgcccactacccaagaaaccaaagaaatgaagctggcaagctacttttcagcctcaagctttacacagctgtccttacttcctaacatctttctgataacattattatgttgccttcttgtttctcactttgatatttaaaagatgttcaatacactgtttgaatgtgctggtaactgctttgcttcttgagtagagccaccaccaccatagcccagccagatgagtgctctgtggacccacagcctaagctgagtgtgaccccagaagccacgatgtgctctgtatccagaacacacttggcagatggaggaagcatctgagtttgagaccatggctgttacagggatcatgtaaacttgctggtttttgttttttcctgccgggtgttgtatgtgtggtgacttgcggatttatgtttcagtgtactggaaactttccattttattcaagaaatctgttcatgttaaaagccttgattaaagaggaagtttttatnnnnnnnnnnnnnnnnnnnnnnnnnnnnnnnnnnnnnnnnnnnnnnnnnnnnnnnnnnnnnnnnnnnnnnnnnnnnnnnnnnnnnnnnnnnnnnnnnnnnnnnnnnnnnnnnnnnnnnnnnnnnnnnnnnnnnnnnnnnttttttgcgnnnnnnnnnnnnnnnaaaaaatttttaaaaccttttttttgggcgggggcccccaaagnnnnnnnnnnnnnnnnnnnnnnnnnnnnnnnnnnnnnnnnnnnnnnnnnnggggttgatttccccccnnnnnnnnncccccgggggaaccccagggttttaaaaaaacccaaagggggtcttggggcctttttggggtttataaccggggtgccccgggagttcttttataaattttnnnnnnnnnggcccctttttggaaaagggtgggaattttttaaacttttnnnnnnnnntgagaacccctcccaacggcggtgttggacccctaatccccacggggttataccccccttgggccctttgggataaaaattttccccccgggggaaaacaggggggcg

SEQ ID NO: 253815 - DNA, 799 bp, Homo Sapiens; identical to SEQ ID NO: 74095

SEQ ID NO: 253816 - DNA, 814 bp, Homo Sapiens
ggggtgtttgaaagcgaggccaaagtgggtgggagcgcgtgctgttgggagttgcttggaggttggcggcgcggggctgaaggctagcaaaccgagcgatcatgtcgcacaaacaaatttactattcggacaaatacgacgacgaggagtttgagtatcgacatgtcatgctgcccaaggacatagccaagctggtccctaaaacccatctgatgtctgaatctgaatggaggaatcttggcgttcagcagagtcagggatgggtccattatatgatccatgaaccagaacctcacatcttgctgttccggcgcccactacccaagaaaccaaagaaatgaagctggcaagctacttttcagcctcaagctttacacagctgtccttacttcctaacatctttctgataacattattatgttgccttcttgtttctcactttgatatttaaaagatgttcaatacactgtttgaatgtgctggtaactgctttgcttcttgagtagagccaccaccaccatagcccagccagatgagtgctctgtggacccacagcctaagctgagtgtgaccccagaagccacgatgtgctctgtatccagaacacacttggcagatggaggaagcatctgagtttgagaccatggctgttacagggatcatgtaaacttgctgtttttgttttttcctgccgggtgttgtatgtgtggtgacttgcggatttatgtttcagtgtactggaaactttccattttattcaagaaatctgttcatgttaaaagccttgattaaagaggaagtttttataatctta

SEQ ID NO: 253817 - DNA, 456 bp, Homo Sapiens
agatcttatggctcttgggcctgtgagaaagtgacatactttacttaccacaggtcaggagacacacgtgtcagggactcgtgcagacacaggtatgtaggcgcacggttccccaaggggtgttttatatggctctatataatcaaggttaataccttaaaggagaagcgacaccattccaggcaaagacttagtaaaataaccacggttcttcaattgtggtcctgtgtcacaataaaaacacgatatcttatttcacttatgcgaataactatattggcgcaagtcacgaatacttacacagtgggttccaaattttggagaaatcaggttgagagaaacaaataagctccaaatttcgttcataggagtatacttggtaaaagctgtgaatagcttaaaagaaaagtttccttgactctgtgcacaacacaggatcagccgctttgtgccgtg

SEQ ID NO: 253818 - DNA, 430 bp, Homo Sapiens
gtgagccaccatgcgcggcgtggactctttaataataaccatactgactcgtgatgagatggtatgcgcatatgtgggtttgatatgcatattctctaatgatcacacgatattgggctttttttcatatgcttggtggccgcatgtgtgtcttcttttgaagtgtctgtgtatagcctttgcgccacatttctaatgagaattttttttcttggaaatttggttaaggtcattatcagtggtggacattagaactttgtcacatgcattggtgcaacacggtttctcctattctgtaaggtggctgtgcactctgttgacaggttcttctgctgtgcagaagctccaagaagaaaggaattcgattgggtctgtgtctgtgtcttttgggattctcagacttatgtaggcattcatatatggtgattgg

SEQ ID NO: 253819 - DNA, 314 bp, Homo Sapiens
ctctgcagaaggaaaaatgtgtaagttctagtttccagtttgtatatacccgtacaacgtgtcctcacggtgccttttttcacggaagttttcaatgatgggcgagcgtgcaccatccctttttgaagtgtaggcagacacagggacttgaagttgttactaactaaactctctttgggaatgtttgtctcatcccattctgcgtcatgcttgtgttataactactccggacacagggtttggctgtgtctaaactgcattaccgcgttgtaaaatatagctgtacaaatataagaataaaatgttgaaaagtc

SEQ ID NO: 253820 - DNA, 415 bp, Homo Sapiens
gtctggtgaattaactaaataacactcactagatcatatagccaatctcatgcatcactgaaaggaacctgacactaaactgtgctcaacttaaatcatcaaggtctatagttatacatactacatatggacaactagaagaagagaacactaggaagtcataatgaaataaagattcttcatatgccatcttgttaaactgtaaaaattacaaccataattcatattctttaggaggcgaaagccctaaaactagttgatggccaaaatgaccccctgcaggtttaagagttgacacacatagtatgcatagtaaccgaaaagataaaataaacaaaaaaagtgctcttcaaattcctaactatacaccaactcacaataaaatttgagtcaaaaaggggggtgagggtggagg

SEQ ID NO: 253821 - DNA, 1164 bp, Homo Sapiens
ctcacccagctcaccctgcccaccccatgcctcacatgccccggcctgccgtcttccctgtgcccagctctgcatacccacagggtgtgcatcctgcattcctaggggctcagtacccttattcagtgactcctccctcacttgctgccactgctgtgtctttccccgttccttccatggcacccatcacagtacatccctaccacacagagccagggcttccactgcccaccagtgtggccttgagcagtgtccatccagcatccacgtttccagccatccaaggtgcctcactgcctgccctgaccacacagcccagccctctggtgagcggaggttttccaccgcccgaggaggagacacacagtcagccagtcaatccccacagcctgcaccacctgcatgctgcctaccgtgtcggaatgctggcactggagatgctgggtcgccgggcacacaacgatcaccccaacaacttctcccgctcccccccctacactgatgatgtcaaatggttgctggggctggcagcaaagctgggagatcgtcatggaagacgctgcagcggctgagtcccgctcatgcccacaaccacctgcgtgccccggccttccaccaactggtgcagcgctgccagcaggcatacatgcagtacatccaccaccgcttgattcacctgactcctgcggactacgacgactttgtgaatgcgatccggagtgcccgcagcgccttctgcctgacgcccatgggcatgatgcagttcaacgacatcctacagaacctcaagcgcagcaaacagaccaaggagctgtggcagcgggtctcactcgagatggccaccttctccccctgagtctttcacccttagggtcctatacagggacccaggcctgtggctatgggggcccctcacacagggggagtgaaacttggctggacagatcatcctcactcagttccctggtagcacagactgacagctgctcttgggctatagcttggggccaagatgtctcacaccctagaagcctagggctgggggagacagccctgtctgggagggggcgttgggtggcctctggtatttatttggcatttataaatatataaactccttttttactctgaactcctgcctgctactgaaacaaaaaagcatgt

SEQ ID NO: 253822 - DNA, 664 bp, Homo Sapiens
  misc_feature (647)..(647): n is a, c, g, or t
cacgagaaaccactggtctaacagtccaaaagttgaagaacttggagtttatgttcgagggcaggaagcttccagcacggaaaaagatgaaggccagaagactcagcaagtctgctcttccatcttctcctgcctgctttgttctagccatactggcaagtgattagatggtgcccactgattagatggtacccaccgggtttgagggtgtatctgcctctcctagtccactgactaaaatattaatctcctttggcaacaccctcacagacacacccaggaacagtactttgcatccttcaatccaatcaagttgacagtattaaccatcacaaagtattccaagtaataaatgaaaaatgaatgatagaatgacaccattttgcaattcccaatgaatggatacggacacttagcatgaacagctgctaagatcacctaagagaggtgacagctattatgtgcctcctataacactgccaaataccactaattggctagacaaaagtctgctgcattatctggatcaagttgcagatgtgtaggagggtatcaagaggacagacgaaagtactgagctgtaccaaaaatagacattctgtacaaactgtatggaaatggcagttgtgtagagggacttgaaattnaaagtgattaaatatgt

SEQ ID NO: 253823 - DNA, 781 bp, Homo Sapiens
  misc_feature (545)..(545): n is a, c, g, or t
tgtgtccatggtccctctgttcctgggctccctggagtccattgggaatccgagtcctcgccttcccatcatctgcctctggaatgacccttgggtttgtctttcgctctctctccgttctgccaccttcccggtgctttaatcaggcatcagtcttgtagctgtagccaggacccaccaagccactccattctcttctcagctcccggagtgtgatggttaatattgagtgtcaacttgattggattgaaggatgcaaagtattgttcctgggtgtgtctgtgagggtgttgccaaaggagattaacatttgagtcagtggactgggagaggcagacccaccctcaatctgggtgggcaccatctaatcagctaccagcaaagctagaataaagcaggcagaagaagatggaaaaggcagacttgctgagtctcccagccttcatctttctcccatgctggatgctttctgcccttgaacatcagactccaagttcctcagcttttggactcttggacctacaccagtgatttgccaggggctncttggacctttggccacagactgaagaatgcacagtcagcttccctacttttgaagcttggggactcgaactggcttcctggctcctcagcttgcagaaagcctactgagggacttcaccttgtgacagtgtgagtcaattctccttaatgaactccctttcacatatacatctatcctattagttctgccccactagagaaccctgactaatacaagaactatgaaacaataaat

SEQ ID NO: 253824 - DNA, 181 bp, Homo Sapiens
aaggaacaccctgtctctgaatatggagtcatcagactagattgacccttaattcaatgtataatttacacaaactttcccctctctctgagcctattcttgtggtcttagcaagtacagcatggctatccatataaataaataacaaatccagatgttgtattagcactccctaacttct

SEQ ID NO: 253825 - DNA, 1565 bp, Homo Sapiens
tggtacggtccggaattccgggatatcgtcgaccacgcgtcgggcaagatggcggcgcccatggaggtggccgtgtgtacggactcggcggccccgatgtggagctgcatcgtgtgggaacttcactcgggcgccaacctgctcacctaccgcggcggccaggcgggaccccgcggcctggcgctgctcaatggcgagtatctgctggcggcgcagctgggcaagaactacatcagcgcctgggagctccagcggaaggaccagctccagcagaagatcatgtgccccgggcctgtcacctgtctgactgcatcacccaatggtctctacgtcctggcaggagttgcagaaagcatccacctgtgggaggtctccaccgggaaccttctggtcatcctgagtcgacactaccaggacgtctcctgccttcagttcacaggggacagcagccacttcatctcagggggcaaggactgcctggtgctggtttggagcctctgcagcgtgctgcaggccgacccctccaggattccggcgcccaggcacgtctggtctcaccacacgctccccatcacggacctgcactgcggctttgggggccccctggcccgggtggccacctcctcactggaccagacggtgaagctatgggaggtctcctcgggggagctgctgctctccgtcctctttgacgtgtccatcatggcagtgaccatggacctggctgagcaccatatgttctgcgggggcagtgagggctccatcttccaggtcgacctcttcacctggcccggacagagggagaggagcttccacccagagcaggacgccgggaaggtcttcaaagggcacaggaaccaggtgacttgcctgtcagtgtccactgacggcagcgtgctgctctcaggctcccacgacgagaccgtgcgcctctgggacgtgcagagcaagcagtgcatccggacggtggccctcaaaggcccagtcaccaatgccgccatcctgctggcgcccgtcagcatgctgagctcagacttcaggcccagcctgccgctgccccacttcaacaagcacctgctgggcgccgagcacggggacgagccgcgccacgggggcctcactctgcgcctgggcctccaccagcagggctcggagcccagctacctggaccgcacggagcagctgcaggccgtcctgtgcagcaccatggagaagagcgtgctcggcggccaggaccagtgcgcgtccgtgtgacggagctggaggacgaggtgcgcaacctgcgcaagatcaatcgggacctgttcgacttctccacgcgcttcatcacgcggccggccaagtgaggcccggagaccccggcccgaggcgcccaggcctgagccccatgcctcccagcaaccagggcccgcgggtgtggcccccaccagcccaggcctggactctcctcagttctgtgtcgtgttcgggtttttcctctgtgactgggccgtcttggtgtctcgtggcacgcgtcacagtggtgctagtctgtttttaacaaaagaggatgaaaagcccctcca

SEQ ID NO: 253826 - DNA, 1875 bp, Homo Sapiens
  misc_feature (95)..(230): n is a, c, g, or t
  misc_feature (251)..(312): n is a, c, g, or t
  misc_feature (853)..(853): n is a, c, g, or t
ctccgggctgaggaattcggcacgagaggggatgctgaggccggtccccagaggagcatgacttggctggtccggaggagctctgagggcatggnnnnnnnnnnnnnnnnnnnnnnnnnnnnnnnnnnnnnnnnnnnnnnnnnnnnnnnnnnnnnnnnnnnnnnnnnnnnnnnnnnnnnnnnnnnnnnnnnnnnnnnnnnnnnnnnnnnnnnnnnnnnnnnnnnnnnnnnaccatgttggtcaggctgctnnnnnnnnnnnnnnnnnnnnnnnnnnnnnnnnnnnnnnnnnnnnnnnnnnnnnnnnnnnnnntgagctagatctgactttctagtgtcctagccttggcccgatggacatgtcatttctctcagctcgtttctgtcccctaaagtgagaatattgcctgggaagattacattagacgatgtatatgcgaagacacttgatagctggtattgtcatgattctgattagttcactactgctactttccctgtggcctaggctttgcctatttccagtgggcgagctagctagatcctcctcccttaaataagccagtgtttttaagacagaatactacttgcatagtggacaataatatcttaaagaactgagcaggatgaaaagaatttgatagaaagcaggtttgaggagcacattggaggttggcaggtttcgaggctgcttgagaggacttgggccgatctgggctgggcttggacgtgaccctggcacccaggcaggtggatcccagctggggcttccattcacgactttctggtccctggcaggacagagcgggatgccaccagcttgtccaaagggaaagttccaggagctcctggtngggcatccgttgtggaagaatgacgctggccgcggcgagatcaacgagtttgaagcaggtggaaggggaggcttcgtgcagcagccgcaaaggaaagctgattttcttctatgagtggaacatcaaactgggctggaaaggcatcgttaaagaatctggagtgaagcacaagggattgattgaaatacccaatctttctgaggaaaatgaagtagatgacactgagaatttacaacgggaatgattttaccaacgaaagctatggcaacccaggaattaactgtcaaaagaaaactgagtgggaataccctgcaggttcaggcctcatctccagtggcactgggtgtaaggattcccactgtggctcttcacatgatggaactgtttgacacaactgtagagcagctgtatagcatcttcactgtaaaggagttaacaaataagaagatcatcatgaaatggagatgtgggaactggccagaagaacactatgccatggttgcactgaattttgtgcctactctagggcaaacagaattacaattgaaggagttcctatctatctatctgtaaagaagagaacatgaaattctgttggcagaagcagcattttgaagaaataaaaggttcactgcagctgacccccctaaatggttgaattaaaatttattataaggcattactttttgtaagcggaaaaagtgtcacatttacctcttccctatcttttgtttaaaaggactgtctttattttatattggatgaaatctatgaacatatatacaatgtaaagcattgtttgactctttattataactagacactgcattgatttaaaagtagcaaacaacctgaaattaagtattaacctgaccttccatcgatattcctctggaaataggtaagtcctgagtgcagatagttgatgtttcccaagctgaagcttgtcctatagcaagcttgcttgcagctgtacttttagttcaagatgacaaaaaataaatggcatgttgcccctaaaa

SEQ ID NO: 253827 - DNA, 684 bp, Homo Sapiens
acgacttccaaacattctgggagcctcctttaggccaactacagcgcagaggagcgctttctcatgatgggtttctccgactggctttccctgcagccggtcctattcgcccttgtcctcttgtgctacctcctgaccttgacgggcaactcggcgctggtgctgctgacggtgcgcgacccgcgcctgcacacgcccatgtactacttcctctgccacctggccttggtagacgcgggcttcactactagcgtggtgccgccgctgctggccaacctgcgcggaccagcgctctggctgccgcgcagccactgcacggcccagctgtgcgcatcgctggctctgggttcggccgaatgcgtcctcctggcggtgatggctctggaccgcgcggccgcagtgtgccgcccgctgcgctatgcggggctcgtctccccgcgcctatgtcgcacgctggccagcgcctcctggctaagcggcctcaccaactcggttgcgcaaaccgcgctcctggctgagcggccgctgtgcgcgccccgcctgctggaccacttcatctgtgagctgccggcgttgctcaagctggcctgcggaggcgacggagacactaccgagaaccagatgttcgccgcccgcgtggtcatcctgctgctgccgtttgccgtcatcctggcctcctactcg

SEQ ID NO: 253828 - DNA, 380 bp, Homo Sapiens
aaacgtcctagtacagaggtcgagtagtaagggtcccctgctggaatacaaagggagtggaagggttagtgcacaagatcgtggacaaatacaattatgaacatcaatgcacaagaagagtccttgggtgatcagcccacattgtagcgtgcaaataggatacagagtcccctaatggacaggactctggacaattgcaactgtgcaaattaactgttcaagagctgttattgaataattattgcacagaaccatgaatatatgcaattatgcatatcaactgtttaagagaaggaaacttgggtagtcagaactcagcagcaatggcaaagaggacatcctagactaatgagtgggactatgggcaattagtgttctac

SEQ ID NO: 253829 - DNA, 741 bp, Homo Sapiens
  misc_feature (396)..(396): n is a, c, g, or t
  misc_feature (623)..(623): n is a, c, g, or t
gctattgccagtggctcggagctatcagaaagtgccttcggctactgtatcacagactgtgctgttatcattttgaccatcatctgttacctgggcctgccccgcctggaattctaccgctactaccagcagctcaagcttgaaggacccggggagcaggagaaccaagtttggaggtttcagtctccaactctcagcccaccaatgaaagccactctatcaaagccatcctgaggatgtttccagccgtgactgttgaggtcaagtccagcatcgcaggcagcagcacctgggaacgttacttcattcctgtgtcctgtttcttgactttcaatatctttgactgggtgggccggagcctcacagctgtattcatgtggcctgcgaaggacagcncgctggctgccaagcctggtgctggccccgctggtgtttggccactgcttgctgctgtgcaacattaagccccgccgctacctgactgtggtcttcgagcacgatgcctgggtcatcttcttcatgcgttgctttgccttctcaaacggtacctcggcagcctttgatgtgcttcgggccaaagaaagtgaaccagctgaggcagagaccgaaggagccatcatggncctctttctgtgtctgggctggcacttggggcttgtttctccctcctgttcccgccaattgtgtgacaggatggacacggccgcctgccttcctccctggttggcctctggcccttcg

SEQ ID NO: 253830 - DNA, 1308 bp, Homo Sapiens
  misc_feature (1054)..(1116): n is a, c, g, or t
  misc_feature (1269)..(1269): n is a, c, g, or t
  misc_feature (1303)..(1303): n is a, c, g, or t
gctattgccagtggctcggagctatcagaaagtgccttcggctactttatcacagcctgtgctgttatcattttgaccatcatctgttacctgggcctgccccgcctggaattctaccgctactaccagcagctcaagcttgaaggacccggggagcaggagaccaagttggacctcattagcaaaggagaggagccaagagcaggcaaagaggaatctggagtttcagtctccaactctcagcccaccaatgaaagccactctatcaaagccatcctgaggatgtttccagccgtgactgttgaggtcaagtccagcatcgcaggcagcagcacctgggaacgttacttcattcctgtgtcctgtttcttgactttcaatatctttgactggttgggccggagcctcacagctgtattcatgtggcctgggaaggacagccgctggctgccaagcctggtgctggcccggctggtgtttgtgccactgctgctgctgtgcaacattaagccccgccgctacctgactgtggtcttcgagcacgatgcctggttcatcttcttcatggctgcctttgccttctccaacggctacctcgccagcctctgcatgtgcttcgggcccaagaaagtgaagccagctgaggcagagaccgcaggagccatcatggccttcttcctgtgtctgggtctggcactgggggctgttttctccttcctgttccgggcaattgtgtgacaaaggatggacagaaggactgcctgcctccctccctgtctgcctcctgccccttccttctgccaggggtgatcctgagtggtctggcggttttttcttctaactgacttctgctttccacggcgtgtgctgggcccggatctccaggccctggggagggagcctctggacggacagtggggacattgtggggtttggggctcagagtcgagggacggggtgtagcctcggcatttgcttgagtttctccactcttggctctgactgatccctgcttgtgcaggccagtggaggcttttgggcttggagaacacgnnnnnnnnnnnnnnnnnnnnnnnnnnnnnnnnnnnnnnnnnnnnnnnnnnnnnnnnnnnnnnngggtggctaggagctgggtctgaccgttgtatggtttgacctgatatactccattctcccctgcgcctcctcctctgtgttctctccatgtccccctcccgactccccatgcccagttcttacccatcatgcaccctgtacagttgccacgtnactgccttttttaaaaatatatttgacagaaacnggtgc

SEQ ID NO: 253831 - DNA, 696 bp, Homo Sapiens
  misc_feature (104)..(104): n is a, c, g, or t
  misc_feature (116)..(116): n is a, c, g, or t
  misc_feature (119)..(119): n is a, c, g, or t
  misc_feature (130)..(130): n is a, c, g, or t
  misc_feature (454)..(499): n is a, c, g, or t
ccagcctctgcatgtgttcgggcccaagaaagtgaagccagctgagcaagagacgccagaagccatcatggccttcttcctgtgtctgggtctggcattggggnctgttttctccntcntgttccgggcnattgtgtgacaaagaatggacagaaggactgcctgcctccctccctgtctgcctcctgccccttccttctgccaggggtgatcctgagtggtctggcggttttttcttctaactgacttctgctttccacggcgtgtgctgggcccggatctccaggccctggggagggagcctctggacggacagtggggacattgtgggtttggggctcagagtcgagggacgggagtgtagcctcggcatttgcttgagtttctccactcttggctctgactgatccctgcttgtgcaggccagtggaggctcttgggcttggagaacacnnnnnnnnnnnnnnnnnnnnnnnnnnnnnnnnnnnnnnnnnnnnnngactgtctgcctgtcctggggtggctaggagctgggtctgaccgttgtatggtttgacctgatatactccattctcccctgcgcctcctcctctgtgttctctccatgtccccctcccaactccccatgcccagttcttacccatcatgcaccctgtacattgccacgttactgccttttttaaaaatatatttgac

SEQ ID NO: 253832 - DNA, 1460 bp, Homo Sapiens
gaatgtgccccggcgggagagggaagctgcagcgagagcgcgcggatctcagcgcgggagcagtgcttctgcggcagcaggcccctgagggagggagctgtcagccagggaaaaccgagaacaccatcaccatgacaaccagtcaccagcctcaggacagatacaaagctgtctggcttatcttcttcatgctgggtctgggaacgctgctcccgtggaattttttcatgacggccactcagtatttcacaaaccgcctggacatgtcccagaatgtgtccttggtcactgctgaactgagcaaggacgcccaggcgtcagccgcccctgcagcacccttgcctgagcggaactctctcagtgccatcttcaacaatgtcatgaccctatgtgccatgctgcccctgctgttattcacctacctcaactccttcctgcatcagaggatcccccagtccgtacggatcctgggcagcctggtggccatcctgctggtgtttctgatcactgccatcctggtgaaggtgcagctggatgctctgcccttctttgtcatcaccatgatcaagatcgtgctcattaattcatttggtgccatcctgcagggcagcctgtttggtctggctggccttctgcctgccagctacacggcccccatcatgagtggccagggcctagcaggcttctttgcctccgtggccatgatctgcgctattgccagtggctcggagctatcagaaagtgccttcggctactttatcacagcctgtgctgttatcattttgaccatcatctgttacctgggcctgccccgcctggaattctaccgctactaccagcagctcaagcttgaaggacccggggagcaggagaccaagttggacctcattagcaaaggagaggagccaagagcaggcaaagaggaatctggagtttcagtctccaactctcagcccaccaatgaaagccactctatcgccatcctgatatctcagtcctggctttctctgtctgcttcatcttcactatcaccattgggatgtttccagccgtgactgttgaggtcaagtccagcatcgcaggcagcagcacctgggaacgttacttcattcctgtggcctggtttcttgactttcaatatctttgactggttgggccggagcctcacagctgtattcatgtgggtaagtggaggaagagggccccaggcctggtgggaagtaagagtccagcctggacccagagagggaacccaagaaagtatggtagtaaggggaccatttgttttaaagtcgaggcataatttatgtatagttaagtacaagtcttaagtgtacaacttcatgaatatatgtatatacacatacctgcccagatcgagatgtagaatatttccagcactccagaaggctccaccatgccccttttcaagagtaacccccttaagggagaaccagggt

SEQ ID NO: 253833 - DNA, 379 bp, Homo Sapiens
  misc_feature (24)..(24): n is a, c, g, or t
aaccctgggccccggaacgggaancccccgcttgtgcaaggccaagtggagggctcctggggcttggaagaaaaacgtgtgcctctgtgtatgtgtctgtgtgtctgcgtccgtgtctgtcagactgtctgccctgtccctggggtggctaggagctgggtctgaccgttgtatggtttgacctgatatactccattctcccctgcgcctcctcctctgtgttctctccatgtccccctcccaactccccatgcccagttcttacccatcatgcaccctgtacagttgccacgttactgccttttttaaaaatatatttgacagaaaccaggtgccttcagaggctctctgatttaaataaacctttcttgttttttta

SEQ ID NO: 253834 - DNA, 375 bp, Homo Sapiens
  misc_feature (21)..(21): n is a, c, g, or t
  misc_feature (115)..(175): n is a, c, g, or t
ccagagtcgagggacggggtntagcctcggcatttgcttgagtttctccactcttggctctgactgaatccctgcttgtgcaggccagtggaggctcttgggcttggagaacacnnnnnnnnnnnnnnnnnnnnnnnnnnnnnnnnnnnnnnnnnnnnnnnnnnnnnnnnnnnnnctggggtggctaggagctgggtctgaccgttgtatggtttgacctgatatactccattctcccctgcgcctcctcctctgtgttctctccatgtccccctcccaactccccatgcccagttcttacccatcatgcaccctgtacagttgccacgttactgccttttttaaaaatatatttgacagaaaccaggtgccttc

SEQ ID NO: 253835 - DNA, 400 bp, Homo Sapiens
  misc_feature (89)..(134): n is a, c, g, or t
ctcggcatttgcttgagtttctccactcttggctctgactgatccctgcttgtgcaggccagtggaggctcttgggcttggagaacacnnnnnnnnnnnnnnnnnnnnnnnnnnnnnnnnnnnnnnnnnnnnnngactgtctgcctgtcctggggtggctaggagctgggtctgaccgttgtatggtttgacctgatatactccattctcccctgcgcctcctcctctgtgttctctccatgtccccctcccaactccccatgcccagttcttacccatcatgcaccctgtacagttgccacgttactgccttttttaaaaatatatttgacagaaaccaggtgccttcagaggctctctgatttaaataaacctttcttgtttttttctccatgaaaaa

SEQ ID NO: 253836 - DNA, 723 bp, Homo Sapiens
  misc_feature (89)..(178): n is a, c, g, or t
gaccaaaagaaagggggggaaccccaaattataatcggttggcaagaagcacaggtaaacccagcctgcagcatgcaattggtgtggcnnnnnnnnnnnnnnnnnnnnnnnnnnnnnnnnnnnnnnnnnnnnnnnnnnnnnnnnnnnnnnnnnnnnnnnnnnnnnnnnnnnnnnnnnnagtacacccacgtggtgacctctctccagaatgtacagcctgcctgtgtgggcagatactcccacaaatgtgtctttctctattatacacagcagctacgacagagatacagcaagtaattaaaaagtaccccaaaaggatgatatcaaagatagctctcaggcgaaggatacgcatcaactcaaaaatggtgacctctttccttgaaggtaagaggagatcgcatatctagtagcacaggttgcgtctgcgtagttagactggggggaaaaaagacacttgtttattacactcaagactttttactctctgatttctattctatgagcagatgtaacttttataatatgtttatttctcagtccacagggagaactttgccctgtaatgaaagaaaccaaattaacccatttcatgacccagtcatggttctactttggatgctcccaagctgggaggcaatgaaatgcttcccagtaacagggaactacaagctactaaaacgtgatctagatacacaaaatacacaacataaacaaaagaag

SEQ ID NO: 253837 - DNA, 390 bp, Homo Sapiens
  misc_feature (39)..(39): n is a, c, g, or t
gaaagaaaggaaggaccggaatgggggctcagggctcgnaagacccctccccaggcggaggctgggtcatggctgcccccaaagacaaggtcaacggctgtgctctggagcgccccccatgggcggaccatgctgaggtggggtgctgggcccaggggaggctcactcagccatgaggtctgcctgaaagacagggccctccgctgctgttctctggcctgcctgattggccagaaggaggctcccatgccaggccaggtttgcactctgcactggggcgtcttctgttccccaagaggtggcctcattttcactaagggaaggacaggatctatttggtgggacccagggcagaaggcagtctgggggtagagtaacggcaagataaag

SEQ ID NO: 253838 - DNA, 1341 bp, Homo Sapiens
gggaggacggaagggaaaaaaaaggcaggtgcgattacacaaggaatccatggtaagcccccatgccccaaaggtccttgcccatgccaatgggaggggctgaaggacaagcatgtggcatgtagggatggtccggtccctgccatggggagtggggagaagaggagaggttctgtggcattttgagccttgcaaagatttggactgaaaagctcagagactcaggtaggtcagcctgtcagggacaagtacactccaccggctctcttctcgctttgcagccctagcttacgcgtgtcagccccaggtttgctccagctattcacaagcagaatataacacaagaaaaacaattcatatcccttagggaaaaaagaggatcaattcatcactcaatatataatacagccaaaatgagctgccaaaacaagcacacacacaaatactgtgaacagaaaaatacaagaaaatgactaagctgggagtcttgacggggtatggacattgcttaaagcacttatcagtccccagaaaaaccaaacccaaaaacattttttaaaaattcagaaactcatgtaccccctgggaaactggtgttggtaacaaagggcagggggtggggagagaaaagagaatcactgctccctttttgctcgccagtgtgagtggagtcctcaggtcaccggcatgtacacaagtaccagacaaggaggaccaagtccctctgctggtggcctcctaaaaggcaaggcttgagttttggctgatgagcagttctctccgttaccaatccctgccaaccagcactaccatggctgaattgatctaccgttttcctgagtaaactgtaactggctacagtttcggtaacatggaaaagaactcagctactacagccaactgcaatacttcaggaaccccctccatccctgggctcctcactcctagtgcatctgattgaggaatctgataacttgctgcagtctggtctgttagcctcatttgcaaagaaaggtgccagggactctattacactcactaaaccagagggcacacgctggcttaggacacccagagcctacttggaaagggccctgtttcatgctctagctcttggatggctattgcctggctgatcagtaaagcaagtatgaaggaagtacataggaaaaggaaagggagggaagaggcttttggacagtaacatttccaaaaaaatatagtgttttatgcaacagagaatcaagtttcactgtgtatactacaaatggtcaaacattttcaagagcatgacaaaataaaaacacacaaatttacgtctgatgttcaccttgcccacta

SEQ ID NO: 253839 - DNA, 475 bp, Homo Sapiens
gcacgaggtacgacgccccaagggacagactggcctcctgaattagggaaaagacaaccggtctctttagacgggcgcctcagagtctgacctgagtcttcaaacgcccagatcccctggggccttgagtctccctgtcccgctggccctgcctcgcctgcgcttcaggactccgacgcccccgcagccttgggctaagggtcagtcgtccccgggcgcgggtccggctgccctggaactgatgctggatttcgctggtaggtgggctaggggcttggtcaccccgtctgaattccactgtcaggacagctgtggaaccgccagagaaaagtctggccatgaaagaaaggtgaggggcgccgacgcagagcttatttattcagtctgtgggcggactcagacgtgcagagcaccaacctcttcaatttctgccctctagactccaaatcttttgaaattagggaccaccatttta

SEQ ID NO: 253840 - DNA, 2172 bp, Homo Sapiens
cggtccggaattcccgggatgactgacgagtgcggtgtcgctccagctcagagctcccggagccgcccggccagcgtccggcctccctgatcgtctctggccggcgccctcgccctcgcccggcgcgcaccgagcagccgcgggcgccgagcagccaccgtcccgaccaagcgccggccctgcccgcagcggcaggatgaatgatttcggaatcaagaatatggaccaggtagcccctgtggctaacagttacagagggacactcaagcgccagccagcctttgacacctttgatgggtccctgtttgctgtttttccttctctaaatgaagagcaaacactgcaagaagtgccaacaggcttggattccatttctcatgactccgccaactgtgaattgcctttgttaaccccgtgcagcaaggctgtgatgagtcaagccttaaaagctaccttcagtggcttcaaaaaggaacagcggcgcctgggcattccaaagaacccctggctgtggagtgagcaacaggtatgccagtggcttctctgggccaccaatgagttcagtctggtgaacgtgaatctgcagaggttcggcatgaatggccagatgctgtgtaaccttggcaaggaacgctttctggagctggcacctgactttgtgggtgacattctctgggaacatctggagcaaatgatcaaagaaaaccaagaaaagacagaagatcaatatgaagaaaattcacacctcacctccgttcctcattggattaacagcaatacattaggttttggcacagagcaggcgccctatggaatgcagacacagaattaccccaaaggcggcctcctggacagcatgtgtccggcctccacacccagcgtactcagctctgagcaggagtttcagatgttccccaagtctcggctcagctccgtcagcgtcacctactgctctgtcagtcaggacttcccaggcagcaacttgaatttgctcaccaacaattctgggacgcccaaagaccacgactcccctgagaacggtgcggacagcttcgagagctcagactccctcctccagtcctggaacagccagtcgtccttgctggatgtgcaacgggttccttccttcgagagcttcgaagatgactgcagccagtctctctgcctcaataagccaaccatgtctttcaaggattacatccaagagaggagtgacccggtggagcaaggcaaaccagttatacctgcagctgtgctggccggcttcacaggaagtggacctattcagctgtggcagtttctcctggagctgctatcagacaaatcctgccagtcattcatcagctggactggagacggatgggagtttaagctcgccgaccccgatgaggtggcccgccggtggggaaagaggaaaaataagcccaagatgaactacgagaagctgagccggggcttacgctactattacgacaagaacatcatccacaagacgtcggggaagcgctacgtgtaccgcttcgtgtgcgacctccagaacttgctggggttcacgcccgaggaactgcacgccatcctgggcgtccagcccgacacggaggactgaggtcgccgggaccaccctgagccggccccaggctcgtggactgagtgggaagcccatcctgaccagctgctccgaggacccaggaaaggcaggattgaaaatgtccaggaaagtggccaagaagcagtggccttattgcatcccaaaccacgcctcttgaccaggctgcctcccttgtggcagcaacggcacagctaattctactcacagtgcttttaagtgaaaatggtcgagaaagaggcaccgggaagccgtcctggcgcctggcagtccgtgggacgggatggttctggctgtttgagattctcaaaggagcgagcatgtcgtggacacacacagactatttttagattttcttttgccttttgcaaccaggaacagcaaatgcaaaaactctttgagagggtaggagggtgggaaggaaacaaccatgtcatttcagaagttagtttgtatatattataataatcttataattgttctcagaatcccttaacagttgtatttaacagaaattgtatattgtaatttaaaataattatataactgtatttgaaataagaaaa

SEQ ID NO: 253841 - DNA, 651 bp, Homo Sapiens
agtggatcccccgggctgcaggaattggcacgaggggaatagccgctcatgtcggctaacggagcggtgtggggccgcgtgcgaagccgcctccgcgccttccccgagcggctggccgcctgcggggccgaggccgcggcgtacggcaggtgcgtgcaggcctccacggccccgggcggccgcctgagtaaggacttctgcgcgcgggagttcgaggccctgcggagctgcttcgccgctgcggccaagaagacgctggagggaggctgttaggagggactctgagcttcacacctgtctgctgccatgggtgcagagccctagtcctgatggcccctggtggcacatatcgaatgcctagggcagaaaggaagtgggaatggcgaagatgtgacattcctcggtgttagatcctgttttttcttaacaagttgaggcgtgggtagagcaggaattggttttccagcattgtgtccgtaaacctgagttagaataagatgtaacggaagccacgataaagactcggtcaaatcctgcaaaataaaatatctctttatcccctatttcttatatcatatcatcctcctcctctctcccctcctttcaacatataaaattaactggcccgcgtttaccaacgtggcaactggt

SEQ ID NO: 253842 - DNA, 445 bp, Homo Sapiens
gacagatgttcctggaaagccaggaactcctgcgcctgttcggcattccctacatccaggctcccatggaagcagaggcgcagtgcgccatcctggacctgactgatcagacttccggaaccatcactgatgacagtgatatctggctgtttggagcgcggcatgtctatagaaacttttttaataaaaacaagtttgtagaatattatcaatatgtggactttcacaatcaattgggattggaccggaataagttaataaatttggcttatttgcttggaagtgattataccgaaggaataccaactgtgggttgtgtaaccgccatggaaattctcaatgaattccctgggcatggctggaacctctcctaaaattctcagaatggtggcatgaagctcaaaaaaatccaaagataagacctaatcctcatgacaccaaagtg

SEQ ID NO: 253843 - DNA, 417 bp, Homo Sapiens
gagggctagtagcaccctgaccacagccagccacaccgcagggacctggtcgctgcaaacacgtggctgggccgaagtgggcaatgccaggcagaagagccctccagagtagtcccagccaacctgtcccagccacccagcctgcatctgaacttgcccttcttcctatctactttaaacagtcatgccacactgccaacacagcaaagcatcaagatatcttttcttcctttcttctcctcaagcctgtaattaaactcctggtgacagagtggtagaggaaggagatcggggagcatgacttgaggaataaacagctccttagctgccctcagaaccgaggcagccaaggaatgtgagcgcctgtcagcctacgacctttcaggagaatctcgtgccgaattcctgcagcccggg

SEQ ID NO: 253844 - DNA, 2252 bp, Homo Sapiens
  misc_feature (2197)..(2197): n is a, c, g, or t
aacaaagcaggctgtaccggccggaatttccgggatatcgtcgacccacgcgtcgctcagaacttgaacacacagcatatttggaagagaaaacatggcctttctttggtgaatcacattagtatgatgagtgagtcatccctgcccatctgctgagcttctcacatctctcagtcacacgtggacccagtggtcaatcctgcagagaattcggcggaggttaggtttgggagtggagctagcgtgctaaagccagagccttcacgtgaaggtggcaggcactggggcggaagccaacactcaacagatgcaagcagtgtgggtgtgcagcagaacagtgatcttgggggaggaagaggatgttactggagtcagatgatttgctgtattctcctgaaaggtcgtaggctgacaggcgctcacattccttggctgcctcggttctgagggcagctaaggagctgtttattcctcaagtcatgctccccgatctccttcctctaccactctgtcaccaggagtttaattacaggcttgaggagaagaaaggaagaaaagatatcttgatgctttgaaaactgtgttggcagtgtggcatgactgtttaaagtagataaaaccttgtcattttaccccatccctgcatgactgtgaagctggcgaggaaggaggaagaagggcaagttcagatgcaggctgggtggctgggacaggttggctaagggactactctggagggctcttctgcctggcattgcccacttcggcccagccacgtgtttgcagcgaccagagtccctgcaaaggtgtggctggctgtggtcagggtgctactagcaccatcagcgcactcccgccattggctcagctcctctctgccagtccaactaagagtgctttgtcctgggtgggacataggggctgagagagatggggggagacataacacccaggaatgaaaatacagatttagagaaggaaccagtaagtaggagacagatgtgaaggaaatggaaatgaggcaagaggacattggaagagagaagtttgctgtccaggagccaggtctggagcatcagtgtgagggagttcaggtaggctgggcctgtgcctctaggtagggacaagggaggctgggtagccagggctggtgcttaaaacccctgaggccatgagctcattggctgcctttgtagcatcctgtcttcttctgtgctgcctggtttgatctcatctcacctggattcaaagggtaaggtgggcatgggtcttgggcctgacacccaccaaggatgacctgtggactgccatcggatgctgaacagggagatgaaaggaggtcctcttaccatacccctctgccaaccccccagtaggccactgttctgactttgtttccagaatatccagaaatccaaaggggctgttgctgaacagtctgcaggaccagtgacagcacctacctgttgtcccaaggcatacaaaggaggcctcaacgctcatgcttctctaatcaagccctaccaagacagacagaaagacagacagaaaaaaggaaggggtagaggagaaggttgaagctgtggagctagactctgcttcacttcctgaagcttcaacttcatgtcgaagattcactgggacccaattcctgcattgttaatatttgtgaggaaaagtgaaacaagtgatctggttttagcccagatgatgaaagtggatatggcacattttcacacacgtgagataattacagcttgccccacaacactgggtgttggagaaagggagagatagtcataagtggaagaaaaagccaagcatagtgagtgggaaagagagtgagagcctgtgcaggctgcttgacgagccccaggcagcccacaagtttcttcgtggggagatggagggcagagcccaggggttaggggacagagctgctggggccttttccttgcctggggaatttgttcccaggaagagcttccccactcccttcccccaaatttggaaaaaccgtactttcaagcctgtttggccctgaaattcttaagaatctggttaagaattaactcactaatgtcaaaagtcaaaacctcctaggggttgtcctgggagtcaggttcacgggtacagaagatgaatctcagatgtcactcaacctgagccgtcattctctgtggcagggctgccctgngtttctcttactcaatccctggagtgtaagcatttggattgtgtcacagattacc

SEQ ID NO: 253845 - DNA, 1971 bp, Homo Sapiens
caaaggagcgaggcctgggtggcgaattcggcacgaggggcgacggcaccgtggtggactgtcccgtgtgcaagcaacagtgcttctccaaagacatcgtggagaattatttcatgcgtgatagtggcagcaaggctgccaccgacgcccaggatgcgaaccagtgctgcactagctgtgaggataatgccccagccaccagctactgtgtggagtgctcggagcctctgtgtgagacctgtgtagaggcgcaccagcgggtgaagtacaccaaggaccatactgtgcgctctactgggccagccaagtctcgggatggtgaacgtactgtctattgcaacgtacacaagcatgaaccccttgtgctgttttgtgagagctgtgatactctcacctgccgagactgccagctcaatgcccacaaggaccaccagtaccagttcttagaggatgcagtgaggaaccagcgcaagctcctggcctcactggtgaagcgccttggggacaaacatgcaacattgcagaagagcaccaaggaggttcgcagctcaatccgccaggtgtctgacgtacagaagcgtgtgcaagtggatgtcaagatggccatcctgcagatcatgaaggagctgaataagcggggccgtgtgctggtcaatgatgcccagaaggtgactgaggggcagcaggagcgcctggagcggcagcactggaccatgaccaagatccagaagcaccaggagcacattctgcgctttgcctcttgggctctggagagtgacaacaacacagcccttttgctttctaagaagttgatctacttccagctgcaccgggccctcaagatgattgtggatcccgtggagccacatggcgagatgaagtttcagtgggacctcaatgcctggaccaagagtgccgaggcctttggcaagattgtggcagagcgtcctggcactaactcaacaggccctgcacccatggcccctccaagagccccagggcccctgagcaagcagggctctggcagcagccagcccatggaggtgcaggaaggctatggctttgggtcaggagatgatccctactcaagtgcagagccccatgtgtcaggtgtgaaacggtcccgctcaggtgagggcgaggtgagcggccttatgcgcaaggtgccacgagtgagccttgaacgcctggacctggacctcacagctgacagccagccacccgtcttcaaggtcttcccaggcagtaccactgaggactacaaccttattgttattgaacgtggcgctgccgctgcagctaccggccagccagggactgcgcctgcaggaacccctggtgccccacccctggctggcatggccattgtcaaggaggaggagacggaggctgccattggagcccctcctactgccactgagggccctgagaccaaacctgtgcttatggctcttgcggagggtcctggtgctgagggtccccgcctggcctcacctagtggcagcaccagctcagggctggaggtggtggctcctgagggtacctcagccccaggtggtggcccgggaaccctggatgacagtgccacccatttgccgtgtctgccagaagccaggcggatctggttatgtgcaaccagtgtgagttttgtttccacctggactgtcacctgccggccctgcaggatgtaccagggggaggagtggagctgctcactctgccatgtgctccctgacctgaaggaggaggatggcagcctcagcctggatggtgcagacagcactggcgtggtggccaagctctcaccagccaaccagcggaaaatgtgagcgtgtactgctgggccctattctgtcaccaaacctgccgcccccctgcatcagctggctaacgaactccacccttctccctggaaccagccccggtgggcaaccctggaatctgaaccctggaatcctggcccgcccttct

SEQ ID NO: 253846 - DNA, 1223 bp, Homo Sapiens
  misc_feature (1151)..(1180): n is a, c, g, or t
ggtaccggtccggaattccgggatatcgtcgacccacgcgtgcgattgaacgtggcgctgccgctgcagctaccggccagccaggactgcgcctgcaggaacccctggtgccccacccctggctggcatggccattgtcaaggaggaggagacggaggctgccattggagcccctcctactgccactgagggccctgagaccaaacctgtgcttatggctcttgcggagggtcctggtgctgagggtccccgcctggcctcacctagtggcagcaccagctcagggctggaggtggtggctcctgagggtacctcagccccaggtggtggcccgggaaccctggatgacagtgccaccatttgccgtgtctgccagaagccaggcgatctggttatgtgcaaccagtgtgagttttgtttccacctggactgtcacctgccggccctgcaggatgtaccaggggaggagtggagctgctcactctgccatgtgctccctgacctgaaggaggaggatggcagcctcagcctggatggtgcagacagcactggcgtggtggccaagctctcaccagccaaccagcggaaatgtgagcgtgtactgctggccctattctgtcacgaaccctgccgccccctgcatcagctggctaccgactccaccttctccctggaccagcccggtggcaccctggatctgaccctgatccgtgcccgcctccaggagaagttgtcacctccctacagctccccacaggagtttgcccaggatgtgggccgcatgttcaagcaattcaacaagttaactgaggacaaggcagacgtgcagtccatcatcggcctgcagcgcttcttcgagacgcgcatgaacgaggccttcggtgacaccaagttctctgctgtgctggtggagcccccgccgatgagcctgcctggtgctggcctgagttcccaggagctgtctggtggccctggtgatggcccctgaggctggagcccccatggccagcccagcctggctctgttctctgtcctgtcaccccatccccactcccctggtggcctgactcccactccctggtggccccatcccccagttcctcacgatatggtttttacttctgtggatttaataaaaacttcaccagttnnnnnnnnnnnnnnnnnnnnnnnnnnnnnncacgagactagttctctctccctcgtgccgaattcgccaccca

SEQ ID NO: 253847 - DNA, 962 bp, Homo Sapiens
  misc_feature (94)..(94): n is a, c, g, or t
  misc_feature (803)..(803): n is a, c, g, or t
cctatcggtggggcgcagcccctctaaagtgatgtgtcgcacaccagcaagccacagccaggtctgcacaaatccaatgtacacctttgtaganaactggtggcacattagtccacaggattccatctgttattgacttaagtaaatcacttagaaaacacaaaattggaggttgcagctccgtaaaataataaagtgctttcgatgagtgaaaggtgataagatttatcatgagtaaaaactgtaagagcttctttctactaaaaagcctgcatttctaaatgtacttttcattggtttccacatcttcatcttactaaattttaaactcactgcggggtaaggaaatagtttattactgggtggcgggtgggggtaggggtggaaaacacagaaaaggagaggtccataaatatcccttaaggattccattcatgaagatgttggcaagggcaggggagtggtggggcggttatagcaaaaaaggtcaggcctcattgctgaatccaggtgtgtgtccggatgagttgagccacagcttagcttctaaaagcattcacatattgacctaagaatttgttacaagtccacatgcttgataactgctataacacactcgcatcttccatggcctcgatccacctctgagctgaattggtatcttctgctttgaagctataaaatagggttttcttgtggtaaaggtgaaaaataggtcctacttcactgctgccctcttccttttctggagcaatggtgaagcctagcagaggcatactctccaaggccactttgtcctcaantgcccatgtaggtgtagagaactttgcctttgatgacaaaccagagcttcttccagtgccgcttgcccctcttacaccggctgagatagccactgatggcagagccctctccagaggcagccagctctgtcagggctgaagggactttcttctgcttcc

SEQ ID NO: 253848 - DNA, 394 bp, Homo Sapiens
  misc_feature (31)..(31): n is a, c, g, or t
  misc_feature (62)..(62): n is a, c, g, or t
  misc_feature (122)..(122): n is a, c, g, or t
aataccaaaagttggcctaggtatgggtggncaaacgccctgtggtcctcggctccccccgnaggctgaggcaggggaattgccttgaaccccgggaggtggaggctgcagtgagcccaagntcatgcccactgaactcccagcctgagtgacagagtgagactgcatcctaaaaaaaaaaaatatgcctttttgaagcacgtacattttgtaacatagaactgaagctcttattatattattagttttgatttaatgttttcagcccatctcctttcatatttctgggagacagaaaacatgtttccctacacctcttgcattccatcctcaacacccaactgtctcgatgcaatgaacacttaataaaaaaaacagttgattggaagaccaa

SEQ ID NO: 253849 - DNA, 454 bp, Homo Sapiens
  misc_feature (143)..(143): n is a, c, g, or t
cagggcaaggcgaggtggtaggatcgggcctggcctctcattcctggcacagaggaacctggaaggtcctgaggtcagtccctcctgacatctggagccacactgcctgaggtggaagagatggagatgtgcttgctctagcncagggtccatgctggcccatgtgggcccactgtgtccccagagaagcaggaatgcacatgatcagcccagggtccatgctggcccatgcaggccactgtgtcccttgagaagcaggaatgcttcttaatgatgaattaaaccaccccagggtgccaggttccaaggctccctgggacccagaaccacatacggaagttggcaatggctcgatgagctgagcagtttgaggctcgtcaaaggggagatgaggagaggatgggacgccattccatctggacatgactggcagctcctcaccctgagatggctg

SEQ ID NO: 253850 - DNA, 708 bp, Homo Sapiens
  misc_feature (559)..(567): n is a, c, g, or t
ggacaacctctctcctgtctcatcagggaagcagtaccgcctgtaagttggacctgcgtgcttcctctgacctctgacctcgtggccactctaggcctcacggaggagggaagaggaagaggcaaggggagggtactgaggggcagatggctccaggagaggcagctcccctgcccaagggtccttgggcagaccccagctgttgtctgcccagtagaagtgggtgggggtaggaggggatagggtgtccttgggaacaatggatcccagcttagccccaaagaccaaccaaagagccagccagagtaagctggacctgcaacctgcctgagccccgtggcctctcagctctgcggccaccccgttccctccccagcttcctgcccaaagagccccacattcaagccaacttgagggaagggggcgtctcgtcagctggtccctgctagggagctattgatgtgcaatattagaaaggagacatgaaaaaaggagaaaaggaaagacagaagtgtatatatatattatttaaacaaacaaaaagaaggtgcgttactannnnnnnnncacccgggaaagaggtgagaggatgggaaggagcagccaggcgtgggaagcggcgagatcctcgggctgggggtgcccacgtttgctacctcccactgtgaaatcgctggtgctcgcaattgtctctcacagtgtatgtga

SEQ ID NO: 253851 - DNA, 401 bp, Homo Sapiens
ccagcggactccaccttggtcccctggccaaaagtgtacggaggagtgatgtaatattgctgacagtaataaactgccacatcttcagcctgtaggttgctgatggtgagagtgaaatctgtcccagacccgctgccactgaaccgggccgggaccccggagtcacggacagacgcccagtaaatgagcaacttaggaggctgtcctggtttctgctggtaccaagctaagtaatccttattgccagggccgtagaaaacactctggctggacttgcagctgatggtggccctctcgcccagagacacagccagggagtccggagactgggtcatcacgatgtccccgtaagtaccagagatccagagcaacagagaaatgaagacctgggtctgcaacac

SEQ ID NO: 253852 - DNA, 475 bp, Homo Sapiens
  misc_feature (67)..(184): n is a, c, g, or t
ttgttcaagctattctcgtgccccagcctcctgagtagctggaatcacaggcacgtgccagcctgcnnnnnnnnnnnnnnnnnnnnnnnnnnnnnnnnnnnnnnnnnnnnnnnnnnnnnnnnnnnnnnnnnnnnnnnnnnnnnnnnnnnnnnnnnnnnnnnnnnnnnnnnnnnnnnnnnnnnnnagcatgagccaccaaacccagccaaaacatcaggtttctttatgctgctagaagtcagatagacttagtgtagaaaccttggttatctcagactgaaaagatcttctgattagagtttgctatctgattaataaggatgaggaagagatataataagtgcattctgtttggcagtcaaaactgttaagtgtatggggtcaatggggaaaataaactggatacttggaggtgatagggtgagaactgccatgtcaaagatcttttcaaaagggctttagccaaatacaaaaa

SEQ ID NO: 253853 - DNA, 351 bp, Homo Sapiens
cccaggtgcatgtccgctccgaggaatgggatataatgacctctgaggccaacccatatgacagcgtgaaagttcttttgctgggctccaagaacttaaagccacggagaagcctctcatcttatggcactgacaaagagaagaacatccacacttaccctgaaaggggtgaagcccactgatgaagagctgcccttgtttcttgtggagtcaagtgaagaagcaaagaagcacctcctccaagtgcgaaagtccacctcaatggcacaagggaaagcaatgatcgagactaagacgggtataatccctgagaaccagaatgtgacttgcaatggaaagagactggagggg

SEQ ID NO: 253854 - DNA, 796 bp, Homo Sapiens
cccattctgccagggaggacccaccagagatggctcccaaggcttccggcctctgtgcgcatgtccgttccgaggaatgggatttaatgacctttgatgccaacccatatgacagcgtgaaaaaaatcaaagaacatgtccggtctaagaccaaggttcctgtgcaggaccaggttcttttgctgggctccaagatcttaaagccacggagaagcctctcatcttatggcattgacaaagagaagaccatccaccttaccctgaaagtggtgaagcccagtgatgaggagctgcccttgtttcttgtggagtcaggtgatgaggcaaagaggcacctcctccaggtgcgaaggtccagctcagtggcacaagtgaaagcaatgatcgagactaagacgggtataatccctgagacccagattgtgacttgcaatggaaagagactggaagatgggaagatgatggcagattacggcatcagaaagggcaacttactcttcctggcatgttattgtattggagggtgaccaccctgggcatggggtgttggcaggggtcaaaaagcttatttcttttaatctcttactcaacgaacacatcttctgatgatttcccaaaattaatgagaatgagatgagtagagtaagatttgggtgggatgggtaggatgaagtatattgcccaactctatgtttctttgattctaacacaattaattaagtgacatgatttttactaatgtattactgagactagtaaataaatttttaaggcaaaatagagcattcaaagccag

SEQ ID NO: 253855 - DNA, 1006 bp, Homo Sapiens
  misc_feature (683)..(683): n is a, c, g, or t
  misc_feature (748)..(748): n is a, c, g, or t
  misc_feature (761)..(761): n is a, c, g, or t
taaaagaggctggtaccggccggattcccgggaccggcaccctttcttgggccgcgaggtccctatctcgaacggctcaggattcgtggtggctgccgatgggctcattgtcaccaacgcccatgtggtggctgatcggcgcagagtccgtgtgagactgctaagcggcgacacgtatgaggccgtggtcacagctgtggatcccgtggcagacatcgcaacgctgaggattcagactaaggagcctctccccacgctgcctctgggacgctcagctgatgtccggcaaggggagtttgttgttgccatgggaagtccctttgcactgcagaacacgatcacatccggcattgttagctctgctcagcgtccagccagagacctggggactcccccaaaccaatgtgggaattacatttcaaactgatgcagctattgattttggaaactctggaggtcccctggttaacctggatggggaggtgattggagtgaacaccatgaaggtcacagctggaatctcctttgccatcccttctgatcgtcttcgagagtttctgcatcgtggggaaaagaagaattcctcctccggaatcagtgggtcccagcggcgctacatttggggtgatgatgctgaccctgagtcccagcatccttgctgaactacagcttcgagaaccagnctttcccgatgttcagcatggtgtactcatccataaagtcatcctgggctcccctgcacaccggngctggtctgcggncctgggtgatgtgatttttggccattgggggagcagatggtacaaaatgctggagatgttttatgaaggctgtttcgaccccattcccagttggggagtgcaaatccggccgggggaccgaaaaacactggacctatatgtggaccccctgaaggtcccgaaaggaatagatcccccagaagtatggagggtccctggtccgaatttcccccttggcctttttggggtttagggttctgaagggc

SEQ ID NO: 253856 - DNA, 842 bp, Homo Sapiens
  misc_feature (748)..(748): n is a, c, g, or t
  misc_feature (816)..(816): n is a, c, g, or t
  misc_feature (832)..(832): n is a, c, g, or t
gggcaacgctgaggattcagactaaggagcctctccccacgctgcctctgggacgctcagctgatgtccggcaaggggagtttgttgttgccatgggaagtccctttgcactgcagaacacgatcacatccggcattgttagctctgctcagcgtccagccagagacctgggactcccccaaaccaatgtggaatacattcaaactgatgcagctattgattttggaaactctggaggtcccctggttaacctggatggggaggtgattggagtgaacaccatgaaggtcacagctggaatctcctttgccatcccttctgatcgtcttcgagagtttctgcatcgtggggaaaagaagaattccccctccggaatcagtgggtcccagcggcgctacattggggtgatgatgctgaccctgagtcccagcatccttgctgaactacagcttcgagaaccaagctttcccgatgttcagcatggtgtactcatccataaagtcatcctgggctcccctgcacaccgggctggtctgcggcctggtgatgtgattttggccattggggagcagatggtacaaaatgctgaagatgtttatgaagctgttcgaacccaatcccagttggcagtgcagatccggcggggacgagaaacactgaccttatatgtgacccctgaggtcacagaatgaatagatcaccaagagtatgaggctcctgctctgatttcctccttgcctttctggcntgagttctgagggcaccgagacagaagggttaatggaacccttggggggcagggtccctccaaaccanccagcactggactccntggggctccg

SEQ ID NO: 253857 - DNA, 1078 bp, Homo Sapiens
tacagttaaacatatttaatagaaatattaaaataatcattacacttcctctcattgcagaaaccatgaaagaatatgccttttgtaatcaaagtaattttttatcatgcaaaaaattattttgttatgacattcgtaagcagagactatatttcaaaacaagtttatacagacttcaaaaggtctaaagtcaaagagaaagtgaaatatatttaaatatgattagttacatcgtatgcagctggcatactcatattcacagtttataaagtaaaaaaactaaactcttcatgtcagctctgaaatagatgcattttcattaatacattcactagttaggtctgttcttctaagacaggaggaaagatgagatatatgagctattttttaaagaacaaactcaacatatcagcagcaaatttcagttaaactgaattggaaaccaatgttctgtgtaaccaaagtgcaaagccagttctccagctcagaaagaaaattaaattaagagtataaactgaaggcttaagagaactgatttaagaacaacacagtttggatctagtcattaaaacatatgcacaggtgtcaaaggcaagtaacactaccacctaaggttattcggaggaactgtgaagatgtagcacggacctctaaggtgtctaaaatcccttctgatggaaagcttatggaacactatctgccaaaaacactgaaagcaccacttttatatttagatccaatgctgagtgatatagtcactgttgggataggtttttatttgggaaaatggagaggattctcaaaacagattcatggcttgcatgcagtgacaccctatcaagagcctggaaagacaccatgaaatcacctcaagtggtgggcccacctactcatagtcagtgttacactagccagctctagggctctgacaacataatgagttttgagatagtatactttaaagaaaaaaagaagagtttattttaaagcaaataactaaactgtattttaacttagcacaattaactgcagcatatttacttcatagccccttaacatgtcacttttaccaacaaag

SEQ ID NO: 253858 - DNA, 670 bp, Homo Sapiens
  misc_feature (358)..(472): n is a, c, g, or t
  misc_feature (495)..(495): n is a, c, g, or t
  misc_feature (543)..(543): n is a, c, g, or t
  misc_feature (586)..(586): n is a, c, g, or t
  misc_feature (594)..(594): n is a, c, g, or t
  misc_feature (621)..(621): n is a, c, g, or t
  misc_feature (630)..(630): n is a, c, g, or t
aggaccaaaacagattcatggcttgcatgcagtgacaccctatcaagagcctggaaagacaccatgaaatcacctcaactcaagtggtgggcccacctactgaggtagtatacaaagaaaaaaagaagagtttaaaagcaaataactaaactgtattttaacttagcacaattaactgcagcatatttacttcatagccccttaacatgtcacttttaccaacaaagctttttccttcatattctaatcacaaaaatttctcaacaatttataacaatctgtaaatctgaccttgcaataaatagtcataaaacgttatttttattttactactataatttttagagacaaggtctcnnnnnnnnnnnnnnnnnnnnnnnnnnnnnnnnnnnnnnnnnnnnnnnnnnnnnnnnnnnnnnnnnnnnnnnnnnnnnnnnnnnnnnnnnnnnnnnnnnnnnnnnnnnnnnnnnnnggccttgaaacattatttttaangcctaaattccagttggtatggtaccaaaatttagtttaacttcaaanttcacagtactgccgaggaaatggggcgggtcctgaggttccngaggaagngtgggagtgaattcattccgggtgggntttattccngggcagcatgcatggggaaatcacatgagttaggaggggc

SEQ ID NO: 253859 - DNA, 815 bp, Homo Sapiens
  misc_feature (80)..(108): n is a, c, g, or t
  misc_feature (122)..(238): n is a, c, g, or t
  misc_feature (712)..(739): n is a, c, g, or t
agatattctaatcacaaaaatttctcaacaatttataacaatctgtaactctgaccttgcaataaatagtcataaaacgnnnnnnnnnnnnnnnnnnnnnnnnnnnnngagacaaggtctcnnnnnnnnnnnnnnnnnnnnnnnnnnnnnnnnnnnnnnnnnnnnnnnnnnnnnnnnnnnnnnnnnnnnnnnnnnnnnnnnnnnnnnnnnnnnnnnnnnnnnnnnnnnnnnnnnnnnncttgaaacattatttttaaagcctaaattccagttggtatggtaccaaaatttagtttaacttcaaaattcacagtactgccgagaaatgggcgggtcctgaggttccagagaagtggggagtgaattcattcctgggtggttttattctggcagcatgcatgggagatcacatgagttagagggctgtggcctggtatcaacacttcaagctgttgtacttttacttcaagttgaaacttttaaaatacatctgtcatatagatgtacaaatatatgtaaatgcaaacatatacacactttttgacaaaagaatgatggtaatacacatgaaccatttttgtaaatagattttatttggttaataaaaacattccttccatcaacctatcgaagtccaaaccaactacgaagataggatgcccatccagaagaacgggaagcattttattcctcacctttggaaagtaaaccnnnnnnnnnnnnnnnnnnnnnnnnnnnngagagtattaaaatttctcaatgtaaaatctatattttagaatcactctacaatataagcaaataatgtgtttttt

SEQ ID NO: 253860 - DNA, 870 bp, Homo Sapiens
  misc_feature (50)..(50): n is a, c, g, or t
  misc_feature (56)..(155): n is a, c, g, or t
ggaatttaggctttaaaaaattaatgtttccaaggcccaggtgtggtgantccatnnnnnnnnnnnnnnnnnnnnnnnnnnnnnnnnnnnnnnnnnnnnnnnnnnnnnnnnnnnnnnnnnnnnnnnnnnnnnnnnnnnnnnnnnnnnnnnnnnnngagaccttgtctctaaaaataataatagtaataaaaataacattttatgactatttattgcaaggtcagatttacagattgttataaattgttgagaaatttttgtgattagaatatgaaggaaaaagctttattggtaaaagtgacatgttaaggggctatgaagtaaatatgctgcagttaattgtgctaagttaaaatacagtttagttatttgctttaaaataaactcttctttttttctttaaagtatactatctcaaaactcattatgttgtcagagccctagagctggctagtgtaacactgactatgaataggtgggcccaccacttgagttgaggtgatttcatggtgtctttccaggctcttgatagggtgtcactgcatgcaagccatgaatctgttttgagaatcctctccattttcccaaataaaaacctatcccaacagtgactatatcactcagcattgaatctaaatataaaagtggtgctttcagtgtttttggcagatagtgttccataagctttccatcagaagggattttagacaccttagaggtccgtgctacatcttcacagttcctctgaataaccttaggtggtagtgttacttgcctttgacaccgctgcatgtgttttaatgactagatccaaactgtgttgttcttaaatcaaaaattggataatttttaatatttatgtattaatca

SEQ ID NO: 253861 - DNA, 535 bp, Homo Sapiens
  misc_feature (365)..(365): n is a, c, g, or t
  misc_feature (386)..(386): n is a, c, g, or t
  misc_feature (420)..(420): n is a, c, g, or t
  misc_feature (438)..(438): n is a, c, g, or t
  misc_feature (447)..(447): n is a, c, g, or t
  misc_feature (456)..(456): n is a, c, g, or t
  misc_feature (461)..(461): n is a, c, g, or t
  misc_feature (490)..(490): n is a, c, g, or t
  misc_feature (518)..(518): n is a, c, g, or t
tgattaatacataaatattaaaaattatccaatttttgatttaagaacaacacagtttggatctagtcattaaaacacatgcagcggtgtcaaaggcaagtaacactaccacctaaggttattcagaggaactgtgaagatgtagcacggacctctaaggtgtctaaaatcccttctgatggaaagcttatggaacactatctgccaaaaacactgaaagcaccacttttatatttagattcaatgctgagtgatatagtcactgttgggataggtttttatttggggaaaatgggagagggattctcaaaacagattcatgggcttgcatggcagtggacaccctattcaaggagcctgggganagacaccatggaaatcacctncaacttcaagtgggtgggggcccacctatttccntaggtccagtgtttacantaggccagntctaggggnctctngacaacataattgagttttttaggtagtntacttttaagggtaataagaagggtttntttttaaggcaataact

SEQ ID NO: 253862 - DNA, 660 bp, Homo Sapiens
  misc_feature (582)..(582): n is a, c, g, or t
cttttatttacttgagaacattgcttgggtcaagtcatataacatatgctttgagttagaagatagcaatgaaattttcacccagctatacagaaccttattttcagttataaacaatggccacaatcagaaagtccatatgcacatggtagaccttatgagctctattatttgtgaaggtgatacagtgtctcaggagcttttggatacggttttagtaaatctggtacctgctcataagaatttaaacaagcaagcatatgatttggcaaaggctttactgaagaggacagctcaagctattgagccatatattaccaatttttttaatcaggttctgatgcttgggaaaacatctatcagcgatttgtcagagcatgtctttgacttaattttggagctctacaatattgatagtcatttgctgctctctgttttaccccagcttgaatttaaattaaagagcaatgataatgaggagcgcctacaagttgttaaactactggcaaaaatgtttggggcaaaggattcagaattggcttctcaaaacaagccactttggcagtgctacttgggcaggtntaatgatatccatgtaccaatccgcctggaatgtgtgaaatttgctagccattgtctcatgaaccatcctgatttagc

SEQ ID NO: 253863 - DNA, 988 bp, Homo Sapiens
  misc_feature (49)..(49): n is a, c, g, or t
cccgaacatcagcaaagcctgagggtagaaagggagtaggaaccgtttnccatcatttattatactgatgtgccatccatctgcatcattaggttcagtagttaccatgacaatatgatgcctacagcaatctaacttgatagccacatgccagaatgtgaaaaaataggaccagctaagaaagtgagagaaatataattaatctgaaccacattcaaaaaaatgtgcacaaaactaggaccaagagggaaactgctgaaatatcattgaagaggaaattataaagggcagcaataatcaagtttcagtataaaaactttgctaaatagagccatgtattggtctattactaagacaggaagtagtcaaagttggtctagaatattgttctgagcccctgcccctccccctgcttcccatttcttgctacagggccctgcggtatcatctttgattctagctgttagggccctaatttccccaaggctctcaagccaccaccataagtgccaccaccatgtcactctgctcatgtgcagtctgctattagacccagactttccacctgatgaaataatttccatcattgtgaagttaatcttaagagactgaattgtgctgtgtcttgagagatcctgtcctcttgccttctaagtgcccggtggaggcatcgggctagcacaaacctcttgagggtcccaatatggtagagaggggctgggagattgagaaaaagagagcaagaaagtttcagtcctgggagatgagcctggcacgtgtgtttattctcagcatggctgggtgggatagcgacgctgagctaggcgatttggccgattcaggctagtgcccgtggacagctgaggcacttgagatgggttgtaaagaggaacagccccttataaggcaggtggaggaagaagaacacgtggctgcctgtggaatcctcccccacatgagctggaagagggtctgcagtgggtcattg

SEQ ID NO: 253864 - DNA, 923 bp, Homo Sapiens
  misc_feature (441)..(449): n is a, c, g, or t
gccacttccatgttacaactgcctaatcccccgggcacagcagaagagtttacctccatccagcctccttccctgttgacctcccttttgggacccatctgtagccagaatggccagcggtcctcccttgataagcgggaaggcagatgacaaaatgatgatgacccatgaggacagtcaggctggggtcaatgtaacactgcccagttacacgggtcctcactcttcaggggaagcacatagaatatgatggccgtgatgacccacaacccacggaccccagggcatctcccatcacatgcaaaagtacacctctgatattcagagcttcagactttttctcttttttcatcatgtcttctggctcattctgggtgttgaaggaatcacctgcattcaaagaagaaaccttgtgttgtgtataagttctacaaacaaacnnnnnnnnnccaatggactcaaaataaagttttgttattttaaatttctactagcttaagggagacccttctgcacacccacagctcagaacagtacattttggccttgaaatagccttgtgatccacctttggacttcattcacacatcctttcaagttaaaacaaaaagagggtgaatgggagcccacctgcagcccctaaacccgtaacacccaagaagacaaacggatgggcaaagagggggggagaacaacaaaattcagacagcaagtaatgagagggaggaggggttgaagagtcctgcctgttgcccaataatagtgaccgatttccaagaaaatcaatactcatatacagagaatagggtaagggaaaagaggccagggctacccgaggatccaggagaaaaaagaagggatggggaatatgttaaattggcagaagagaagtaaagcgggattgtaaaggcaatggatttatt

SEQ ID NO: 253865 - DNA, 924 bp, Homo Sapiens
  misc_feature (49)..(66): n is a, c, g, or t
ctccttcaaaccttgttactatgtcagcacattaactgcctggcatggnnnnnnnnnnnnnnnnnngaaatatgttcttttcctaccatttgaaaaaaatcctccattgcttttattagagttttgaatacttgtgaaaattttcaaaagaaagtaattgattaccatttttgctgcttattacgatgagctgtgtccattagctgtgtcaccccactcttgcatttccagaatagtccctacccaattgcagcgggcatgtttttgagtggtgttgcattccatgtgcttgattttgtcctagaactggcacagcgcctgccctacctgcagccctgggttgtggccctgttgcgtaccatgtgatttgccaccccgcttctaggccatattaattcagccagaactgaacacctgacccaagggcagcaagcaatcatcagagcatagagctgacagaacatgatggaccacggacaccaccaggccttccagatctgaaatgcaaacaaggaaacagaagcttctaggcatcagaaggtgtggggagcagcacagtactcagaggagtgaggagcgtggcgcctgctgggagtgaaggcctggccatggtatgttcttggatttctggcagcagcccttcattggtccacgtgcgtccccactacagactccttgacttgagccagcttgagtgggtctctactcttttctattgtgttttgccacttggctgcttcctgggccaagtcgcacctgactggcatgaacacctgttcaaacgtgtgttctctgttctcttaagatgggtgaaagtcgatgccttctagtcttcagtggaatttaaacctgtggattttatgtctacgtatattgtttccctttactgaacccaccacatgcgggggccattaaaatgaagtg

SEQ ID NO: 253866 - DNA, 615 bp, Homo Sapiens
gggggacccgtccacctgtggactgtatctcgaaagctttggaatcggtctgcctggggttaatctgcttgcctgtggttatgcctggcttagttctgcctggatggcgaagtgtccatccacttctctgtgtggtcccctgagtgtccaagtgagggaggctcaggtgctgaggatggactagtgctgtgtggtgaggagagcagtctccggaagctcatctgtcccttctccccttcataactcaggggtcatgccccttcctgatcttctttcttgaatctgctctgtgcagcctcaccagccactataccctagctacctcctccagcctcaagccttgaatgctacagtcattggggcaaagcccccacatttcccaccctgagaaactttaactttgatccaggcccactgtttccattctgcgcacggcgctcagcagcaccggggcatcagcagtccgagctcacaagaggcaacaggcaggaactggcgttagacttacacccgggtccactcagcaggcgggtcccggggacccttcggcctcccaatgcgcaggttgaaacctagcccaccggtctgagctccacccgccacgtcctcgtaggc

SEQ ID NO: 253867 - DNA, 1003 bp, Homo Sapiens
  misc_feature (58)..(112): n is a, c, g, or t
aagaaatgagtttttgccatgttgcccagactggtcttgaactcccaacctcaagcannnnnnnnnnnnnnnnnnnnnnnnnnnnnnnnnnnnnnnnnnnnnnnnnnnnnnntcagccccctaagatttgaaacactttaaatggcccatggtagggttcctgctaggataaaacattaagcggctgttaaaagaaataaaaggaggacacgtctctgtgcactggtgtggacaaatctccaagtcactgcaaaatggaaaaagtataagatgctctttccctgaacctcaagggtcccgcccctctcactttcaggtctctggacctctgactgacactgtgcctgcccaggtccctgtatgcactgccacagtgccctgggccccatgtccacccctgtcctgcccttctctgggatagggctggccttcctctgcctctgcctggctgcatccatggtcgatctcaagtgccttggcatgaactccactctcctgcagccttcaatcaaggaatgatggggatgtgtacataccccaccccaccccttggcagggtgatgctgaggtgtggatttttaacagttcccagactttcccaggaggcttgggtttgggtgcccacagtgggagctggtgtgatatcataccttcgccggccgccttcccttcctgttctctgtgcccctactcccactctagagctgccccgtttctctgttttcgtgaaagagctgaccctgtgctgcctcccactctcccaatgcccctgccactcctgtgagcctgctgctggtgaggtcggtgctgacctctgggttggctggataatgaagtcatctatctccgggaaggagaaagaaaaggcagggccctccacaagccctggataaaaatctcccaagtctccccaagtttcggggccccctctccctgggaaatggaaaccccactggcctggccccaattgggaacaaaccccattggccccccttccttgggg

SEQ ID NO: 253868 - DNA, 438 bp, Homo Sapiens
  misc_feature (26)..(26): n is a, c, g, or t
  misc_feature (69)..(69): n is a, c, g, or t
  misc_feature (77)..(77): n is a, c, g, or t
ctggtgtgaaaatcaaaaccttcgcnggccgccctttcccttccctgttctctgtgccccctaatcccnactcctanagctgcccccgtttctctgttttcgtgaaagagctgaccctgtgctgcctccccactctccccaatgcccctgcccactcctgtgagcctgctgctggtgaggtcggtgctgacctctgtgttgctggataatgagtcatctatctctggaggagaagaaaggcaggtcctccacagccctgataaaatctccaagtctcccagtttcgggtccctctcctgggatgcagacccactgcctgcccagctggtacgatccacatgccctcttcttgggaataggggcatgggaaagtgactaaagatactgttctggctgctgtgttcactgtgagtaataaactgtccatttctccgaaaa

SEQ ID NO: 253869 - DNA, 670 bp, Homo Sapiens
ggaggacgaggtgatggtgtatggtggcgtgcgcatcgtgcccgtggaacacctcacccccttcccatgtggcatctttcacaaggtccaggtgaacctgtgccggtggatccaccagcaaagcacagagggcgacgcggacatccgcctgtgggtgaatggctgcaagctggccaaccgtggggccgagctgctggtgctgctggtcaaccacggccagggcattgaggtccaggtccgcggcctggagacggagaagatcaagtgctgcctgctgctggactcggtgtgcagcaccattgagaacgtcatggccaccacgctgccagggctcctgaccgtgaagcattacctgagcccccagcagctgcgggagcaccatgagcccgtcatgatctaccagccacgggacttcttccgggcacagactctgaaggaaacctcactgaccaacaccatgggggggtacaaggaaagcttcagcagcatcatgtgcttcgggtgtcacgacgtctactcacaggccagcctcggcatggacatccatgcatcaaacctgaaccttctcactccgaagaaactgagtcgcctgctggaacccgcccgaccccctgggggagggactgtgccttctcgccattgctatgccttcctggacctcgttgcgtac

SEQ ID NO: 253870 - DNA, 1844 bp, Homo Sapiens; identical to SEQ ID NO: 5076

SEQ ID NO: 253871 - DNA, 1018 bp, Homo Sapiens
gcaggtggtacggtccggaagtacgggatatcgtcgacccacgcgtcggatgaaaccctctcggctttatgatgcttatgaactgaaacatgccttgaagggagctggaacaaatgaaaaagtactgacagaaattattgcttcaaggacacctgaagaactgagagccatcaaacaagtttatgaagaagaatatggctcaagcctggaagatgacgtggtgggggacacttcagggtactaccagcggatgttggtggttctccttcaggctaacagagaccctgatgctggaattgatgaagctcaagttgaacaagatgctcaggctttatttcaggctggagaacttaaatgggggacagatgaagaaaagtttatcaccatctttggaacacgaagtgtgtctcatttgagaaaggtgtttgacaagtacatgactatatcaggatttcaaattgaggaaaccattgaccgcgagacttctggcaatttagagcaactactccttgctgttgtgaaatctattcgaagtatacctgcctaccttgcagagaccctctattatgctatgaagggagctgggacagatgatcataccctcatcagagtcatggtttccaggagtgagattgatctgtttaacatcaggaaggagtttaggaagaattttgccacctctctttattccatgattaacggagatacatctggcggactataaagaaaagctcttctggtgctctgtggagaagatgactaacgtgtcacgggggaagagctcctgtgtgtgctggagcaaccatgattacttagcacttagtgctgttgcatgttaaaaatgcttatcatattagtggttggcaacatacgctaagaaaagggggcttgagttaggagattacggggacaagtctagtgagtataggggggtacgattaatagggaagtactaagaaatggcgcatgaacagggcataaggctcagtgtattttgaaaaaagtttgtgtgtttaga

SEQ ID NO: 253872 - DNA, 594 bp, Homo Sapiens
agccaagcatccgcaagaatgttccacactgggtcgtccactttatagtaagcggtggcatgaatctctcgctcttctctgtactgctcaatggtctcttgtagcttcttaagttgtgaggttaagctgagctctcttgctgcacttggagcagctgatacagactcagtattcaactccagcagatgcagtttataactccagtgctgtcatccactccataactgtagaaagcatctctttctctcactccaatgacagttcccaagacatctacctgttttattggatgtccattgtacaaaaatacacctggcacctggcgggactccttcatgtccaggatatccctgatgtagagttttgcaaaggctagaaacacaggatccaaaccccacaagagggaaggggtctcctcttcacaccggctggatccaggctgcatcaagaggcagggctgtggcttccagctaactctgaaaggttctgcatcactgagtcaagcatttgtagcccctcccgccgcctgcagctccaggagccctgcgacctggcccttccggcgctcggagccgctggcggcgacgaccccgc

SEQ ID NO: 253873 - DNA, 972 bp, Homo Sapiens
  misc_feature (17)..(17): n is a, c, g, or t
  misc_feature (869)..(869): n is a, c, g, or t
ggctggtaccggtccgngaaattcgggatcggcgccagcggctccgagtttccgaagggccaggtcgcagggctcctggagctgcaggcggcgggaggggctacaaatgcttgactcagtgatgcagaacctttcagagttagctggaagccacagccctgcctcttgatgcagcctggatccagccggtgtgaagaggagaccccttccctcttgtggggtttggatcctgtgtttctagcctttgcaaaactctacatcagggatatcctggacatgaaggagtcccgccaggtgccaggtgtatttttgtacaatggacatccaataaaacaggtagatgtcttgggaactgtcattggagtgagagaaagagatgctttctacagttatggagtggatgacagcactggagttataaactgcatctgctggaaaaagttgaatactgagtctgtatcagctgctccaagtgcagcaagagagctcagcttaacctcacaacttaagaagctacaagagaccattgagcagaaaacaaagatagagatcggggacacgatccgagtcagaggcagtatccgcacatacagagaagagcgagagattcatgccaccgccttactataaagtggacgacccagtgtggaacattccaattgcaaggatgcttgagcctgcccactatctacaggaaagtttatgacccagccttttcacagctccacccctaaagaaagaagaggcactaagcaatccaggcgccctggacctccccagtctcacgagtttgctggagtgaaaagcccaaagaattcctcatggagaacagagtgcagaagcttttaccagcaggagctggaaatggntggagtcctttgctgtcccttgcccatcagcctgtgattcacagtgccctgctccgcacaaggtgaatttttaggaaggacaccaccttccagggcgattccc

SEQ ID NO: 253874 - DNA, 864 bp, Homo Sapiens
  misc_feature (684)..(684): n is a, c, g, or t
gggtcggggagggccgcgcagtcggaccggctgctgagacgaacgcttcactggggcagtctctgcatatcatggggagatagacgctgctgcctttaattggccttggtcctcacagctccaaaaagaaacaggatctcgataagctctatgagctgaagtccaaagctcggcagattatgaaccagtttggcccctcagccctaatcaacctctccaatttctcatccataaaaccggaaccagccagcacccctccacaaggctccatggccaatagtactgcagtggtaaagataccaggcactcctggggcaggaggtcgtcttagccctgaaaacaatcaggtattgaccaagaagaaattacaggacttagtaagagaagtggatcctaatgagcagttggatgaagatgtggaggagatgctgctgcagattgctgatgattttatcgagagtgtggtgacagcagcctgtcagcttgcgcggcatcgcaagtctagcaccctggaggtgaaagatgtccagctgcatttagagcgccagtggaacatgtggatcccaggacttggctctgaagaaatccgaccctacaaaaaagcttgcaccacagaagctcacaaaacagagaatggcattgatccggaaaaaaaccaagaaattaacacacggaaagggtcangggaatggacagcaatgtatttggagatacttgagctgagaactcagccatctcatccttggatttttaaacataaatgctttacaagagaagcatatatttaattaacagtgcagcaatatctataatgactgagaggatctgccaaagagaataagccttctaccccaaattcggtcc

SEQ ID NO: 253875 - DNA, 506 bp, Homo Sapiens
  misc_feature (22)..(22): n is a, c, g, or t
  misc_feature (27)..(27): n is a, c, g, or t
ggtgccaaaaacttgcgaatgnccgcngcaaagctgaacaggcctggctgtcaacccacactcctcgaataaaaatccatccaccaaacctgcagcaagccatctccctcccacatcttccatcccaactgccccattaggatcccacttctcttactaagtcctgtaatttcttcttggtcaatacctgattgttttcagggctaagacgacctcctgcccccaggagtgcctggtatctttaccactgcagtactattggccatggagccttgtggaggggtgctggctggttccggttttatggatgagaaattggagaggttgattagggctgaggggccaaactggttcataatctgccgagctttggacttcactcatagagcttatcgagatcctgtttctttttggagctgtgaggaccaaggccaattaaaggcagcagcgtctatctccccatgatatgcagagactgccccagtgaagcgtactgtgccgaaaat

SEQ ID NO: 253876 - DNA, 1066 bp, Homo Sapiens
  misc_feature (628)..(628): n is a, c, g, or t
  misc_feature (918)..(926): n is a, c, g, or t
  misc_feature (955)..(963): n is a, c, g, or t
ggctgagaggcgactctcagacgaaggaaccgggtagcttggccaggttgtgaagaaccgcagcgcgccgcaagaccgggccgctgagcctgcagccgccccgcgccgtgacctgcgaccctagaccccgactccctttggctcagcccgcgcgccccaggcccggcccgggcggcgcgacgggaggatgagcggcgggcggcggaaggaagagccgcctcagccgcagctggccaacggggccctcaaagtctccgtctggagtaaagtgctgcggagcgacgcggcctgggaggataaagatgaatttttagatgtgatctactggttccgacagatcattgctgtggtcctgggtgtcatttggggagttttgccattacgaaggttcttgggaatagcaggattctgcctgatcaatgcaagagtcctgtacctctacttcagcaattacctacagattgatgaggaagaatatggtggcacgtgggagctcacgaaggaagggtttatgacctcttttgccttgttcatgtgcttgtctcctcactaagtcatttggatcatcttttacactgcccatccattatgactgatggtgtacagctcccaagtgctccctatccantccaaaggaccctcttgattacagcacaggaacttgatcgttgggggaccccagcccccttggaacttggaagacccgtgtttcctggaccgcgaatcagtgtgttggggcatcagtgttttcctgccaagggttgttgacctgaaacctgtttaaaaaccaccccccctttggggaaaacattttcgggaattgatcccatccaccaaccattttcttccttggatacccctccagtaacgacctatttattggcccagctggaagcctgccactttaaatccgatagnnnnnnnnnggatctcccaaaggaaacccttaattggnnnnnnnnngaatttctccctctcggggtggccaaagtctttcaataactccccttagaggccttcccaaggcctttccgcgaacaacacagggccctggctatcgccccga

SEQ ID NO: 253877 - DNA, 1355 bp, Homo Sapiens
  misc_feature (998)..(999): n is a, c, g, or t
  misc_feature (1197)..(1208): n is a, c, g, or t
  misc_feature (1230)..(1240): n is a, c, g, or t
gcggcgggcggcggaaggaggagccgcctcagtccgaccctagaccccgactccctttggctcagcccgcgcgccccaggcccggcccgggcggcgcgacgggaggatgagcggcgggcggcggaaggaggagccgcctcagccgcagctggccaacggggccctcaaagtctccgtctggagtaaggtgctgcggagcgacgcggcctgggaggataaggatgaatttttagatgtgatctactggttccgacagatcattgctgtggtcctgggtgtcatttggggagttttgccattacgagggttcttgggaatagcaggattctgcctgatcaatgcaggagtcctgtacctctacttcagcaattacctacagattgatgaggaagaatatggtggcacgtgggagctcacgaaggaagggtttatgacctcttttgccttgttcatggtcatttggatcatcttttacactgccatccattatgactgatggtgtacagctcccaagtgctccctatccagtccaaaggaccctcttgattacagcacaggaacttgatcgttggggaaccccagccccttggaacttggaagacccgtgtttcctggaccgcgaatcagtgtgttgggcatcagtgttttctgcaagggttgtgacctgaaactttttaaaaaccacccacctttggggaagcatttctgaatttatccatcaccaaccatttcttcttggataccatcaagtaacagctattatttgccaagtggagctgtcatttaatttgatgcacctctggattcagatgaaacattaaattgtcttcctcgattctccatcgggtgtagagtttttaaactatcaatggcatttcaagtcttctgaaacagcatggctgtatgtgcgtggtccatagcacagtacatgcagcatctaataacagtttccattgtagaatgttttcagatacttgaataaatcaaatctttaatannaaacaacaaaacacatacactaaaatccctggtcggccgcctccgggccccctcaaaaaacttttctaaaacccttttccttttgggccgcggggccccccattaggggaaaatggaaaattggggcaatataaccgggtttccccaaagagaagaaaccctcggggtcaatgacacaaaagggcggtttgggaaatnnnnnnnnnnnnaatataaaaaaacaaccccccnnnnnnnnnnncaaaacaccggaacacgtgttttctttaaaaaacaaaataccccccacaagaagggggggagatttttcctggaggggggccccctttttcacacgggcgggggatcccttactc

SEQ ID NO: 253878 - DNA, 526 bp, Homo Sapiens
  misc_feature (34)..(34): n is a, c, g, or t
  misc_feature (47)..(47): n is a, c, g, or t
  misc_feature (70)..(70): n is a, c, g, or t
  misc_feature (85)..(85): n is a, c, g, or t
  misc_feature (113)..(113): n is a, c, g, or t
ggctcccaagggctcccttttccaggccaagggnccctcttggattnccggcaccgggaactttgatcgntgggggaacccccangccccttgggaacttggaagaccccggngtttccccgggacccgcggaatccagtgtgttgggccatccagtggtttcctgacaaggggttgtgaccctgaaactttttaaaaacccaccccacctttggggaagcaatttctgaatttatcccatcacccaaccatttcttcttggataccatcaagtaacagctattatttgccaagtggagctgtcatttaatttgatgcacctctggattcagatgaaacattaaattgtcttcctcgattctccatcgggtgtagagtttttaaactatcaatggcatttcaagtcttctgaaaaagcatggctgtatgtgcgtggtccatagcacagtacatgcagcatctaataacagtttccattgtagaatgttttcagatacttgaataaatcaaatctttaatttttgaa

SEQ ID NO: 253879 - DNA, 516 bp, Homo Sapiens
  misc_feature (467)..(467): n is a, c, g, or t
  misc_feature (476)..(476): n is a, c, g, or t
gaatatgggtggcacgtgggagctcacgaaggaagggtttatgacctcttttgccttgttcatggtcatttggatcatcttttacactgccatccattatgactgatggtgtacagctcccaagtgctccctatccagtccaaaggccctcttgattacagcacaggaacttgatcgttggggaaccccagccccttggaacttggaagacccgtgtttcctggaccgcgaatcagtgtgttgggcatcagtgttttctgcaagggttgtgacctgaaactttttaaaaaccacccacctttggggaaaggcatttctggaatttatccatcaccaaccattttctttcttgggataccattcaagttaacagctatttattttggccaagtgggaagctgttcattttaattttggatggcacctctggggatttcaggatggaaacattaaaattgttctttccntcggatttntcccatcggggtgttgggagttttttttaaaactattcca

SEQ ID NO: 253880 - DNA, 540 bp, Homo Sapiens
agaggggggcccacaaggatgtcgcaaggagcagaaagcgacaccgagcagggccaaaaggcggatccatcagcggaacacaggcggcagcttcctcaactttgaggtacatcaacatcaatatcggatcaatggacccacttaatggagctcttaattgagtagaaaaaaatatttaagaggccgctatacagcaggaaagctaattttcctaaactgaaatatccttcgcttcccttggggaaaaattttcatgaggactaaggtaatgggaaaacctgttgcttagaacttttaacttggccttgaagatggaaactcatccaggatggagaataatgtagggagactagttaaaaatagacatggaccagtttactttcctgcttatttacaagatgccttatttaaatgacactttgatccaacatcttactaaacaagtgacaacaggaaaaaataagaggcagttggtgcacctggagatgtgatattgagcccagtcaggaggcctgaggttctaataaaatttccttagat

SEQ ID NO: 253881 - DNA, 1238 bp, Homo Sapiens
  misc_feature (224)..(224): n is a, c, g, or t
  misc_feature (275)..(275): n is a, c, g, or t
  misc_feature (388)..(388): n is a, c, g, or t
  misc_feature (436)..(436): n is a, c, g, or t
ccagaggcagcccaagggcaggggaagccggtataggacaggggttgccaagacacggggtgtaccgaccagtcaagcttgtggggtgtggtgcaagggctgcttgcaaggctcatccaccaagccacttccctttggtgcaagagtctctgacatttgtgcatcccccagtggagccgtggcatgcaagggtattccgcaagagatatcaaccagttgccagnggatgttgctccgaacttcatgcttgcccatgcaccacttctgagttaganaagtgcaagggggacacttctcctcactatgcaagaatgatatactggatggtcacactcatggactctagcgcaggtttgggtccatcaagggggcctagtaccacaggganctggagggtaaatcactgatgcaccacaatggcaggttaattcatcanaactggcttgccagcatgtctggcagtttccacgatgacaaggttcttcacacctatgaaggccacaacggagtttcctcccacaaatcaaaggacacttgtgctccttatccacacagcatatctcattaacatttatcccgtccacacaaccgtttcttgttacaccgcttggtcacacataaatgtagcatcttcactttttgagactggtacatggaagctcctttgttctgaaagagcatctgcaggaaataactgatgtgcgagagcatggtccacagtctccttcatggcagagcttttcacaggtatgaatgaaatctaaggaaccacaaggcagaggcttgccgcacacttttccacatgaaggcacagggtccatgcatgttttccgactactacttccaagttctagcaattggctgagaggagtttgccacaggggcaacagcgcaccagctgggggagccgtgggcattgctggcagggctgagggtggcacacttgcgaacatgtatggttaccgcatttcaagtccttgccacatatctttaaacagctgaaatccccaatccatcagactttcctacatcggttccacataacacatctcgggaggtgctgccgcatagcatacctggttcaaatgatctggcaggctggcactgacccccatggcacagctcagcacactggtgctgaccacagttcaaatattctcacatgggttagaacgtggactgagacgcctgcgaacgcgtgggtcgacgatatcccgggattccggaccgtaccagcc

SEQ ID NO: 253882 - DNA, 519 bp, Homo Sapiens
  misc_feature (496)..(496): n is a, c, g, or t
  misc_feature (499)..(499): n is a, c, g, or t
ggatcaagggaatgacttgggcggccttgggaaatcgatgagaaattgaacttcagggagggtggtcattgcctagaggtgctcattcatttaacagagcttccttaggttgatgctggaggcagaatcccggctgtcaaggggtgttcagttaaggggagcaacagaggacatgaaaaattgctatgactaaagcagggacaatttgctgccaaacacccatgcccagctgtatggctgggggctcctcgtatgcatggaacccccagaataaatatgctcagccaccctgtgggccgggcaatccagacagcaggcataaggcaccagttaccctgcatgttggcccagacctcaggtgctagggaaggcgggaaccttgggttgagtaatgctcgtctgtgtgttttagtttcatcacctgttatctgtgtttgctgaggagagtggaacagaaggggtggagttttgtataaataaagtttctttgtctccnganatggaagccatcaacaacca

SEQ ID NO: 253883 - DNA, 407 bp, Homo Sapiens
cacaggagggaggaatattatattgctgtgcatcaaataaaatacaacatagaactttaaatctggaaatgaatataaagatgtagtccagtcttgacatctggtctcctgattcccaaactcatctgttctttcttccttctgaagtgtgtgtaaaatctgttgctgaaaaattctgaaaaatctttctgttgcatgatttcatcttcctaaacgtacatttgatttgtttgcaaagtacttcttgtctcttccggacctgggattctgaaacgcagattcctcaggaatactgatccaatattttcagcctcatagaaccctgcaaacattgctcctgggaacatctgtgttgctggttcccgagacagcactagtttcttattcctttgcacagcatagataag

SEQ ID NO: 253884 - DNA, 1516 bp, Homo Sapiens
  misc_feature (1280)..(1315): n is a, c, g, or t
gtgactgcctgcgtgctgctctccaccaaggctgtgtactctgtgctccacgacggcctccgccgctacttctcagagccactgcaggatttctggcatcagaagcttagtgacctgcagtcagtcaatgtggggcttttcgaccagcatttccggctgacgggttccaccccgatgcaggtggtcacgtgcttgacgcgggacagctacctgacgcactgcttccttcagcacctcatggtcgtgctgtcctctctggaacgcacgccctcgccggagcctgttgacaaggacttctactccgagtttgggaacaagaccacagggaagatggagaactacgagctgatccactctagtcgcgtcaagtttacctaccccagtgaggaggagattggggacctgacgttcactgtggcccaaaagatggctgagccagagaaggccccagacctcagcatactgctgtacgtgcaggccttccaggtgggcatgccaccccctgggtgctgcaggggccccctgcgccccaagacactcctgctcaccagctccgagatcttcctcctggatgaggactgtgtccactacccactgcccgagtttgccaaagagccgccgcagagagacaggtaccggctggacgatggccgccgcgtccgggacctggaccgagtgctcatgggctaccagacctacccgcaggccctcaccctcgtcttcgatgacgtgcaaggtcatgacctcatgggcagtgtcaccctggaccactttggggaggtgccaggtggcccggctagagccagccagggccgtgaagtccagtggcaggtgtttgtccccagtgctgagagcagagagaagctcatctcgctgttggctcgccagtgggaggccctgtgtggccgtgagctgcctgtcgagctcaccggctagcccaggccacagccagcctgtcgtgtccagcctgacgcctactggggcagggcagcaggcttttgtgttctctaaaaatgttttatcctccctttggtaccttaatttgactgtcctcgcagagaatgtgaacatgtgtgtgtgttgtgttaattctttctcatgttgggagtgagaatgccgggcccctcaaggctgtccgtgtgctgtcagcctcccacaggtggtacagccgtgcacaccagtgtcctgtctgctgttgtgggaccgttgttaacacgtgacactgtgggtctgactttctcttctacacgtcctttcctgaagtgtcgagtccagtcctnnnnnnnnnnnnnnnnnnnnnnnnnnnnnnnnnnnngcatcttgctgctaatcctgaggctggtagcagaatgcacattggaagctcccaccccatattgttcttcaaagtggaggtctcccctgatccagacaagtgggagagcccgtgggggcaggggacctggagctgccagcaccaagcgtgattcctgctgcctgtattctctattccaataaagcagagtttgacaccgtc

SEQ ID NO: 253885 - DNA, 638 bp, Homo Sapiens
aaaagggacaaaaataagtaagccctgcaagacatcaaatcaactccaacatgctactgtgctgtacaaatattagaattttctatatatgagatgtcattaaaaggattggaaccacttatataaattgacatatatggatttccgtacctaataaaaaaagaatgtatgttctgtttaagtgcacattgtacgtttgcagaaattgaccacattttaggccacaaaacacatctcaacatatagcaaagaactgatatcatataaaccaagtcatcaaccataatgctattaagttataaatcaataatcttttaaaaagcaaaaagaactctataaatttggggatttaaaaacatgctttttttctgggcaagatcttattcaacttctagtttcaagctattagaaaaggaaaaagactgaatacatttatggcaataagtttttgaaaatgcttttaggtaaatcattaattaaacaggaaataaatgataacagacattaaaaaatatctagtactgagttgtaactgaaactatttgtaaaaatgtgtgaggtgcagctatagttacagttaaaggaaaatttattgtcttaaaatcctgcctttgacataaaggagttgaaaatctcgt

SEQ ID NO: 253886 - DNA, 647 bp, Homo Sapiens
  misc_feature (15)..(15): n is a, c, g, or t
  misc_feature (262)..(262): n is a, c, g, or t
ggaaggcctgtagtnaggtccctggtcattggcctggtccaaagggccgttctgactgtaaagaatgtgggactgcccagcttgcacctgtttcctgctgaagagtaacttgtagcttaagaaaggttcctgggacagaagcaccagctgggaaggtgtaacctgagccatagaaatgccacaagcggggggataccatatgtgggggcggaaaccctggcctactgagaagagaaggaaaggctcaagggtgatgaatggngatgaactgggagttacttgcttgagttgaggtttgagttacaacctctcttgaagaagaacttcttccttggtctctgttcacttctcgtgtcttaatgttttctttgaaggtaaccactggcttctctcctgtgtcacagttgatgcgtaaatttcggcttgtagatagcactgattttagccctgggctcccatctgcagccagcgactcgatcacagatgtttcttgcagaatgaggttctcattggcatcactggggtcttccagtattaattctgggatttctgtgataaacaacaatttacctacctcattttcacactgaatcagccttggctgattatcagcaatccatttgcctatagagatcaagcgttgctgt

SEQ ID NO: 253887 - DNA, 1696 bp, Homo Sapiens
caggccttgagacccagaagggagcgaaggtttttgctgcgccaacgcagtgaccgaaggctccgctcacgcccggcctgatcctgcctgaagatggtgccactggtggctgtggtatcagggccccgtgcccagctctttgcctgcctgctcaggctgggcactcagcaggtcggcccccttcagctgcacaccggggccagccatgcggccaggaaccattatgaggtgctggtgctgggtgggggcagtggcggaatcaccatggctgcccgcatgaagaggaaagtgggtgcagagaatgtggccattgttgagcccagtgagagacatttctaccagccaatctggacactggtgggtgctggtgccaaacaattgtcctcatctggtcgtcccacggcaagtgtgattccatctggtgtagaatggatcaaagctagagtgactgagttgaacccagacaagaactgcattcacacagatgacgacgagaagatctcctaccgatatcttattattgctctcggaatccagctggactatgagaagattaaaggcctacctgaaggtttcgctcatcccaaaatagggtcgaattattcagttaagactgtagagaagacatggaaagctctgcaggacttcaaagagggcaatgccatcttcaccttcccaaatactccagtgaagtgtgctggagcccctcagaagatcatgtacttatcagaagcctacttcaggaagacagggaagcgatccaaggccaatatcattttcaacacttctcttggagccattttcggggttaagaagtatgcagatgccctgcaggagatcatccaggagcggaacctcactgttaactacaagaaaaacctcattgaagtccgagccgataaacaagaggctgtatttgagaacctggacaaaccaggagagacccaagtgatttcatatgaaatgcttcatgtcacacctccaatgagcccaccagatgtcctcaagaccagtcctgtggctgatgctgctggttgggtggatgtggataaagaaactctgcaacacaggaggtacccaaatgtgtttgggattggggactgcaccaaccttcctacgtcaaagaccgctgctgcagtagctgcccagtcaggaatacttgataggacaatttctgtaattatgaagaatcaaacaccaacaaagaagtatgatggctacacatcatgtccactggtgaccggctacaaccgtgtgattcttgctgagtttgactacaaagcagagccgctagaaaccttcccctttgatcaaagcaaagagcgcctttccatgtatctcatgaaagctgacctgatgcctttcctgtattggaatatgatgctaaggggttactggggaggaccagcgtttctgcgcaagttgtttcatctaggtatgagttaaggatggctcagcacttgctcatcttggatggcttctgggccaaaactgcagtcactgaatgaccaagagcagcacgaaggacttggaacctatccttgtaaagagttccttgatgggtaatggtgaccaaatgcctcccttttcagtacctttgaacagcaaccatgtgggctactcatgatgggcttgattctttgggaataataaaatgaaataatacttttattttctgaataaaagtttgtcactg

SEQ ID NO: 253888 - DNA, 453 bp, Homo Sapiens
tgatttcatatgaaatgcttcatgtcacacctccaatgagcccaccagatgtcctcaagaccagtcctgtggctgatgctgctggttgggtggatgtggataaagaaactctgcaacacaggaggtacccaaatgtgtttgggattggggactgcaccaaccttcctacgtcaaagaccgctgctgcagtagctgcccagtcaggaatacttgataggacaatttctgtaattatgaaggaatcaaacaccaacaaaggaagtatgatgggctacacattcatgtccacgggtggaccggctacaaccgtgttgattctttgctggagttttgactaccaaaggcagagcccgctaaggaaacctttcccctttggattcaaaggcaaaggaggcgccctttccatgttattcttctggaaaggttgacctgatggccttgtcctgtattggg

SEQ ID NO: 253889 - DNA, 368 bp, Homo Sapiens
  misc_feature (33)..(33): n is a, c, g, or t
cctccatgaaaaagctgaccctgaatgcccttnccctgtaattgggaaatatgatgcctaaaggggttaactgggggagggacccagcgtttcctgcgcaagttgtttcatcctaggtatgagttaaggatggctcagcacttgctcatcttggatggcttctgggccaaaactgcagtcactgaatgaccaagagcagcacgaaggacttggaacctatccttgtaaagagttccttgatgggtaatggtgaccaaatgcctcccttttcagtacctttgaacagcaaccatgtgggctactcatgatgggcttgattctttgggaataataaaatgaaataatacttttattttctgaataaaagt

SEQ ID NO: 253890 - DNA, 1370 bp, Homo Sapiens
  misc_feature (751)..(786): n is a, c, g, or t
aaaatatctttgttttgctttcattcacaaagtaatgaagccagctgccaattacatcctcccaacagcactttggtctgtggactgctgtgtgaatattcagaagggaagtaagtattcagggggtaaacaggtctcccagcattctgagtgttccaaaccagtaatccacatgccaattcaaatagaacagccccttgctagatattaccacagataatgacagttacatggtagaactgcccatgccacaaatatttatttggaaaagtagtcattaaatgaacccactgccttaaatgtcttgaatgttgcagtcaagtgtctgtcatgtgttgatatccacacagaattaggccctaatgagagccttagaccctcaaccatgcccccttcgttggcatcacagggccttatttggaagagcgggcaaagaggatggaaatcataaaatatttcatgggaatcgaacctagggatagtgctccacttctgacgatggagtgaagacacttggcagacttgagccagacacttcacctagtagttcctgaaactgtgagcaccactgcactaagccagtgcggagctgttagggacgggcccagctcctgcaccacggacacagaatgtctgggagagggccagcaggccctctgagggttctggaatctgtgcaccttatttgaccacactccaaaattctgtttttattttaacccttgaatctgctttatgtacataatcaaannnnnnnnnnnnnnnnnnnnnnnnnnnnnnnnnnnnttttaatcatctacatgtaaatgaagcaatagaattctaacataaggccaagaaatgagacgaatgtctggggtttatgttttttaaggtaaataccggtaattggttttaattattaccatgtattaaattgtgggctttgaaacctaatgcctgttagccacttctctgtgccatatacttcccatgttacctacccccaactctttagccatgtagtcttctggagaagtatttttgacattgagctctgggacaggacaccttgggtttgtggactgcagcccactatgatgttattacttctctggccaggcctccagtggaagtgcacaggcactcccaatgttgttaatgctctgtcttccatttgttctggaatcctacgtgttggtctgtggttccatgcattagctgtttgtaaataatgcatttgcatactgaaaaaggaatgccacctgccacagttgatggtgaggaagctcctttgacgtggtgcaattttgatgagatgtctctggggacacgaggatgccctaatgatgctgacttgtcatggttgcagcatttgaacttttggtgtt

SEQ ID NO: 253891 - DNA, 1138 bp, Homo Sapiens
ctacaaactcggacagggtcagaaacagagtgtcccatcccattgcagcctccaccacctgtaaccccttcctgtcattggccactgaagggtacaaaggcaaaagggccacagcaccacttaggtgtagcatggattttaaactgcagtcagtatcagatcctgtttgataaataagctgactgttctctcttgagaacctgtggcctcaaccagccaccaagctgatgtggcccaagtccatctcttggtcttctcctttgaagcacagcctatttctgagccaagggttggggaagcctgtctagatgtgggactcattgccccaaaccagggagaggaagagctccacagggagagcccaggctctctttgcagcctttcccagtttggtgtttaagcagtgccatgttccttgtttgacaacaagacagtctgtaaagtattgctcttaaaaacaattaaaaagaaccctttcatattggcaccattgccttagtcctctgtgggttggtcttcagccagcattctggtgggagtgactggcattaacaagactggaaatcgggggtcaaagtaaaatatctttggtttgctttcattcacaaagtaatgaagccagctgccaattacatcctcccaacagcacctttggtctgtggactgctgtgtgaatattcacaagggaagtaagtattcagggggtaaacaggtctcccaccattctgagtgttccaaaccagtaatccacatgccaattcaaatagaacagccccttgctagatatttaccacagataaatgacagttacatggtagaactgcccatgccacaaatatttatttggaagagtagtcattaaatgaaccccctgccttaaatgtcttgaatgttgcagtcaagtgtctgtcatgggttgatatcccacaccgaattaggccctaatgaaaggcttaaacccttcacccatgcccccttcgttggcatcccaaggccttaatttggaaagagcgggcaaagaggcagggaatccctaaaatattttcagggggaatccgaacccaggggaaaacgcctcccctttctgaccaagggagtgggaaaacactcgggacagacttgaagcccaaacacctcc

SEQ ID NO: 253892 - DNA, 342 bp, Homo Sapiens
caaaactaaaagctgctcttggaaaggcaccactaggagagtgaaaatgtaatctagaatatgtgagacactcttaacagcttaatgataagacataacccaaattaaatgggcaaaatagaaaaaaacatttcatgaaagaggatataggaatggcaataagcacgtgaaaagatgctcaacatcatcagtcatcaaaggaatgcaaattaaaaccataataagatgcctctaaacaccaactagaatgaatacaattttgaaacagactttaccatgtcttgatgactatatgatgcatttggaaatctctttttattggtgggtggggttggaagaggg

SEQ ID NO: 253893 - DNA, 1336 bp, Homo Sapiens
  misc_feature (219)..(260): n is a, c, g, or t
gtttcggcggcttcagtgctcggggaggaggcagtgacggccggtgagattggaagtggcggcggcggcaggcggcagaggggagtccgaggttatgcgtctcaatgatcccgcggaaacgctacgggtctaagaacacggatcagggtgtctacctgggtctctcaaagacacaggtcctgtcccctgcaactgctggcagtagcagcagcgacatcnnnnnnnnnnnnnnnnnnnnnnnnnnnnnnnnnnnnnnnnnngacaccatgtcctgccgggatcggacccaggagtttctgtctgcctgcaagtcgctgcagacccgtcagaatggaatccagacaaataagccagctttgcgtgctgtccgacaacgcagtgaattcaccctcatggccaagcgcattgggaaagaccttagcaacacatttgccaagctggagaagctgacaatcttggcaaagcgcaagtccctctttgatgataaagcagtggaaattgaagagctaacatatatcatcaaacaggacatcaatagcctcaacaaacaaattgctcagctccaggatttcgtgagggccaagggcagccagagtggccggcacctgcagacccactccaacaccattgtggtctccttgcagtcgaaactggcttctatgtccaatgacttcaaatcggttttagaagtgaggacagagaacctgaagcagcagaggagccggagagagcagttctcccgggcacctgtgtcagccctgccccttgcccctaaccacctgggcggtggtgctgtggttctgggggcagagtcccatgcctccaaagatgtcgccatcgacatgatggactctcggaccagccagcagctgcagctcattgacgagcaggattcctacatccagagtcgggcagacaccatgcagaacattgagtcgacaattgttgagattgggctccatctttcagcagttggcacacatgggttaaggaacaggaggaaaccattcagaggatcgacgagaacgtgctaggagcccagctggacgttgaggccgcccattcagagatcctcaagtacttccagtctgtcacctccaaccggtggctcatggtctgaaccctctctactctgaggcactctgttggggtttgggaccctcctgggaaggcaagtggccagtgctgccactgagcctgtgcagggtacttgggagaaaggccctgttaccctggaactgctaagtgaccactgcccctgatccctcaccccttgcctctggccaccctgtactgccgacatcaccctcaggcctatgcacacagggttctagtt

SEQ ID NO: 253894 - DNA, 1383 bp, Homo Sapiens
  misc_feature (176)..(176): n is a, c, g, or t
aaatcagagcgtccagaggaaattcttcctaaaactaggattcctgttcctttgtcttctcactcgcactctggcactgctccctctgaagtgcagtgggatctcgtgtgctttgtcttgattctgtgctgcgctgccgctgggcgactgcagaccacctgtcttctactgaaggnacagtccggctgtctcccagtggggggcagcagctgtccccccagccctcgatggagacacctgggggcagtcctgcccttgtctgtggagctgcctctctctcccctcatccccacccccaaataccttaaaatgacactacacccagacggcgcccagctggctgcagcacttgtagcatgcacatgactctggtagtaaccaacaaaaacttgttttatggattcctcgtttactgaggaaagggaacatgctggttctggaaaagccacaatattgaatctaaaaggaaaccgtttattgtttgatgaaagtttcactggttaaataaaaaactaaattaataactggagcctctaaatttattatccattatccagtgatggaaagttgtatttctcaatcatgcttagggccaaaataggtatataaaatgtgtcacagaaaaacacgcatttgcaacgttaacctaacgaaatttccatgaagaaccaagtcagggcagcatctccttagtcccagctcaggctctctgccttccagaggccgcttctccagtgactaacctcctcctctggctcctacttgcagacagttatcccttgtttagaacacgaatttccatttacctggtgggaacacgaaacaggagtctcttctgttctgcaagtttgatgggtaagaggtagccttttttcaaagtaggatttcctttttcaactgttccaggaaagaatctctaagactgggtagctcacagccagcccaaggcagctaccatttccacagaagcccgtccgctgcctccgtggcttctccagccattgaactggtcccacacgcaccccaggccccactcctcggcagtttcaggtgtagctgtggggccccgttcctaggtctgtactcactttagggaggcttcactgactaggctttcctcctgcatgttgaatttccttcagctttaagaggaagagtggaataaatattctaagtgatttaatgcactttgacttgtataaaactttctgtgttagcgacggtatctatagccctttatacgagcgatggatcttgagctctccttccatgttgtaaatagggattgtattcttgaaaactgctgtagcaaattcatctgtggtgcaatacactttttgattaaagctcttcaatccagatgcaactacaatggattttact

SEQ ID NO: 253895 - DNA, 926 bp, Homo Sapiens
ggggcccccttcccggccagacggcgggcaagacagctgggtgtacagcgtcctcgaaaccacgagcaagtgagcagatcctccgaggcaccagggactccagcccatgccatggcggattctgagcgcctctcggctcctggctgctgggccgcctgcaccaacttctcgcgcactcgaaagggaatcctcctgtttgctgagattatattatgcctggtgatcctgatctgcttcagtgcctccacaccaggctactcctccctgtcggtgattgagatgatccttgctgctattttctttgttgtctacatgtgtgacctgcacaccaagataccattcatcaactggccctggagtgatttcttccgaaccctcatagcggcaatcctctacctgatcacctccattgttgtccttgttgagagaggaaaccactccaaaatcgtcgcaggggtactgggcctaatcgctacgtgcctctttggctatgatgcctatgtcaccttccccgttcggcagccaagacatacagcagcccccactgaccccgcagatggcccggtgtaggcgaacttccctcatttctctctgcaatctgcaaataactcctccattgaaataactcctccccaccccaacaacaacattcccagcagaccaactcccaccccctctttgaggtaaaagtgcctttattgggagacttttgtcttccagcctgccaatcaacccctcctgggtgtggccaccatatgtgtgtgcctaggtcctccttctgcacgatccaataaggagacaccagtttctgactgaaccatgcccccacctaagtcacaaaatgagggaaagtgggggagtttagatttcagaagtccaggccccctaggttggggacccacctccaaataaatctccctcggtga

SEQ ID NO: 253896 - DNA, 1414 bp, Homo Sapiens
  misc_feature (493)..(608): n is a, c, g, or t
  misc_feature (619)..(635): n is a, c, g, or t
  misc_feature (842)..(875): n is a, c, g, or t
  misc_feature (889)..(897): n is a, c, g, or t
  misc_feature (935)..(949): n is a, c, g, or t
  misc_feature (1169)..(1191): n is a, c, g, or t
cctatgcccccttccccgttcggcagccaagacatacagcagccccccactgaccccgcagaaggcccggtgtaggcgaacttcccctcatttctctctgcaatctgcaaataactcctcccattgaaataactcctccccaccccaacaacaacattcccagcagaccaactcccaccccctctttgaggtaaaagtgcctttattgggagacttttgtcttccagcctgccaatcaaccctccctgggtgtggccaccatatgtgtgtgcctaggtcctccttctgcacgatccaataggagacaccagttctgactgaaccatgcccccacctaagtcacaaaatgagggaagtggggagttagatttcagagtccaggccctaggttgggacccactccaaataatctcctcggtgtgggtggtggttctatagagggataaatgaataataaacattgttaaaatatccccaaccaacaaaatccacnnnnnnnnnnnnnnnnnnnnnnnnnnnnnnnnnnnnnnnnnnnnnnnnnnnnnnnnnnnnnnnnnnnnnnnnnnnnnnnnnnnnnnnnnnnnnnnnnnnnnnnnnnnnnnnnnnnntttcttggggnnnnnnnnnnnnnnnnnaaaaaattttttctaaacccttttctttggggcgccggggcccccctcgtcgggcaggggaacattggcgcctaacggtgtttctcaaaaaggaaaaacccggggccataagaacacgggggtgtgggatctttccccaccacaataaaaaacaaccgccccgggggctaaaccccgacgctgtttctgaaaaaaacttctgcaaannnnnnnnnnnnnnnnnnnnnnnnnnnnnnnnnnttctctagcgaaannnnnnnnnccccgcgcggcgaggttcttcaattataaatttttttnnnnnnnnnnnnnnngctggccaacatacatatcgagaaggaaacgttgggtcgcgatatattccctgttacaaggtcctttttctgccgccggagagcgtggaaaaaccccctctccccacaaacggcgtttttttggtgtgcacccccttataatttcccccaacgggggcgtacctccccacaccttgtggggcgccgctcttggaggaataaaaatatatgtcccccccannnnnnnnnnnnnnnnnnnnnnntagaaaaaaagtggttgtccctcattgtggggccccagggctttataaacacacaaacatcggtgggagaacaaccctcctcacccagggtggttgttgtggtgttgggcaaaacagaaacgaaaccttttcttctcgctcatatacacccccctcttgataggagagaaatcgaggtggccgcggtctttttttcttccccgaaaagaccgaccgcctccgc

SEQ ID NO: 253897 - DNA, 816 bp, Homo Sapiens
  misc_feature (277)..(385): n is a, c, g, or t
  misc_feature (754)..(754): n is a, c, g, or t
  misc_feature (787)..(787): n is a, c, g, or t
gctgagcgcgcctggtgtgggtctgcagcggaggcctcagcaacctgctcttccgctgctcgctcccggaccacctgcccagcgttggcgaggagccccgggaggtgcttctgcggctgtacggagccatcttgcaggtgagggggttgtgagcgccgcagcaccagtggctttagggcctgtcgcttacgcgatgcgggtagtattggtcccgttgcgcagttgaggacaccgaggttcacggtctgagtaacacctcattacaccgaagcctggnnnnnnnnnnnnnnnnnnnnnnnnnnnnnnnnnnnnnnnnnnnnnnnnnnnnnnnnnnnnnnnnnnnnnnnnnnnnnnnnnnnnnnnnnnnnnnnnnnnnnnnnnnnnngaccaacgctaaagcctgtgctccagagcctccaggcaattggatcagaagtcgcagctctggtgggaggaaggcgagccctcatgtgtgtccctgtgccactttgccttggcccctttgctgtccatcctttttcagggcgtggactccctggtgctagaaagcgtgatgttcgccatacttgcggagcggtcgctggggccccagctgtacggagtcttcccagagggccggctggaacagtacatcccaagtcggccattgaaaactcaagagcttcgagagccagtgttgtcagcagccattgccacgaagatggcgcaatttcatggcatggagatgcctttcaccaaggagccccactggctngttgggaccatggaagcgtacctgatgtacagncttgaggatgagatgggcacctcaggaag

SEQ ID NO: 253898 - DNA, 364 bp, Homo Sapiens
ggggactcggccgccatgttaggagtactgggacgattccgcggagccgcgcagaggttttaggggtgcgcacgagtcaagtggtggttcagtggggacggaatgattaacaaaggcgtccgaagaaatcgttgttggaaggtgaccaaggtggaaagagacgttgctttggccctgcaagtaagaagagagagggaatagcctgaaggagtaacactaaatttaaaatgacacttttttaccaaccagcgaaagcagatgttcaaaggggatattggccagagtctgtcacactaagatgagaaatgtcctttcttcctgaaggtgtctgatgtgtaaaaatatgatatactttgtgctgttt

SEQ ID NO: 253899 - DNA, 357 bp, Homo Sapiens
cccgggctgaggaattcggcacgagtgaaggtctgcgtcacggtgttcgggatgtttacagagcatcacaaatgcctctctctcgccgctctctcattttctttgtataactatgcagccttccctctctttctgggatgtttgggacttcactcgacctgcacgggctctgcccgacatgccgtgggagctgctgggattcctttagccgctgcccgcatgctttgcgtgcagggcgggctccaagcgctttgcttccggaactccggcttcccaaggggtactgtgcagactgaccaccggcctcccgcctgcaggtcagaggctctgacactgtctggtttcctgcttctggag

SEQ ID NO: 253900 - DNA, 865 bp, Homo Sapiens
gggaggttgggctggaggcctgtccactggcttctggagctgaaggtctgcgtcacggtgaaaattcgggatgtttacagagcatcacaaatgcctctctctcgccgctctctcattttctttgtataactatgcagccttccctctctttctgggatgtttgggacttcactcgacctgcacgggctctgcccgacatgccgtgggagctgctgggattcctttagaaaccgctgcccgcatgctttgaaaacagacctttctcagctggctgtggggacctgtcagagtctggggactcggcgtgcagggcgggctccaagcgctttgcttccggaactccggcttcccaaggggcactgtgcagactgaccaccagccgcccacctgcaggtcagaggctctgacactgtctggtttccaatgcttctggagacttcctgcctaggcctcatcctcctctttgccagtcacctgattaaccaattctccagcattaggacttacctccttctttttgtaaggtctcttgtatgttgttaaatgtttggcttaaacaatttataaaagcctttctagaaggcagacttagccccagcagagcctgggaggaaggcggccgctggggctcctgggcatcctctctggggagctgctggccgcttagcgttgtttgatttttgaccttgacatagtagataggcttgtggtttttttaatttaaagatattaagacttaattcactaaaatttattctaaggggatatttatacttttatacttttttaggtatcgtattttatcagcttacagtttaatgcctaagtttcccctgaaaatagcaaacaaaactgtgtatttatg

SEQ ID NO: 253901 - DNA, 353 bp, Homo Sapiens
agtctctcctgattataactggtttagaggtacagttccccttagattattgtggatgatgatgacagtaagatatggtcgctctatgacgcgggcccccgaagtatcaggtgtcctctcatattcctgccccctgtcagtggaactgcagatgtctttttccggcagattttggctctgactggatggggttaccgggttatcgctttgcagtatccagtttattgggaccatctcgagttctgtgatggattcaggggaggctttttggcccagaaatttgctgaatacactcactctcctagagtccattccctaatcctctgcttccttcagtgacacctcttcttccc

SEQ ID NO: 253902 - DNA, 1781 bp, Homo Sapiens
  misc_feature (1517)..(1558): n is a, c, g, or t
gggggcggtcgggcggggggagcgcggcggcccaagctcgcttggccacgcgccccgccccctcagaggccggcctcccgcacgcaccgcgcagcctgctgtgcccgtgggtcccgagtgctccgccgcccgccccgacccgggcccagccgcctccacggcccgcgctcgtactggagcgaagagcggcctcctgaaggaggggaagggacgtgggggcggccacggcaggattaacctccatttcagctaatcatgggagagattaaagtctctcctgattataactggtttagaggtacagttccccttaaaaagattattgtggatgatgatgacagtaagatatggtcgctctatgacgcgggcccccgaagtatcaggtgtcctctcatattcctgccccctgtcagtggaactgcagatgtctttttccggcagattttggctctgactggatggggttaccgggttatcgctttgcagtatccagtttattgggaccatctcgagttctgtgatggattcagaaaacttttagaccatttacaattggataaagttcatctttttggcgcttctttgggaggctttttggcccagaaatttgctgaatacactcacaaatctcctagagtccattccctaatcctctgcaattccttcagtgacacctctatcttcaaccaaacttggactgcaaacagcttttggctgatgcctgcatttatgctcaaaaaaatagttcttggaaatttttcatctggcccggtggaccctatgatggctgatgccattgatttcatggtagacaggctagaaagtttgggtcagagtgaactggcttcaagacttaccttgaattgtcaaaattcttatgtggaacctcataaaattcgggacatacctgtaactattatgggatgtgtttgatcagagtgcgctttcaactgaagctaaagaagaaatgtacaagctgtatcctaatgcccgaagagctcatctgaaaacaggaggcaatttcccatacctgtgcagaagtgcagagggtcaatctttatgtacagatacatttgctgcaattccatggaaccaaatacgcggccattgacccatcaatggtcagtgccgaggagcttgaggtgcagaaaggcagccttggcatcagccaggaggagcagtagtgtgtctctcgctgtcaatgatgagttgacccggtgtgttcttgtatagtcagtggcatcagcacccgtcagccggccttttccttcaggttcgtcaggctcaccggttctcactgtgtctgggaagtaggactgatggtcatcttcatgacaggcggcatctccactaagcctgtgtaactgttccctctttggttttcttagcttttgaatttgaagaagtacttttgaagactcccattttaagaaccgtgcaaattttgctaccaaaagtcttcaccactgtgttcttaagtgaatgttaatttctgaggtttgggactttgtggtggnnnnnnnnnnnnnnnnnnnnnnnnnnnnnnnnnnnnnnnnnnatgttgtttgctgtaaatgctgcacatccagattgcatatcaggacattggttattttatgctttcttggatataaccatgatcagagtgccatggccactaccccactgtttgctctcctgcaaatcaactgcttttaatttacacttaaacaaattgttttgagtgttagctactgcctttctagatattagtcatttggaataaaaattcaatttcactg

SEQ ID NO: 253903 - DNA, 455 bp, Homo Sapiens
  misc_feature (15)..(15): n is a, c, g, or t
  misc_feature (33)..(33): n is a, c, g, or t
  misc_feature (78)..(78): n is a, c, g, or t
  misc_feature (92)..(92): n is a, c, g, or t
ccccaaaaaagggtnaacggggtttgtcccccngaaatttttaatggaggggtcccccaaccattaaggaatttttgnacaaattccaaggntaaagtccttgaaaagccaagttcaactcctggaccccaaaactttcctaagccctgtcctacccatgaaaatccaaatgccatccagcccatcaatagggtcccaccgggcccagatgaaaaatttcccaagaactatttttttgaagcataaatgcaggcatcagccaaaagctgtttgcagtcccaagtttggttgaagatagaggtgtcactgaaggaattgcagaggattagggaatggactctaggagatttgtgagtgtattcagcaaatttctgggccaaaaagcctcccaaagaagcgccaaaaagatgaactttatccaattgtaaatggtctaaaagttttctgaatccatc

SEQ ID NO: 253904 - DNA, 609 bp, Homo Sapiens
cagccactaaatgccaaaagaacactactctatactgtagcaaatgaaagaagaaaggtgttaggaaaaacaggcctttacagattccaaaccaaagacgttggggcagtgaattagcttgaaaacagctctggtcaaatgcatggattctcccaccaagaactctcttctgaaactccatatggtggatagttcttgcctttcagtattcagctcaagtgtcaccctcttggaaaagattactttcctgaccacctgattaccctcttggaaaagattactttcctgaccatggaaagcagtcctcaagccctctttatcacatcttgctgttttattttcaaaatagtatttatcagtattccaaaatacctcacctattttcttaattaattattttgtctcctctattcgagtataagctccataggggtaaggaccatgtccgtcttgttccccactgaattctcagtacctggtatgcagtgggcacttgataaatatttgttaaatgattaaaactgaaagataggatagtgattttgctatcaattatcaagcctttaactattagttagaattctccctctttccataatctgagggtcc

SEQ ID NO: 253905 - DNA, 605 bp, Homo Sapiens
  misc_feature (43)..(43): n is a, c, g, or t
  misc_feature (571)..(571): n is a, c, g, or t
  misc_feature (579)..(579): n is a, c, g, or t
gcgatcatgttgatttatctacggctcggtgagacgacgctgnacgctggttagggtaagggttagggcaagcattagcagcaggggcatggccctgggaagcacctggaccccagaacataagacaggagggagagatgccatccattcagcgggcacttatgcccacgaccagctgagccagaccagcattcccatttcaccaccccttactcctcaagatgcaaatgaagctcagggctgggcggaagctggcagggctgtccacagggaggacccccgtgtgtctctcgggctgcccaggtggctctgtccacccttctgtctgggaggctccttaaggctggggagggcccagagggaaggagatcctgaggggctggcagattcaggccctccctgcgagctgaggtttgaagaggagagcagaccacccagagtagtgggagaaagcaccggcagaaaagctggcatatccaccgagggcctctctgcttcttttgacctttttcagagtttcagagttatgaaccaaatcgccttcatgagagatgacgaatcagatgctacnatagtggnggaggcggcagctggcctggctcccc

SEQ ID NO: 253906 - DNA, 391 bp, Homo Sapiens
gagaagtagagcaatgcaggtgacattaatccttgcagatgggctatctgaagaggaacggggacgggagcctgctctacagcgtggtcaacacggccgagccggacgctgatgaggaggagacccacccggtggacttgagctcgctctccagtaagctactcccaggcttcaccacgctgggcttcaaagacgagagaagaaacaaagtcacctttctctccagtgccactactgcgctttcgatgcagaataattcagtatttggcgacttgaagtcggacgagatggagctgctctactcagcctacggagatgagacaggcgtgcagtgtgcgctgagcctgcaggagtttgtgaaggatgctgggagctacagcggtggtggacg

SEQ ID NO: 253907 - DNA, 1295 bp, Homo Sapiens
  misc_feature (1071)..(1100): n is a, c, g, or t
ggcctgggtggcgaattcggcacgagggttgtaccagtacaagtagaaactgccaagaaatccaaaaagccgagtagagaagttatcagctgcatgtttgagcctgaagggaatgcctgcagcttgacggacagtaccgcagaggagcacgtgctggcgctggtggagcacgcagctgacgaagctcgggacaggatcaaccggttcctcccaggcggcaagatgggctatctgaagaggaacggggacgggagcctgctctacagcgtggtcaacacggccgagccggacgctgatgaggaggagacccacccggtggacttgagctcgctctccagtaagctactcccaggcttcaccacgctgggcttcaaagacgagagaagaaacaaagtcacctttctctccagtgccactactgcgctttcgatgcagaataattcagtatttggcgacttgaagtcggacgagatggagctgctctactcagcctacggagatgagacaggcgtgcagtgtgcgctgagcctgcaggagtttgtgaaggatgctgggagctacagcaagaaagtggtggacgacctcctggaccagatcacaggcggagaccactctaggacgctcttccagctgaagcagagaagaaatgttcccatgaagcctccagatgaagccaaggttggggacaccctaggagacagcagcagctctgttctggagttcatgtcgatgaagtcctatcccgacgtttctgtggatatctccatgctcagctctctggggaaggtgaagaaggagctggaccctgacgacagccatttgaacttggatgagacgacgaagctcctgcaggacctgcacgaagcacaggcggagcgcggcggctctcggccgtcgtccaacctcagctccctgtccaacgcctccgagagggaccagcaccacctgggaagcccttctcgcctgagtgtcggggagcagccagacgtcacccacgacccctatgagtttcttcagtctccagagcctgcggcctctgccaagacctaactctagaccaccttcagctcnnnnnnnnnnnnnnnnnnnnnnnnnnnnnngcacgtgtagaagtttttggcatcagacaaggactttgaatcctgtcccctttgggcatccgggaaagcaaccgccggggagggaaatgaatggcctggggggattcatggcaaccagaatcttccaagccccccccaaaccctgaagggagtggaagtcattacccgcaaaggcccatattgggccattccggt

SEQ ID NO: 253908 - DNA, 355 bp, Homo Sapiens
gtcagcttgtgggaaagtgacatcagcgtccacccgctaaccctgccctctgcaacctgcttggagctgctgttgatattgtcaaagagtaatgccaatctgccttcatcccttcgccgtgtgaattcctttcaggtggcctttttgaagatgtaactattagagctgggcattctcctcccccggcagacagctctcaagcaggagcacaccgaggccagcagtcagctcaggaggcatcaattacgacaagaaccagagctatgggataagagcattgcattgaagttttaagtttacttgtttgcatgtattctctaagagaagagttctttagatctttgttacatctctt

SEQ ID NO: 253909 - DNA, 649 bp, Homo Sapiens
  misc_feature (216)..(216): n is a, c, g, or t
aatatcattcaccattcatcatttcataatatgagcccatgtgttctatgagaacacttctccccctgtggtagctctagcacacagcatggtatctggcacattataggtgaccacaacaagctgagtcccttatgttcccagtatattttagagttaaacgcagttcacatgtgttttcgtttctgacacctggaatactgcatttttactcanaattcacagagcagcaaccacaaattggcctcaaatatacatataatttatctcatttatcaaacaattccttgtgtctgcatagtactatatccttttgaaagagcactttttaacgctggctcctttcttgtgtatccacaacgcttatcacagtagaatacaagtgctttacagtttacaaagcacattcactattttttttcaggtcacctagatatcaataatcattgcatttttagtgcctagcacagggacaggcacagaaaaggaaactagtagtattcagaaattttctctgaataacaaataatacatcagggggtggtaagctatgaacagcaggccaaatccaattggctcaaaaactaagaatgattttgaccttataaaaacgttgtttaaaaaacaaatatgtaacagaaaccatatg

SEQ ID NO: 253910 - DNA, 741 bp, Homo Sapiens
  misc_feature (96)..(96): n is a, c, g, or t
  misc_feature (181)..(181): n is a, c, g, or t
  misc_feature (191)..(191): n is a, c, g, or t
  misc_feature (202)..(202): n is a, c, g, or t
  misc_feature (214)..(214): n is a, c, g, or t
ccagtgctatcagtcagatatcatctgacagcagtcatctcctatgtgtgaagatagtcagctcagtctaggttgcaaggatgctgtgagtccatnctgacactagtacatgctcagtgttgcagtgcataggtccttggatataattcactagaagatctgcttgaagcatccatctctngagttctccnagcagtcctcngcctgcacctcncgagcagccttcgatgactcctgtcttctgtggtcacagttcaaaaagcccaagcgcaatgtgtccatcgtcttgcaagtaaaaatgcttctgaagctatagctacagagaataaataggggcaaaggtgggtaggaggggcaaggaagcagaagaaagagatacaataccaaccaaagggtggattggagagaaaaatggagtgaagatatgggttggaaaggcagctgggaagttcaaggagaacaggtagatgactgagaagtagtttatgtaaaaagatatcttctcactaagtccgcaagggctgcaggagactatcagacctcagaagggctgtgtgctgtccaccctggaagtcccagaccctgacactgacttacttgctggtgactatggtgtgcagcctcctcctcaatactgtcagtgaactcagtgcttgtatcttcggtgtcatcccctgcagctgcacctggaaacaagtccagaaaagaaaagtgattcccttcacagatggcttctcgtgc

SEQ ID NO: 253911 - DNA, 1225 bp, Homo Sapiens
  misc_feature (840)..(840): n is a, c, g, or t
  misc_feature (1137)..(1137): n is a, c, g, or t
  misc_feature (1148)..(1148): n is a, c, g, or t
  misc_feature (1169)..(1169): n is a, c, g, or t
ggtgggcgtggggaatggacccatagacccgggacgagcggcgcggagcccgcagctggccagcttcagccaccttgggagacgcagtgcagctgccgctgctgacagacaagaccaaggctcggctgggccccaccccagatccggcctgagcgcctttcgcgctgctcgggctcaaggcgaaacttttcgcgcagaaactcctggagaacagccccggccgccaggtactcgtccgcccggaccgcagagaccacagagcttcaattcgcaggaaggggagtggggagccctgagctggggtgttcctggaagaggtcggggagcgcggggagaggcattccacgctggaggcctggaaacgtttggaagctctgctaaccttggagaccatgtcaggaaagaagcgtacccaggccgtctgctgtgtgcccaccccgatccccatcagtgccccacgcactcgagctcttcttcggcgtctgcagactcttcttccgcgcggagaggcggaggtctcccggcagtgtccgactgtggcaccccagagcgtgcaatgcgagctcatgcctttcccgcaagtctggagttttcttatacagttgagggcggcttcgctgtactcactctctgccgcccaccccatcttctgccacccgacctccatcttttgatggttagcgccttcagccctcaacagcattcgcacaaccaacccctagaagccgtggagtcagaccaggccagggtgggacctacgttttaactcgggttctggctacacacgctgcgcctccataaagtttgtccccaggtttggcagcaggccggctaccttcnaggaattctttgctttggcttctgtctgttcctgtctgttgggcaagtttctagctaccccactgagagaaccatagaacaaggaccctggcatggcatacagacaaggaatgtttgctgaattaatggagctggtgccttgcagcttcccttttgttccttgaagttgcccttgctctcctccacatcagctccctctcctcctcagctacttattccccaccctggcttcttctagtcgcagtccccaagtacttgctgaatcctgtatggacagcctaagcctccatttctganaattcctgtgncccactccatttgttttttanacttctccctcctttttgccccatcccccaagttataaaactataatgcaaaaaaa

SEQ ID NO: 253912 - DNA, 1075 bp, Homo Sapiens
  misc_feature (917)..(918): n is a, c, g, or t
  misc_feature (1005)..(1006): n is a, c, g, or t
  misc_feature (1021)..(1021): n is a, c, g, or t
ggcctgggtggcgaattcggcacgaggccaccttggggagacgcagtgcagctgccgctgctgacagacaagaccaaggctcggctgggccccaccccagatccggcctgagcgccttccgcgctgctcggcctcaaggcgtgagtcaccaagggcaagtcccgtgacttggtcctcagggtctccggcctcggcacattaatcttcagacccggctttttcgacgccgagctgccgcccagccccaatggcagggccttccagggagtcccagtcagactgctccccagctcccgcagctgctcggtccctgcaaagcccccgggagcgtttctactctcccctgagcccacgccatcccgtcactcctaggaaacttttcgcgcagaaactcctggagaacagccccggccgccaggtactcgcccgcccggaccgcaaagcccacagagcttcaattcgcaggaaggggagtggggagccctgagctggggtgttcctggaagaggtcggggagcggggggagaggcattccaggctggaggcctggaaacgtttggaagctttgctaaccttggagaccatgtcaggaaagaagcgtacccaggccgtctgctgtgtgcccaccccgatccccatcagtgccccacgcactcgagctcttcttcggcgtctgcagcctcttcatccgcgcggagaggcggaggtctcccggaaacagtgtccgactgtggcaccccagagcgtccaatgcgagctcaggcctttcccgccaagtctggagttttcttatccagttgaagccgccttcgctgtactcactctctgcctcccaccccatcttctgccacccgactttccattctttgatggttagcgccttcagcccctcaacagcttcgcacaacaaaccctannaagccgtggagcaaaacccgccagggtgggggactagaggttttaaacctcggggtcctgggctaacacgctgcgcctttcataagnnttttgtgcccaaagnttttgggaaacaggccggtttaacctttaagggaaatccttttgcgttttgggg

SEQ ID NO: 253913 - DNA, 861 bp, Homo Sapiens
  misc_feature (181)..(181): n is a, c, g, or t
caggtgaacacaacgtaagaacaggcatcaaacttcactggaaataatattgttcagtgtgtggcggcaaaatatgcattttagagaaaacttattcctcaaatcatgtgttaatagtattaacatgagcaacgtgagagaacatcctgaccccaacgtttttgcccatgccctccctttnagaagcttaggagtttgtacattccctaagtggtcagcactacaagtgtctgctaaaatgggcacttcatcaagataacaggaaagcaaacttaaagtaacgagatttcttcccaaaggcacatggaagaagctgatagagcccttgacccagacagaatgggacccatccctacccgtcctgaactgtcgcacactgcatggccaaagacaaactctccacccccacagaggaagcagtggctgactctggggacaaagcactccaggaagtcacctgctccctgggtttcaggagtattcagttgaccgtctggacaccagtgagggagacacaggtaatgaaatcaaatgctcaaacttttggcaaccgaaagttgttttttaaagctctttataatctgctcaagtagaatttctaacacaaaacccttttttgcttaaaaagcagatgacaaaggaaatgtcaaataatgcacatgaatcttcagctattttcctacccccaaatgagatatggggctgcacagcattcactacagatccctagtttttacaactgtcagctgtacattctcatgtttaggatactccagttcgctgcgtggatatttggaaagctggacaaaatcaggcagcccacccctcccttgtcccgagcttcctcgatctccattcacc

SEQ ID NO: 253914 - DNA, 846 bp, Homo Sapiens
cttcttgagagagaagaatatggagtgaaagaataattcttgagctatcattcaaatgctcccagcatattgtgagccttgtgtgactggtgaggtacagacatttggttgccaaatgctagattagcgctgggtcagctgtggaagaatcgcctcagcttacagattgtcagacagatctaactagttttccagaaagcctgggaagctgtgtgttcaacatttcccaagggattctgatcaccaggcagcttgggaaccactggggcaggccaaatagaatattttgggcgggaaagaagcacccgatttaaaatgaagcgtaaccagaggagttcagaactgggaagagagtggtagacttcctgtgatcttcagaaatcatctacctggtaaaaatacatgctgtttagaatatctgataggtgtttccagctactattagaggtgatagtgcttttgtgggggaaaaaattggtcatggtgaatggagatcgaggaagctcgggacaagggaggggtgggctgcctgattttgtccagttttccaaatatccacgcagtgaactggagtatcctaaacatgagaatgtacagttgacagttgtaaaaactagggatctgtaatgaatgctgtgcagccccatatctcatttgggggtaggaaaatagctgaagattcatgtgcattatttgacatttcctttgtcatctgctttttaagcaaaaaagggttttgtgttagaaattctacttgagcagattataaagagctttaacaactttcggttgccggtcaactgtactcctgcccagggagcaggtgacttcctgggtgctttgtcc

SEQ ID NO: 253915 - DNA, 1091 bp, Homo Sapiens
  misc_feature (812)..(812): n is a, c, g, or t
ggtcttcactcgcagcaagtgcgcgtgcgctgcctctcagcccaaattggaaacatggccgtacggtcgctgtgggcgggccggctgcgggtgcagcgcctactggcctggagtgccgcgtgggagagcaagggatggccgcttccattcagcactgccacccagagaactgctggtgaggactgccgttctgaggaccctcctgatgagcttgggccccctcttgctgaacgagccttaagggtaaaagctgttaaactggagaaagaagtccaagatttaacagtgagataccagagagctatagctgattgtgaaaacataaggaggcgaacccagagatgtgtggaagacgccaagatatttggaatccagagtttctgtaaggacttggtggaggtggctgacattttggagaagactacagagtgcatttctgaagaatcggagcctgaggaccaaaagctcactctggagaaggtcttccgaggggtgttgcttttagaagcaaagctgaaaagtgtgtttgccaagcatggcctggagaaactgacacccattggtgacaaatatgacccccatgagcatgaactcatctgtcatgtgccagctggtgttgggggtgcagccttggcaccgtggcattagtaagacaagatggctacaaacttcatggccgcaccattaggcttggcccgagtggaagtggcagtggagtctcaaagaagactgtgaagaggccatcaggaactggatgttctcccagagcgcagtcacctatgtttcttttatttattaaactaggtttgtanttgtacatgaggtacttcatgtgatatgttttggatttagtcatattggctttatttctaagatattctattgatttaatgtgacctgtttggtctcatcagaagtcttaccattgggcatttgaacagtgtgacaggtgttccaatggcctttatcaaaacatgtttaggaaaattggtactgtgattttgaatcctccttttaactatgggttttcaactacatgtttcttcctagcggtctctataacaggttgtgtagtatcttgtattttgtgg

SEQ ID NO: 253916 - DNA, 630 bp, Homo Sapiens
attggcacgagctgtcctcattcttagagactgcttctcccaaacataacgcgttagccatgaaggagtcggagccctgggtccgaatggacccgcctgcggtctgcatcagcctctgggccacagcagtgatgccagctgggcacgtcaggacctccccacacacccacacgatgccacaggtcagggggctgtgcctgactagggagccctcccattgccttcctggcccgggatagaagaggggaggtaagtctgggggctacgaagccgggcccccacaccctggctgaagtcagcttgacctaggtcttgaccctcatccagcaagggactcgacagacccaagggtccctggaacgtagggaggggctgggggtcactccagcccgggcctcccagaacaccaggcccgtgtgggtggcaccctgaggtcaggggatcctaagggtgtccttccagagacggtgtttccagggggaggaacgcccccgcttccagatccccggccccggctgtgactgccctgtttcacccctgctgtgtcccataccccgtctgtccactaactgtaccgcacacggccattaaaagatgaaagcacaccgctgtgaaaatcctggccgccgt

SEQ ID NO: 253917 - DNA, 360 bp, Homo Sapiens
agggcgtaatccggagtgccattaggcaagaagtgaattggaactgctccaccaggtggggttcttcctcagccaactccttcattgccttctcgaactccgcagtggcttgggaagccagttcactgtcgaatagttcctggaaaaacttctcttgggaagcgaagagggcatctttggcagtgtctcctggcgatctcttctggggccccgaagcatcaggggccgtggtggtagaagggggtgctggggagggtttggctttatcgaaatcatcaagagcactttccagaagctcctccaattccctgtccgcttcggccccgacactacagccttcctcagcggcgcctgcagccc

SEQ ID NO: 253918 - DNA, 868 bp, Homo Sapiens
acggcaagtcggaggtagcaagatggccgccgctgaggaaggctgtagtgtcggggccgaagcggacagggaattggaggagcttctggaaagtgctcttgatgatttcgataaagccaaaccctccccagcacccccttctaccaccacggcccctgatgcttcggggccccagaagagatcgccaggagacactgccaaagatgccctcttcgcttcccaagagaagtttttccaggaactattcgacagtgaactggcttcccaagccactgcggagttcgagaaggcaatgaaggagttggctgaggaagaaccccacctggtggagcagttccaaaagctctcagaggctgcagggagagtgggcagtgatatgacctcccaacaagaattcacttcttgcctaaaggaaacactaagtggattagccaaaaatgccactgaccttcagaactccagcatgtcggaagaagagctgaccaaggccatggaggggctaggcatggacgaaggggatggggaagggaacatcctccccatcatgcagagtattatgcagaacctactctccaaggatgtgctgtacccatcactgaaggagatcacaggaaagtatccagaatggttgcagagtcatcgggaatctctacctccagagcagtttgaaaaatatcaggagcagcacagcgtcatgtgcaaaatatgtgagcagtttgaggcagagacccccacagacagtgaaaccactcggctcgttttgagatggtgctggatcttatgcagcagctacaagatttaggctatcctcccaatctttcgggcccaccaggtgccagtggtgaacagtgtctgatcatgtgcaccc

SEQ ID NO: 253919 - DNA, 721 bp, Homo Sapiens
  misc_feature (669)..(669): n is a, c, g, or t
  misc_feature (677)..(677): n is a, c, g, or t
ggcacgaggtcacgctgaccggcggcttccgcaggtaagaaggcccgacgtgcccctctggcttggcttcagacccctccccagtgaagggacctgagtcggggaccctgaagcgggcccactcgttggaagggatgtggcctggggctggagtgagcaggccgtgtccctgagtcagagtcagactgacgccctcagggggaagttgcagggccatgacgtggacttcctcatcacccaccccaaggagggtcaggaggcggggctgctgcctagagtgatgtgccgcctgcaggaccagggcctcatcctgtaccaccagcaccagcacagctgctgtgagtcccctacccgcctggcccaacagagccacatggacgcttttgagagaagtttctgcattttccgcctaccacaacctccaggggctgctgtggggggatccacgaggccctgcccatcctggaaggccgtgagagtggacttggtagttgcacccgtcagccagttccctttcgccctgctcggttggactggctccaagcttttccagccggagctgcgccgcttcagccggaaggagaagggcctgtggctgaacagccatgggctgtttgacccggagcagaagacatttttccaagcggcttcagaggaggacatcttganacaccggnggcgtggagacggtgctgcagagcgtaggcgcgtgcgtggctgg

SEQ ID NO: 253920 - DNA, 947 bp, Homo Sapiens
  misc_feature (811)..(811): n is a, c, g, or t
tccgcgctgctggaggctgtcgtcccaatgctccccaaacggcggcgagcgcgggtcgggtcccctagcggcgatgccgcttcctccacgccgccctcgacgcgcttcccgggagtcgccatctacctggtcgagcctcgcatgggtcgcagccgccgggccttcctcacaggcctggcgcgctccaaaggcttccgcgtccttgacgcctgcagctccgaagcgacacatgttgtgatggaagagacctcagcagaggaggccgtcagctggcaggagcgcaggatggcagctgctcccccgggttgcacccccccagctctgctggacataagctgggtaacagagagcctgggagctgggcagcctgtacctgtggagtgccggcaccgcctggaagtggctgggccaaggaaagggccctctgaacccagcagggatgcctgcctatgcctgccagcgccctacgcccctcacacaccacaacactggcctctccgaggctctggagatactggccgaggcagcaggctttgaaggcagtgagggccgcctcctcaccttctgcagagcagcctcggtgctcaaggcccttcccagccctgtcacaaccctgagccagctgcaggggcttccccactttggagaacactcctctagggttgtccaggagctgctggagcatggagtgtgtgaggaggtggaaagagttcggcgctcagagaggtaccagaccatgaagggttgcgagtggggaacgcgcctgcctggtgcatggtgctccatgggccacaccgtcccgggagcgggntgatcatcccgagtctagccatgtagagctctgccccaaccggggctacgctcctttccccacagctcttaccccaaatctttcgggggtcggtggtgaaaaatgcctgaaccgtggggtaccgggaaaggaatgc

SEQ ID NO: 253921 - DNA, 970 bp, Homo Sapiens
  misc_feature (6)..(6): n is a, c, g, or t
  misc_feature (11)..(11): n is a, c, g, or t
  misc_feature (13)..(13): n is a, c, g, or t
  misc_feature (21)..(21): n is a, c, g, or t
  misc_feature (25)..(26): n is a, c, g, or t
  misc_feature (36)..(37): n is a, c, g, or t
  misc_feature (56)..(56): n is a, c, g, or t
  misc_feature (60)..(60): n is a, c, g, or t
  misc_feature (71)..(71): n is a, c, g, or t
  misc_feature (86)..(86): n is a, c, g, or t
  misc_feature (98)..(98): n is a, c, g, or t
cccctntgatntntaacagcntgtnnacagaggagnnttacaatcccgttcgtctnaccnttgtggctganaccttgagcaactanttaacatctgtntcctcagtttctcatgggtaatatagggataattactggcacctgcctcccaggccattctgacgtgtaaccgcatataggagcccactggctgagtagctaccatcatcgctggtggggaaactggtggtaggggtgtgagggtagtgggggtgtcagccccccaggtgtttcagaacaaggcctcgggcactcccaagtctgcctcttggctcccaccctcaaagcccatgttctgtgaggcccaagagaacacatggagtcttagcaaatgcactaatgtattccgggggactgtcacctggcaccactggggcactctgctggctacaactcatacgtcctgtggtggcattgggagagttcccccatgatgagggccaagatagaatctgtaccactcagtgctaccatccccacccctacaccacttccacacaggggcctcatggcatggtccagggtcccagctgtgggtgagagcagggcactgtccagctgtccactggggaagtccaagatgtcctaaggcccaggccagggcatctggagtctgaaggaccctagttcctagaggcatctggcagcaagaaggtgaggcatcagggaacgggaatcaggctgggactgatcagaggtgaagggacagagagaggagaggaggaagattgagctgggggcaacagccaagctcacctgggcaggtctctgccacctccttgctctgtgagctgtcagtctaggttattctctttttttgtggctatttttaattgctttggatttgttaaatgttttctgtcttctgttaagtgtgttttctctggagatagaatgtaaaccatattaaaaggaaaaagtttcagacaagc

SEQ ID NO: 253922 - DNA, 1252 bp, Homo Sapiens
  misc_feature (1071)..(1162): n is a, c, g, or t
ctgctcagggaagagcctgctacggtggactgtgagactcagtgcactgtcctcctcccagcgaccccacgctggaccccctgccggaccctccacccttcggcccccaagcttcccaggggcttcctttggactggactgtccctgctcatccattctcctgccacccccagacctcctcagctccaggttgccacctcctctcgccagagtgatgaggtcccggcttctgctctccgtggcccatctgcccacaattcgggagaccacggaggagatgctgcttgggggtcctggacaggagcccccaccctctcctagcctggatgactacgtgaggtctatatctcgactggcacagcccacctctgtgctggacaaggccacggcccagggccaacccaggccaccccacaggccagcccaggcctgccggaagggccgccctgctgtgtccctgcgagacatcaccgcacgtttcagtggccagcagcccacactgcccatggctgatactgtggaccccctggactggctttttggggagtcccaggaaaagcagccaagccagagggacctgccaaggaggactggcccctctgctggcctctggggtccacatagacagatggacagcagcaagcccatgggggcccccagagggaggctctgtgaagccaggatgcctgggcattccctggcaagaccaccgcaggatgggcagcagagctctgacctaagaagctggacttttgggcagtctgcccaagccatggcctcccgccaccgcccccgccccagcagtgtcctcagaacactctactcgcacctcccggtgatccatgaactctgacccctccccagtaaaggcttctgtagagagcatgctgggtctgcatctcctctcgtctcctccatggtggtcactgcccactggcaggtctctgaaaagggaaagccttttctgcagaggcccctgcttgggcagttcacagtgagaccgaccccctctgaatatgataacagcctgtttcacatgaggagatgttaccaatccgttcgctctgaccnnnnnnnnnnnnnnnnnnnnnnnnnnnnnnnnnnnnnnnnnnnnnnnnnnnnnnnnnnnnnnnnnnnnnnnnnnnnnnnnnnnnnnnnnnnnccaggccattctgacgtgtaaccgcatataggagcccactggctgagtagctaccatcatcgctggtggggaaactggtggtaggggtgt

SEQ ID NO: 253923 - DNA, 1222 bp, Homo Sapiens
  misc_feature (199)..(290): n is a, c, g, or t
  misc_feature (395)..(403): n is a, c, g, or t
  misc_feature (405)..(414): n is a, c, g, or t
  misc_feature (416)..(437): n is a, c, g, or t
  misc_feature (441)..(441): n is a, c, g, or t
  misc_feature (443)..(444): n is a, c, g, or t
  misc_feature (446)..(452): n is a, c, g, or t
  misc_feature (454)..(455): n is a, c, g, or t
  misc_feature (461)..(463): n is a, c, g, or t
  misc_feature (474)..(476): n is a, c, g, or t
  misc_feature (610)..(671): n is a, c, g, or t
  misc_feature (708)..(708): n is a, c, g, or t
  misc_feature (724)..(733): n is a, c, g, or t
gtagcgaggcctgggtggcgaatcggcacgaggctcgtctcctccatggtggtcactgcccctggcaggactctgaaagggaaatgcttttctgcagaggcccctgcttgggcagttcacagtgagaccgaccccctctgaatatgataacagcctgtttcacatgaggagatgttaccaatcccgttcgctctgaccnnnnnnnnnnnnnnnnnnnnnnnnnnnnnnnnnnnnnnnnnnnnnnnnnnnnnnnnnnnnnnnnnnnnnnnnnnnnnnnnnnnnnnnnnnnnccaggccattctgacgtgtaaccgcatataggagcccactggctgagtagctaccatcatcgctggtggggaaactggtggtaggggtgtgaggggtagtggggnnnnnnnnncnnnnnnnnnncnnnnnnnnnnnnnnnnnnnnnncccncnncnnnnnnncnncccccnnnctcccagcccnnnctccctcccgtcgcccctttttcgcctccctgccccctttggggttttgccgctgtttttccttcccggcgctttgccccttcttttcttccttcccgtccgcgccctctttggttcttccctttgcccgtcgnnnnnnnnnnnnnnnnnnnnnnnnnnnnnnnnnnnnnnnnnnnnnnnnnnnnnnnnnnnnnntctcctccgggcctcccttttgctgttggggtgccgnccgccgtccgccctcnnnnnnnnnnctcgcgcgctccaccgtttttcgcgcgccccgatccctcgcccctttttctcggttttgttattccgcccccgtgtttatcccgccgctgccccctctattatatccttaatcccccacttcctattccgcttatccccgccgccttgtcctgcgatatccacgatttatccctcactgtgtccgttacacaccaccctatccggcggcaatcttctctttgctctgtgttgtcctccacgatgtaccagctatgtaattaatgccgcgcggcgctcgttctattccctcgccacccgcgatctgtctcgcccgctctcttagttcctctcgcgcccgcctctatagccaacttgctggtctgccactctttattgtactcccacccggccccttcttattattcgccgcgcgtttgtcactcgcgccgccctttgtgtgtttgctctattacacgccaaccgccctcgcgccccacctctctatgtcg

SEQ ID NO: 253924 - DNA, 401 bp, Homo Sapiens
gcagggcacctgtcccagctgtcccactggggaaagtccaaagatggtccctaaagcccccagccccagggcatcctggagtcctgaaggacccctagttcccctagaggcatcctggcagcaagaaggtgaggcatcagggaacgggaatccaggctgggactgatcagaggtgaagggacagagagaggagaggaggaagattgagctggggcaacagccaagctcaccctgggcaggtctctgccacctccttgctctgtgagctgtcagtctaggttattctctttttttgtggctatttttaattgctttggatttgttaaatgttttctgtcttctgttaagtgtgttttctctggagatagaatgtaaaccatattaaaaggaaaaagtttcag

SEQ ID NO: 253925 - DNA, 1279 bp, Homo Sapiens
atagactgcgcatgcgtgtcagtggcgctagcggcggacccggctgggcagttccttccccagaaggagagattcctctgccatggagtcctacgatgtgatcgccaaccagcctgtcgtgatcgacaacggatccggtgtgattaaagctggttttgctggtgatcagatccccaaatactgctttccaaactatgtgggccgacccaagcacgttcgtgtcatggcaggagcccttgaaggcgacatcttcattggccccaaagctgaggagcaccgagggctgctttcaatccgctatcccatggagcatggcatcgtcaaggattggaacgacatggaacgcatttggcaatatgtctattctaaggaccagctgcagactttctcagaggagcatcctgtgctcctgactgaggcgcctttaaacccacgaaaaaaccgggaacgagctgccgaagttttcttcgagaccttcaatgtgcccgctcttttcatctccatgcaagctgtactcagcctttacgctacaggcaggaccacaggggtggtgctggattctggggatggagtcacccatgctgtgcccatctatgagggctttgccatgccccactccatcatgcgcatcgacatcgcgggccgggacgtctctcgcttcctgcgcctctacctgcgtaaggagggctacgacttccactcatcctctgagtttgagattgtcaaggccataaaagaaagagcctgttacctatccataaacccccaaaaggatgagacgctagagacagagaaagctcagtactacctgcctgatggcagcaccattgagattggtccttcccgattccgggcccctgagttgctcttcaggccagatttgattggagaggagagtgaaggcatccacgaggtcctggtgttcgccattcagaagtcagacatggacctgcggcgcacgcttttctctaacattgtcctctcaggaggctctaccctgttcaaaggttttggtgacaggctcctgagtgaagtgaagaaactagctccaaaagatgtgaagatcaggatatctgcacctcaggagagactgtattccacgtggattgggggctccatccttgcctccctggacacctttaagaagatgtgggtctccaaaaaggaatatgaggaagacggtgcccgatccatccacagaaaaaccttctaatgtcgggacatcatcttcacctctctctgaagttaactccactttaaaactcgctttcttgaaatt

SEQ ID NO: 253926 - DNA, 2095 bp, Homo Sapiens
  misc_feature (626)..(626): n is a, c, g, or t
acgctacaggcaggaccacaggggtggtgctggattctggggatggagtcacccatgctgtgcccatctatgagggctttgccatgccccactccatcatgcgcatcgaacatcgcgggccgggacgtctctcgctttcctgcgccctatacctgcgtaagggagggctacggacttccactcatccctctgagtttgagattgtcaaggccataaaagaaagagcctgttacctatccataaaccccccaaaaggatgagacgcttagagacagagaaagctcagtacatacctgcctgatggcagcaccattgagatatctgcacctcaggagagactgtattccacgtggattgggggctccatccttgcctccctggacacctttaagaagatgtgggtctccaaaaaggaatatgaggaagacggtgcccgatccatccacagaaaaaccttctaatgtcgggacatcatcttcacctctctctgaagttaactccactttaaaactcgctttcttgagtcggagtgtttgcgaggaactgcctgtgtgtgagtgcgtgtgtggatatgagtgtgtgcgcacatgcgagtgccgtgtggccctgggaccctgggcccaganaaggacgatgaactacccgcagtggtgatggcctgaggcctgggggttgaccactaactggctcctgacagggaagagcgctggcagaggctgtgctccctcctcaggtgggcctctggctgggctgtggggggactccgttttactaccacagggagacagagggaggtaagccatcccccgggagaccttgctgctgaccatcctaggctgggctggccccaccctcacccccacccccagggtgccctgaggccccaggcagctgctgcctccactatcgatgcctcctgactgcacactgaggactgggactggggttgagttctgtctggttttgttgccattttggtttgggaggctggaaaagcaccccaagagctattacagagactggagtcaggagagagcaggaggccctcatgttcaccagggaacaggaccacaccggccactgaaggagggcaggagcagtcctccctctgaatggctgcagagttaatgttcccagcccagtcccctttcgggggccttgggagagtttaaggcacctgctggttccaggacctcgctttccatctgttcttgttgcaatgccatcttcaaaccgttttatttattgaagtgtttgttcagttaggggctggagagagggagcttgctgcctcctgccttgctacactaatgtttacagcacctaagcttagcctccagggccccacctctcccagctgatggtgagctgacagtgtccacaggttccaggaccatttgagattggaagctacactcaaagacactcccaccaggctctttctcccttttcctcttgctcactgccctggaatcaacaggctggttgctggttagattttctgaaacaggaggtaaaatttttctttggcagaggcccctaagcaagggaggggtgttggagagccagtgcccttaagactggagaaagctgcaatttaccaagttgccttttgccactgtagctgaccaggggactaggttgtagaggtgggaaggccccctctgggctgatcttgtgccattcttgaccttggacctgcttggttaaggagggagtgggccagaccagagtgccaggagctaatggagccaggcctgactcctaggagtggtccaaaggccttcagcctagatggtgcaaagctggggccagcctgtcttcaccggcaccctcacctgtgacaccaagacccaccccaatcccagacttcacacagtattctcccccacgccgtcctatgaccaaaggcccctgccaggtgtgggccacagcagcaggtatgtgtgaaagcaacgtagcgccccgcggactgcagtgcgcttaaccaactcacctcccttctcttagcccaagcctgtccctcgcacagcctcgcacaaaccacattgcctggtggggcccagtgtactgaaataaagtcgttccgatagac

SEQ ID NO: 253927 - DNA, 867 bp, Homo Sapiens
agacgatgctgactgcacgttgatagggagtttgctgttgtaacagatatgaatttggacttcccctccacgaccccgctcagtgggatggaaagcaggaatggccagtgcttgacaggaactaacggaattagcagtggattagccccaggacagccgtttccgagtagccagggttctctctgcattagtgggactgaggagccagagaagaccctgagagctaaccctgagttgtgcggttctctgcacctgaacgggagtccaagtagctgcatagccagtaggccttcctgggtggaagacattggggataacctgtactatggacactaccacgggtttggggacactgctgaaagcatcccagaactgaacagtgtggtcgagcattccaagtccgtgaaggtgcaggagcggtacgacagtgccgtgctgggcaccatgcacctgcaccacggctcctagagacgctgacctggctctcggaaacgcaggagtccttcctggtagccagctcagaatacccatgtagcagcaacttgaacgaatgtcacaacttgtactttttttatatacttcaactttctgaaaaagtaaacttcgacaagttcccagcaactgcttgtttgtgcatgagtagggcttactaagtgcatagatgtttctacagtgaggtgtcctttttataaggtgcacttttggagtttttctgatgccaatctcaacattgtctttttaatactgtcaccagatattgccatttttctttttgttaaaagattatatgatcaagataaattggggtggtaaatcaggtgcctggtaatttatctctttgcacatgggcatcattttatatgcaag

SEQ ID NO: 253928 - DNA, 1140 bp, Homo Sapiens
  misc_feature (126)..(142): n is a, c, g, or t
gcaagagaacccactaggggatgagcccgaactagggatgtgacagagcgcgagacccagcctaaagagagcccggagccagcgtgggaggccgctgccgtcgcgcgccttggtttttctgttccnnnnnnnnnnnnnnnnnaacttcctgcctatacacacgcagccatcagcccacaaagacatgactaccaacgcgggccccttgcacccatactggcctcagcacctaagactggacaactttgtacctaatgaccgccccacctggcatatactggctggcctcttctctgtcacaggggtcttagtcgtgaccacatggctgttgtcaggtcgtgctgcggttgtcccattggggacttggcggcgactgtccctgtgctggtttgcagtgtgtgggttcattcacctggtgatcgagggctggttcgttctctactacgaagacctgcttggagaccaagccttcttatctcaactctggaaagagtatgccaagggagacagccgatacatcctgggtgacaacttcacagtgtgcatggaaaccatcacagcttgcctgtggggaccactcagcctgtgggtggtgatcgcctttctccgccagcatcccctccgcttcattctacagcttgtggtctctgtgggccagatctatggggatgtgctctacttcctgacagagcaccgcgacggattccagcacggagagctgggccaccctctctacttctggttttactttgtcttcatgaatgccctgtggctggtgctgcctggagtccttgtgcttgatgctgtgaagcacctcactcatgcccagagcacgctggatgccaaggccacaaaagccaagagcaagaagaactgaggagtggtggaccaggctcgaacactggccgaggaggagctctctgcctgccagaagagtctagtcctgctcccacagtttggagggacaaagctaattgatctgtcacactcaggctcatgggcaggcacaagaaggggaataaaggggctgtgtgaaggcactgctgggagccattagaacacagatacaagagaagccaggaggtctatgatggtgacgatttttaaaatcaggaaataaaagatcttgactctaaaaaa

SEQ ID NO: 253929 - DNA, 524 bp, Homo Sapiens
  misc_feature (444)..(460): n is a, c, g, or t
aggctgagtggtccccacaggcaagctgtgatggtttccatgcacactgtgaagttgtcacccaggatgtatcggctgtctcccttggcatactctttccagagttgagataagaaggcttggtctccaagcaggtcttcgtagtagagaacgaaccagccctcgatcaccaggtgaatgaacccacacactgcaaaccagcacagggacagtcgccgccaagtccccaatgggacaaccgcagcacgacctgacaacagccatgtggtcacgactaagacccctgtgacagagaagaggccagccagtatatgccaggtggggcggtcattaggtacaaagttgtccagtcttaggtgctgaggccagtatgggtgcaaggggccagcgttggtagtcatgtctttgtgggctgatggctgcgtgtgtataggcaggaagttnnnnnnnnnnnnnnnnnggaacagaaaaaccaaggcgcgcgacggcagcggcctcccacgctggctccgggctctctttag

SEQ ID NO: 253930 - DNA, 817 bp, Homo Sapiens
  misc_feature (358)..(358): n is a, c, g, or t
ggggacagagcgcgagacccagcctaaagagagcccggagccagcgtgggaggccgctgccgtcgcgcgccttggtcgtgctgcggttgtcccattgggactttggcggcgactgtccctgtgctggtttgcagtgtgtgggttcattcacctggtgatcgagggctggttcgttctctactacgaagacctgcttggagaccaagccttcttatctcaactctggaaagagtatgccaagggagacagccgatacatcctgggtgacaacttcacagtgtgcatggaaaccatcacagcttgcctgtgggggaaccactcagcctgtgggtggtgatcgcctttctccgccagcatncccctccgcttcattcttacagcttgtggtctctgtggggccagatctatgggggatgtgctctaattccctgaaagagcaccgcaacggattccagcacggagagctgggccaccctctctacttctgggtttactttgtcttcatgaatgccctgtggctggtgctgcctggagtccttgtgcttgatgctgtgaagcacctcactcatgcccagagcacgctggatgccagggccacaaaagccccagagccagaaaaacttgaggaatgtgggacccaggctcgaaccccgggcccgaggaggaactcttctggcctggccaaaaaaagtctaggccctggctcccacagtttgggaagggacaaagctaattggatctggtccccctccaggcctcaggggcaggccaacagaaaggggaattaaaggggcctggggtgaaaggcccttgcctg

SEQ ID NO: 253931 - DNA, 544 bp, Homo Sapiens
cagcagtccggacagtggcgactgcgctgacagaacgtgattctcgtgcctttattttgaaagagatgtttttcccaagaggcttgctgaaagagtgagagaagatggaagggaagggccagtgcaactgggcgcttgggccactccagccagcccgcctccggggcggaccctgctccacttccagaagccaggactaggacctgggccttgcctgctatggaatattgagagagattttttaaaaaagattttgcattttgtccaaaatcatgtgcttcttctgatcaattttggttgttccagaatttcttcataccttttccacatccagatttcatgtgcgttcatggagaagatcacttgaggccatttggtacacatctctggaggctgagtcggttcatgaggtctcttatcatattactcagtttgcaagactgcattgtactttaacatacactgtgactgacgtttctcaaagttcatattgtgtggctgatcttgagtcagccgaattttgtaaacaggtagcaaacaagat

SEQ ID NO: 253932 - DNA, 356 bp, Homo Sapiens
cagcagtccggacagtggcgactgcgctgacagaacgtgattctcgtgcctttattttgaaagagatgtttttcccaagaggcttgctggagtgagagaagatggaagggaagggccagtgcaactgggcgcttgggccactccagccagcccgcctccggggcggaccctgctccacttccagaagccaggactaggacctgggccttgcctgctatggaatattgagagagattttttaagattttgcattttgtccttttccacatccagatttcatgtgcgttcatggaggatcacttgaggccatttggtacacatctctggaggctgagtcggttcatgaggtctcttat

SEQ ID NO: 253933 - DNA, 382 bp, Homo Sapiens
gcacagaggggttagtaatggcttccttcctcattcatacattgctacattcttaatttggcttcttacatttagagctgggtttgaatcttatgaaaatgcatacttacttttgtaatatagtccaagaggaaaataggcttttatatatagatatttatgaaagcacgtaatgtgtaaatcatgggaactctttatctttatgaggtcagcacttaagcctctgtgattattgatctagagaagctagatgctgtagcatttctaaaggtttaagagtgatggtatcagggagatttactatggtggtaaatttttatgaattagtatctcatacttaacattacaatgcagcaactgtttgaatgaaagcctttggaat

SEQ ID NO: 253934 - DNA, 809 bp, Homo Sapiens
  misc_feature (20)..(20): n is a, c, g, or t
  misc_feature (58)..(58): n is a, c, g, or t
  misc_feature (90)..(90): n is a, c, g, or t
  misc_feature (98)..(110): n is a, c, g, or t
  misc_feature (117)..(137): n is a, c, g, or t
tgttttacttaaaaagcaancaatcccccaggaaatactgaataggaaccagcaaccncaagggccagcttgtgttgtatgtttattaanccagtctnnnnnnnnnnnnngcaaaannnnnnnnnnnnnnnnnnnnnaacaataactctcaatcacatagctaattgctttcattatttttgtaaaactgacatcctaacactggcacctagaatacttttcccatctgagtctaacgtaccccactgcctctaatacggcccgcactacgatgagctacttcagtgggtgggaccaagcaggaactgtaagggaaaattagtcactagttctattatcgttttatttttcaagatgtgtgacaggtacaggtgacaatatggttgccaagtaacctgctctccctccctcaacaagacgcaacatgaaacctggaagtatgaggccttggtatgatttttaacctaagcaggtacacccatggtaaagaatggataccctgccctccatggaaaagattgcctgcaaaaataaatggaacaaaatagaaaaggcctaaaagccagaaatcttcaaacttactaaacaaaaatattttttaatgattctgatctaaacaatactgtatcttcttccatttgctcaattttcagtctatcaggactcatttctccagcttgagtttattattctgaatatatattactctacgatagtaactaattggttaacctgcagctatggtctatggttataccacaagtttatatataggtatgtaatgtatgcatatataaaaagcttcccca

SEQ ID NO: 253935 - DNA, 1446 bp, Homo Sapiens
  misc_feature (461)..(471): n is a, c, g, or t
  misc_feature (1006)..(1024): n is a, c, g, or t
  misc_feature (1033)..(1071): n is a, c, g, or t
  misc_feature (1118)..(1190): n is a, c, g, or t
  misc_feature (1230)..(1238): n is a, c, g, or t
ttgaagatttctggcttttaggccttttctattttgttccatttatttttgcaggcaatcttttccatggagggcagggtatccattctttaccatgggtgtacctgcttaggttaaaaatcataccaaggcctcatacttccaggtttcatgttgcgtcttgttgagggagggagagcaggttacttggcaaccatattgtcacctgtacctgtcacacatcttgaaaaataaaacgataatagaactagtgactaattttcccttacagttcctgcttggtcccacccactgaagtagctcatcgtagtgcgggccgtattagaagcagtggggtacgttagactcagatggaaaagtattctaggtgccagtgttaggatgtcagttttacaaaataatgaagcaattagctatgtgattgagagttattgtttggggatgtgtgttgtggttttgcnnnnnnnnnnnagactgtattaataaacatacaacacaagctggccttgtgttgctggttcctattcagtatttcctggggattgtttgctttttaagtaaaacacttctgacccatagctcagtatgtctgaattccagaggtcacatcagcatctttctgctttgaaaactctcacagctgtggctgcttcacttagatgcagtgagacacatagttggtgttccgattttcacatccttccatgtatttatcttgaagagataagcacagaagagaaggtgctcactaacagaggtacattactgcaatgttctcttaacagttaaacaagctgtttacagtttaaactgctgaatattatttgagctatttaaagcttattatattttagtatgaactaaatgaaggttaaaacatgcttaagaaaaatgcactgatttctgcattatgtgtacagtattggacaaaggattttattcattttgttgcattattttgaatattgtcttttcattttaataaagttataatacttatttatgnnnnnnnnnnnnnnnnnnnctcgaggcnnnnnnnnnnnnnnnnnnnnnnnnnnnnnnnnnnnnnnncatggtcatagctgtttcctgacccagctttcttgtacaaagtggtnnnnnnnnnnnnnnnnnnnnnnnnnnnnnnnnnnnnnnnnnnnnnnnnnnnnnnnnnnnnnnnnnnnnnnnnntgcagtacccgggaatttaaccccgcctaatgagcgggcnnnnnnnnngtgatccaaaggatctttcttgaaatccttttttttctgcaaagtaatctgctgccttggcaaccaaaaaaaccccccggttacagcgggtgggttttgtttggcccggatcaaagagcttaccccacctcctttttttccgaaaaggtaaccttgggcttttcaagcacagaaccggccagaattaccccaaattaactggtttcca

SEQ ID NO: 253936 - DNA, 2009 bp, Homo Sapiens
  misc_feature (1015)..(1035): n is a, c, g, or t
  misc_feature (1173)..(1190): n is a, c, g, or t
  misc_feature (1280)..(1352): n is a, c, g, or t
  misc_feature (1870)..(1870): n is a, c, g, or t
cttgagcagtgggcccaggcctggccctccacacttcattctctgacctttctctctcctcatttcggtgcatgtcctttctgcagctgcctttcagcacaggtggttccactgggggcagctaacgctgagtgacaaggatgggaagccacaggtgcattttactcaagtcttctctagtcaatgaggggcacccagtgcttctagggcaggctgggtggtggtcccctaggtatcagcctctcttactgtactctccgggaatgttaacctttctattttcagcctgtgccacctgtctaggcaagctggcttccccattggcccctgtgggtccacagcagcgtggctgccccccaggccaccgcttctttcttgatcctctttccttaacagtgacttgggcttgagtctggcaaggaaccttgcttttagcttcaccaccaaggagagaggttgacatgacctccccgccccctcaccaaggctgggaacagaggggatgtggtgagagccaggttcctctggccctctccagggtgttttccactagtcactactgtcttctccttgtagctaatcaatcaatattcttcccttgcctgtgggcagtggagagtgctgctgggtgtacgctgcacctgcccactgagttggggaaagaggataatcagtgagcactgttctgctcagagctcctgatctaccccaccccctaggatccaggactgggtcaaagctgcatgaaaccaggccctggcagcaacctgggaatggctggaggtgggagagaacctgacttctctttccctctccctcctccaacattactggaactctatcctgttaggatcttctgagcttgtttccctgctgggtgggacagaggacaaaggagaagggagggtctagaagaggcagcccttctttgtcctctggggtaaatgagcttgacctagagtaaatggagagaccaaaagcctctgatttttaatttccataaaatgttagaagnnnnnnnnnnnnnnnnnnnnnttctttaaatttttgagtctttgatatgtctaaaaatccattccctctgccctgaagcctgagtgagacacatgaagaaaactgtgtttcatttaaagatgttaattaaatgattgaaacttgaaaacaccacaatannnnnnnnnnnnnnnnnnggggaaataagcggccccagcaccgcgagcgttgcttgtccggccccctcccgcccccggagaaagttttctcaaacacatttcttttcnnnnnnnnnnnnnnnnnnnnnnnnnnnnnnnnnnnnnnnnnnnnnnnnnnnnnnnnnnnnnnnnnnnnnnnnngcggcccatgcgccgagcccgccttgcgccttccccccaccacatcacaacaccacgcgccggggcggtgccaaaccgggcacggtggttgggtgccaaccaaactttctttttcacgcgggaccccctccccacaggtcctcctcttgaacccgcgagatttgtttgctccacttcccgtgcaagctcgccatccgcgtagcgcgctctcctcgccaattataccccacacaattttcatgcactctccccggcgcgctgcatggtgcacagctttccgcccgcgcgcccgctcacacggcgccgacgcgccgcacgatgggcggggacgaggggctgtatctacactgccccacccgacacggcggaaagcgcccccttctacacacctcagcgccggacccgtgacgtgtgtcagacctccgccgcctccccgccaccagaccctgtggcagtatctcatcgccaccgcgtaggtgtcggcgcgccgcgccgtggcgctacagatagccgctatntgcgcgcctcctgccgacggggagtgtaacgggcggggcggcgcgcaccgcaggcagccggtcgtcggtcgaacgacgcgcgtcctatcgtcttgtggcaggtacggcaatgcgcggcgcgcgggagaccgcagaagcc

SEQ ID NO: 253937 - DNA, 1491 bp, Homo Sapiens
  misc_feature (78)..(78): n is a, c, g, or t
  misc_feature (134)..(134): n is a, c, g, or t
  misc_feature (150)..(150): n is a, c, g, or t
  misc_feature (157)..(157): n is a, c, g, or t
  misc_feature (185)..(185): n is a, c, g, or t
  misc_feature (198)..(198): n is a, c, g, or t
  misc_feature (207)..(207): n is a, c, g, or t
  misc_feature (213)..(213): n is a, c, g, or t
  misc_feature (258)..(258): n is a, c, g, or t
  misc_feature (307)..(307): n is a, c, g, or t
  misc_feature (333)..(333): n is a, c, g, or t
  misc_feature (396)..(396): n is a, c, g, or t
  misc_feature (487)..(487): n is a, c, g, or t
  misc_feature (606)..(606): n is a, c, g, or t
gccacgagctgttgtgcatccagaggtggaattggggcccggcattccctcctcgtcccgggctggcccttgcccccnccctgcaactcctggttgagatgggctcagccaagagcgtcccagtcacaccagcncggcctccgccgcacnacaagcntctggctcgagtggcggacccccgttcncctagtgctggcntcctgcgcnctcccntccaggtactctgggccagcgtgggaaaggcagagaatgtctganttcttgggtctcttcctaacctgattttgagagagccgtcatgaccccncccttatcctagccttattttctgcnatctcaatctgtgtggggtaggctggatatctgagggccttggcaattccttcctggaatatngggaggagaggagagaagagtcagggcccagacttgttctagcctatggtcttgacaggtggagagctctccacagccaggcctaccagcnggggagcaactggagggtcttaaacatgcccaggactcagatccccgctctcctactcttggtattgcacggacacctatgaagaccaccagtggagaccccccaagcccactggtganacagctgagtgaagtatttgaaactgaagactctaaatcaaatcttcccccagagcctgttctgcccccagaggcacccttatcttctgaattgcacttgcctctgggtacccagttatctgttgagcaacagaagccaccttggaaccagactgagttcccctccaaacaggtgttttccaaggagaaagcaagacagcccacagaaacccctgtggccagccagagctccgacaagccctcaagggaccctgaggactcccagatcttcaggtacagaatctaaggcaagatgcagggaagataaactagcataatgttttgggataaggtccatgggtgagtgtgggaggaataaactgtaagtcctagttttgggtccttgctttaacgccttacccaccccaggttctatgcgcaatagatggaaaccaaacagcagcaaggtactagggagatcccccctcaccatcctgcaggatgacaactcccctggcaccctgacactacgacagggtaagcggccttcacccctaagtgaaaatgttagtgaactaaaggaaggagccattcttggaactggacgacttctgaaaactggaggacgagcatgggagcaaggccaggaccatgacaaggaaaatcagcactttcccttggtggagagctaggccctgcatggccccagcaatgcagtcacccagggcctggtgatatctgtgtcctctcaccccttctttcccagggatactgaggaatggcttgttttcttagactcctcctcagctaccaaactgggactcacagctttattgggctttctttgtgtcttgtgtgtttcttttatattaaaggaagtaattttaaatgttactttaaaaaggt

SEQ ID NO: 253938 - DNA, 566 bp, Homo Sapiens
tcgggagttgagccacgagctgttgtgcatccagaggtggaattggggcccggtaagtgatttgaataatttaataaataagttagagggctcagcaggcccagaacgagccattttgtcagctgcagcagtcattaactccgcagaggcctctggtccctcgccaggaagtttcttcactggctgggaagacagggtggtttagggttgaaggtccgacgtggaagagataagggctgagacctgagtcacttctcacaggcattccctcctcgtcccgggctggcccttgcccccaccctgcaactcctggttgagatgggctcagccaagagcgtcccagtcacaccagcgcggcctccgccgcacaacgcatctggctcgagtggcggacccccgttcacctagtgctggcatcctgcgcactcccatccaggtactctgggccagcgtgggaaaggcagagaatgtctgaattcttgggtctcttcctaacctgattttgagagagccgtcatgaccccacccttatcctagccttattttctgcaatctcaatctgtgtg

SEQ ID NO: 253939 - DNA, 910 bp, Homo Sapiens
taacttcgggagttgagccacgagctgttgtgcatccagaggtggaattggggcccggcattccctcctcgtcccgggctggcccttgcccccaccctgcaactcctggttgagatgggctcagccaagagcgtcccagtcacaccagcgcggcctccgccgcacaacaagcatctggctcgagtggcggacccccgttcacctagtgctggcatcctgcgcactcccatccaggtggagagctctccacagccaggcctaccagcaggggagcaactggagggtcttaaacatgcccaggactcagatccccgctctcctactcttggtattgcacggacacctatgaagaccagcagtggagaccccccaagcccactggtgaaacagctgagtgaagtatttgaaactgaagactctaaatcaaatcttcccccagagcctgttctgcccccagaggcacctttatcttctgaattggacttgcctctgggtacccagttatctgttgaggaacagatgccaccttggaaccagactgagttcccctccaaacaggtgttttccaaggaggaagcaagacagcccacagaaacccctgtggccagccagagctccgacaagccctcaagggaccctgagactcccagatcttcaggttctatgcgcaatagatggaaaccaaacagcagcaaggtactagggagatcccccctcaccatcctgcaggatgacaactcccctggcaccctgacactacgacagggtaagcggccttcacccctaagtgaaaatgtaagtgaactaaaggaaggagccattcttggaactggacgacttctgaaaactggaggacgagcattggaccaggcaaggaccatgacaaggaaaatcagcacttcccttggtg

SEQ ID NO: 253940 - DNA, 447 bp, Homo Sapiens
ggctgcaggaattcggcacgagcgggcacgcaaacaagatgaagaagagcgggagctgcgggccaagcaagagcaagaaaaggagctgttaaggcagaaacttcttaaagaacaggaagagaaacgtctcagagaaaaggaagagcaaaagaaacttttggaacagcgggcccagtatgtggagaagaccaaaaatattcttatgtttactggtgagactgaagcaacaaaagagaagaaaagaggtggtggtggtggacggcgttctaagaagggaggagagtttgatgaatttgtcaatgatgacactgatgatgacctacctatatccagaagaagagaagaaagggtagtggcagtgaacaagaaggtgaagatgaggagggtggtgagagaaagaagagaggagaagacatccaaagggagaagggatctgatgatgatgcg

SEQ ID NO: 253941 - DNA, 1070 bp, Homo Sapiens
  misc_feature (62)..(77): n is a, c, g, or t
  misc_feature (893)..(893): n is a, c, g, or t
  misc_feature (895)..(895): n is a, c, g, or t
  misc_feature (906)..(906): n is a, c, g, or t
  misc_feature (913)..(913): n is a, c, g, or t
  misc_feature (965)..(965): n is a, c, g, or t
  misc_feature (977)..(977): n is a, c, g, or t
  misc_feature (979)..(979): n is a, c, g, or t
  misc_feature (985)..(986): n is a, c, g, or t
  misc_feature (992)..(992): n is a, c, g, or t
  misc_feature (1020)..(1020): n is a, c, g, or t
  misc_feature (1043)..(1043): n is a, c, g, or t
  misc_feature (1067)..(1067): n is a, c, g, or t
gaaacagacagatggacagagaatgcagcaggggctgtgtgaaaactgtgatatgtgtgtgnnnnnnnnnnnnnnnntgttttgtgtgtttgtaaaaggccttctacaggccagaaaggggccccttggaattaggcccacctgtctagatcctctcctcagtggtgggtcctgggctgaaaccagcttccacatcatacccccaaaggaagaatgggggtctttctggaatggaagacgctgacttcaagcattcttcaaattactctcgttccccagctgagctttgttgctgagggggttggggacaagccacaggggcacttgcatagcaggggagtagaatggggataaggcatatggtgaggacaggggagaaggggaagggcatcatagctgcaggtgaagggggcctccaaaaggcagctcctcttccccctcatcccctcaaattgctgctgggttgaggagtcagactgaggcagtataataccctcccccatccttaactctagaaccccggtttggtggggaggaggtgggaagctgtggagctatggaaaggcctcagttagtgagtcaagctgtgatgtgtgtgtctgaacacaactggctcccttggtataccgggggctccctctccagatgggtgtgagtgcatggtcctactgtacacacaggtctcagtatctatatgtgtctcatttgttcccatgggtctctgtgtttggatacataagcatggatatccctgctcatacagcaggaactcaggatctgcatggtgtatgtccctgtctgtaaacatgggctccagcaagtggatatgtgcgggcctgcccgctcctgtccatccgcagtcttccttcaggctggctggtcaagggtcctgncnaagaggtagtngtgagcncagccggagtcccgagcataggagcgagagtatagagagtgttaggagtctnggttctgagaantntcggcnncgcgangccagagtggatggatgagcccggcgtnctcaccatcatgtgtttgcccantcaaactgtgctcacaggcctttntac

SEQ ID NO: 253942 - DNA, 1638 bp, Homo Sapiens
  misc_feature (1553)..(1591): n is a, c, g, or t
  misc_feature (1607)..(1607): n is a, c, g, or t
ttcccgggatgccggcgggctccgaggccgtgagcgcaaagcctcaggccccggctccctcctgagctgcgccgtgccaggccgcccgccgggatgcagtgggccgtgggccggcggtgggcgtgggccgcgctgctcctggctgtcgcagcggtgctgacccaggtcgtctggctctggctgggtacgcagagcttcgtcttccagcgcgaagagatagcgcagttggcgcggcagtacgctgggctggaccacgagctggccttctctcgtctgatcgtggagctgcggcggctgcacccaggccacgtgctgcccgacgaggagctgcagtgggtgttcgtgaatgcgggtggctggatgggcgccatgtgccttctgcacgcctcgctgtccgagtatgtgctgctcttcggcaccgccttgggctcccgcggccactcggggcgctactgggctgagatctcggataccatcatctctggcaccttccaccagtggagagagggcaccaccaaaagtgaggtcttctacccaggggagacggtagtacacgggcctggtgaggcaacagctgtggagtgggggccaaacacatggatggtggagtacggccggggcgtcatcccatccaccctggccttcgcgctggccgacactgtcttcagcacccaggacttcctcaccctcttctatactcttcgctcctatgctcggggcctccggcttgagctcaccacctacctctttggccaggacccttgaccagccaggcctgaaggaagacctgcggatggacaggagcgggcaggcccgcacatatccacttgctggagcccatgtttacagacagggacatacaccatgcagatcctgagttcctgctgtatgagcagggatatccatgcttatgtatccaaacacagagacccatgggaacaaatgagacacatatagatactgagacctgtgtgtacagtaggaccatgcactcacacccatctggagagggagcccccggtataccaagggagccagttgtgttcagacacacacatcacagcttgactcactaactgaggcctttccatagctccacagcttcccacctcctccccaccaaaccggggttctagagttaaggatgggggagggtattatactgcctcagtctgactcctcaacccagcagcaatttgaggggatgagggggaagaggagctgccttttggaggcccccttcacctgcagctatgatgcccttccccttctcccctgtcctcaccatatgccttatccccattctactcccctgctatgcaagtgcccctgtggcttgtccccaaccccctcagcaacaaagctcagctggggaacgagagtaatttgaagaatgcttgaagtcagcgtcttccattccagaaagacccccattcttcctttggggggatgatgtggaagctggtttcagcccaggacccaccactgaggagaggatctagacaggtgggcctaattccaaggggcccttcctggcctggagaaggcctttnnnnnnnnnnnnnnnnnnnnnnnnnnnnnnnnnnnnnnntatcacagttttcacncagcccctgctgcattctctgtccatctgtc

SEQ ID NO: 253943 - DNA, 1584 bp, Homo Sapiens
  misc_feature (1201)..(1201): n is a, c, g, or t
  misc_feature (1481)..(1521): n is a, c, g, or t
  misc_feature (1574)..(1574): n is a, c, g, or t
  misc_feature (1576)..(1576): n is a, c, g, or t
ggccgtgagcgcaaagcctcaggccccggctccctcctgagctgcgccgtgccaggccgcccgccgggatgccgtgggccgtgggccggcggtgggcgtgggccgcgctgctcctggctgtcgcagcggtgctgacccaggtcgtctggctctggctgggtacgcagagcttcgtcttccagcgcgaagagatagcgcagttggcgcggcagtacgctgggctggaccacgagctggccttctctcgtctgatcgtggagctgcggcggctgcacccaggccacgtgctgcccgacgaggagctgcagtgggtgttcgtgaatgcgggtggctggatgggcgccatgtgccttctgcacgcctcgctgtccgaggcgctactgggctgagatctcggataccatcatctctggcaccttccaccagtggagagagggcaccaccaaaagtgaggtcttctacccaggggagacggtagtacacgggcctggtgaggcaacagctgtggagtgggggccaaacacatggatggtggagtacggccggggcgtcatcccatccaccctggccttcgcgctggccgacactgtcttcagcacccaggacttcctcaccctcttctatactcttcgctcctatgctcggggcctccggcttgagctcaccacctacctctttggccaggacccttgaccagccaggcctgaaggaagacctgcggatggacaggagcgggcaggcccgcacatatccacttgctggagcccatgtttacagacagggacatacaccatgcagatcctgagttcctgctgtatgagcagggatatccatgcttatgtatccaaacacagagacccatgggaacaaatgagacacatatagatactgagacctgtgtgtacagtaggaccatgcactcacacccatctggagagggagcccccggtataccaagggagccagttgtgttcagacacacacatcacagcttgactcactaactgaggcctttccatagctccacagcttcccacctcctccccaccaaaccggggttctagagttaaggatgggggagggtattatactgcctcagtctgactcctcaacccagcagcaatttgaggggatgagggggaagaggagctgccttttggaggcccccttcacctgcagctatgatgcccttccccttctnccctgtcctcaccatatgccttatccccattctactcccctgctatgcaagtgcccctgtggcttgtccccaaccccctcagcaacaaagctcagctggggaacgagagtaatttgaagaatgcttgaagtcagcgtcttccattccagaaagacccccattcttcctttgggggtatgatgtggaagctggtttcagcccaggacccaccactgaggagaggatctagacaggtgggcctaattccaaggggcccttcctggcctggagaaggcctttnnnnnnnnnnnnnnnnnnnnnnnnnnnnnnnnnnnnnnnnntatcacagttttcacacagccccagctgcattctctgtccatctgtctgttgnantacataaa

SEQ ID NO: 253944 - DNA, 927 bp, Homo Sapiens
  misc_feature (357)..(396): n is a, c, g, or t
  misc_feature (478)..(549): n is a, c, g, or t
  misc_feature (578)..(578): n is a, c, g, or t
  misc_feature (582)..(582): n is a, c, g, or t
  misc_feature (584)..(588): n is a, c, g, or t
  misc_feature (696)..(761): n is a, c, g, or t
agggggatgaggggaaagaggagctgctttttggaggcccctttcacctgcagcttatgatgcccttccccttctcccctgtcctcaccatatgccttatccccattctactcccctgctatgcaagtgcccctgtggcttgtccccaaccccctcagcaacaaagctcagctggggaacgagagtaatttgaagaatgcttgaagtcagcgtcttccattccagaaagacccccattcttcctttgggggtatgatgtggaagctggtttcagcccaggacccaccactgaggagaggatctagacaggtgggcctaattccaaggggcccttcctggcctggagaaggccttttnnnnnnnnnnnnnnnnnnnnnnnnnnnnnnnnnnnnnnnntatcacagttttcacacagcccctgctgcattctctgtccatctgtctgtttctattaataaagatttgttgatctgttccnnnnnnnnnnnnnnnnnnnnnnnnnnnnnnnnnnnnnnnnnnnnnnnnnnnnnnnnnnnnnnnnnnnnnnnntatctttaactaaaaaaagaaatacaaanaaanannnnntcttggccgcccgcccccggcccccaaaaaatttttcaaaaccccttcctttggggggcccgggccccccaggggaaaggggaaatggggccctaagtgttgttcccnnnnnnnnnnnnnnnnnnnnnnnnnnnnnnnnnnnnnnnnnnnnnnnnnnnnnnnnnnnnnnnnnnccccgccgcgggggggaaaacccaaagagggggttttttgaaacacaaaaaccccccaaaggggggggagttttttcggagggggccttttataccgggggggacctcccttacaacacacgcggggggcgccctcccagagcgggggagagccctccatacatat

SEQ ID NO: 253945 - DNA, 376 bp, Homo Sapiens
  misc_feature (258)..(315): n is a, c, g, or t
atccccattctactcccctgctatgcaagtgcccctgtggcttgtccccaaccccctcagcaacaaagctcagctggggaacgagagtaatttgaagaatgcttgaagtcagcgtcttccattccagaaagacccccattcttcctttgggggtatgatgtggaagctggtttcagcccaggacccaccactgaggagaggatctagacaggtgggcctaattccaagggcccttcctggcctggagaaggccttttnnnnnnnnnnnnnnnnnnnnnnnnnnnnnnnnnnnnnnnnnnnnnnnnnnnnnnnnnngcccctgctgcattctctgtccatctgtctgtttctattaataaagatttgttgatctgtt

SEQ ID NO: 253946 - DNA, 387 bp, Homo Sapiens
acggatagtgtgcacggagtgggtgttgatggaggagcacgacgccagagtcccagccctggaaccgcgcagagtggagcaagcaccacctgtaatctactatgtccctgacttcatctccaaagaagaggaggagtatttgcttcgacagggtgttaatgccccaaagccaaagtggacccagctctctgggagaaaggtacagaactggcgtgggcttcctcatacccgagggatgggtcctgagaggctgcccacaaggctccagcgctacgtggacaaagagtccctcaaactctatggaggcctcccagataaccatgtcctcgtgaaccagaatctgcctggggagggcatcatgggccacacacactcggcccgtgtcca

SEQ ID NO: 253947 - DNA, 823 bp, Homo Sapiens
  misc_feature (626)..(663): n is a, c, g, or t
ggggcaggaacctgggaatccgaggggtcccggccctggcggtcacttgcccagcaggaggccggcgcgcagcacgcggggcacgcggcggatggtcagcgagacccgggtgccgcgcaccaggcaggctcccggccgcgccgacgggcaggctgccgcattgggcggcgaggaggcggcgtccagcgcgtctacgcgggcggcggcgatgccgtggagaagacgcgtgtaggcggggccgcggagcaccagcaggctgcgcggttccagcagtagcgaggtggtgggccggggcggaggccgaggctgttctgtagggtcatcgtcctctggccgccgcggctcgtagaagtccagcacggtgtgggagcccaggctgatggtgctgacagtcgggtagtacagtggtccgtcctcgtggggcatgatgccctccccaggcagatactggttcacgaggacatggttagctgggaggcctccaaagaggctgaggtttgacactttgtccacgtagcgccggagccatgggggcagccgctcaggaaccatccctcggggatgaggaagcccaccccagttctgtaactttctcccagagagccgggtccactttggctttgggnnnnnnnnnnnnnnnnnnnnnnnnnnnnnnnnnnnnnntttggagatgaagtcagggacatagtagattacaggtggtgcctgctccactctgaacggttccagggctgggactctggcgtcctgctcctccatcaacaccaactccttgcacccaatccgtccaccagcgtcccctccaatttccaaattcaacatc

SEQ ID NO: 253948 - DNA, 360 bp, Homo Sapiens
cataggcgtgataaggactgattaagaatatctatcacatacttagtgctcagcaaagattccaatctattctgtacacagtgccagattaatctgaagatcataacaattaactttgatcatatcattactctttcaaataattgctgtgattcctcataatgctcctaattaaataaaattacttcatgcaaatgttccttgcccattttatctctgcctacaaagatccagcccttcactaacctgaactccacatttcccaaacatgctgacttttcctccattaatataatgtcatatgctgaatatgttggccctctgtgtctcttcattgtgtgaaatatttcttctcgtgcc

SEQ ID NO: 253949 - DNA, 2212 bp, Homo Sapiens
ccgggatggggtcgctgcctgaggcgcaggcgccgtggactccacccgccccggggcctgggctcgctgtggactcgtcatggcgaccgagcagaggcctttccacctggtggtgttcggcgcgtctggcttcaccggccagttcgtgaccgaggaggtggcccgggagcaggtggacccggagcggagctcccgcctgccctgggccgtggcgggccgctcccgggagaagctgcagcgggtgctggagaaggcggccctgaagctgggaagaccaacactgtcatctgaagttggaatcatcatctgtgatattgctaatccagcctcgcttgatgaaatggctaaacaggcaacagttgtcctcaattgcgtaggaccatatcggttttatggagaacctgtaataaaagcatgtattgaaaatggagccagttgtatcgacatcagtggagaacctcagtttctggaactaatgcaactgaagtatcatgagaaagctgcagacaaaggggtttatatcattggaagcagcggctttgactccattccagcagatctgggagtaatatataccagaaataaaatgaatggtactttgactgctgtggaaagtttcctgactatacattcaggacctgaggggttgagcattcatgatggtacctggaagtcagcaatttatggttttggagatcagagtaatttgagaaaactaagaaatgtatcaaatctgaaacctgtcccgctcattggtccaaaattgaagagaaggtggccaatttcttattgtcgggaactcaaaggttattccattccttttatgggatctgatgtgtctgttgtaaggaggactcaacgttacttgtatgaaaatttagaggaatcaccagttcagtatgctgcgtatgtaactgtgggaggcatcacctctgttattaagctgatgtttgcaggacttttctttttgttctttgtgaggtttggaattggaaggcaacttctcataaaattcccatggttcttctcctttggctatttttcaaaacaaggcccaacacaaaaacagattgatgctgcctcattcacgctgacattctttggtcaaggatacagccaaggcactggtacagataagaacaaaccaaatatcaaaatttgtactcaggtgaaaggaccagaggctggctatgtggctacccccatagctatggttcaggcagccatgactcttctaagtgatgcttctcatctgcctaaggcgggcggggtcttcacacctggagcagctttttccaaaacaaagttgattgacagactcaacaaacacggtattgagtttagtgttattagcagctctgaagtctaaacactggaagaattaactgaagtcataacgtgcgtgaattaacagcttctctatttgatatttgaaattcttctgtaagcctgtctgagtgtatgtggaaacgattgtcaaatctaaaatatctatatattaaaaagtaggaaattgtcctagcttaccctaaatttccaaatctgagttgattttgtgattttattgcttataacagagaactcatatttgacatatttttttcattgatgtgttcctggtagattttcacgaatgagctggcaggtctaatgggggaggcggcgtcccagtctgtgttgcagcagcattctcatcgggggtgcgcacaccatcgttactgtcgggcagtaactgccgcttgccttgccgcagtaggagggaaatctcaccttccttccacatactgtcttgagcctttgctaaattaaactgcactttttgctatttttgcctagtttttcgccaatctacactgattttggactgttacctaagttgaaaaataaaaggttgtcaatcgaatggtggtttaatgtttggacctgccgatgtatttgtatagtggtagaaacatgctgcttaagtggcctaacctgtttcttgccaataagtaggcttatcattttatctttacgtaattctatatctgtgactaggtttttaaggatacagcttataagttgctatcaattttcactacctaagcagaatttttctctaatttactttttgtattttaactaggttttacatggaagccctaaaataaggcaaaagactttttcttttgtaataagcatataataaacacgtatatacatagcaaattga

SEQ ID NO: 253950 - DNA, 371 bp, Homo Sapiens
agaaaaaaccatgtagatgcttggtaagttccctcacattgatgttcctggaaactgctgttgtcgctccaaaacttgctgatttaatagctgttgttgatttaacacttgttctaaaagagtaggtcttgcaggacgatccccaaaagatcctgttctttgtttaacaatggagagtatgttatctgcactttcctcgagtttgacgtttcccgcgctgccagtcgaggcagtcccaccgcagttcagggcctggtcgctcttcttctatacttgtccttgtacatcttgttgcggtgtttcttgcacatccacggtttgcgctgcttggccacctggctcgtggtctcgtacagcctctcgtgcgaatt

SEQ ID NO: 253951 - DNA, 365 bp, Homo Sapiens
gagccctcctgctaggggataccttggccaaacaaccaagtctccagagcactagcaagttcagaggaaatggcgtacaggttgcacaagaaatagcaagaaatccagattgtattcaaagcggcagactaattctagtaaaatgtctccacccactgctgcccttcctgagcccattatctgccgagaatcaaagggcctggctataaatgtgggtgtccaatgtccttataagctccataagctgtatacatgaacaatacgattaactggtaagaaatgtggaggggtaggaagaccgcacatctctaaatcctggctcctccataacacaaagtgaaataaatgtataatgttaatctttc

SEQ ID NO: 253952 - DNA, 586 bp, Homo Sapiens
  misc_feature (502)..(502): n is a, c, g, or t
  misc_feature (527)..(527): n is a, c, g, or t
  misc_feature (534)..(534): n is a, c, g, or t
cctccatcttctcactccattctcccacagcagccagggcagccttcagcatgcaggtctgtcaggacattccctgcctgaggcattcggcgactcctaccagttgcaaggaatgaccccaaggccctgtcacaggcccctgaccatctcttcctctctcccacccctgtgtctcttaccacagcaacactgacccacctatcatttcccagactcaccgtcccgctcctgccccagggcccctgcatcaggccgtccttcctcctggacttcaccacctccatcccggtccacacagctaccttgaccgtccttcagaactctgatcccctgtcacttcctcgggcttccctgacttcctacaggccggatgttttgcacattctacactagtgatttgttcatacaccaatcttccccttgagctgagggcagaagctgcatctttcttggtttgtatccccagtaccgcccttgcccacacacagtagatgatcaatanatgttgaccagaaccgctctgctgngtgagtngggggttgggggtcgggccatcagctcaggtatgcttggagggagccagggg

SEQ ID NO: 253953 - DNA, 501 bp, Homo Sapiens
gaatacacagctttctgggccagaaattgagcttctgactcttgagccttatatgagtactgcgttggtcatatttattttgtgaaactactctgtgggctgaaagggagagactctccttggtttgcagagcctgactagacaggaattctggcaactgctccagcagaactatggcactgagctaggtttaaatgctgaggagatggaaaacttgtcactgtcgattgaggatgtgcagccaagaagtccaggaagaagcagcttggatgactctggggagagagatgaaaaattatccaagtcaatcagttttaccagtgaatcaattagtcgggtttcagaaacagagtcattcgatggaaattcatcaaaaggaggattacgcaaagaggagtcccaaaatgagaaacagaccaaaaagagtctcttaccaactttggaaaagaagttaactagagcgccatcgtcactggacttgaatatgtatctttctctggc

SEQ ID NO: 253954 - DNA, 600 bp, Homo Sapiens
tgcgtaatgtatagccttgagccagccgagcaagcctgccccgcctgggatctcacagatcaggcccccacctctgcccccacagccgcccagccgcctcccgcagaagaagcctgcgccgggggctgacaagtccaccccactgaccaacaaaggccaaccgagaggacctgtggatctctctgcaacggaagctctgggtcctctgtccaatgctatggtcctgcagccccctgcacccatgcctaggaagtcgcaggcaaccaagttgaagcctaagcgggtgaaagcgctctataactgtgtggctgacaaccccgatgagctcaccttctccgagggggatgtgatcatcgtggacggcgaggaggaccaggagtggtggattggccacattgatggagatcctggtcgcggcgcattcccggtgtcatatgtgcaccttatcgctgactgaattgctactgaacacaagcattaacaggtatgtgtctggttcgttattgcgaccctcttgccagataaccaggttcatgaactgtttgtatggcagcccatgttctctaatgccactgctctggtttattcatggcttgcttg

SEQ ID NO: 253955 - DNA, 367 bp, Homo Sapiens
aagcagactctgccggaagtatagaaagtgttgattctcctgatccagaggtttaagttctgaggctcctatcagtctatagagactggagctccctttgatgggacttgctttcttctacattgccttattgttattcacctgttataaagataagagtttgtctttcaaaccaggataaaatttcagaatgcaagaatccaaactgagacaatattacaaaatgaatttaactccccaaagctctccatctccaaccacaacccccataaacacaaacgatttattaaaaatatataatgaagcatttgtttagattttccagggtaagggaagtaattaattgtaaaagtgtttgctctcgtgc

SEQ ID NO: 253956 - DNA, 623 bp, Homo Sapiens
cccacctcaagttcaaagcacatgcttcaatgtactacccctacttgtgtgaaattatgcagtttgacctgatccctgagctccgagcagttctgcggaagttcttcctacggataggtgttgtgtataagatatggataccagaagagccatcacaggtaccagcagcactgtcaccagtgtggtagccctggctgaccaggccagtgctgcagctctgcagaatgttcagcatgccatttctgactggcacatctcgtgaagtttcatagaaacaaggagttggcatcttggatctcagaatggcctggaaacggatggcctctacgctgttccatcacagtctccaactaaggcttatggtatttcattaaactgttgcatacccagttagcacagtacgtggggagtctgcttcatttctatcattccatttttctgattaaactgtcaaatctgtcattgcatatgccatcgttttctagcacaatcccatgattggctataaacgttttgtaagaagtcactctccttgaaaatactgaacatcgctgtgtaggtctgtgattattagagaatatgttaataaaacttcttgtaacgccaaaaataatatccctccc

SEQ ID NO: 253957 - DNA, 420 bp, Homo Sapiens
cgtgaagttgctcgccgggtcgttgggccctgtcgacctgtaggcgggcgagcgagccagcggacaagactgcgggtgaggctgagctagcgagcggccggcagggggggcgcccgggctgcgagccgctgagcccagccgcgctgccgccgccggccgtcgtggggccggaatggcgcaaggccggagtggcgcgggcgctcggcggtgggctgccgggtagagtcctgtccccgcccctcgccttgcggcctgacgccggccgctgctgcccggggaccggagcggcgggccgcctttgcccaggacacacgctctggcgtttgttcctttgggcgtgacgccagcttccgggtacgcggctttcccgacgggtgctgatctccgagtcgctgttgtcacgcggactgctgtgctccc

SEQ ID NO: 253958 - DNA, 484 bp, Homo Sapiens
caatccatctccccctgaggcagacactggcttcttgcatcctatgagacaaagagaaagagagtaggcccattcttctgccttcccgcacctatgaagaaatacccctccgagatgtagagactaagaatccagggccagtcttggaacattgtctttcagggcagagacacactcatccaggacacagggagagacacagaggatcacaggtggccatacgcagggactcagagacttataggcagattcattcataggacaggaaggaactggaaaaggagggctagggccctcaacctaggatggcaccttgcgggaaggtcatcacaggaaggcttccaaaaaggaggaagggatgagcttcaagtatgaatagggtcatgaatgtcttgggtagaagttacacacataaaggtgaaaggtttgaggtaaatatgggaaactaatttgcccaagaatgaaatgtgaatgacgccaatta

SEQ ID NO: 253959 - DNA, 639 bp, Homo Sapiens
acttgctcacggtgcacccaacaagacctgcaggtgcatataagtttagtcccaactgcagggccagaccaaacacttcctgggaagtgtgtggagggctgtgctagaccttcctgagtttctggctaaatcatcagccctgtttggtgcagtctcatgtctctgtggttcccaagctgcatgatcagagccagtgagaagacaggatcagtgacccacagctttggggaaaaacagccccactgttaacttccctcctgcaaacctgggtccccaggccataaggtgggcacactggtgcttacagactgggtggagagccctaccttccaaggtcttgatcccagcctgcctataaggttgggattagcatgcaatccccctttcccaatcctgtctttttaaaatctcaagtttgcacttaaccttgacaacagcaccctctcctactccaggcctagaactcagaggccttagagaatggggtcccctgcactgaaggtccacgccttgctcccagttacatactggccaataggctgcgcctcaagaggtggagaagggagggagggaggaagaattatttagaacacaaggatggctcgagcacgttagaggcgtgagaggcacgttggtgag

SEQ ID NO: 253960 - DNA, 527 bp, Homo Sapiens
  misc_feature (17)..(17): n is a, c, g, or t
  misc_feature (43)..(43): n is a, c, g, or t
  misc_feature (65)..(65): n is a, c, g, or t
  misc_feature (78)..(78): n is a, c, g, or t
  misc_feature (93)..(93): n is a, c, g, or t
gtgacctgaaccctcantcgggggggaaacactaatccctcgnggttccctctcctccctcctangcggccaaatttnaaggacacccttaantggggtacttcgcactccacaaaacacacactatccatacccatgaagatactcattaaaaggatactgcaccgtatcctatggatgaagaaatgctgcagctccttgctttagaactgtctgcaccctaagcaattcaaggggcacagatgctggagcttcacacaaagtccttgtatctttaaactacctcacatcaaacagaggaaaggatgacaccccgacttccccaggaaggcagaatgtgttctcagaagcaaccaatctactccaaactcaacttcaaaaatgacaggagaaacattacattaaataagagcatagaaataacatttcactgtggaatgctcagtggttaaaagtgttacagtgtttcacgttttagcaaaccttactcttacaggccttctaattcgcttgatttctgtaaagtt

SEQ ID NO: 253961 - DNA, 408 bp, Homo Sapiens
  misc_feature (113)..(223): n is a, c, g, or t
cagtggtgcaatcacagctcactgcagccttgtcctcccaggctcaagctatccttgcacctcagcctcccaagtagttgggaccacaggcatgcaccactacgcatgactannnnnnnnnnnnnnnnnnnnnnnnnnnnnnnnnnnnnnnnnnnnnnnnnnnnnnnnnnnnnnnnnnnnnnnnnnnnnnnnnnnnnnnnnnnnnnnnnnnnnnnnnnnnnnnatgagccactgcacctgcccagctccccaactccctgccattttttaagagacagtttcgctccatcgcccaggcctgggatgcagtgatgtgatcatagctcactgtaacctcctctggggctcgcagttctcccaccagcctcctttgtattattttgtacagatggcgtcctgcttgttgcc

SEQ ID NO: 253962 - DNA, 1349 bp, Homo Sapiens
  misc_feature (152)..(258): n is a, c, g, or t
  misc_feature (1314)..(1314): n is a, c, g, or t
  misc_feature (1316)..(1316): n is a, c, g, or t
  misc_feature (1321)..(1321): n is a, c, g, or t
atgagccactgcacctgcccagctccccaactccctgccattttttaagagacagtttcgctccatcgcccaggcctgggatgcagtgatgtgatcatagctcactgtaacctcaaactctggggctcaagcagttctcccaccagcctccnnnnnnnnnnnnnnnnnnnnnnnnnnnnnnnnnnnnnnnnnnnnnnnnnnnnnnnnnnnnnnnnnnnnnnnnnnnnnnnnnnnnnnnnnnnnnnnnnnnnnnnnnnntgggcatgagctgctgtgcccagcctccatgttttaatatcaactctcactcctgaattcagttgctttgcccaagataggagttctctgatgcagaaattattgggctcttttagggtaagaagtttgtgtctttgtctggccacatcttgactaggtattgtctactctgaagacctttaatggcttccctctttcatctcctgagtatgtaacttgcaatgggcagctatccagtgacttgttctgagtaagtgtgttcattaatgtttatttagctctgaagcaagagtgatatactccaggacttagaatagtgcctaaagtgctgcagccaaagacagagcggaactatgaaaagtgggcttggagatggcaggagagcttgtcattgagcctggcaatttagcaaactgatgctgaggatgattgaggtgggtctacctcatctctgaaaattctggaaggaatggaggagtctcaacatgtgtttctgacacaagatccgtggtttgtactcaaagcccagaatccccaagtgcctgcttttgatgatgtctacagaaaatgctggctgagctgaacacatttgcccaattccaggtgtgcacagaaaaccgagaatattcaaaattccaaatttttttcttaggagcaagaagaaaatgtggccctaaagggggttagttgaggggtagggggtagtgaggatcttgatttggatctctttttatttaaatgtgaatttcaacttttgacaatcaaagaaaagacttttgttgaaatagctttactgtttctcaagtgttttggagaaaaaaatcaaccctgcaatcactttttggaattgtcttgatttttcggcagttcaagctatatcgaatatagttctgtgtagagaatgtcactgtagttttgagtgtatacatgtgtgggtgctgataattgtgtattttctttgggggtggaaaaggaaaacaattcaagctgagaaaagtattctcaaagatgcatttttataaattttattaaacaattttgtgataccaactctgncnaggancctaaagtttgtaacatcaaatatctgg

SEQ ID NO: 253963 - DNA, 373 bp, Homo Sapiens
agctccctgtcaagtcactcttctgagatgagagttcaataaaagtaaggtggaaggtaacagtaaaaatatactttcttcagttagatttaataagctgacactgtctccttagatacaatatacttccctattccctccatcattaaagaaaaattcctttacataaagatggttaacatttattaggcagttagaacccaaattgatttataaatatagttagcaattacattgtaaacttcagtgtcaaatcacactagtatatatttaaaataaaaatcaatttgggggaggtaatatatcataaaagaaatgctacacttggaatgggaagaaaacagttacagcacagattactactaactttctg

SEQ ID NO: 253964 - DNA, 599 bp, Homo Sapiens
  misc_feature (74)..(74): n is a, c, g, or t
  misc_feature (145)..(145): n is a, c, g, or t
aacaaacatcaaaaaaaaaatcagacaaaccaaaataggaacattctataaaaatctcagcaagcgctacccanaactatcaaagttctcaagaaaaaggaaaatcttagacagcctagaggaccctgaggagacatcatgacanaatgtaatgtagtgtaaagtagtagcttggcatggatcttggaacagaaaaaggtcatttggggaaaaccaatgaaatccaaatccaagtgtaactttagttaataagacaagaaaaatggacaagatacacaaaaaggtggacttcttggtgcatcaaatacacaaatgtaagaaaaacaaatagctactgaattgcaggaagttgaaggaaaaaacatctatgaaagggaaacttacctatgagaagaaactccagacttgcagctatttcagaggaatttcctgtcaatcactgggcatagatatctgctcagccttacctgggaatcagtcaatgcagtaaaagtacaaaatgctcagaggtgtaagttctccttcctccatgatccccacaagcatgggggggataacagtgtggtttctctgtgagtgtgtgatgtcttccatttatg

SEQ ID NO: 253965 - DNA, 754 bp, Homo Sapiens
agaaggcaagaagtgggtagagtaagaaagagaaaacagaagacctggcgtgcacagcgcctgagagaatcaaagcaaattctgtcttctagttctcccagaagaaaggaagatgttaggaaggttggaaaatgaacgtgtgttgtcagttgggaggcaaaggaattgacaaatgcttctagttagaatatcagctaggaaaaggagggatacagagcctgacctcatgctctgaaaaggcaaggaacccagaacttgcctcccttatccacttaagccccaaccttgatcatcaagggcagcgcatgggtgatcctgttcccatgaggattgtgtgtcgcacctgaacacaggacacagcgtgggggaaacaaccttgccttcctcggttctgctgccgccagtcgccctcctaggctacccgaaatgcctctccctcagtctcagctctgatccatgagccctgccaaaggcctgagactgcactgatctccaggaaaacagaagtcttcctttcccacactaactgaaaggtgacacaggaaccaactccttaactttccaaattactgagaactcagactgccaaataccgtacctcttggccagtggggcctgcttggtctttctataaagggaagggaggccaatgggagagtaatgcctgtcatttccaggggaagcagaaaaaggacagtaaacaactttactaccataggccccagcgcagagccgtagagggagaagtaccttc

SEQ ID NO: 253966 - DNA, 612 bp, Homo Sapiens
ggcacgagggcccagacctgggggcaggtaccggcccggatacggcactggctacttccagtacggtctcccagacctggtggccgacccctactacatccaggcgtccacgtacgtgcagaagatgtccatgtacaacctgagatgcgcggcggaggctgtctggccagtacagcatacagggcagatgtcagagattatgatcacagggtgctgctcagatttccccaaagagtgaggcacagttgtcatcaacattaccacagtatggatgagtttagccactatgacctgcttgatgccaacacccagaggagagtggctgaaggccacatagcaagtttctgtcttgaagacacatcctgtgactatggctaccacaggcgatttgcatgtactgcacacacacagggattgagtcctggctggtatgatacctatggtgcagacatagactgccagtggattgatattacagatgtgaaacctggaaactatatcctaaaggtcagtgtccccaacttcctgggttcttgatctgactataccaacacatggtgtgcgctgtgacattcgcttcacaagacatcatgcgtattgctcaagctgcct

SEQ ID NO: 253967 - DNA, 197 bp, Homo Sapiens
gagaaatgaaaagcaacccaaaagtacccaggaggcccatttacttactgatgacaactgtgccattcccaggaatatcttggtcggctgggtaagaaatctgatgtcccttggtttttcactctttggggaaatctgagcagcaccctgtgatcataatctctgacatctgccctgtatgctgtactgtgattttg

SEQ ID NO: 253968 - DNA, 478 bp, Homo Sapiens
  misc_feature (12)..(12): n is a, c, g, or t
  misc_feature (45)..(45): n is a, c, g, or t
cttcaagcgtcncctgaattgtgctaccatcagcgaacaaagtcngccgcttgaattggattttgaggttattttaaccatggaattatttttatagaaggggaaaatgtatgtgaaagtctctatttgtgtatttctctcctaaagttgtgtctctttgggaattggatttgatttttattatttaatacctcactttggcccgtcccccctcccaacacttctgtatcctcgccctgccgccccagcctggagctctgcgtggaagtgcgtgtttgtagcagctcgggcctcatctcagcgctcggatccctcctgctgccagaatccactggcctctgtctcattcttgggttttcctgctgtcttcgtttacgtctctgtccacatgtcagtgtattaaaaccccaatgggttccgtttctccttttcccctctggattttaaataaatatttaaaactgaggcaatgtttctt

SEQ ID NO: 253969 - DNA, 2087 bp, Homo Sapiens
  misc_feature (544)..(544): n is a, c, g, or t
  misc_feature (1070)..(1134): n is a, c, g, or t
  misc_feature (1227)..(1277): n is a, c, g, or t
  misc_feature (1543)..(1543): n is a, c, g, or t
  misc_feature (1597)..(1597): n is a, c, g, or t
  misc_feature (1814)..(1814): n is a, c, g, or t
  misc_feature (1990)..(1990): n is a, c, g, or t
cgggctgcaggattcggcacgaggtcagcctcaagtcttgccaaacctcaacctggactgccgactccctggcctgacgtctttccctgacctctatgccaacttcctggatcattttgaggctgtctcttttggggaccacctctttggggccctggtcctcctgcccctgcagcgtcggttcagtgtcaccttgcgccttgccctctttggggaacacgtgggagccttgcgagctctgagcctgcctctgacccagttgcctgtgtccctggagtgttacacagtgcctcctgaagacaacctggccctccttcagctctacttccggaccctggttactggtgcgctccgcccacgttggtgccccgtgctctatgctgtggctgtggctcatgtcaatagcttcatcttctctcaggacccacagagctcagatgaggtcaaagctgcccgcaggagtatgctgcagcttcccaattccacgctcccagagggctttgagctctattctcagttgccccctctgcgtcagcactacctncagagactgacttcaacagtgctccaaaatggggtatcagagacctaggatagttgatatagatggaaagatgggtacgttgtcctgtatccagcctttcaacagatgtctggccagacgaagaacattgtgtcctaatggtaggcaggagaccaaggagcagaaggcttgccttcctgggagcaggttgtttgagctgttttagagcagtgagccctaccattacatcctgatatctggggcttctgaaggtctgtgctgggagtgaagagtggcttagctatttacccgctctttggggacagggcaaactaaatgcatcccttcttacctaactcccaacccctgccctgggctgaggcatatgaatgctatagttgtgcattaaaataaatgttttttatctcctggaagccctatccccttcccctcccctgccgctgtgccggatcccccccgaccccaccttctaggaaacccgaatgtcgggtgtctcgtgctttgctatccctttttgccgcctttnnnnnnnnnnnnnnnnnnnnnnnnnnnnnnnnnnnnnnnnnnnnnnnnnnnnnnnnnnnnnnnnngccaagattgttgtgggccgccgtcccctgggggcagtggtgctttaggagcaaaggcgggaggccccttgtaccctttcgccttttggtttnnnnnnnnnnnnnnnnnnnnnnnnnnnnnnnnnnnnnnnnnnnnnnnnnnntgagaaagcagaccccccgcacggggtccgatttcgaagccgcttgccgccgtggccgagtattatcccgcactggcaccgccgggaaggtgtagcaggaacggcctgccgcccactataatgaatctcacgcggcgcccgcgctgagagcggcgccagtcaccgacgctcgtctcgcaccgcacagcctgcagattgttagctccccattggtagcgcaccgcgtcgaacgtgtgtgtccgcgcgcgctgaccatctacgtgtgntgcgcgaactagcaacgcccccgcgtctcttctgttttgtcggcacgcaagacntatacctacgggcggggcattgtaacggagatctgacgtgggcggaacggctacacgcggaattgtaggaggtggggtgtccaggtgcgcccgccggcggccttcccggcgcgggtcgtgagtgtgcaccatatatgtgttcttatgttccaccgccgccgccagtgtaacgccatgcgctgaaggtcccgcccggtgctgagtatttgtacccccncctccccacccatctgagcgtcggcggcgccgacgcgcgccccccgccgggccggtgtgataatgagattgggtgaaggacgccccccacggcgcgcatggttgaggcggcccagtgccaggaacggccgtctatggtgcggtgacccgcgtcactcgcggaggatgtgccgccgnctggactgacagtagacgcactggcggagatgtatgtaattgtttctgtcttgagtgttgctacagtctctcaatcgctcccgcccaccgagctttt

SEQ ID NO: 253970 - DNA, 731 bp, Homo Sapiens
gggtcataatccctaactccaatcactggcaactcctgagatcagaggccagcaacagcgtgggagtttggggagaggcattccataccagattctgtggcctgcaggtgacatgctgcctaagagaagcaggagtctgtgacagccaccccaacacgtgacgtcatggccagtagggaagatgagctgaggaactgtgtggtatgtggggaccaagccacaggctaccactttaatgcgctgacttgtgagggctgcaagggtttcttcaggagaacagtcagccagaggcgccactgcccagcctgcaggttgcagaagtgcttagatgctggcatgaggaaagacatgatactgtcggcagaagccctggcattgcggcgagcaaagcaggcccagcggcgggcacagcaaacacctgtgcaactgagtaaggagcaagaagagctgatccggacactcctgggggcccacacccgccacatgggcaccatgtttgaacagtttgtgcagtttaagcctccagctcatctggtcatccatcaccagcccttgcccaccctggcccctgtgctgcctctggtcacacactttgcagacatcaacactttcatggtactgcaagtcatcaagtttactaaggacctgcccgtcttccgttccctgcccattgaagaccagatctcccttctcaagggagcagctgtgggaatctgtcacatcgtactcaa

SEQ ID NO: 253971 - DNA, 610 bp, Homo Sapiens
  misc_feature (336)..(336): n is a, c, g, or t
  misc_feature (509)..(509): n is a, c, g, or t
actgcacaaactgttcaaacatggtgcccatgtggcgggtgtgggcccccaggagtgtccggatcagctcttcttgctccttactcagttgcacaggtgtttgctgtgcccgccgctgggcctgctttgctcgccgcaatgccagggcttctgccgacagtatcatgtctttcctcatgccagcatctaagcacttctgcaacctgcaggctgggcagtggcgcctctgagtcttgctgacttcacagcttccagcaaaggggcaggtgggaccaatgcttttgctgactgttctcctgaagaaacccttgcagccctcacaaagtcagcgcattnaaagtggtaacctgtggcttggtccccacatacccacacagttcctcagctcatcttccctactggccatgacgtcacgtgttggggtggctgtcacagactcctgcttctcttaggcagcatgtcacctgcaggccacagaatctggtatggaatgcctctccccaaactcnccacgctgttgctggttttcctctgatctcaggagttgccagtgattggagttagggattatgacccgtagtatctggaaaacaagagatgtctgttttat

SEQ ID NO: 253972 - DNA, 677 bp, Homo Sapiens
  misc_feature (50)..(50): n is a, c, g, or t
ggcacgagcactggctgaaggaagccaagaggatcactgctgctcctttnttctagaggaaatgtttgtctacgtggtaagatatgacctagcccttttaggtaagcgaactggtatgttagtaacgtgtacaaagtttaggttcagaccccgggagtcttgggcatgtgggtctcgggtcactggttttgactttagggctttgttacagatgtgtgaccaaggggaaaatgtgcatgacaacactagagctaggggcgaagccagatgactccatattttcctacttgtggcagcgactgcatccgacataaaggaacagttgtgctctgcccacaaacaggcgtccctttccctctggataacaacaaaagcaagccgggaggctggctgcctctcctcctgctgtctctgctggtggccacatgggtgctggtggcagggatctatctaatgtggaggcacgaaaggatcaagaagacttccttttctaccaccacactactgccccccattaaggttcttgtggtttacccatctgaaatatgtttccatcacacaatttgttacttcactgaatttcttcaaaaccattgcagaagtgaggtcatccttgaaagtggcagagtagcagagatgggtccagtgcagtggcttgccactcgtgcgatggtctt

SEQ ID NO: 253973 - DNA, 1052 bp, Homo Sapiens
  misc_feature (105)..(290): n is a, c, g, or t
  misc_feature (1008)..(1008): n is a, c, g, or t
ctctactgaaggctactcttcttatcaagtaacgtcttctccatgctcttgacccttgccccttcagacctatggatggtaataacctgcccacacctagtttannnnnnnnnnnnnnnnnnnnnnnnnnnnnnnnnnnnnnnnnnnnnnnnnnnnnnnnnnnnnnnnnnnnnnnnnnnnnnnnnnnnnnnnnnnnnnnnnnnnnnnnnnnnnnnnnnnnnnnnnnnnnnnnnnnnnnnnnnnnnnnnnnnnnnnnnnnnnnnnnnnnnnnnnnnnnnnnnnnnnnnnnntgtaagaaaatggatttgggtcaaacaagcatttgagtggcgcattaaagaattctcaaataaacccgatattttttgcccataaatagtagtactttacatcttaagatgcattttaaaaaacgaaaatttagataaaacaacaaatagcgtcagttttctacatggctaatatctgggcagaaatctaggaatggctaacatttgaaatgattatttcttaagatgcgatctgtgttctctaactccaattcttgggtatgagagagagaggagccatccattgttctttccacattttgatttccaactgagatcaaaacacattgatcaaagccaggaagccaagagccaaaggtgaaagaatccacaaactcagatacatgaggacatactgagtaagatggagaaaatgggttcctcttcctatataaaaagccagtctgacaatctaagagttgcactttacaaggaaatgagctcatacttcaacattataacacctgatagagtgttgatttattttaacccatagagatttaataggaaaatagtttaggacagctgtcaatacataccctctagcatgcctcagatcattttctctaaaggaaaatatatcttgggttcttagaagaaaattcaaaataaatttgtcaataaaaaaatcttctaaacacttccttttgtcatactcaacctaaaatattttatgggntctattttcatgagatatttaaattcaaatttttcttatttata

SEQ ID NO: 253974 - DNA, 1194 bp, Homo Sapiens
  misc_feature (408)..(417): n is a, c, g, or t
  misc_feature (425)..(425): n is a, c, g, or t
cagatttgtaactcaatagaaagacagcagtgataataactcacacatgagcagctcgcaaatttcaaagtctttggtcttcaagtcctatgtcacagcttcctcagtctgattccctccttctctgtagaattccgagaactagtttgggttcacttaatcatctccaatggagatggcccctttcctgccattcactcaaatctagaactcccaatatgtggctcacaaatacttcagtcatctacaaaagcatctggaaattagataattttagccagagtcagggacataaaacttctttaaagggatgcagtcaatcctggtattcaccacaaagaagatcctcatgtataaaaatgtggaatctgtgctgcttttaataatagaacctttaaggttcaaagnnnnnnnnnntgctttcntgaactacatcatttccagacacatcagccacacaaggagctgacaagacctgctgtttctattatagagaacgtgagactttaaaaccacatcaaaagaaaatggtgggagcttttctgctatgcagagaattccgcatagcactcctttgccaagactgggagacaaacatacccctccctcctgaactgaatcccaacaacctttccaaaggccactggacatgtctcttaaacgctgcatttcagctcttgatcattctgccctgaggatcccttctcttaaggttctttgttatggtctggggaaacactctgactttctatggtgttgacagcatctgagtccaatcttcttcttttcttcagttggttcaagtgggatttggattttatgtgcgctgcccattcgcgatccccaatgatgattcgatcacaggggtcacacaggtgataacttctcttgttctcagcttcattgtatggcatctttattggagtggctgtaggcttgtggccctggatgaaactttgcacgatttcaagagcaggttcaagaacagactcttcccacttcgagacatcagatacctctaagccatagacaggggggacaatgggaccaggtctgctcaaaaaacggtttttaacccatcggttttgtttccgggcatatctcttagttacttgtttcagagcctcaatacctttctttagaagctggttactagtctccagtgtgcattttccctcagtgatcaggtactcg

SEQ ID NO: 253975 - DNA, 1143 bp, Homo Sapiens
  misc_feature (248)..(292): n is a, c, g, or t
  misc_feature (592)..(617): n is a, c, g, or t
gagcggcaagagcttccagtactcgcacaacctgagccgccatgccgtggtgcacacccgcgagaagccgcacgcctgcaagtggtgcgagcgcaggttcacgcagtccggggacctgtacagacacattcgcaagttccactgtgagttggtgaactccttgtcggtcaaaagcgaagcactgagcttgcctactgtcagagactggaccttagaagatagctctcaagaactttggaaataatttnnnnnnnnnnnnnnnnnnnnnnnnnnnnnnnnnnnnnnnnnnnnngatctctatatagttgtggtacggtctaaaagcagtcttgtttcctggaaataaaaagttgggatattaactcgtttttgcactttagaatagcatgagaatctcactaatttagcattctgataaaagaaactctagagcaagtcagaatagagaggtgtttttcctttgaggggataggggaagtaagccaataagaaccttttaaacaaatcgtcctgtcacaaaatgctctcatatggcttaattttgtcaacactgcattgtcttttgagctcttttttcccccccaacaaagannnnnnnnnnnnnnnnnnnnnnnnnnaagtagaaattccctccagttttattagcctctttatatgtctcaaattgcatgaattttttctggctgttggaaacctgaatgctcttagacccaaatggaaaatttctgaaatgctggattatctatttttaaacaagcagttgacttaaaactttctgtggcaacttctggttttctgacagttcccagtgagagaaatgctgaaagtacactgggatcactgggacactgtcttatgaaggtttgcttgggatgaaaaaggatattgcagcttcagcagtgttgaactgtggtgtttatgtgaattactgctattgtatactgcaattgattacatgggctgggggggtgtcaaagaacttgacaggttgtgttgatgctcttaggtgagtcttgaaaagtaaatattaacgctacagaaatgcatgagtttcaatatattttttgtctttgtttgcattgtataactttaacgagtgagtttaaaattatttaatttccttagaaaaatagcaccatttgg

SEQ ID NO: 253976 - DNA, 1114 bp, Homo Sapiens
tcccataatgcttttaagtcgttggacctcatcttcctgtgctctgtaagattctagttcctgctgaactgattctgcaacttctggggatggacttcctttatgtttttgccaaaatttatcaaccggagttaaatcataagacttcttgttttttctctttggtctagcaccagctggagagttttccactcctgaagattcttccaaattaaccctgttaaaatggaaatccagtacatcgtgcaccaatgcttgatatgtccaagtatgatgtaaagggagttgccaaatctatgtttctgtcaacaaggactaataagggcctctggaagctgaattggccagctccaagtgtatcacctgtaaaaagactgtttcttgcatctcttagattttctcgaagtttcttgtctagtttcactgctaccatttctgctgctgttcctcttgaacatctgattataggaacagcacccagagtaacaaaaaagcagaagaggctgtcaactatagtgtccataacaggaacaactcccgagtatcaaaaatcagaacagtctggcaacgatatgaaacagtttccatatccggattacataatacaaacatatcatcttccaaagtaataaaattgagatattggtcaaaaaccttggctacttgtgttactgcactagctgctaacgctgcatttgcaatatcttccagtttacttcttgaaatagcagaaataaaatttaaataatatgattcatatagttgatttcgaagatcctggcacattctgtcaatattttcttcagttggcattacaaagtatactgcaggaacatctggaataggatctcgatcagagtgtaaaagcagatgcagagtgattcccatgtctcttagctccctcacagatagcagaggagagattatatcttggccaaatctgtcataaatgagtaccttccatactggttctcctgtgctgtttttaatatgaggcacattgaaattcaacatacgcttcaaagccactgtctgcctttcccgaatactggctgctgctgctgctgtcgctgccgccgccgccgccatcttggctcccacgagccactgcccc

SEQ ID NO: 253977 - DNA, 1628 bp, Homo Sapiens
  misc_feature (412)..(412): n is a, c, g, or t
tagtgactggagagcgcaggctcttacctagtatgcccccctccgtgaggtagagctctgtggaagaggtagcattttaggctgaatttctttgtttcccaaaaggaagttggttgctatctttatcctttttttaaattaaacttttatttcctccaaggcaattattctggatggagttccatacctagagctccctttcatattgtaaaaatagcacaactgatggcgtttcatggtgaagctgtgttggatcatcccagagaagctccgagacagggcaagtgaacaccagaccacaaaggacagctacagtgtcaccatctgtggaaactaggcttttcccccatgcacgccttttcctgattcttcctctgcatagagacatttggctactttttccatcactggnggctagaacacgaaaatgtgggcggtaaatgggagttctcatgagccaagatttgggcctgggaaaggaaggatgaagaggagcagcttggagcggggcatgaggttagactctcaaggccaggtgggcttgctgagggcagggatcctctgaggttgttgactcccagtggcaggtgaccccttatcaggacttgcctggtagaagtccctggactgagccagataactaaatcgggaccactggtgcttgtgttgccttttgtaccgggtaccctgtaccccttggttgctttttggtggagatatttatctccttgtaaaaagggcaggtctttccctaccccactcatgacggctctggctcagaggagggtacaagattgtagcaaaaaatttgagagctgggccaccctggggcctgccggaccaggggcatactggggccagtgtgcactctctgaagggacaactgtgatttattctggctaatcattgtcgtgtaggatcacaggctgattgctagcacatttgccagtttttcaaaagaaattagaacctatatttttaatcaaaagtcttttgatttgtaaatagtggcaaccaattcatatatgtcttcaatggtatagtgaaatctggtcagtaggctgcccctgctctctctgacgtagaacataccgattcaccctttgttttctgttcagagcagactacttcaaattaaggaaaagagtacaaaaccaacaacaaactctccatggcccttgaggttatcttcctcttccagtggcttccagtgggaatcagaacaggtcaggcagtctcctctttgccactaaatgctttgcccaaagaaagaccagatttcatttggctttgggatcaaagctggggctggagggtggaggtgtcaagccaggccaggcaaagggagatttgaagccagagcaggtgggcgcatctcccaggaaaccctgcatcattctttcctggtgattctttccttctttgttatggttcacatgagtctatggagtgctcattctacattctccgttcttatcttcatcctatgcaactttagaccgctgttttttaaaagtgatttgatttgggctgtaacctttttttattgttgttagctttgactttgaaatgtgtaataaaggattcaaggtgagcattagaagtttttttaaaaagtagtggtttaa

SEQ ID NO: 253978 - DNA, 1329 bp, Homo Sapiens
  misc_feature (134)..(184): n is a, c, g, or t
cagatctctgtgggtgtggagcttgttggggggatgtctaggaagcttcagcttatccacattcccaagtttaggtgcactgagccatatagcccagtgtatgcatgtgtgggtgtgttcatgcacacacacannnnnnnnnnnnnnnnnnnnnnnnnnnnnnnnnnnnnnnnnnnnnnnnnnnaggtcacttgtacacttggtttcctagtagaagctcacttgccacctctcagaggggtcccggattgcatccatcacaatcccaaaactagagttggggggaactggagggagcaaaacactgatttgatactagtcagtttgcttgaaactagttcacctaaagctagatctcttaaaaccaatttactgaaaacttgtttgcttaaagttaatgacttaatgactaatttgccaaaagctcaattcctattttggtgtgtttatatccatttaggtgtcctattcttttttgtcatgctttggatatttcaaggatttatatctattcatccaagagtacttctgagctattatcagcaacataaatttatcaaatttgcagcactttgtaaatgatgagattgcttcctacctttatggatgtctttttctatgttatctaccattcaaaaacttttttaaaaagtttaaagtttctagcaataaatacaattggtacagacattttgtgtatcattatttttgtttcttaatacaatattactttacaaattaaatgccttgaaaaatataatgggagttcaatgtgattttgatgctttgggtctaacttctacattcctactgttaaaaaggccagtatatcttaaacaaatgaataggcatgaggcatattcagttgacttacaatgaaaagttatacagacaacagtaataactaaaagggtgaatctgctaaatccttttgaaatgctgcagatttgataaatatttattttagactaattggttttaggtgaattggttttaggcaaattaatttagtaatctttgatctttagtcttcattttctgtcactcagtgagtttcttactggaaatgatgactcctgacaacagaatttccacatttgggggctattctaaggtgactatgccagccaacctgtgaaatacataaaagagatctctgagtgagagggaaagaggtcagatttatacaactgagcgccagaggggaaaatgcaccttgttggagtgagaaatgttctgaaactgaattacttcttgtacagctgagatagcttcttctgaactattattaaataagtgaatacaaaggccctatgatgggaaatccag

SEQ ID NO: 253979 - DNA, 1143 bp, Homo Sapiens
  misc_feature (931)..(955): n is a, c, g, or t
  misc_feature (994)..(994): n is a, c, g, or t
gagaaacttacacatgtccaaaaatgattgagatggagcaggcggaggcccagcttgctgagttagacctgctagccagtatgttccctggtgagaatgagctcatagtgaatgaccagctggctgtagcagaactgaaagattgtattgaaaagaagacaatggaggggcgatcttcaaaagtctactttactatcaatatgaacctggatgtatctgacgaaaaaatggcgatgttttctctggcctgtattcttccctttaaatacccggcagttctgcctgaaattactgtcagatcagtattattgagtagatcccagcagactcagctgaacacagatctgactgcattcctgcaaaaacattgtcatggagatgtttgtatactgaatgccacagagtgggttagagaacacgcctctggctatgtcagcagagatacttcatcttcacccaccacaggaagcacagtccagtcagttgacctcatcttcacgagactctggatctacagccatcatatctataacaaatgcgaaagaatattctagagtgggcaaaggagctttccctgtctgggtttagcatgcctggaaaacctggtgttgtttgtgtggaaggcccacaaagtgcctgtgaagaattctggtcaagactcagaaaattaaactggaagagaattttaattcgccatcgagaagacattccttttgatggtacaaatgatgaaacggaaagacaaaggaaattttccatttttgaagaaaaagtgttcagtgttaatggagccaggggaaaccacatggactttggtcagctctatcagttcttaaacaccaaaggatgtggggatgttttccagatgttctttggtgtagaaggacaatgacatcaagagtagttgaaagtatcttgccactgttggccnnnnnnnnnnnnnnnnnnnnnnnnncttgaaagattaagtaattttattttagttccattctanaatgttggggagtggggcacaagaaaaaatagtatagctgaaatgcatctgttaaaaatgtcatgattgaaagcagaactgagtttcaaattacaaccttaaaattgttgttagatatttcttcacatatcagctgcccattttgaaaa

SEQ ID NO: 253980 - DNA, 1675 bp, Homo Sapiens
  misc_feature (19)..(19): n is a, c, g, or t
  misc_feature (46)..(46): n is a, c, g, or t
  misc_feature (710)..(725): n is a, c, g, or t
taccccataccccttcctncaacctggggacccccaggcaacccanagactgtcccactcaggggagctgaatccccaggtcagccctgcccaatgtcccttaggaaactgccccaggcaaggcccctggttttgtatacttgttcctgccacccagcagtagatgagtgtttcaggtgaagaccaggatagattttctaagtgtgaatccccgcttcacatatggaaccccttatgctgaacttgaaaagcaccaagacttcctgtagacaagaaagtgcttaggtagggacagcccctgggcatcccacccaatgtagctggcaccccactatggcaaaggtgccttgataactgagccctgtatccctcccatgcccagccagattctcatgggaagccctctcccttcttttctgcctaacaccatctcatcgtttctggcctcactgtggacaatccacacacattcttctttcctctcctggcggggcacagagccacccccttgccttttcttttcttgaaggttctagttcagctcctgattcatcagacccttctagccccctgcatctagcagtgaagcatgaagcctggtggggatgtggtactcccatctggtgtggccaccagctctgccaatgttcctgtagccttggaaaacttgctctctcggttcttttgggtgctgtgtactccccagcttnnnnnnnnnnnnnnnnattttgcacatgggtttagtgaaaggatggcatttggttgacccatatagaaacccagaatgaggtctcagggccaggaggcctggtatttgtaggccagggaaggggaagaggcaagtggtatggggtatcaccagccagccctctctgatttggcctctactccccataagtcacagtaccataagcaggcttctggcctcagcaatttggtctttgtgcccaagtttattgtgagaatttcctgaaaactctataaaaggtctcttcctactgtaggcctctaatgtttctcccctttttgcttcagtccactcttcagtcttgtaggcctagttttcaaacctgcacatgtgtcctacctggccacaggcatgcaggcctcaggcagctgggccagtttgggagcctcgggtgatgtctgcacgatctggggctgcctctgcacccctgctgtgggcttcagggttggagaagggctgggaccaaccgggtgagatccacaagtctctggatgtggctgaaggcaaatacacaattgaagtactttctgttttgaagtgctttcccttttgaatctggtttgaaacatgcagcttctgtctctagcccaaggaaagaccaaaacatagggaaataaaagcatttatctttgtcttggaagtaattgttgaagttgtgcagttgatcagtgcacagttagatgcaatgtttatagaaattgattgttaaaccaaatttacactggcatgtgtggtgtagtttctaaaaggcacttcacatttgaaatttttcttaccttagaaagtttctagtgatctaaatgtctagttttgtattcttttgtgtgtgttcactgtttctcagtattaccacttgaataattctctgtacaggggggtttgtgctatacactgggatgtctaattgcagcaataaagcctttcttt

SEQ ID NO: 253981 - DNA, 365 bp, Homo Sapiens
gcaggcggaggtcgaggtactcctcagagacggccagcaggaccgtccagcgcctccaccagctgcttgaaggtaggcctctggaagggcgctgcgtgccagcactcacgcatcagcccgtacagctctgggggacagtgtgggggtcggtccatccgatgtccctcccgcagcagcgagaacagctcctccaccgggatgccaggatacggggagcccccgagggtgaagatctcccatagcaggatcccaaaagaccacacgtcactctggtgtgtgtacacccggtccttatagtagtcaatgtggtggacgccgcgggccagcccaaagtcagcaatcttcatcacagtgtcctcagtcac

SEQ ID NO: 253982 - DNA, 941 bp, Homo Sapiens
  misc_feature (135)..(135): n is a, c, g, or t
  misc_feature (230)..(230): n is a, c, g, or t
  misc_feature (929)..(929): n is a, c, g, or t
agagacggccagcaggaccttgtccagcgcctccaccagctgcttgaaggtaggccatctgggagggcgctgcgtgccagcactccacgcatcagcacgtacagctctggggggcagtgtgggggtaggtccatnccgatgtccctcccgcagcagcgagaacagctcctccaccgggatgccaggatacggggagccccagagggtgaagatctaccatagcaggatcnccaaaagaccacacgtcactcctggtgtgtgtacacccggtcaaacaaggcctcgggcgccatccacttcacaggcaggcggccgttgctggttttcttatagtagtcaatgtggtggacgccgcgggccagcccaaagtcagcaatcttcatcacattgtcctcagtcaccagcacattgcgggcagccaggtcccggtggatacacttccgggactccagatactgcatgcctcgggccacctggtaggcgcaggagaccaggactgggaaggagagcggcccctcactgctccgaggaccgtcggggctgaggtcggggcctggggggcgccgggcccgcaggaactcccgcaggtttcccttggcggcgcactccacgatcacgtacaggggcccttcctgggtgcagacaccaagcaggttgatgatgttcttgtgtcggccgatcagcttcatcacctccatctccgagaccaggtcggccaggtccttgtcagaggcgttgtctttgagcatcttgacggccacagtgctggcttggtcaggccgggcagggtccatgccaaaggcctctgcacgtactacctggccaaagcagccctcgcctaggggcttcccaagcaccagcccctcgtgccgaattcgccacccaggcctcggtgttgggggttgggatagagtggggtggggaatagncgtaaagaaacc

SEQ ID NO: 253983 - DNA, 1610 bp, Homo Sapiens
gtcaagttccgctgtccagctgcaggcaaccccacgcccaccatccgctggcttaaggatggacaggcctttcatggggagaaccgcattggaggcattcggctgcgccatcagcactggagtctcgtgatggagagcgtggtgccctcggaccgcggcacatacacctgcctggtagagaacgctgtgggcagcatccgttataactacctgctagacgtgctggagcggtccccgcaccggcccatcctgcaggccgggctcccggccaacaccacagccgtggtgggcagcgacgtggagctgctgtgcaaggtgtacagcgatgcccagccccacatccagtggctgaagcacatcgtcatcaacggcagcagcttcggagccgacggtttcccctatgtgcaagtcctaaagactgcagacatcaatagctcagaggtggaggtcctgtacctgcggaacgtgtcagccgaggacgcaggcgagtacacctgcctcgcaggcaattccatcggcctctcctaccagtctgcctggctcacggtgctgccagaggaggaccccacatggaccgcagcagcgcccgaggccaggtatacggacatcatcctgtacgcgtcgggctccctggccttggctgtgctcctgctgctggccaggctgtatcgagggcaggcgctccacggccggcacccccgcccgcccgccactgtgcagaagctctcccgcttccctctggcccgacagttttccctggagtcaggctcttccggcaagtcaagctcatccctggtacgaggcgtgcgtctctcctccagcggccccgccttgctcgccggcctcgtgagtctagatctacctctcgacccactatgggagttcccccgggacaggctggtgcttgggaagcccctaggcgagggctgctttggccaggtagtacgtgcagaggcctttggcatggaccctgcccggcctgaccaagccagcactgtggccgtcaagatgctcaaagacaacgcctctgacaaggacctggccgacctggtctcggagatggaggtgatgaagctgatcggccgacacaagaacatcatcaacctgcttggtgtctgcacccaggaagggcccctgtacgtgatcgtggagtgcgcccgccaggggaaacctgcgggagttcctgcggggcccgggcgccccccaaggccccgacctcagccccgactggtcctcgtgagcacgtgaggggccgctctccttcccagtcctggtctcctgcgcctaccaggtggccctgaggcatgcagtatctggagtcccggaagtgtatccaccgggacctggctgcccgcattgtgctggtgactgaggacaatgtgatgaagattgctgactttgggctggcccgcggcgtccaacacattgactactataagaaaaccagtcaaccggccgtctgcctgtgaagtggcatggccgcccgaaggccttgttttgaccagggtgtacaccacaccagaagtgacgtgttggtctatagggaatcctgctaatgggagatcttcaacactacggggagctcccacgtcattcttgggccttcccga

SEQ ID NO: 253984 - DNA, 633 bp, Homo Sapiens
  misc_feature (18)..(18): n is a, c, g, or t
  misc_feature (68)..(68): n is a, c, g, or t
gtttttgaggagtacttngacttccgcctgaacttcggaccctattccccctctggtggggacgccangcagcacctgctccttccaagcgattctgtcttcagccacgaccccctgccattgggatccagctccttccccttcgggtctggggtgcagacatgagcaaggctcaaggctgtgcaggcacataggctggtggccttgggccttggggctcagccacagcctgacacagtgctcgaccttgatagcatggggcccctggcccagagttgctgtgccgtgtccaagggccgtgcccttgcccttggagctgccgtgcctgtgtcctgatggcccaaatgtcagggttctgctcggcttcttggaccttggcgcttagtccccatcccgggtttggctgagcctggctggagagctgctatgctaaacctcctgcctcccaataccagcaggaggttctgggcctctgaaccccctttccccacacctccccctgctgctgctgccccagcgtcttgacgggagcattggcccctgagcccagagaagctggaagcctgccgaaaacaggagcaaatggcgttttataaattatttttttgaaataaagctctgtgtgcctgggtc

SEQ ID NO: 253985 - DNA, 410 bp, Homo Sapiens
gatgtacaagttggggttatctgttatgtagaagtaacaggtcatcgctggaacatggactaagttagtgatacctggatgaaacaggcagaaagatcacacatttacttaaggcttgttaggctgttgggcctcagtctaactccagagtccatttcaccaggccctttcctcagggcctttgacattgggagggacagaaagatgacataggatgaactcatgaaagtgaagtaggaagggaagaaatcacagaaagagaaacaggttgtatatggctctggaatgaataattttttcccccaaagtgggacttcagaattctaacaataattccaaatagaagactccacaatattcagaacacagaaaaatcatttaaataaaggtagacccacctcgtgccgaaa

SEQ ID NO: 253986 - DNA, 628 bp, Homo Sapiens
gggatatcccaaagggacaattcgttcattcataaggatatattcacatgtatgttcactgcagcactcttcgccatagcaaatacttgaaatcaacctaaatgcccatcattggtagaaaataaaatatggtacatacaccatggagtactatgcagccataaaaaagaatgagatcatgtcctttgcaggaacatggatggagctggaggctattatccttaacaaactaatgaaggaacagaaaactagataccacatgtgctcacttacaagtgtgagctaaatgatgagaacgcatggacacatagaggggaacaagagacactggggcctattggagggtagagaaagaggatcaggaagaataacgaatgggtactgggcttaagagtgtgtaatgaaataatctgtacaacaaaccccacaacacaagacctacataagaaacttgcacatgtacttctgaacttaaaagttaaaaagttaaagaagccctaatcccccatgtgatggtattaggaggtgaggctttggggaagtaattaggtttagcgagattatgaggatggagcccttggtgggattagtgcccttattaaaagaggaagggataccagctcgtgcc

SEQ ID NO: 253987 - DNA, 910 bp, Homo Sapiens
tcttgaagaaatgattgctactttacagcatttcatggatgatattaattacataaatgttggggagattgcatcttttatttctagtactgattacctcagtactttgctactagataggatagcctcagtggctgttcagcagattgaaaagatccatccttttacaatccctgctattattcgtccattcagcgtattgaactatgatccacctcaaagggatgaatttttgggaacttgcgtgcaacatcttaattcttacttaggtatattggatccttttatattagtgtttcttggtttctctttggccacacttgaatattttccagaagatctgctaaaggcaatttttaacatcaaattcttagctagattggattctcaacttgaaattttatctccatctcgaagtgcaagagtccagtttcatcttatggagttaaatagatcagtctgcttggaatgccctgagtttcagattccatggtttcatgaccgcttctgtcaacaatataataaaggtattggtggcatggatggaacacaacagcagatttttaaaatgttagcagaggtactaggaggaatcaattgtgtaaaagcctcggttcttacgccttattaccacaaagtagattttgagtgtatcttggataaaacgaaaaaaacctcttccgtatggaagccataatatagcattgggacaactaccagaaatgccctgggaatcaaatatcgaaatagttggatcaaggctgcaccaggggctgaaaggattgcttggaaattcttggattcaaaaggcactttgtagaaatatccctcacattaaagggaaatctgctatgaaacaacgacattggcaaattccggggaatcggtaattccgatttccaattgaatg

SEQ ID NO: 253988 - DNA, 1013 bp, Homo Sapiens
gcaggcggtacggtccggaatttccgggatatcgtcgacccacgcgtccgaccatttcagctgggaaattactgcaatttttatgtaatgcacagagaagtagagtccttagaaaaaaatatggccattcttgatccaccagatgctgaccacttatacagtgcaaaggtaatgctgatggctagccctagtatggaagatttatatcataagtcatgtgctcttgctgaggacccacaagaacttcgagatggattccaacatcctgctagacttgttaagtttttagtgggcatgaaaggcaaggatgaagctatggccattggaggccactggtctccttcgttggatggaccagacccagaaaaagatccctctgtgttgattaagactgctattcgctgttgtaaggctctgacaggcattgatctaagtgtgtgcacacaatggtaccgttttgcagagattcgctaccatcgccctgaggagacccacaaggggcgtaccagttccagctcatgtggagacagtgggtttatttttcccggatgtttggcattgcccttcccacccgctcagagtgggaaaaaccctctccccgaggatacaagcagcagctggtcgagaagcttcaggggtgaacgcaaggaggctgatggagaacaggatgaagaagagaaggatgatggtgaagctaaagaaatttctaaactaacccatttggtcctaaccttgattcccaagaccactgaaggttaatgaccttccgaaaagaatttgaaaagtccagctctttagttccaaggattaaatcccattatagccgttgtgaaacagtttagtgtgggcaccaacaacacgcaggggctgaatctcgcaacaaggtgggggtgaatccggaaaagagagaaagagggtgagataaaaccggcgcaaaaattttcggagcgccaaatcacatagggaagcaaagacgtttttgcacacagaaacgctggacacaatgtttttaa

SEQ ID NO: 253989 - DNA, 942 bp, Homo Sapiens
gcaggcggtacggtccggaatttccgggatatcgtcgacccacgcgtccgagcagaggcagtggccacgttcagggaggggccggctggcctggaggctcagcccaccctccagcttttcctcagggtgtcctgaggtccaagattctggagcaatctgacccttctccaaaggctctgttatcagctgggcagtgccagccaatccctggccatttggccccaggggacgtgggccctgcaggctgcaggagggcactggagctgggaggtctcgtcccagccctccccatctcggggctgctgtgtggacggcgctgcctcaggcactctcctgtctgaacctgcccttactgtgtttaacctgttgctccaggatgcattctgataggagggggcggcagggctgggccttgtgacaatctgcctttcaccacatggccttgcctcggtggccctgactgtcagggagggccagggaggcagagcgggagggagtctcaggaggaggctgccctgaggggctggggagggggtacctcatgaggaccagggtggagctgagaagaggaggaggtgggggctggaggtgctggtagctgaggggacgggcaagtgagaggggagggagggaagtcctgggaggatcctgagctgctgttgcagtctaacccactaatcagttcttagattcaggggaagggcaggcaccaacaactcagaatgggggctttcggggagggcgcctagtccccccagctctaagcagccaggagggacctgcatctaagcatctgggttgccatggcaatggcatgccccccagctactgtatgcccccgacccccgcagaggcagaatgaacccatagggagctgatcgtaatgtttatcatgttacttccccacccctacattttttgaaataaaataaggaattttaa

SEQ ID NO: 253990 - DNA, 336 bp, Homo Sapiens
aaaacaaagcgggtgtcccacccccagaggctaatccagtaggtctggggtagaacttgaaaccttgcaccaacaagctctcaggcgatactgatactctggtcagcagatcacacagtaagacccataaactggactaggcttcactaagatcaaaactcaccccagaaaaaaaatggatggaagaaccaatggtgggcaaaccaatggtgggcaaagaaatttgtctacatttggtaaaattaaatcagtatgcacagtagggagaaaaaagataaaaattccacccaacaatcacgtggcaaatgagagtggaaagaatggcattcaagttcc

SEQ ID NO: 253991 - DNA, 622 bp, Homo Sapiens
  misc_feature (529)..(529): n is a, c, g, or t
ctcagcacagccccacctccacttgcccttcctacccaccccccaatctcatgtcccagcttggggtgctgagtctgctcttcggcctgggtgggatacacagaatgcctagtttcatggatgccagctggagagcacggcacctggcagacacttactgggcagggggggtcccaagagcagccatggggtgagccccactcccgctgacaccagagacaggggagacatgtgctgcggtctgggaaatagctacccccagccaaatcatgaaagagccattaaacaccgcactatacacatacttaacttaaaccaatcgggcgctcagcgagaagtgcgcagcagtgtggggagctggagctggggtggctgtcctgcaccagcccccacgaccctcagaccacaggcactgccaagagggaacatgaacctagccggcctctaagtgcaacggctgcccctgacaggtggtgacagatattctcaagagtgactctgaccaactgtgatttccaccttacatgtntgtctttggatcctttccctgaatgatatgagattgtgccgggaactctaaccctctgtgtgctgaccttcctctgcaccttcctttccccgg

SEQ ID NO: 253992 - DNA, 2594 bp, Homo Sapiens
  misc_feature (1461)..(1531): n is a, c, g, or t
  misc_feature (1974)..(1998): n is a, c, g, or t
  misc_feature (2069)..(2171): n is a, c, g, or t
  misc_feature (2178)..(2192): n is a, c, g, or t
  misc_feature (2261)..(2412): n is a, c, g, or t
  misc_feature (2426)..(2439): n is a, c, g, or t
  misc_feature (2462)..(2471): n is a, c, g, or t
  misc_feature (2522)..(2522): n is a, c, g, or t
  misc_feature (2526)..(2534): n is a, c, g, or t
tccgggcccctggccccgcggagcgatgctgctgctggctgccgccttcctcgtggccttcgtgctgctgctgtacatggtgtctccgctcatcagccccaagcccctcgccctgcccggggcgcatgtggtggttacaggaggttccagtggcatcgggaagtgcattgctatcgagtgctataaacaaggagcttttataactctggttgcacgaaatgaggataagctgctgcaggcaaagaaagaaattgaaatgcactctattaatgacaaacaggtggtgctttgcatatcagttgatgtatctcaagactataaccaagtagagaatgtcataaaacaagcacaggagaaactgggtccagtggacatgctggtaaattgtgcaggaatggcagtgtcaggaaaatttgaagatcttgaagttagtacctttgaaaggttaatgagcatcaattacctgggcagcgtgtaccccagccgggccgtgatcaccaccatgaaggagcgccgggtgggcaggatcgtgtttgtgtcctcccaggcaggacagttgggattattcggtttcacagcctactctgcatccaagtttgccataaggggattggcagaagctttgcagatggaggtgaagccatataatgtctacatcacagttgcttacccaccagacacagacacacctggctttgccgaagaaaacagaacaaagcctttggagactcgacttatttcagagaccacatctgtgtgcaaaccagaacaggtggccaaacaaattgttaaagatgccatacaaggaaatttcaacagttcccttggctcagatgggtacatgctctcggccctgacctgtgggatggctccagtaacttctattactgaggggctccagcaggtggtcaccatgggccttttccgcactattgctttgttttaccttggaagttttgacagcatagttcgtcgctgcatgatgcagagagaaaaatctgaaaatgcagacaaaactgcctaaccttcttaccccttggaagaagactgtttccaaataatttgaacagcttgctgctaaatgggacccaatttttggcctatagacacttatgtattgttttcgaatacgtcagattggaccagtgctcttcaggaatgtggctgcaagcaaggggctagaagttcacctcctgacagtattattaatactatgcaaatatggaataggagaccatttgattttctaggctttgtggtagagaggtgaaggtatgagaattaatagcgtgtgaacaaagtaaagaacaggattccagaatgatcattaaatttgtttctatttattcttttttgcccccctagagattaagtccagaaatgtactttctggcacataaagaaatcttgaggactttgtttaaaccttccataaaaaaacaattttcggtttctcgggtnnnnnnnnnnnnnnnnnnnnnnnnnnnnnnnnnnnnnnnnnnnnnnnnnnnnnnnnnnnnnnnnnnnnnnnttctttctttgtgtattttattcaagatgagttggacccattgccagtgagtctgaatgtcactgacagccctgtgttgtgctcaggactcactctgctgctggtggaaactcatggcttctctctctctttgatcccataaagctacgagggggacgggagagggcagtgcaatgggaagtaaagagatattttccagtaggaaaagcaatgctttcttgtctttagactcaaatgcttagggaacgtttcatttctcattcatggggaaaggcagcctccttaaatgttttctgaagagcggtaaaatctagaagcttaagaatttacagttccttcaataaccatgatgacctgaagttcacctatcccattttagcatctacttgtttttcccatctcttcctttccaattttgcttatactgctgtaatatttttgtnnnnnnnnnnnnnnnnnnnnnnnnngaccagctaaaattttcgacttgactttttaacttaactcatgaattaattaaagcaaatgaaaaaattannnnnnnnnnnnnnnnnnnnnnnnnnnnnnnnnnnnnnnnnnnnnnnnnnnnnnnnnnnnnnnnnnnnnnnnnnnnnnnnnnnnnnnnnnnnnnnnnnnnnnntttgggnnnnnnnnnnnnnnnaaaaaattttttaaaaactttttttggggcgcgggcccccaaaggaaaagaaacggggccaaagttttnnnnnnnnnnnnnnnnnnnnnnnnnnnnnnnnnnnnnnnnnnnnnnnnnnnnnnnnnnnnnnnnnnnnnnnnnnnnnnnnnnnnnnnnnnnnnnnnnnnnnnnnnnnnnnnnnnnnnnnnnnnnnnnnnnnnnnnnnnnnnnnnnnnnnnnnaaataaaaaaatannnnnnnnnnnnnnggggaatttttattagaaagaannnnnnnnnnaaaattcctaaaaaccccttttccccccccaatggggaaaaccccctccanaaannnnnnnnntaaaaacacccgaaataccccccccggggggaacaaaaccccttttggcccccttggtgg

SEQ ID NO: 253993 - DNA, 557 bp, Homo Sapiens
  misc_feature (14)..(14): n is a, c, g, or t
  misc_feature (29)..(29): n is a, c, g, or t
  misc_feature (48)..(48): n is a, c, g, or t
  misc_feature (58)..(58): n is a, c, g, or t
  misc_feature (63)..(63): n is a, c, g, or t
  misc_feature (73)..(73): n is a, c, g, or t
aaaaggtacatttncgggaccaaacctcnagggggggccaaaaaaggnaataaatggnaaacnaaatttaaangaatcattccgggaaatcccggttcctttaacctttggttcaacaggcctaattaaattcctcaatacccttcaaccctcctcctacccacaaagccctagaaaatcaaaatgggtctccctattcccatatttgccatagtattaaataatactgtcaggaggtgaaacttcctagcccccttgcttgcagcccacattccctgaagagcactggtcccaatctgacgtattcgaaaacaatacataagtgtctataggccaaaaattgggtcccatttagcagcaagctgttcaaattatttggaaacagtcttcttccaaggggtaagaagattaggcagttttgtctgcattttcagatttttctctctgcatcatgcagcgacgaactatgctgtcaaaacttccaaggtaaaacaaagcaatagtgcggaaaaggcccatggtgaccacctgctggagcccctcagtaatagaagtta

SEQ ID NO: 253994 - DNA, 677 bp, Homo Sapiens
  misc_feature (130)..(130): n is a, c, g, or t
agcaacgtgggtccccctccaacctctcctcctcttgggatctggctactgtgttccacttgcttcccagcagcaaggaaacacagggttctgggtaggcagaaagaagggtatccaagaaaggattccntgaccttcagactcttagactctacatcaagaatgttgccttcattcctgcatagataagcctttgaactgagctccaggccagagccctgataaggaggggaggatcccatagtacaggaggacttcttcacaggtcccttctgccccaaccctccatctgcctggactgcacccctctgccctagccacttagaaagccccaagccaagctccgtggcggctcacatgccacctgctccttgtagcccctaatagacacagactctgtctatgaggaaggcctggaatgcaagttgcccaggttgaaagccttgctctgacccttactactatagcaggttactcagcctctgtgggtctcagtttgctcatctgtgtaatgggattaatagtacggttctgggggcaatcatcagcagtgcctggcagacagccaagactgacataggagtggctggcggcagtcatggtggggtactggaatccgaggacccagttgctattctaaggacagtcacgtgtggggacagagaggctgagctcgt

SEQ ID NO: 253995 - DNA, 348 bp, Homo Sapiens
gtttctgaatatatgctggaactgcaaagagaaatacagatgctctttaattcatgatgaggttatgtctcaataaacccacctggttaaaatatgtcagaaatgagtttaattcacctaacctactgaacatcgtagcttagcctagcctatcttaaatgtgctcacaacacttacattatcatatggttgatgaacaaaatcatctaacacaaagcctattttataataaagtgttgaatgtctcgtgtaatttatcgaatactgaaaagtggccgaatgcttgtatggatacttgatgtatggtttctactaaatgtgtatctcttttgctccatcatgtccttt

SEQ ID NO: 253996 - DNA, 788 bp, Homo Sapiens
  misc_feature (387)..(387): n is a, c, g, or t
aattcggcacgagcggcacgagtagtgtggaaggtcctttcagtcttcctgtgcctatcagtgatcctcattgccatgttcccttctggtgctcaaccggagctccctgacagatgagtcctctgccagaggaaggctaagatgtagaggacaaatcgtgtcaaggaaaagaagcttgaaggagctaagaatgcttagcttagagaagacaagaggaaacaggacatggctttgggaagttcaaggatggtccagtgaaatacatactatacttttgcaccccagctaagctgacccatgatcagtaagtaggaaataaaaggccaatttctggctactcttgcccccaaccccatttcagtgaactatgaacctctattagatatngcaaggccggtgcttaaatgctgggagggctttggccctttccctcaaggagctagtctagtagggggtcagaaatacagatgggcctgaacataatgatggtttgacttccagtttttcaactttaggattgtgcaaaagctatacacattcggtagaaacagtacttcaagtatccatacaatcagtacagtattcaataaattacatgagacattcaacactttattataaaataggctttgtgttagatgagtttgcccaactgtaggctaatgtaagtgatctgagtaggtttaaggtagcctagggtgtatttaaatgcatttttccactttaacggtattttccaacttttgttggggttattgggatgtagccccattataagctgaaaagca

SEQ ID NO: 253997 - DNA, 456 bp, Homo Sapiens
  misc_feature (42)..(42): n is a, c, g, or t
  misc_feature (191)..(191): n is a, c, g, or t
ttagataatgccaaggcccggtgcctaaatgcctgggaggcnttggccccttccccctcaaggagcctagtcctagtagggggtccagaaataccagatgggccctgaaacataatgatggtttgacttcccagtttttcaactttagggattgtgcaaaagcctatacacattcggtagaaacagtaccntcaagtatcccatacaatcagtacagtattcaataaattacatgagacattcaacactttattataaaataggctttgtgttagatgagtttgcccaactgtaagctaatgtaagtgatctgagtaggtttaaggtagcctaggtgtattaaatgcatttttcacttaacggtattttcaacttttgttgggtttattgggatgtagccccattataagctgaaaagcatctgtagtataataaatgtggggagtgctgtgagag

SEQ ID NO: 253998 - DNA, 378 bp, Homo Sapiens
ccagcattggtgaatattcagtttaggggaacagttctagggagtgagacatttttgggagcagaggaaaactctgctgatgttcggtcctggcaaacattgagttattttgagctgtgaaggcagtcgtctctgttacacagtggcagctcttgagttatgcactgtgaagaatgagaagggaaaagcaaaaattatccttgtgtatctgctgattgtgccctactctttgcacctgacttttcctagttgtcctggtgctaacacaggagctacaccttgatcctctcctggcatgtttcccttggctgatgcctcctctgggtcacattgcttcttatcctgaacacttgacaccttgagggtagtttgcgtttg

SEQ ID NO: 253999 - DNA, 1069 bp, Homo Sapiens
  misc_feature (102)..(151): n is a, c, g, or t
  misc_feature (539)..(547): n is a, c, g, or t
  misc_feature (1023)..(1023): n is a, c, g, or t
ctatttctgtgcacttaacaatggaacccaaacagaagagaataaagccttgataccaaaattgggaaagaacatgtgtccatttggaccaaacgttgttgnnnnnnnnnnnnnnnnnnnnnnnnnnnnnnnnnnnnnnnnnnnnnnnnnncatcttaatatgtaccagcggcacttaaccaaaagatacagtgatatagccatgtactgtgggtgggacagatacagtctccttggcctataatgaaaccactaggactttatacagttttccttaatttgttgacatataaatggtaaattatatttaggcttatcctgttttgaaatgatggtagtcatctttcttactgctactttcatgttgctttctagaaaacagcatttcattccaaaataactaggatctgtatttagaacaagaatcattatttgtcctgaccttttcagtcctacagagacgcatctgtggttcttttgtacttgccatagatgtaacctaaaaagttttggcatatttaggtcagcctagcggaacnnnnnnnnncatttaaatggagctgaataatggagattttgtgtctgcaaaattcctgagatcattgaaaaagtaacaagctgttccttgtttctgatacataaaattattttaagcattttatcaatcattaaaatttactgccagttgtgagtggctttttaattaacttgtctttcattgcacttcactatgcctgttttcaaggggagtaagattggtaacatttggggagactgtatctgtctacttagcgtggctgttttgagggactgtcccatcagtgaacaaactgcatggccttggagagagactctgggctcttggctcagatgtgttcatcaaatactcctttcagagctgttgtgggtgtaagtgacatgatgtggccaaaaatccaaactgtgcagttgcgttgtgacaaacatgcaatgtgctgtaaaaattcgatacagtttaaataaaatctctatattaggtgaaanaaggaaacaaaagctcgtgccgaattcttgggcctcgaggggccaa

SEQ ID NO: 254000 - DNA, 1492 bp, Homo Sapiens
  misc_feature (881)..(930): n is a, c, g, or t
  misc_feature (1318)..(1326): n is a, c, g, or t
cagcaatagaaaggcatatgtataaccaaactccaagtgataaccagacccatctctcctccaccttgacaaaagcagattatagtatacaaggtaggaattcctgtcctatttgagatgaactatatcctgtacctctgtgctctgtgtctgcatgaaggctcagcctttagaggcactccttctagttgcattagtactgtctttctgtggagtttggtttgaagactggctcagcaagtggaggtttcaatgtatttttcagttggctcatcagccagcattggtgaatattcagtttaggggaacagttctagggagtgagacatttttgggagcagaggaaaactctgctgatgttcggtcctggcaaacattgagttattttgagctgtgaaggcagtcgtctctgttacacagtggcagctcttgagttatgcactgtgaagaatgagaagggaaaagcaaaaattatccttgtgaaatatctgctgattgtgccctactctttgcacctgacttttcctagttgtcctggtgctaacacaggagctacaccttgatcctctcctggcatgaaaataaaacaaaggttttcgttgttgttgttccattgcccatttcccccatgttgtctttcccttggctgatgcctcctctgggtcacattgcttcttatcctgaacacttgacaccttgagggtagaatttagcgtttggtttttacctcctagcatatgctgtttggtatgtgagggtttcagtacaaatgctgctgtctatttctgtgcacttaacaatggaacccaaacagaagagaataaagccttgataccaaaattgggaaagaacatgtgtccatttggaccaaacgttgttgnnnnnnnnnnnnnnnnnnnnnnnnnnnnnnnnnnnnnnnnnnnnnnnnnncatcttaatatgtaccagtggcacttaaccaaaagatacagtgatatagccatgtactgtgggtgggacagatacagtctccttggcctataatgaaaccactaggactttatacaggtttccttaatttgttgacatataaatggtaaattatatttaggcttatcctgttttgaaatgatggtagtcatctttcttactgctactttcatgttgctttctagaaaacagcatttcattccaaaataactaggatctgcatttagaacaagaatcattatttgtcctgaccttttcagtcctacagagacgcatctgtggttcttttgtacttgccatagatgtaacctaaaaagttttggcatatttaggtcagcctagcggaacnnnnnnnnncatttaaatggagctgaataatggagattttgtgtctgcaaaattcctgagatcattgaaaaagtaacaagctgttccttgtttctgatacataaaattattttaagcattttatcaatcattaaaatttactgccagttgtgagtgggctttttaaattaacttg

SEQ ID NO: 254001 - DNA, 787 bp, Homo Sapiens
  misc_feature (250)..(250): n is a, c, g, or t
tccaagagggtaccagggatatagttccatcctccaaataggaacaggaattccctaccttgtataactataaatctgcttttgtccaaggtggaggagaggatgggtctggttatccacttggagtttggttatacatatgcctttctattgctgtttggggcactttgcaccaggcaacatctacgcaatcatcatcttgtgacctccaggagaaagaggctggagtcaccaactcaacattaagctntccagaccctgggtctgggttaggaccattaccccaaggtgagggtatcaccagtagaggacctcctgctaaattgcaattcctctgctccagtttcatgataccaaggaggatttctcaagatggtatctctgagctctgtgatttcatgagccacaccaaggaaccttccaaactacaactgaagaagatcctcccttcaaacctgctaaaattggacaggtttctccccggcattcaactggaagctgtagcaatgggtttcttcagctgttggctcatgagttccctggcacgagagacttgaatgtgttcgtaacatgagttacagacgagaactgggtcatagagttgctgatcaggaatgggcagcttcaggtggcagcatccagcacaaaatacattcccacaatttctgcaatggtgtcttcgtttggccaaccagaattcacagtcacagttatagcagtgtgatgccatatggtctggaacccagcgagtcacctcagtctctttcttatcaacaggttcccagcc

SEQ ID NO: 254002 - DNA, 357 bp, Homo Sapiens
ggtaatactcgtgagtaggtggcagatgtagcaaaaacttcacaacaattcagcaatcattagctcgggtcacttagagtaaggataacccttcatgaaaataagcctttagttgctctctattttgacttgtaaggatacctcataagctggatcttttatttttccttcatgtttgatttttgttttgccgaggattttggttagatcttttagtattatgtaaatttatgctgcaatagcttttgctgctatttggtattattaataccataatactctattcaggctaggatatcaattaaacacaagatcagaatagacttcaggcttcggtggggtcactatttctgctgc

SEQ ID NO: 254003 - DNA, 426 bp, Homo Sapiens
agcactgccaacagaccagagtccgcgagcaacccaacagtaacaaagcatgcgctcgcgatggaggaagaacttcggcgagagggaagcatcgagactctgagtaacagctcaagctccaccagcggcagcataccaagaaactttgatggctaccgatctccgctgcccaccaatgagagccagaccctcagactcttcccgactggcttcccgtaggtaccagaaacctgcttctgactggccagccccctcccctgctggaggaagggagaagccccgctctgggcctacaccttcagactctgctcttccttcatcaaccaccttccccaagcttagtgacagcagacgcccatactaactggatggagaagagaccctcctccgcacctcagagcacttgccctctgccaccctgtcggt

SEQ ID NO: 254004 - DNA, 1720 bp, Homo Sapiens
  misc_feature (975)..(1130): n is a, c, g, or t
  misc_feature (1285)..(1311): n is a, c, g, or t
  misc_feature (1567)..(1567): n is a, c, g, or t
  misc_feature (1585)..(1585): n is a, c, g, or t
  misc_feature (1638)..(1638): n is a, c, g, or t
  misc_feature (1641)..(1641): n is a, c, g, or t
cctgagggcttcgggctgcggcacatgtcctccatggagcacacggaggagggcctccggagcgacttgccgacgccatggccgagtcacctagccgggacgtcgtgggatccggaacagaactttagcgagagggaagcatcgagactctgagtaacagctcaggctccaccagcggcagaataccaagaaactttgatggctaccgatctccgctgcccaccaatgagagccagcccctcagcctcttcccgactggcttcccgtaggtaccagcaacctgcttctgactggccagccccctcccctgctggaggaggggagaagccccgctctggtcctacccttcagtctctgctcttccttcatcaaccaccttccccaagcttagtgacagcagccgcccatcctacctggatggagaagagacccttctccaagcacctcagcgcacttgccctctgccacacctgtcggtggaggctgtggccaggagagactgtagaagctcggtccctgtgtatgtttgcatatgacatcctgcattggatccgcttttgtattttttaaccatacccacggtggggcgggtggggggagcctggaacagtgaccagatctgggggcctgagtggggacagagttgatcgtccacctggccattttgaccctgagtggacagtcacagcctcagctcatgtctggctgtgaaaaaaactgcccccagcttcccttggtcagccccactccagcacggggtgaacggaggcccagagtactagggaaggaggaagggaggacatgcctcttcttcctcctttctttccccatctgttcctgggaagagtttgtctttcttatctttaagcccctttaccctggtcctgtactgatcagtgaaggaaaccgtggttactgaggccctgttgaaaagtgcacgtcttgtccaataaatcacgctgcagttggtgtccnnnnnnnnnnnnnnnnnnnnnnnnnnnnnnnnnnnnnnnnnnnnnnnnnnnnnnnnnnnnnnnnnnnnnnnnnnnnnnnnnnnnnnnnnnnnnnnnnnnnnnnnnnnnnnnnnnnnnnnnnnnnnnnnnnnnnnnnnnnnnnnnnnnnnnnnnnnnttttttggggggggcccccgccccctagaaaatttctttaaacaccttctgtggtgggccggccgccccccatgagaaaggggaaaatgggcccaatctcgtttttcaaaaagaaaacacccccggcccggaacaacggggggttcggcactctnnnnnnnnnnnnnnnnnnnnnnnnnnnggggggcgcatcccccacggccgctctcttcccaacacacacctcccccacaagcggcgcgcaccctctatcaggggcgccgccctctctaggccgcggggtctatcctcccacacaccagcggggaggttgccccacagcagacgggacgcgccctcctccaccacaccacccatattattgtccgcgctgcctcccccctcccggggtgaactccaatttgttcccccgcgaaaacacggcggggcggccgtantatctccgtctctttaanaggatctttcttccctccagcccgcaccgggcggggagagacacacactcttnatnacacaaacgcccacgtgatttcttataacgccccccctcacctaattcattcgcccccgcgcgcgcgtgtttttatcta

SEQ ID NO: 254005 - DNA, 1210 bp, Homo Sapiens
  misc_feature (102)..(157): n is a, c, g, or t
  misc_feature (646)..(646): n is a, c, g, or t
gttggggtggggcggagttgtgtgtctctgtagaaaggcgaaggggcagttcctatcaggactgtgtatgtctgagcacatgtggctctgtttgggattacnnnnnnnnnnnnnnnnnnnnnnnnnnnnnnnnnnnnnnnnnnnnnnnnnnnnnnnnatagggtgtctgtagatcaagatgtgtatacagctgcttctgctattgctggtttgggggaggggactggaaagctgagactgaaaatcaagagggaagaggtgaggaaggcccacccctggggctgtgcagtgtagacctgccaccgtgtgaagaaaaatgaaagcacagatagcctaagactggcacaggcaatgtgcccacataccgtatagcacaggcccaggtggatcatctcatgctaacaccccacatgtgctggtggatccactcccatggatccactcacatgctgcaggcatgcagtagactcacccacagcccactctctggacaccaatcctgggaggtgggagctggaatggggagcaatgagaggagggagtgagactgttggcttaggaaggggtggtacctctccctgcatcatacccaggaacttccagctacaaaatatttggagtacagcatcaccacccaccactccgncaacccattcctacctactctactgcaagacccaccagttagcatgatgacaaaaatgccaaacaaagggagcgcaagcacaagaacgtacctgcacgacccacaagcccatactgtcccccattcctgaaacccaacactctcctcacccctagcatacccacttcctagactaccctcagcaccctccaccaccaccctaacacacacacctccaacctcatccctctcaccttcactcacccctactcaaacacaactcagacacacacccccccaatccaccaccttctcccaacctatccccgaaccacaatccaaaccagcatatacactatccttcactatagccgatccctcctcgcccatgcatcatcacacactagacttacagccatctcagtccataccaccactaccactaccccaaatactcaacatcgacacgcatacccaaataccccataatattgatccactatcctttctcttactttcatctcccatacttctcaatactactgactcaacccactttcctcacacctcatcaatcactctccc

SEQ ID NO: 254006 - DNA, 769 bp, Homo Sapiens
  misc_feature (697)..(710): n is a, c, g, or t
  misc_feature (713)..(713): n is a, c, g, or t
ccacaatcctgcccaccagtctcacccactaggataggaactgggccttgtgtgctggcttccgctgtcacccagcaaggcacaggctcctgtatttgagactaggatagcttcatcttgagcctgagccttagaatctgtagaggagcctggagtcggatctagccatggctggcagaggtttctagggtgggccccagccgtggcgtgaactgaggatgacccggggcagctggcaggagagagccttggcctgacctggcacagaaagggcagcttcagtctctgcagtgtccattatctgctgttccttcgagggttccaggctgtgtgtggcgcccaagcatgccccacccacccctcctgggcccaggcagcacctggagcccacagagtctgtgtgtagccaggaagccccgctcaggtagccaccgccggggcactggctgctctgtcttggtcctgttaaccctccacctcctctcttggactccctccccaccccaaccactctttctttctcctttaacccaatggagactttctgatgcatcattttctttgctgtgccaaagcaggtcagaagagggagaggaggggctgggggtgaggggccagcccatgccaaggggccagctgcccctcatttatcactctgaccttcacagggacagatctgatttatttattttggttnnnnnnnnnnnnnnggnacagaaacaactttgcattgcattggcttgacccataaactaagttatatccgtgg

SEQ ID NO: 254007 - DNA, 562 bp, Homo Sapiens
  misc_feature (477)..(477): n is a, c, g, or t
  misc_feature (497)..(497): n is a, c, g, or t
  misc_feature (522)..(522): n is a, c, g, or t
  misc_feature (527)..(527): n is a, c, g, or t
acttccgtccaggtccagcgggtgctgtgatcttcaagtatggggtctgctggcttgtcgcggctgcatgggcttttcgcggtctataagcccccggggctaaaatggaagcacctgcgggatacagtggagctacaacttctgaagggtctcaatgccaggaagcctcccgctcctaaacagcgtgttcgcttcttgctgggccccatggaaggcagcgaagagaaggagctgaccctcacagccaccagcgtaccctctttcatcaaccatccactggtatgtggaccagcatttcgcccatctcaaggttggcgtgggacatcggttggatgcccaggcttctggagtacttgtgctcggcgtgggacatgggatgcaggctcctcaccgatatgtacaatgctcatcttaccaaggattacacagtgcgtggcctcctgggcaaagcttacagatgacttccgtgagacgggnggctggtagagaagacaacntttgaccacgtgaccagagagaagntggancgcattttggccttattccaaggttccatcagaat

SEQ ID NO: 254008 - DNA, 465 bp, Homo Sapiens
cggcaccctgggcccagaggactcgcgggcctcatctccaatgattcagaactcacgtccgtcgctgctgcaaccccaagatgtcggagacacggtggaaacgcttatgttacatacggtgatcaaggctttcctgtgtggctccatcagtgggacctgctctaccctccttttccaacctctggatctccttatgttggctgtactcttgaaggtggttcgcacggagaggcttttgggcctttggaaagggatgtccccttccattgtgagatgtgtccctggcgttggaatctactttggcactctctactctttgaagcagtatttcttgcgaggccatcccccaaccgccctggagtcagtcatgctgggggtgggctctcgctctgttgcaggggtctgtatgtcacctatcactgtgatcaagacacgctatgagagtgggaaatatggctatgagag

SEQ ID NO: 254009 - DNA, 2175 bp, Homo Sapiens
  misc_feature (152)..(152): n is a, c, g, or t
  misc_feature (154)..(154): n is a, c, g, or t
caagagttaaggaccacagggtttcccttttcctctacctgggggccccgcgcggcgcccacacggaaatgggttgttggaaaagagtttttttggaaggggcccgagaggcgggcccgaaccacggatatttttaatatacggcagcacgngngtttttcccggtttttccaaaacagcctttcaagggataaagtttcaaataattaaagttacagcccctttattgccagggaaaaaaaatgccagaatttagaggtaaaacagtacaggggccaagaccaaaaaattttatttggaacattcagaggctagaaagccactgtcccgttctccagagcctctgagaagttaactgagaaccaattaaagaagggcatctgttcctcctcatcctaccatcacctcagtcagtctgtgacctggtgacagtgactcctctcctcacatccagtcttccctggttggagctcctcaggcccggcaggcagcttacagcttctctggctttgtgattgcttgcccaagaacatacccaaggagaccctgtggtgtaggggtggggctgaagcgcagcacctgacagagctctcctgggaaaatgcctttccaagtagcctctcagagtatgcaaagctctctcctaacaccctagtgtgctctatgaattgatgactcctcttttggagattctgaaggctgaaatcaggtccatatattttctccttaaggggattactgaaggcaaaggcaacacaatttctgcctggttttccaggtaggacttcatcttactgcagaatagtaagaagcagcagcccttggcagaaaccaagcagggcaacagatttcacccgttcccagtcctctcttggtcaggacttcaggcccatcttggccatcatctcttcatacaccgtccacgccattgctgccattagagttctgcggagggctcgggggatgccaccttggaagaagccacgtagtccatagtctttgaaaataagtgtcactgcttggccaatccattgaaacttcagtggataaagctgcatatgagttttgataacatccgcaggttgagttaccagtgaggccagaataccagcaaatatcccacagctgaaatttgtaataggaataagggttgcatccacctggtcatgaggcactatatttttggtctggttgtaaaacatcaggtagattcctgagaagggcgcatctcgaaggagagttgctgtcaggccactgaagaggccccggtgcccctcactgtgatagatgctcctcagggcagcgtagatactctcatagccatatttcccactctcatagcgcgtcttgattacagtgataggtgacatacagacccctgcaacagagcgagagcccacccccagcatgactgactccagggcggttgggggatggcctcgcaagaaatactgcttcaaagagtagagagtgccaaagtagattccaacgccagggacacatctcacaatggaaggggacatccctttccaaaggcccaaaagactctccgtgcgaaccaccttcaagagtacagccaacatcccaacacgtctagacccatgatctgagggctggagggtttgcaggcgtgttttaaggagatccagaggttggaaaaggagggtagagcaggtcccactgatggagccacacaggaaagccttgatcaccggatgtaacataagcgtttccaccgtgtctccgacatcttggggttgcagcagcgacggacgtgagttctgaatcattggagatgaggcccgcgagtcctctgggcccagggtgccgtcgacgggcgcttgggcccagccctggaggccttgaagaaggctagggggtggcgctagccaggcgacgcgctttaagccgcgggctctctgacgtctgcgcctataagcacgcagccgccggggttcggatcctgctagtccaggggctgcgggcgcggaacaatcttgctgcgggaattacgcgccgctcttcacccgcgccgcagactccgcggctctgctctcctgcccatcctgccctgctgcaggcttcagcaccgtaggagatgaggttctgtgtatcccggggtggaggaagcgccggaggaactctgtagaaggggagatttcgcttccgggtccc

SEQ ID NO: 254010 - DNA, 475 bp, Homo Sapiens
  misc_feature (12)..(12): n is a, c, g, or t
  misc_feature (50)..(50): n is a, c, g, or t
  misc_feature (69)..(69): n is a, c, g, or t
gcaaaagctctnctccctaaaaacccctaatgtgcctcctaatgaattgnatgaactcccacttttggnagattctgaaaggctgaaaatcaggtcccatatattatctcccttaaggggattactgaaaggcaaaggcaacacaatttctgccctggttttcccaggtaggacttcatcttactgcagaatagtaagaagcagcagcccttggcagaaaccaagcagggcaacagatttcacccgttcccagtcctctcttggtcaggacttcaggcccatcttggccatcatctcttcatacaccgtccacgccattgctgccattagagttctgcggagggctcgggggatgccaccttggaagaagccacgtagtccatagtctttgaaaataagtgtcactgcttggccaatccattgaaacttcagtggataaagctgcatatgagttttgataacatccgcaggttga

SEQ ID NO: 254011 - DNA, 404 bp, Homo Sapiens
gtgttgaactctcacttggagcccaaagtggaatatggtgaggagttcattatatttcataatgtgaaaaaatatttcataatatgaacaatagcaaggcgctcatagctcagacctctctgatacagtccatttctttttatgaggtctcatgccaagagacggaaaagagctctaacagccctgagcagctttagagtattacagtgtgccaggaactgctttaagtgaccaagagcagtacccagattacttggaggtggtggacctttccacaagcagagtttcgttaagcaagcaaggggcttttggagaaatttcagattcgcatctttcaaagactgagtcaattctctgaaaagtaaattgctaagagccaatttgctaaaagtcagctctcaaaa

SEQ ID NO: 254012 - DNA, 1839 bp, Homo Sapiens
  misc_feature (69)..(69): n is a, c, g, or t
  misc_feature (509)..(533): n is a, c, g, or t
  misc_feature (917)..(943): n is a, c, g, or t
  misc_feature (996)..(1014): n is a, c, g, or t
  misc_feature (1061)..(1072): n is a, c, g, or t
acaacaaaaaaacccagcacaaaaccgacgatggagtttgtttctgggatttctttgccaatggcaagnaagatgagatgccctcagcactgaggattcttgcccccttgtggtgcccgctgcccccaaccttcaggctgccagatgctcccctgacaacaccaggctacaggagccagacgccagggcctgcccggcctcctgttcctgcccccacccaccacctgcctggagaggaacgggtcgggtccgtgtcggagaagtgacaggtcccagagccaaagccggccctcaagcatcatcagggagtggtgtagtcagttgaaggcagttcccaccgagttttccgagcctcagaatccaggagatacgcacagccccacccactctgagatgacagtggctgacttcccgtgctgggcttttccattgtccccctggcctccaggctcctcctctgcctctccatggagtgggtggggaggtggtgggggccggcgtcccctgcnnnnnnnnnnnnnnnnnnnnnnnnngatgtattgacctgtgtttcccaagacagcaggtgccacggcccgccccgcctgccagcccgaattcccgttctcctgtgtctactaacaaggacatgggggtgggcggtgacctccgcatccctcagagctcagagggtcctcgctgccaccggtccccccctagcccgtcatcagccggtggcagctccatcttccattcctggttttagggcagaatccatggagactgcttccagaaggcatctggctctgagttataaattacttccctggtcctgacagtcacctggggtcccccctctccctggttccacctttctgaggaggagcctggagtcagggctgggttttggattaacccatccttcctagttaacaccnnnnnnnnnnnnnnnnnnnnnnnnnnngcttgctttctccgggtgtgtgttttcctaatttatttacctctggttccccnnnnnnnnnnnnnnnnnnnaattaaagagcaaagctttttattactttgtaatttacacaaactgnnnnnnnnnnnnctgaagaactttggggggaatttcggactcttttcctgcgtaaatatcggacttttttgagctttaccgggggtgttactcttgaacgtaataaagtacacaagacgcagggggcccaggcccattccgtatatgatcctaacttgtgggcccgcctcgggcccccccgagaaattttccccagaccatttcctttgggcgcgggggggcccatgtattgtaatggggccatgggcccaaacgctggtctccctagggagacccctcgggccgtagaccaccggcgtgcgggatttcttccccccattaaaaaaccgccgcccccgcgcggggcacaccgttaagcgtgtccgcgggagcaagattccaagaagagcgggggctgccgggagggtttaatctcgccgcgcggggcgcctgatttattagggcgcaggtttctcacggcgcaacgccgcccgcgagtactcgacatgttgcgcccccccgccaccccttggaccacctgccgtttcgcgcgggcagtgggtgtgtctggatttgttcttgacgacccgtgccctgggccggatgctgtgggtgaactctttagggagatgaggcgggccgcgctatttatacacgccgtaaggacgccccctatgcgggcctctcccaggcggggtacatgtggtctatctttgcgccgcggagataaatgcgtggccgcccacgggaggcggacaaacaggggcggcgcggccaaaaaaagcaagtcgcgcgcctcc

SEQ ID NO: 254013 - DNA, 653 bp, Homo Sapiens
  misc_feature (619)..(619): n is a, c, g, or t
gtcattggcccgatacaaaacatttcctgcaacgaaggaggtggtgccgacgtgctgcttcccatcaccagcagctgctcgacaaggggcgcagggtggctgtctttgttccagcactgttcaggctgcctgtcatcccgggcctgccagctcccctgagtgatgagcacttccaagcacccctctgccctttctctgtccttatgctgtcccggcctcgccagccctctggggcattgtgggagatgcctgccaggaatgagcaagctctgttgctcgggagcctcttgtcaccttcttggacttattccccacctgataccttatagaggtgtgaattcaggtggagagtaggcccaggccccatgaggcaccagtggaagcacagctccaagttcagacaggtgcccttagagaggcaggtggcatctggtgtgctgttcttgagttttcgtttaggattagttgagttccagctgggttttgggagggagatgctaccaagtcttggatgttagggcgagaccctgcaagttgagtattagagagcttgtctttcaaggcaggttcctggggcttcagggctaggaaggaggagcctgcccttttaacagaaccncagtcacatgcggctcgtcactcagggctgttgc

SEQ ID NO: 254014 - DNA, 2574 bp, Homo Sapiens
  misc_feature (2063)..(2143): n is a, c, g, or t
  misc_feature (2372)..(2384): n is a, c, g, or t
cctgggtggcgaattcggcacgagggtccggcgggcggttggcttgagcgggaccggagctgaggcaggaagagccggcgccatggtggagaaggaggaggctggcggcggcattagcgaggaggaggcggcacagtatgaccggcagatccgcctgtggggactggaggcccagaaacggctgcgggcctctcgggtgcttcttgtcggcttgaaaggacttggggctgaaattgccaagaatctcatcttggcaggagtgaaaggactgaccatgctggatcacgaacaggtaactccagaagatcccggagctcagttcttgattcgtactgggtctgttggccgaaatagggctgaagcctctttggagcgagctcagaatctcaaccccatggtggatgtgaaggtggacactgaggatatagagaagaaaccagagtcatttttcactcaattcgatgctgtgtgtctgacttgctgctccagggatgtcatagttaaagttgaccagatctgtcacaaaaatagcatcaagttctttacaggagatgtttttggctaccatggatacacatttgccaatctaggagagcatgagtttgtagaggagaaaactaaagttgccaaagttagccaaggagtagaagatgggcccgacaccaagagagcaaaacttgattcttctgagacaacgatggtcaaaaagaaggtggtcttctgccctgttaaagaagccctggaggtggactggagcagtgagaaagcaaaggctgctctgaagcgcacgacctccgactactttctccttcaagtgctcttaaagttccgtacagataaaggaagagatcccagttctgatacatatgaggaagattctgagttgttgctccagatacgaaatgatgtgcttgactcactgggtattagtcctgacctgcttcctgaggactttgtcaggtactgcttctccgagatggccccagtgtgtgcggtggttggagggattttggcacaggaaattgtgaaggccctgtctcagcgggaccctcctcacaacaacttcttcttcttcgatggcatgaaggggaatgggattgtggagtgccttggccccaagtgaactcaagatttggcagccccagagatgccaactgcagcatgcccacctgtattccctgtccccttccttcatgaaggcatctccaggcaaggaaaactgaagtcattggcccgatacaaaacatttcctgcaacgaaggaggtggtgccgacgtgctgcttcccatcaccagcagctgctcgacaaggggcgcagggtggctgtctttgttccagcactgttcaggctgcctgtcatcccgggcctgccagctcccctgagtgatgagcacttccaagcacccctctgccctttctctgtccttatgctgtcccggcctcgccagccctctggggcattgtgggagatgcctgccaggaatgagcaagctctgttgctcgggagcctcttgtcaccttcttggacttattccccacctgataccttatagagaaaagtgtgaattcaggtggagagtaggcccaggccccatgaggcaccagtggaagcacagctccaagttcagacaggtgcccttagagaggaaaaccatgacaggcaaatgcatttcctctggagtttgagaccctgacaaacaacaggtggcatctggtgtgctgttcttgagttttcgtttaggattagttgagttccagctgggttttgggagaaaggagatgctaccaagtcttggatgttagggcgagaccctgcaagttgagtattagagagcttgtctttcaaggcaggttcctggggcttcagggctaggagggaggagcctgcccttttaacagaaccccagtcacatgcggctcaagtcactcagaggctgttgcatttcagggctatgttggtcctttgtttacctcctaaaccacagctgtttgtgtttcacatatgttgtgaattttccttggttctttttaaaggaatgataataaagttacttgctttaggnnnnnnnnnnnnnnnnnnnnnnnnnnnnnnnnnnnnnnnnnnnnnnnnnnnnnnnnnnnnnnnnnnnnnnnnnnnnnnnnnaaaaaaaacaccaatcagcggcgagagccagtaaaccaccagtcagcacaggccgcaccacggttgttgaaataagcgaagacgcggccacagccagcagagggaggagtaattacaaacggcgggcggggcactccagcgtgacaccacaaacacggcgccgggcagacggcaaaaccagcgcgccggacgcacgggagcacgagcggagaggcgccacaccctgatnnnnnnnnnnnnnagaccaaacgacgcagggtcacccgcccaggcgtgaagcgaatcccccgacaccgggggaacgcatcaacaacaccacgcgagcggccagctgaatggagagagcgagaagcgccgagggccgaaggcacggggcaacaaaagaagtggccggcgcaggtaatgaacaagagactccgcccagggacagc

SEQ ID NO: 254015 - DNA, 890 bp, Homo Sapiens
gtaccggtccggaattcccgggatgacagggactgccaggtcggaagtagtgtgaggctcgtgggcggagccaagcgccgccatgtccgccgccctgctgcggcggggcctggagctgctggcggcgtccgaggccccccgggaccctccaggtcaggccaagccgagaggggctccggtgaaacggccccggaagacgaaggcaattcaggcccagaaactgcggaactcggccaagggaaaggtgcccaagtcggcactggacgagtaccggaagcgagagtgtcgagaccacctcagagtaaacctgaagtttctgaccaggacgagaagcaccgtggctgagtctgtgagccagcagattttgcgccagaaccggggccgcaaggcctgtgaccggcctgtggccaagaccaagaagaagaaggctgagggcaccgtgttcaccgaggaagacttccagaagttccagcaggaatacttcggcagctaggctccctggagggcacggtgaagaggccttcaagccctgcagcctccgactcctgctggctccaggaaccggccgtgccgcgcggccagcagatggcgatgcaggaccagcctggctcgaggaagccgcggagctgagccgagtggaggctggaatggagctggtgggccggaagtcctggggaggatttacacacagaccggagctgcttccgcaggcctgggcagagcatctgcactgccggaaaggaacgtatctgttttgtttgcttttgcccaggtgggcctctgggctgtttgctgtggagcaaggctaattcctgagcccttggggacgacagctccaggagtaggaagaagggtgggcttccaagttacaataaatgtgaacccaagaa

SEQ ID NO: 254016 - DNA, 616 bp, Homo Sapiens
  misc_feature (28)..(28): n is a, c, g, or t
ctatactaaccatgcaagattagtatgnatcagtcgtagacatctgtccaatcagtcagtatataactcatggtctcacgatacatgagcgacatgacgtacaatgcgttacacagtctttctaggaacagacccatcgatctcactgtatgagaagatgcaaaggaaagccacaaatgtgaatatatgcatctagttctcacaatttaaaataaatatcaaactgacaatataaagctaagtgacaatgacttaaccattgggcaccaaacaggcaatacaactgctcactgtaatacataatgctcttcaggagccagcagatggccatcacaacaatactgtcataatacagaaaaaacatttatccactgtgggaaaaagttaatgatatcaaaatacccatcactggtaaaccaagctaggtcaagtatatgtcccaaagcagcactgaattcagagtaagaggttggcagaaaagtttggaaaactgcagtttttaaaaattggcaatttctccatgcttaataaaactatcagaagaggtataatgtttgttcgtttgtggaatgttgactgcttgctgcaaaaatttacaacatgaatgaggacctgc

SEQ ID NO: 254017 - DNA, 647 bp, Homo Sapiens
gggcccaactaggctctgtgcaacgtctgctagcggcagccagagtatccaagaagcgagatgcccaggaatagttccagactcagtcaggaatgagaaatgggaggatgggctggatgatccctgtacaggcataatccgctggcctccctggggcctccctttctttgtgccaagccctgtcctgggtgctgggaactgggaacacagaatgaatcagacatagcctttgttcccatggggctcagtctcatggggaagacaaatgtgtatcaggcattattgacccaggatcatcagtgctccaataaaaagctcagagggtgggttgggaaggcttcctggaggaggaggtactggagggcttgaaggacaagtaaaagttcaagtaaccaagaaggggtatctcaggcaaaggtaacagcaattgtcaaaacttgaaagcatgcttggggaaacttaactgctttggaatggccaggcttgaaccctgagggtggggcgggacacaaaagctgaagagccagaactccctctctgagagaactgccctcggtcatcctcctccatccccctgggtgagtcatctgtcttatcacagaactccaaacagaaagaagactctccttagatgctggtgggggtag

SEQ ID NO: 254018 - DNA, 1294 bp, Homo Sapiens
  misc_feature (69)..(69): n is a, c, g, or t
  misc_feature (121)..(365): n is a, c, g, or t
cctaatggtcccaatgaaattccctgaatttaaaatgcaaagacaacttaatgaaggcccacttgaaanaccaacctttaccccatgaacatctggtaaacttttcttctttgagatgggnnnnnnnnnnnnnnnnnnnnnnnnnnnnnnnnnnnnnnnnnnnnnnnnnnnnnnnnnnnnnnnnnnnnnnnnnnnnnnnnnnnnnnnnnnnnnnnnnnnnnnnnnnnnnnnnnnnnnnnnnnnnnnnnnnnnnnnnnnnnnnnnnnnnnnnnnnnnnnnnnnnnnnnnnnnnnnnnnnnnnnnnnnnnnnnnnnnnnnnnnnnnnnnnnnnnnnnnnnnnnnnnnnnnnnnnnnnnnnnnnnnnnctggtaacttttaatgttcctttgaaggtgttttcctagtatgaggatgggcagcttactgagtctgttgtgtgtcatgcttacacacaaaaacggttttcacaaaagctgaaaccactttaccaaaaattgagtttaccctgaagacacaaaaaatgaattgtatacacaaggagtcacaactgacttgatatgaatacttatggctatttcgcaggggaatttttaaaactaaggtttaaaacgtgtaggacatggtaccaaggtagttttcagttgaagaatttttccaatgtgcctactagagagggacaaagttgtgaaatatgtaatgtagacttgcagggaaacaaatggtgtcatcaggttttactgtcaactacaaaccttacccagccagaaaccttcgtattttagatggtaggaaagacattcctcatttaggcaagtagggttctcattcaacctgcaaatcaaaaagattactcttaccttgctttacaaaaaattactctttaattagtgaaaaaaatcaaaattcaaagcccttacctaatgcttattgccccttccttgcaggtcctaaaggctaagacctagtgaactgtggcaactatctctcaattgatgttccaaaaggcgaagagctccttcctgctagactttcttcgatatttcagttgtaataagcagatttaactagcttttggaaagttgctcactatcatcatagtatcttatgccttcacttctctgtagttgaagctcttgctgctgccttgtcattctttatttatgctgacttgtccaaacacaaaaggctgctgaagtcctgtcttagtgagtttctgtgatccacaactggcttaaaaagcacatcttaggtcctttaaaggtggttaaatcgctctcctcatggcttacttttc

SEQ ID NO: 254019 - DNA, 650 bp, Homo Sapiens
  misc_feature (462)..(462): n is a, c, g, or t
  misc_feature (474)..(474): n is a, c, g, or t
  misc_feature (586)..(586): n is a, c, g, or t
  misc_feature (600)..(600): n is a, c, g, or t
  misc_feature (605)..(605): n is a, c, g, or t
ttggggggcaaacatagtggattatacctgtaacctggtttcagcttcagcgtaagctttcccatcccctgttattactttatatgagttgagtttattatgcaatttcttttctggtctctgatagcaacattaaacagcaagctgacattttgcagacgaagactttttctgagagctttgcaagtattacacaatctatttgttgcaatgtgaaatgtacttttctattacatttgttaccatgtcaaatttatcttgtgagaacattagttattaaataataatcacagtaccgaaatgatcattaaatttatgctgagaatcagagttttccaggctctatcaggatctaacgaggaatttaaccaaagttctctttgaataagcagtggactccttcctgtgtgttatgcttgccagactaaggggtgattatcttttctaggccatgtatagttnttatttaagaantaactatgaggcagagcttttgtgacacctaaacacttaggaaagagtattgctgatgtctctttatactctattcaaatcattattacacagcatttaaatatcacacttngttcaacccactgngcatncatccattcattctatttttaatgaataattttttgccagcggtg

SEQ ID NO: 254020 - DNA, 740 bp, Homo Sapiens
caaacccccgcccaaataaaaactcaccattttaataactagtccccgccccaagttagaaaatcaccagttccattatatgggccttaaagttcacaaaatgctaacatagggtattgccttatttttggctgtggctaaataaaatatgataaattttcagtgcctttaaaagtgagttcacatagtaggcaatcaaaattgatctatttaaccaggtatttaaacccttggtttgtataactacttatagaacccttctcactgtggtttaactataaaatgagaattttgtagagacaatacctagcttacagaaagttttattcatacagaaagcatcaaatttttcatttacaagtgctttataatttagaaagcacattcgcaagctgaattaagtgactttcggtctggatctcacatctattacttcatttcctcatactagctctttcctggttacctggaaaaatgtatcagtaataatttaacttaacctcaccagtaaagtcttgattgtttaaaattaagcaatatatcattccttacatctgaatagtatagaggataaactttcctcttattacataggagaattaatcttgtattttacagtacccaaaatagctggtatgtaagaggcacttaatattcattcatccattcattcattcataaatatgtagcccattgacatttgtatcatgctttagtttacaaagcactttaatatgcac

SEQ ID NO: 254021 - DNA, 639 bp, Homo Sapiens
  misc_feature (246)..(246): n is a, c, g, or t
  misc_feature (253)..(253): n is a, c, g, or t
cacccgcacacaccgggaatagacacacaagcatggctatatccacccagccaaggaagtagttccaattgtaagaaatatatttctctacctatatagtccatctccctatgtatagccaaaaaaagtgcacagtcaggtgagaatgaagtccaaggtgagtctttaaataccagctgacccaagaagtataagaccgctaagagtgagttgaaaagagcctgcatggcctgccgtggcaatggnctatganagacatcacttggggattctgttccttaagcctcctgccaccaccatcccagccccttcatctgcttaatctctgtcgcaggactggcgcctcactttcactgctcctggctactcatgtgtttataatattgtgttgtacgcacaattgttagaaacaactttaaactattttgtgataagtcgagggaatatgtaaataagactattctgtttctaaatccatagcaatttttctgacttgatatcaatgactctacatgattatagaaagctccaagtcacctcctggagactggctaaatatacatgggacatatgtgcaataatcattattcgggtattaaaaaagggtgctcccagtctagacaacatgatataacctcg

SEQ ID NO: 254022 - DNA, 672 bp, Homo Sapiens
caagggggcggcctatacccaaaaaaaattaagggggttttcattcatttaaccagcaagtaaaatcctgcctggtttatccgctttattttcaccttacagtcttaatacacattccaagactgatgcgatattcattatttctttcggataactggaagaggaggggaagtaaaagctgtacattaaacagtccacttggtaattgagaaaatccagcagtgaaatatatcatgaggcaccaaagagatttgccgggaagggcagacaaaagagaaaccagccacagaacattaagccccggaagagatgagaatcggtcccatatacgtaactcgacgactggacaaaaccccgcttgacgctgccggtgggtgaaacgaggtgatttgagattcagggcgttctcggctctttccctctctcgaatcgatcatctccaacaggaagtcagagcaaggcagggttcggagtcagagaaagctcccgggggagtctgtctaccacgacaacaaactcctaaggctccttccggagctccacagccctctgggcggcctctctagcgctgtacttcacgtccccgctccccaaaaaagtcgtgcaccccgacttcagctatccgcgttcaagagagtgcggcagcagttgggtcggccccctcagcggtcc

SEQ ID NO: 254023 - DNA, 1017 bp, Homo Sapiens
ggtacggtccggaattacgggatatcgtcgacccacgcgtcgcacccggtgaccagtggtggcccctcagcccaccctcccggcagctcagcctgtggctccttgaggccgtggttcccacgtggactgggaggcagtctcagccacccggggtgctgttcagctgcccctccctgccatcagcaggtgggtgaggggttgcccactgggtgggggcccgtgctaggagtcaccacatgctccaacctcccactggctccctgtcaggggcccaggctgccatcactggaggctgcagggaccaagaggccatcaccgtgtctatagagagcagacagaagcagaacagagcccggggctcctgagcctctgcgtgtgccctcccagcccacaccagtgctctcggccactgagcacccagactcaggcttgggttccccagccttattggaaggcagctcccgcataccaggataacccccgcaaaccacatagcagacccccgccatcctcgcagagtgggagaggctgcagcaaggcttttgcctctgcagaccccatcttagtggcacggtgcttgggcctgtgtccccgggtggtggaaccctgtaccggtctgtggccctagggtccctgctctgtctgccccggcccgtgctgtccgctgggtgaggcaggctccccgtgcctgctcctctgtcagggaactgggaccccttcccaatgctggacagaggaccctgacctcggcagaggtggcccaggtcatggtgggcactaggcacgtccgtgccgagtcggggccaacgaggctgtgccggtaagggggcgtggcaaaaggggaagggcccggcactgtcaccggtgggcggctggccctaagctggataaaacagtttatccacaaaaaaaggggggcaaaaactcagggccagacaacaattcaagagcaaagaggaaaaggcggagacaagagaaatttggagcacgcggggaacacacaaaataggcaaaacc

SEQ ID NO: 254024 - DNA, 967 bp, Homo Sapiens
tttggagggcgtccgcgggacgggggcgccgggagcactgtctcacggcgcatcccggtcgtggaagcccctcggccaggctgctggggcctaaggcctgtgtttgctgccgtccccgtgggagaccagacatctgccccagctgtttctctggcctgcagaccttcgtacaccacgtctttgtcaagcaccagttactgcacgcatcagctgagcacggaggggataggcacggacgcaacacttttggaacttagacgctacagaaaaatggctacaaacttcctagcacatgagaagatctggttcgacaagttcaaatatgacgacgcagaaaggagattctacgagcagatgaacgggcctgtggcaggtgcctcccgccaggagaacggcgccagcgtgatcctccgtgacattgcgagagccagagagaacatccagaaatccctggctggaagctcaggccccggggcctccagcggcaccagcggagaccacggtgagctcgtcgtccggattgccagtctggaagtggagaaccagagtctgcgtggcgtggtacaggagctgcagcaggccatctccaagctggaggcccggctgaacgtgctggagaagagctcgcctggccaccgggccacggccccacagacccagcacgtatctcccatgcgccaagtggagcccccagccaagaagccagccacaccagcagaggatgaccaggatgatgaccttgacctgtttggcagtgaccatgaggaggaggacagggagccggcacacctggggggaggacgggctaccggaataccccggagaaaaaaggccaagaaacccggacctggggggcaaaggccctccatccctggtcgggagggccaagcccctgtgggatgtaggagaacgggactcggggtttccacctgggaagacccccgtgggtgccacttctaaatccaac

SEQ ID NO: 254025 - DNA, 1005 bp, Homo Sapiens
  misc_feature (759)..(789): n is a, c, g, or t
ctccctttcatagtcttcccgcgtccgccgattcctcctccttggtcgccgcgtccttggctggcgtcagaaaaatggctacaaacttcctagcacatgagaagatctggttcgacaagttcaaatatgacgacgcagaaaggagattctacgagcagatgaacgggcctgtggcaggtgcctcccgccagagctcaagccccggggcctccagcggcaccagcggagaccacggtgagctcgtcgtccggattgccagtctggaagtggagaaccagagtctgcgtggcgtggtacaggagctgcagcaggccatctccaagctggaggcccggctgaacgtgctggagaagagctcgcctggccaccgggccacggccccacagacccagcacgtatctcccatgcgccaagtggagcccccagccaagaagccagccacaccagcagaggatgaccaggatgatgacattgacctgtttggcagtgacaatgaggaggaggacaaggaggcggcccagctgcgggaggagcggctacggcagtacgcgggagaacaaaggcaagaagccctgcctggtggcccagtcctccatcctgctggatggccagcctcgggatgacgagaccgacatgggcccaactcggaggcctgtgccgccctctatcccacctggaccgggctggtcctggggcgggctctccaagctgggggcccggggcgctacggcaatcccggaagcctccacattcccggcnnnnnnnnnnnnnnnnnnnnnnnnnnnnnnnaacaaatctgcccggcagggaggaagctcccccaagtttgtggggaaaccccttgcgccagcgggccaataatgcgcaggtttttcgacgaaggatctggaaagccctacagccgcggggttatattggcgtccgcgcccgcgcgaaaggtcctcgtcccgcccctctaccggcgttggtatctcgcccccgctaaacgaggacggggccgccaac

SEQ ID NO: 254026 - DNA, 947 bp, Homo Sapiens
ggggccctttcatcagtcttcccgcgtccgccgattcctcctccttggtcgccgcgtccttggctggcgtaaaaatggctacaaacttcctagcacatgagaagatctggttcgacaagttcaaatatgacgacgcagaaaggagattctacgagcagatgaacgggcctgtggcaggtgcctcccgccaggagaacggcgccagcgtgatcctccgtgacattgcgagagccagagagaacatccagaaatccctggctggaagctcaggccccggggcctccagcggcaccagcggagaccacggtgagctcgtcgtccggattgccagtctggaagtggagaaccagagtctgcgtggcgtggtacaggagctgcagcaggccatctccaagctggaggcccggctgaacgtgctggagaagagctcgcctggccaccgggccacggccccacagacccagcacgtatctcccatgcgccaagtggagcccccagccaagaagccagccacaccagcagaggatgacgaggatgatgacattgacctgtttggcagtgacaatgaggaggaggacaaggaggcggcacagctgcgggaggagcggctacggcagtacgcggagaagaaggccaagaagcctgcactggtggccaagtcctccatccctgctggaatgtcaagcccttggggatgatgagacgggacatgggccccagctgggaggcctgtgggcccctctatccacctggaacgggcctgggtcctggaggggccttccaagctgggtggcccgtggggctacgggtattcgggaagctacagatttccctggtggtggtgggagggaccacaaggggggggacagacttggttgggagggaggaaattcccccagttttgaaggaaccccgggccaaaatggtccaatatcgcagccttccaa

SEQ ID NO: 254027 - DNA, 1194 bp, Homo Sapiens
  misc_feature (902)..(1063): n is a, c, g, or t
  misc_feature (1065)..(1126): n is a, c, g, or t
tagcgaggcctgggtggcgaattcggcacgagggtccgccgattcctcctccttggtcgccgcgtccttggctggcgtcagaaaaatggctacaaacttcctagcacatgagaagatctggttcgacaagttcaaatatgacgacgcagaaaggagattctacgagcagatgaacgggcctgtggcaggtgcctcccgccagagctcaggccccggggcctccagcggcaccagcggagaccacggtgagctcgtcgtccggattgccagtctggaagtggagaaccagagtctgcgtggcgtggtacaggagctgcagcaggccatctccaagctggaggcccggctgaacgtgctggagaagagctcgcctggccaccgggccacggccccacagacccagtggagcccccagccaagaagccagccacaccagcagaggatgacgaggatgatgacattgacctgtttggcagtgacaatgaggaggaggacaaggaggcggcacagctgcgggaggagcggctacggcagtacgcggagaagaaggccaagaagcctgcactggtggccaagtcctccatcctgctggatgtcaagccttgggatgatgagacggacatggctcagctggaggcctgtgtgcgctctatccagctggacgggctggtctggggggcttccaagctggtgcccgtgggctacggtatccggaagctacagattcagtgtgtggtggaggacgacaaggtggggacagacttgctggaggaggagatcaccaagtttgaggagcacgtgcagagtgtcgatatcgcagctttcaacaagatctgaagcctgagtgtgtgtacgtgcgcgcgtgcgtgaggccctgccacgattaaagactgagaccggcnnnnnnnnnnnnnnnnnnnnnnnnnnnnnnnnnnnnnnnnnnnnnnnnnnnnnnnnnnnnnnnnnnnnnnnnnnnnnnnnnnnnnnnnnnnnnnnnnnnnnnnnnnnnnnnnnnnnnnnnnnnnnnnnnnnnnnnnnnnnnnnnnnnnnnnnnnnnnnnnnntnnnnnnnnnnnnnnnnnnnnnnnnnnnnnnnnnnnnnnnnnnnnnnnnnnnnnnnnnnnnnngggaaaggaaaaggggcaaaattgtttccaaagaaaaccggggaaagaaaaagggtgggattcccccc

SEQ ID NO: 254028 - DNA, 1066 bp, Homo Sapiens
  misc_feature (60)..(60): n is a, c, g, or t
  misc_feature (66)..(111): n is a, c, g, or t
gttcgctgggcggccggggtagaaggacgcgggggggtgggtgcaagggcgattgttttncccgtnnnnnnnnnnnnnnnnnnnnnnnnnnnnnnnnnnnnnnnnnnnnnngacccccacgcccggggtttcaaagtttggttgaaaggctgggaatatggacactttgccacgggctcctccaaacctgggtgatctcctccctccagcaagttctgtcccccccctgtcgtccctcccccaccaccctgaatctgtagctcccggataccgtagcccacgggcaccagcttggaaggccccccagaccaagcccgtccagctggatagagcgcacacaggcctccagctgagccatgtccgtctcatcatcccaaggcttgacatccagcaggatggaggacttggccaccagtgcaggcttcttggccttcttctccgcgtactgccgtagccgctcctcccgcagctgtgccgcctccttgtcctcctcctcattgtcactgccaaacaggtcaatgtcatcatcctcgtcatcctctgctggtgtggctggcttcttggctgggggctccacttggcgcatgggagatacgtgctgggtctgtggggccgtggcccggtggccaggcgagctcttctccagcacgttcagccgggcctccagcttggagatggcctgctgcagctcctgtaccacgccacgcagactctggttctccacttccagactggcaatccggacgacgagctcaccgtggtctccgctggtgccgctggaggccccggggcctgagcttccagccagggatttctggatgttctctctggctctcgcaatgtcacggaggatcacgctggcgccgttctcctggcgggaggcacctgccacaggcccgttcatctgctcgtagaatctcctttctgcgtcgtcatatttgaacttgtcgaaccagatcttctcatgtgctaggaagtttgtagccatttttctgacgccagccaaggacgcggcgaccaaggaggaggaatcggcggacgcgggaagactgatgaaagggagccc

SEQ ID NO: 254029 - DNA, 1138 bp, Homo Sapiens
gagcgaggcctgggtggcgaattcggcacgaggcctccttggtcgccgcgtccttggctggcgtcagaaaaatggctacaaacttcctagcacatgagaagatctggttcgacaagttcaaatatgacgacgcagaaaggagattctacgagcagatgaacgggcctgtggcaggtgcctcccgccagagctcaggccccggggcctccagcggcaccagcggagaccacggtgagctcgtcgtccggattgccagtctggaagtggagaaccagagtctgcgtggcgtggtacaggagctgcagcaggccatctccaagctggaggcccggctgaacgtgctggagaagagctcgcctggccaccgggccacggccccacagacccagcacgtatctcccatgcgccaagtggagcccccagccaagaagccagccacaccagcagaggatgacgaggatgatgacattgacctgtttggcagtgacaatgaggaggaggacaaggaggcggcacagctgcgggaggagcggctacggcagtacgcggagaagaaggccaagaagcctgcactggtggccaagtcctccatcctgctggatgtcaagccttgggatgatgagacggacatggcccagctggaggcctgtgtgcgctctatccagctggacgggctggtctggggggcttccaagctggtgcccgtgggctacggtatccggaagctgcagattcagcgtgtggtggaggacaaggtggggacagacttgctggaggaggagatcaccaagtttgaagagcgtatgcagagtgtcgacatcgcagctttcaacaagatctggcctgagtgtgtgtgtgcgcccgcgtgcatgaggccctgacacaattaaaaactgagaccgttcttcttctcgtcttcccctatccccttttttcttgttgggccgccttcggcccctcaaaaagcttttctacaacctttccttttgggcgcggcgccccctgtagggcaaatggaacatggtccaatacctgttttccctagggaaacccttgggttacggacatagggttttggaattccccccccattcaaaaacaggccccgggggggccaaacggaacggttttctggaaa

SEQ ID NO: 254030 - DNA, 836 bp, Homo Sapiens
gccccccatgaaagtggcaatgtaggccaaatgctatgacaccaatatcaagtcacgaaagcagcctgtcacctgttgaagctgagaggcagtggtggctgggccagaggggaaggtgggctcctgggcgctgcccgtgggcctcactcctctgcctccactcacactggctcgtgtgaccagacaggttttctcttctggagaaaggccgtgatgccctcctgcccgtcccgcagggccaggtggtccaccatggcttggaaggtgaggtagtaacccgtccccaggtcttgggacagctgcttgtagaaggtggctttgcccagggacaccaccggacggctcagcgatgcgatcttcctagcgatccgcatggtctcctcctgcagctccgcctcttggcaccaccttgctaagcagcccgtggagcagggccccctgggcagaaatgggctcaccagtaaagagcatctcaaaggcaacctttctaggcactgctcttgccaaggcaaccccaggggtagaacagaagagcccgacgttcaccccaggagtggcaaaagaggacttgtcgctcgccacggcaatgtcgcagctggcaaccagttgacagccggcagccgtggccagggccaaccttgaagaacaggtctgaaatacttcggcatggtaatcacggccttgctcctctgtcagctcctttaagtcatgcccagaagaaaacacaggcccttcagccgagatgataatgactttcagatcgttgctgtcagcgtcatgaagaatgtcactttggagagattcaagctcgtgccgaattcctgcagcccgaggga

SEQ ID NO: 254031 - DNA, 932 bp, Homo Sapiens
  misc_feature (657)..(724): n is a, c, g, or t
ttgggtaccggtccggaattcccgggatatcgtcgacccacgcgtccgtatggccgccgtcgccgtcttgcgggccttcggggcaaggtgggcccatgtgtctccggtgcggcccctgggcccagctccccgcccgcttctgcagccgggacccggccggggcggggcggcgggagtcggagccgcggcccaccagcgcgcggcagctggacggcataaggaacatcgtcttgagcaatcccaagaagaggaacacgttgtcacttgcaatgctgaaatctctccaaagtgacattcttcatgacgctgacagcaacgatctgaaagtcattatcatctcggctgaggggcctgtgttttcttctgggcatgacttaaaggagctgacagaggagcaaggccgtgattaccatgccgaagtatttcagacctgttccaaggtcatgatgcacatccggaaccaccccgtccccgtcattgccatggtcaatggcctggccacggctgccggctgtcaactggttgccagctgcgacattgccgtggcgagcgacaagtcctcttttgccactcctggggtgaacgtcgggctcttctgttctacccctggggttgccttggcaagagcagtgcctagaaagagtctcgctctgtcannnnnnnnnnnnnnnnnnnnnnnnnnnnnnnnnnnnnnnnnnnnnnnnnnnnnnnnnnnnnnnnnnnnccatagtaactggggattttacggcccgtgccaccattacccggtaattttggatttttccgggaagatggggtttcaccccttttggccagttggctctaaatctgtagctctatagtcggccctctggtccccaaaagtgggatacgggttatgcgcgcctgggcttgaattttttaactctttgttctaccgttgccgttttttc

SEQ ID NO: 254032 - DNA, 426 bp, Homo Sapiens
gaatctttgctggttctcactcggggacacaacaagatgcagcacctcctaggtgtcatctagctgtttggaaagaatagaaggaacatttggaaacttaccaggtgctagaaggtgcttagtaacattcaacaacctatattctcctaggattatggactgctggcaatactcacggggaaggttttaaatggcttctcttcccatggtaataacatggaacttctgaaataaacagtcattagctctctgagttctgtctcagcttcaatcttctcttccttatttgaactttaggcatagaaataagagtaagaaggcattttggttaaaggatattttctccttttttaatcttccattcccttagagggaggtttatttctagtcagagaacatgatatacttttatttagcgcctgtggt

SEQ ID NO: 254033 - DNA, 283 bp, Homo Sapiens
  misc_feature (173)..(181): n is a, c, g, or t
aatgttctgatacattaggatgaagttaaatcttaaatcttattagttgaattgttgtaaggacagtgatgtctggtaacaagatgtgactttttggtagcactgttgtggttcattcttttcaaatctatttttgtttaaaaacaatacaagttttagaaaacaaagcattnnnnnnnnngcctatcagtattatgggcaatatgtaaataaataaatgtaatatttcatcctttatttttcaggtaaaaggtcatgctgttacaggtgtagtttgtgtgca

SEQ ID NO: 254034 - DNA, 755 bp, Homo Sapiens
  misc_feature (30)..(30): n is a, c, g, or t
  misc_feature (234)..(234): n is a, c, g, or t
gacacttcattgcgaagttctctccctctnacagtctttaaattcagttatttattttatgttaggttccaagttattaagtctgcctgtaactagttttgaaacattcaaaatattattcttgactgtttcctgtggggaagtaaggtggggaaggggcaagaccctaagaaattaagataaagctgctcagctaagttttataaaatctgacctgagtgttttctcttcatntgctgtgcttgtgtaaccagtgtgacaccatcgccacaacaggctcgggtctgtcctccccatatgttacctgaagatggagctaatctttcctctgctcgtggcattttgtcgcttatccagtcttctactcgtagggcataccagcagatcttggatgtgctggatgaaaatcgcagacctgtgttgcgtggtgggtctgctgccgccacttctaatcctcatcatgacaacgtcaggtatggcatttcaaatatagatacaaccattgaaggaacgtcagatgacctgactgttgtagatgcagcttcactaagacgacagataatcaaactaaatagacgtctacaacttctggaagaggagaacaaagaacgtgctaaaagagaaatggtcatgtattcaattactgtagctttctggctgcttaatagctggctctggtttcgccgctagaggtaacatcagccctcaaaaatactgtctcaacagctggaaatataaaagatttgcaaacttaa

SEQ ID NO: 254035 - DNA, 1208 bp, Homo Sapiens
  misc_feature (170)..(170): n is a, c, g, or t
  misc_feature (233)..(233): n is a, c, g, or t
  misc_feature (910)..(910): n is a, c, g, or t
  misc_feature (920)..(920): n is a, c, g, or t
  misc_feature (922)..(922): n is a, c, g, or t
  misc_feature (941)..(941): n is a, c, g, or t
  misc_feature (952)..(952): n is a, c, g, or t
  misc_feature (956)..(956): n is a, c, g, or t
  misc_feature (965)..(965): n is a, c, g, or t
  misc_feature (968)..(968): n is a, c, g, or t
  misc_feature (992)..(993): n is a, c, g, or t
  misc_feature (997)..(997): n is a, c, g, or t
  misc_feature (1000)..(1000): n is a, c, g, or t
  misc_feature (1002)..(1002): n is a, c, g, or t
  misc_feature (1008)..(1008): n is a, c, g, or t
  misc_feature (1070)..(1070): n is a, c, g, or t
  misc_feature (1085)..(1085): n is a, c, g, or t
  misc_feature (1101)..(1101): n is a, c, g, or t
  misc_feature (1107)..(1107): n is a, c, g, or t
  misc_feature (1110)..(1110): n is a, c, g, or t
  misc_feature (1143)..(1143): n is a, c, g, or t
  misc_feature (1151)..(1151): n is a, c, g, or t
gcccgcgcctttcgcgcttctgccgtggccctctgcgggccgctccgccggtgctgtccctgggcgcctccgtgctctcagccaaccgcctctgagagcgcccactcgagcgccccgggagccagagggcgggggtcctcgccgggaccctcctgtgggcccaggggganaaaagtggctctcaatccagcacatgcacattgaagcaagttaaaggatttaatatgaagcanagaagcagatagtgccaaatagaaagcagtagttgttacacatttctggaaaagcagtgtccgtgttgttatgtacacctccaaaaaaagttcaaatgtgtaggggaattgttgtgtaaagtaaactgaactgcagggtagcagtattttaatagctattatagacctgtatttactgtatttaaatgagtaaaggaacaagcagtgacacatcactaggaagggtgagcagggcagcatttccttctcccactgctgctgagatggcagaaattagtcgaattcagtacgaaatggaatatactgaaggcattagtcagcgaatgagggtcccagaaaagttaaaagtagcaccgccaaacgctgacctggaacaaggattccaagaaggagttccaaatgctagtgtgataatgcaagttccggagaggattgttgtagcaggaaataatgaagatgtttcattttcaagaccagcagatcttgaccttattcagtcaactccctttaaacccctggcactgaaaacaccacctcgtgtacttacgctgagtgaaagaccactagattttctggatttagaaagacctcctacaacccctcaaaatgaagaaatccgagcagttggcagactaaaaagagagcggtctatgagtgaaaatgctgttcgccaaaanggacagctgntnagaaatgattctctacctntgttgcgtggngggnctgctgccnctntttctaatcctcatcatgacaacnncagntangncatttnaaatatagatacaaccattgaaggaacttcagatgaccttattgttgtagatgcagcttcantaagactacagatantcaaactaaatagacntctacnacntctggaagaggagaacaaagaacgtgctaaaanagaaatgntcatgtattcaattactgtagctttctggctgcttaatagctggctctggtttcgcc

SEQ ID NO: 254036 - DNA, 886 bp, Homo Sapiens
cagaaggggccagcccgcgcctttcgcgcttctgccgtggccctctgcgggccgctccgccggtgctgtccctgggcgcctccgtgctctcagccaaccgcctctgagagcgcccactcgagcgccccgggagccagagggcgggggtcctcgccgggaccctcctgtgggcccagggggacaaaagtggctctcaatccagcacatgcacattgaagcaagttaaaggatttaatatgaagcacagaagcagatagtgccaaatagcaagcagtagttgttacacatttggtgagcagggcagcatttccttctcccactgctgctgagatggcagaaattagtcgaattcagtacgaaatggaatatactgaaggcattagtcagcgaatgagggtcccagaaaagttaaaagtagcaccgccaaacgctgacctggaacaaggattccaagaaggagttccaaatgctagtgtgataatgcaagttccggagaggattgttgtagcaggaaataatgaagatgtttcattttcaagaccagcagatcttgaccttattcagtcaactccctttaaacccctggcactgaaaacaccacctcgtgtacttacgctgagtgaaagaccactagattttctggatttagaaagacctcctacaacccctcaaaatgaagaaatccgagcagttggcagactaaaaagagagcggtctatgagtgaaaatgctgttcgccaaaatggacagctggtcagaaatgattctcttgtgacaccatcgccacaacaggctcggggtctgtcctccccatatgttacctgaagatggagctaatctttcctctgctcgtggcattttgtcgcttatccagtcttctactcgt

SEQ ID NO: 254037 - DNA, 351 bp, Homo Sapiens
gaaccagctctctcgtggctgcaattcctggctctatgtctgccttgctccacctgaaatctactccactcctgaagacccaggagttgagattgttctcttctagatgtacctatggcctagacaggtcaggtgactcctctggggcttgcaagtaatcagccaatcagtgggagagcactgattagcaggacatggggcagggcctccaggggatggtggaggaggctgacttctgacaactcaagtcagcaaacaataggcctaggattgaggactccaagtgcaatggaggtaaagggtggatgagggagtgctcgttgtccccttaaggttggggctgggggtggc

SEQ ID NO: 254038 - DNA, 359 bp, Homo Sapiens
agcagacaccctccccatttgtggaactagacaagactgaatcatcctagctctgaactacaaataatacatatagactttgctatatgaatataatcgtttctataacccccacaaattacacatcaatctataaaaccatccacctgtgtggattacagatgaccaaagacagaatcactgtgctcaattatataaggctgcactaaggatgaaagcccgtcatttaaaataccactttgttcttacacaatacctttgacttataagtgatctgtaaacagagataagagtaacaagcctgacaatactcaggtgatgaatatcccattttaaaagtaaatttagttgggaggccg

SEQ ID NO: 254039 - DNA, 804 bp, Homo Sapiens
agaaagaactatgttgctgctggagatcaatgaagccgagtgaatgggggctgaatgtgcgagtccatagctgaagaggagcgccagatggtggaggaatacacttatttatgaaactgtcttgagttcttcttgaattgccagttttcagcctcctcatgcctccgtctcctttagacgacagggtagtagtggcactatctaggcccgtccgacctcaggatctcaacctttgtttagactctagttaccttggctctgccaacccaggcagtaacagccaccctcctgtcatcgccaccaccgttgtgtccctcaaggctgcgaatctgacgtatatgccctcatccagcggctctgcccgctcgctgaattgtggatgcagcagtgccagctgctgcactgtggcaacctacgacaaggacaatcaggcccaaacccaagccattgccgctggcaccaccaccactgccatcggaacctctaccacctgccctgctaaccagatggtcaacaataatgagaatacaggctctctaagtccatcaagtggggtgggcagccctgtgtcagggacccccaagcagctagccagcatcaaaataatctaccccaatgacttgggcaagaagatgaccaaatgcagcaagagtcacctgccgagtcagggcccctgtcatcattggactgcaggccctttcatggagtaccacaaggaggtcccatcccaaggagctggtccacattaaactgggggccaataaaaatcaaccccggccgggagaactggcaagcaaaggggca

SEQ ID NO: 254040 - DNA, 1228 bp, Homo Sapiens
aacgttaatgacctgctgacccgagtgattgctgaggtcagagagcagctggggaaaacaggcattgctgggagccgagagattaggcatcttggctggcttgcagaaaaggtgccaggggagagcaagaaacagtggaaaccagccctggttgtgctgactgagaaagaccttttaatctatgacagcatgccacggaggaaggaagcctggttcagcccagttcacacataccctcttcttgccaccaggctggtccattcaggtccaggaaagggatcaccccaggctggtgtggatctgtcctttgcaacgcgaactggtaccaggcaagggattgaaacacatctcttcagagcagagaccagcagggacctctcccactggacaaggagcatagtacagggttgccacaattctgctgaactcattgctgaaatcagcactgcttgcacctacaaaaaccaggagtgccgtttgaccatacattatgagaatggattttctattaccactgaaccacaggagggtgcctttcccaagaccatcatacagtctccttatgaaaagctctgtcttcagatgatggaatcaggatgctgtatttagattttggaggcgatggagagattcaactggaccttcattcctgccccaagccaattgttttcatcattcattccttcctgtcagctaagattacaagactgggcttggtggcctggacaggggtgacttgcctttgagaaaagaagggctgcaatgccaccagagaacgtgatgtcagacaccatctgtagtgagcagcgcacccagatgtagcgtgctacagtcagctttagctctcaaagagtcgtatgtaactgtcccagactcctctgtcagtttcagcaactacaagggataccctgcgaaagtaccatgagaaatatcagagtaaaactttctagaacagtacaaggttaaagaggtgaggtgacgggaaatacacagcatagctttgaaataatgacaaccaaggacatgaccattagaacagcatgtgcagatcttaatcatcccagttcctaggcaacttgttcaccaggtacgcaagggccgaatagttgagaaatggacatttttacctactcctcctagccccctatccccagtaacagtgatcccttttcttattgtgatttatttcctaattcttgctgagttgactttcccttgtaggaaaaga

SEQ ID NO: 254041 - DNA, 665 bp, Homo Sapiens
agaaggccctgcagtttaagaacaagcccaagacccaagcaaaggcaggcaagggtgccaaaggacaggcggagaccggccgtcatacgcgagcctcatgaaagaaagatccttgcactgctggatgctctgagtacggtgcatagtcagaagatgaagaaggccaaggagcagcggcacctgcacaataaagagcacttcagagccaagcagaaggaggaggaggagaagctgaagcggcagaaggacctcaggaagaagctcttcagaattcaggggcagaaggaaagaagaaaccagaagtccagtttgaagggggctgagggccaattgcagtgagcctttggactggagggactgtccctggatctgcggaggtagacagtttcaaacatcacagtttgaatgcctgtgaatgacacgtcagtgggaaagagctcaagagatgtctctactcaaactgtgcctgcaggaggaggaacagagaagcctgggctgctgggactgggttcattctcatgacttggggctgtcgagatttaaagtgatgtaagctgtggttatgtggattctcttactttcctctgcctgcctcagtttaattattttgtcctacagaaatatcattaaaatatttttttgttacaagagaaagaagagaaaga

SEQ ID NO: 254042 - DNA, 682 bp, Homo Sapiens
  misc_feature (82)..(82): n is a, c, g, or t
acctcgagattgaactaactcttgttggccagagggggactggtctaggcagattccttgtagggacctaactcaaggcagncagggctaaagggtgacagagctcaatatgacccaatagcttcttcaaggtattcacagctgagcccacttggaggtcatatcagaagggaggcagaggacaggcaagtgtacatatgaaatcttccccaggtcacctctatgtggcctggtgaaagccctcatttgagggccttcctagtcatctgggctctcgttctcttgggaagggaggagaggacactgtttactcaagcattttactgacagagttgtttgttttctggtcccaccacctccccaaagaaccaaggccacagggcagggtgctagaggccccatccccatcagctgacccatgaggggtgagtgccgggtggtctagaagggaaagtcaaagactgggttctggtgtttctgggaaaaagcagagttcaaacctaccttcacgaagtacctcagctctgacgggatgatgaggacatctggggtgacaggcagctgtgcgtaaacatagaacgactcatagtcaatggccatgtcttcttggggcgggtagagtgggtagtagctcctctgggtcaagatgtgcttgagtattcggctgaatctgtctgaagtt

SEQ ID NO: 254043 - DNA, 647 bp, Homo Sapiens
  misc_feature (373)..(373): n is a, c, g, or t
  misc_feature (421)..(421): n is a, c, g, or t
  misc_feature (561)..(561): n is a, c, g, or t
ggcagaggagctactacccactctacccgccccaagaagacatggccattgactatgagtcgttctatgtttacgcacagctgcctgtcaccccagatgtcctcatcatcccgtcagagctgaggtacttcgtgaaggatgtcctcggctgtgtctgtgtgaaccctgggcgccttaccaaagggcaggtgggaggcaccttcgcccgactctaccttaggaggccggcagcggacagggcagagaggcagagcccatgcattgctgtgcaggtcgtcaggatctgaggcttctgtcctctgctgttctctgctgtgtgggcccttaaagtcttagccaagagccaagacatagccctgtgacaaggtgaacnagttgggtgggaaaaggagagaagagccagccagggaggggcagctgncagtgaccaggcccagcagggaggacttgtgcagccgggcctgcctctgagtggtgcctctcctggaaggaagctcttgcttctccagtccatgctccgtgtccagaagtaagcccagctgtggatcccgcccactcagnaaaggcgagaaggctttgtgattttctacatgaatcaaacacagaaacaacttttggagaaattaaattctgagtgtgactttcta

SEQ ID NO: 254044 - DNA, 1889 bp, Homo Sapiens
  misc_feature (1847)..(1847): n is a, c, g, or t
gggagacgctggcactatggtcatggcggaggggacggcagtgctgaggcggaacaggccgggcaccaaggcgcaggatttctataattggcctgatgaatcctttgatgaaatggacagtacactagctgttcaacagtatattcaacagaacataagagcagattgctccaatattgacaaaattcttgaaccacctgaaggccaagatgaaggtgtgtggaagtatgaacatttaaggcagttctgccttgagctaaatggacttgctgtcaaacttcagagtgaatgccatccagatacttgcactcaaatgacagcaactgaacaatggatttttctttgtgcagctcataaaactccaaaagagtgtcctgctatagactatactagacacacacttgatggtgctgcatgtcttctgaatagcaataaatattttcccagcagggttagcataaaggaatcatctgtagcgaaactaggatcagtatgccgtaggatttacagaatattttcacatgcttattttcatcatcggcagatatttgatgaatatgaaaatgaaacatttttgtgtcatcggtttactaagtttgtgatgaaatacaatttgatgtccaaggataacctgattgtaccaatttttagaagaggaagtacagaattcagtttctggggaaagtgaagcatgaagggaatcataggaaaaatgtactgatcatataattaacattatgtactgtatatatcattttagacacatcaatcatgtatccatattatagcttctttgtttagtataggtttttgtatgctgggtttgccttttaaaatgggaaatactttttaagttattcataagctgtatattcaccagtgtggcactcatggtttttaaataagattagtattatctgtttataatgcctgttaataaaagaatttacagtttggtaaaattgctgctaaacaatcattggatcacaatcctcatcagacaaacccatctgtaaaaaaaatgagggagagcttgaggtttcacacaagccatttactaaagaggtagaaatgttttctattggttttaccttgagttagatatcctaaaaaattctgtagtacgtagttttgtcttacctgttaactttccccaattgagataaaagtgttttaaaattctgtttatagtttttgatatgcatatataattatgtgtatatctaaatacaaatgcaaatgaagcattagtaatacttaaataatttttactgtgctacataaagtataacatacttggaaaggatttaccgttctgcaacaacggactggtacatacaggatgatcacaatgggaaggcacataaataattttcccactggaaacctgccctgtcccaccccctctcatttcccttaacccttatctccaaactactttagctgagaagcttttcaccagactgagttagtggtggcttatacctatttatatttgtattaattgcttacagagtatacctcatattagcaattacattacactacaagaaaatgtatttgcataggctcttgcttatctatgttatgcaaaaatgttctacttagcagtccttaggcagcattaaatagaattgaagaaataccatagtatatattgtacacacgccttttcacgaagtttatgtgtgtattacatgcacgtgtgagattatttgcacataattatatgttccaagggtgttgatgaatagtcatacatattattggactctgtgataattcattgtggtaagaatgattgagatgcagatctaacaatgctataatctattgaatgccatttntgataaagcactgggggtctcattgtcctgattgtaatgggc

SEQ ID NO: 254045 - DNA, 865 bp, Homo Sapiens
accagtagttcctttcccgctttattttttagctgctttttgggttttatacaatgaacatgtattaattgtagaagaaaacgatgtcatcctttatgataaaatccatttccattttagcttttttaaaaaaccaaaaagctgttgtggacagatgaacatccaagtactgggcacacttccagccttccttcttccattgaaggccattgcctattgctagaaagttctttcccaggtatgcagctttcagtttccacttcagaggccacagtgtctggggaacggactgcccccaatactaaagggagtcaaatctctttaattccgcactcctcaggatggcagcacggcgtcctaggccttgacacagcggctggggtttgggctgtcccaaaccgcacaccccaaccctggtctacccacagttctggctatgggctgtctctgccactgaacatcagggttcggtcagaagatgaaatcccaagggggacagaggtcagtagaggaagctcaatgagaaaggtgctgtttgctcagccagaaaacagctgcctggcattcgccgctgaactatgaccccgtgggggtgaactacccccaggaggaatcaggcctgggcgatgcaagggtgccaacaggaggggcgggaggagcatgtacgggtaaactgaatactgtgtccaattccataaattaacaatttagactttcttgaagctactgatgaaagcgtcacgcttcagtctaacagttaaacatcatctaattctgattggtaatgaagaggtagcagacactctaaagttggctctcacagggaagaaagcacagcatttacagaagggaccttgaaaaataa

SEQ ID NO: 254046 - DNA, 1200 bp, Homo Sapiens
  misc_feature (539)..(689): n is a, c, g, or t
  misc_feature (697)..(711): n is a, c, g, or t
  misc_feature (746)..(755): n is a, c, g, or t
  misc_feature (840)..(852): n is a, c, g, or t
  misc_feature (896)..(915): n is a, c, g, or t
  misc_feature (950)..(997): n is a, c, g, or t
  misc_feature (1073)..(1083): n is a, c, g, or t
  misc_feature (1112)..(1120): n is a, c, g, or t
gcctgacggagcaagagctgatggaacagctggaacactgtgagctggccccgccggctccttcagctccctcatggggctgtctccccagcccctcaccccgcatctccctcaccagcctccactcagcctccagcaacacctccttgtctggccaccgtgggagcccaagccccccgcaggctgaggcccggcgccgcggtgggggcagctttgtggaacgctgccaggaactggtgcggagtgggccagacctccgacggccacccacaccagccccgtggccctccagcggtctcggcactcccctcacacctcccaagatgaagctcaatgaaacttccttttgaacaacgcagctgccatgatgccttgggatgccctggtcctgggggactcaggtgcctccctgattcctgtgggaaccccgggttcagggccagggcctccttggaataaatggttattgttactaggtccccaccttccctcttatctggaagccaaagtcaccctccccaataaagtcctcactgccnnnnnnnnnnnnnnnnnnnnnnnnnnnnnnnnnnnnnnnnnnnnnnnnnnnnnnnnnnnnnnnnnnnnnnnnnnnnnnnnnnnnnnnnnnnnnnnnnnnnnnnnnnnnnnnnnnnnnnnnnnnnnnnnnnnnnnnnnnnnnnnnnnnnnnnttgtgggnnnnnnnnnnnnnnnaaaaaattttttaaacattctctttgggggggggnnnnnnnnnngggaaggggaaaaagggccttaacttttttttcctcaaaaaaaccgggcccgggaaaaaagaggcgtgggttttccccccccacnnnnnnnnnnnnnccgggcggggaaaccaaaacggttttgttaaaaaaaccccacannnnnnnnnnnnnnnnnnnnccttttcttggagggctaatcacaccggggggggnnnnnnnnnnnnnnnnnnnnnnnnnnnnnnnnnnnnnnnnnnnnnnnngggccccctttttttataaagaaaagtgggggggagcttcttctttataaaaatcctttccccaccgctgggaagnnnnnnnnnnnaaccccgcgcggtgggggaacctaaaatnnnnnnnnngcggggggtaaaaaccaccgttggggcggcgtgggctgaaaaataattattcccccccgggggagaaaaaagaggcgggg

SEQ ID NO: 254047 - DNA, 763 bp, Homo Sapiens
  misc_feature (697)..(697): n is a, c, g, or t
ggccgggcccctggtggcctctctctacacgactacaaactcctgaaaccgagcctggcggtcaacctggccgacccctaccggagtctcaaagcgcctggggctcgcggacccggcccagagggcggcggtggcggcagctacttttctggtcagggctcggacaccggcgcgtctctcaagctcgcctcttcggagctggaacgcctgattgtccccaacagcaacggcgtgatcacgacgacgcctacacccccgggacagtacttttacccccgcgggggtggcagcggtggaggtgcagggggcgcagggggcggcgtcaccgaggagcacgagggcttcgccgacggctttgtcaaagccctggacgatctgcacaagatgaaccacgtgacaccccccaacgtgtccctgggcgctaccggggggcccccggctgggcccgggggcgtctacgccggaccggagccacctcccgtttacaccaacctcagcagctactccccagcctctgcgtcctcgggaggcgcccgggctgccgccgggaccgggagctcgtacccgacgaccaccatcagctacctcccacacgcgccggccttcgccggtggccacccggcgcagctggccttgggccgcggcgcctccaccttcaaggaggaaccgcagaccgtgccggaggcgcacagacggngacgccacgccgccggtgtcccccatcaacatggaagaccaagagcgcatcaaagtggagcgcaag

SEQ ID NO: 254048 - DNA, 862 bp, Homo Sapiens
cagaaagtagatagccaggcttggaaaccaattcagagattttctctctgcatgtatgaaaatctggtctcacgtgactgccacaccacttctttaggaaaaaagcctacccgtcattcccaggtcctgggctgagctttccacaccactggttttttgaaaacctcttagatgagggtccctttaattttcagaccaatcttcttggtccagtcaatttcatggctcgcccacccatcccataggcagcctgatcactcttcccccactgccccaggtacctgatggaagcagtacggggcctgtgctcacgggaatccatcacccagcccacatggctctccaagggtgggtttgaactgtgtcttgtctttctcgaggcatcttggcatccagtgtccgtccttctttcaccactgggtaaaaccgtgatgtctggcttgagtctttgagctgtggtgtccggggagtgcgaggggtcctggtgttgcggtagtttggtgactctgggacagtggttggtagagagcgggcgatggtggagggctcaggagcaccaaacaacttgttggccagggcatccgtaggaacttgctggaaccgaggtggcccaggaggaactccctggttgggatccacagggggctcaggggtcagtgtgtcaaactgctcccggctgatcatattgacctttttgaagttctcgacttcttgcttgatctgggaatactcaggttcaaacttttcagcccacaggtcctgctcatagtagaagaggccatcattaatgaccttggccagttcggcgctcatcttggcacgcgaggtgtggttgcctgtgcggtccccccctgggtgcccc

SEQ ID NO: 254049 - DNA, 354 bp, Homo Sapiens
  misc_feature (128)..(137): n is a, c, g, or t
gtagcactacataggacaaattctattactaaataggctccaaattacattatacagttaaatgaaatgcaatataaaatactaatacaccttccaaaagtggaaatgcttaagtaccctatactagnnnnnnnnnnttaggctgtttattcaattccacaatgtataatacagcagttttatgtcccttattgctgacagcttcgataaaaactattaacaagtagttccaagcacagaaacagatgtacagtatgagcacgatttttctttatattaatttttaatgtcctatcatgtggattaaatgcataaagggcaaataaaaatgaggaatcttccataagtaatcaa

SEQ ID NO: 254050 - DNA, 257 bp, Homo Sapiens
ccaaaataatttcttcattctcatgtcataattaagtgtccatttgacagctcctgagaaaaaaactggttcaaagttctttatccaaagccaaaaacatgattgattaaatggatattttggagttcgttcatgtcttttctctctaaagattgtgttttgggagactagcttccacataagtacttaaaaaatggaaaaagaggatcatcgataaatgagagaagagtctatattcgttgatggaaaagtgtttt

SEQ ID NO: 254051 - DNA, 1213 bp, Homo Sapiens
  misc_feature (1041)..(1041): n is a, c, g, or t
ggggccgtcacccggtgcgaacccgcgagaggcctagtgcagctggcagccccgccccggcacccgcctactcttctcgcgggtccggaccgcgagcgcgggggccgacgggtcgccgctgcgccgggccgggatggcggccaccgcgctgctggaggccggcctggcgcgggtgctcttctacccgacgctgctctacaccctgttccgcgggaaggtgccgggtcgggcgcaccgggactggtaccaccgcatcgaccccaccgtgctgctgggcgcgctgccgttgcggagcttgacgcgccaggtgagccgggccggggagcccgggcccctgccccgtccccgccgctccgtccctgtcgggccgctggggtctccaccgtctttgctgagccacctctttgcctcggcagctggtacaggacgagaacgtgcgcggggtgatcaccatgaacgaggagtacgagacgaggttcctgtgcaactcttcacaggagtggaagagactaggagtcgagcagctgcggctcagcacagtagacatgactgggatccccaccttggacaacctccagaagggagtccaatttgctctcaagtaccagtcgctgggccagtgtgtttacgtgcattgtaaggctgggcgctccaggagtgccactatggtggcagcatacctgattcaggtgcacaaatggagtccagaggaggctgtaagagccatcgccaagatccggtcatacatccacatcaggcctggccagctggatgttcttaaagagttccacaagcagattactgcacgggcaacaaaggatgggacttttgtcatttcaaagacatgatgtatggggattagaaagaactcaagacactcctgcttgatacagaacaaaaagagcttaacaggaccaacagggcttaagcccagacttgacgtaacagaaatgtgccaataggtaataggtaatttttctttctctgacttgttttgttttcttgaaataacactgttgtgtggctagaaacgatcataanaccttctgcaaaaacgaaaaaccatgtccggccgccctcggccctcgaaaaagctttctaagaccattccgtttgggcgcgcgggccccattagggaaggggaacatgggccatagctggtttcaaaggaaaacctgggtcatgaactaagggcttgggattctcccccatt

SEQ ID NO: 254052 - DNA, 855 bp, Homo Sapiens
ggggggggccgacgggtcgccgctgcgccgggccgggatggcggccaccgcgctgctggaggccggcctggcgcgggtgctcttctacccgacgctgctctacaccctgttccgcgggaaggtgccgggtcgggcgcaccgggactggtaccaccgcatcgaccccaccgtgctgctgggcgcgctgccgttgcggagcttgacgcgccagctggtacaggacgagaacgtgcgcggggtgatcaccatgaacgaggagtacgagacgaggttcctgtgcaactcttcacaggagtggaagagactaggagtcgagcagctgcggctcagcacagtagacatgactgggatccccaccttggacaacctccagaagggagtccaatttgctctcaagtaccagtcgctgggccagtgtgtttacgtgcattgtaaggctgggcgctccaggagtgccactatggtggcagcatacctgattcaggtgcacaaatggagtccagaggaggctgtaagagccatcgccaagatcccggtcatacatccacatcaggcctggccagctggatgttcttaaagagtccccaagcagattactgcacgggcaacaaaggatgggaccttttgtctttccaaaaacatgatgtatgggggaataaaaagaaattcagaaccctcctgcttgataccgaaccaaaagaactttaacaagacccaccggggctttaagcccccaaacttgacgttaacaagaaatggggcccataaggaaaaaaggtaaatttttcccttccccgggaactggggttgggttttctctgaaaacaaccccttggttggggtggggctaaaaaa

SEQ ID NO: 254053 - DNA, 548 bp, Homo Sapiens
ctgccacataaatcctctgagggagatgatgacaattcactgctgattaatgccattctgcctttactgtaattagaaggaaataaccccagaatacaaggaatttagcaagataaggaacccctgctgctacctaaacatccatctaaacaaagatgtttggcttttgaagcaaagagtttggttcttaagactgtgttctttgacagttaattttcaagaagactgaagactgaattatcattgttgagaattctctaggtctcagtaaccctctgaaccagcagtttgggtggtcgatgcctagcaaataggagtgggtggccttttctctggtgtataagattcatctaatttttaggaatttttgtaccattttccccctctagaaacacatttactccccaataattgtacgggaggtgatcgaggaagaagaaccaagtgaaaaatcagaggccacctacatgaccatgcacccagtttggccttctctgaggtcagatcggaacaactcacttgaaaaaaagtcaggtggaggaatgcca

SEQ ID NO: 254054 - DNA, 545 bp, Homo Sapiens
  misc_feature (405)..(405): n is a, c, g, or t
  misc_feature (482)..(482): n is a, c, g, or t
  misc_feature (500)..(500): n is a, c, g, or t
  misc_feature (520)..(520): n is a, c, g, or t
acctggtttagtactatatttgatccattctataagttcttcttggggcaaattgctgaactcccctacaatattccactgggtttgcagatttgctgaaccttgtattgacattgctgctaatatagcaaacacaatagcaacaggatgtactttgcaaaagagccatccaaatagctgaaaccaaattaagaatacattggtaattgttagtataagtagtatgcatctgttatgcaaaacttcttcccagagaagaataaggcctctgctagagtcccaaataaaggattaattatcctaaagaaaaagccccaaaataataatctttgggatcaaaaggattctaccatcagcctcatataagtgggaacacaatgtaggaagctcttttctcaacctggntttcactactccccagattcaagtaaagccacaaccaatttaccaggcccagtacaaaccaaaatggtgggggcccntgttaaaaaatttagganggttccaaaccggcagcggnaaacattcaatcaagttccggggcc

SEQ ID NO: 254055 - DNA, 656 bp, Homo Sapiens
aagctgaactgcggatcccagttggtctctggcagtgggatcctggagaggagaaatcctggcctctgctcatgcgcaggccacaaccgggctggaagtgcggttgagctctctgccactttcttcaatgtaaaaagtaggcatcaaagatacgacttctactatatacatttctctgtccctgagaacagagaaacgtaaccctgtaggggactggttacagaggacctcctggagcatctgccccattcctccaagtccaagcacagccatgctgagtggaagcgaggccaccatctgagtggattggtcccaagtgtgtaatgaggaaagtggccaggtgccggcacagtgcctctcccagagcctcaagaagggccatttaggagcttgcttcaacccattttcccaaccattttctgtgaaatgctgtcagcccaaactccaaagggatgtgcagcctttcgttttaccaaattctttgctgtcgtttggaaaaaatgggccatgtggtggagacctttatttaaggtgatttttacagaaatgtgattttgctgtaggtgattatccaaacaagtaaatttgagtgtataatttaatttttaacctgttaaataaaccttgtccctccaaggagttcatttttgggaaac

SEQ ID NO: 254056 - DNA, 1234 bp, Homo Sapiens
  misc_feature (44)..(44): n is a, c, g, or t
  misc_feature (53)..(53): n is a, c, g, or t
cacaaaaggacaccctaccaaattatgaaacagacccatttttnaataattanttaaccacaatgtggcataagggtttaggccatataaccccataaaaaatttgttaaaaggtcatggtttttccttaaaagctaaaaatccataaatgcctctaaccattacccagtcagtagggccaccacatgcatatactggacaggttgtgcacggcacaactcgagtgggtaccagtcacctggactggggtgcagtacacaatctgtgtgcagtacagaaagccctcatcagctgtggccagagaactgtattctaacagtctgtcagctcaagctaatcaagttaggaaaactgctatttggttggaggatttccaagaaacagctgtacctgtgagaggcaggtattacctgaggggtggacgaggtacagacataaaacaggaagggttctaaatatatttgctggtcatttgaaactcaatggcacttgtttatatgagcaaaagccttcaacaccagttttctggccaagtttccctagaattttgccagccaaattaacttcctgatgttaactatttgattacaatatctcagttcccgacctaaactaatattgtctgttttcacatagctcttaaaaacatttctaaatctgacagcaaaggacagcacagtgatacctgggtgtgatatatatcagtccactcaatttaataaagcactttgggataaaaggtgctccccattaaaaatgtagctactattgacagataaaactgaaaaagagtgaatggatgactcaattatttttaaaggaagcattaaccactaaccagataatataccaacaaattacccagccagcaactaagaataccatgtaagattcagttcccagaacacagctacatttctgtgtccatcacagtaattagtccttaaaagttgtacttaaaatgtcaatctttaataaactcaaaaataatttattgagatttcatcttgtagtctacggattatgagttgcgaatagaggctgaggtccccccaagtgttatctgcaggctgctgtgttgatgcagagctgggaagatcacagatccatggagggagaaggcacttgtcttccaggagatcacttcgggacagggcaggcctgaccctgcgacggcaccttcaactcttgagccagaagctggtacctacaaggaactcatctcatgaccttc

SEQ ID NO: 254057 - DNA, 603 bp, Homo Sapiens
agggcgggcaaaaagttccagggcatacattaaaagggaactccacaacaacaatcgtccgatatagctcaaataatcccgctataagctgagaccggacaccgacgtgcagcttgatgcgcgccatccaggagacgcgggccgcttgtatcggggtcgaaccgtcgccagggacacccgggggtcaggctattccagagctcgcgagtctccgtggccttgccgtatcgttccggttgggcaggaatctaacttacaggcgatcagtcataatcccacagatggtagcttcgccccattggctcctcagccaagcacatacaccaaatgtctgaacctgcggttcctctcgtactaagcaggattaccatggcatcaacacatcatcagtagggtaaaactaacctgtctcacgacggtctaaacccagctcacgttccctattagtgggtgaacaatccaacgcttggtgaattatgcttcacaatgataggaagagccgacatcgaaggatcaaaaagcgctgacacctcctgcttaaaacccaaaaggtcagaaggatcgtgaggccccgccacggtctgtattcgtactgaacctgca

SEQ ID NO: 254058 - DNA, 663 bp, Homo Sapiens
cagagggcagccgacccacaatcaatgactcaaggggcactatctgggaaacgcatactccgtgagagaagcaggaccgaaacacacagaggcagcggggctcagagaagcacagtgcagaaacccgcgcggcacgagctagccctattagctcttagtaagattacacatgcaagcatccccattccagtgagttcaccctctaaatcaccacgatcaaaagggacaagcatcaagcacgcagcaatgcagctcaaaacgcttagcctagccacacccccacgggaaacagcagtgattaacctttagcaataaacgaaagtttaactaagctatactaaccacagggttggtcaatttcgtgacagccaccgcggtcacacgattaacccaagtcaatagaagccggcgtaaagagtgttttagatcaccccctccccaataaagctaaaactcacctgagttgtaaaaaactccagttgacacaaaatagactacgaaagtggctttaacatatctgaacacacaatagctaagacccaaactgggattagataccccactatgcttagccctaaacctcaacagttaaatcaacaaaactgctcgccagaacactacgagccacagcttaaaactcaaaggacctggcggtgcttcata

SEQ ID NO: 254059 - DNA, 990 bp, Homo Sapiens
  misc_feature (37)..(37): n is a, c, g, or t
  misc_feature (52)..(124): n is a, c, g, or t
  misc_feature (964)..(964): n is a, c, g, or t
agtgatgccctgtaaactgaagatcccacgagctgcnagagattcgcacgannnnnnnnnnnnnnnnnnnnnnnnnnnnnnnnnnnnnnnnnnnnnnnnnnnnnnnnnnnnnnnnnnnnnnnnngtgtgagccaccacacccggcctcagggcaattttgcataatagaaattcaagaaagactttaggaaatcagtacccccttctatgatgctgagaagtcaagatattagcttgatataaaagctagatattagcttgatataaaagactcagttctaatcaattagacatttgaaatgtcttagacaattgaaatcaattaggcaattgaaaatatgcacattaagagtcatggataattaggaaatacacattaagagtcccaagagaaggactctggggtttccagcatccctttctataatgtaaaaggggtagaatataggtttaaagggagagaccatgaacattggaattttgcacattcatagtcccagggaaaggtaacataggtaattaatatcccttgctgtaaaacaaggaggataaaatggatctgatctgaaagacattgttgtgatcagttgccatggttcacattaactatcctagtgcaaaggtcttgactagaggtcatccactgctgaacactagggaagtgagtggggtctttagtgcacaggaagagggacaaatgcaagtagcacattaacagtacaaaagaaatgtccttgtgattagcaccctctactgtaatgctaagagggtgtgagcagttgggatcttaatttaatggaaaagaccataattgcaattatgcgcattaacagtcccaagtaccccctgctgtaagacaaaaggaatatgaggggatgagaccccagactaacagcagatagggaaattgcattttgcacatcaataatttctggaggaggggcattaggtaaccagcaccctncttgatgtaaagcaaagatgatgcag

SEQ ID NO: 254060 - DNA, 566 bp, Homo Sapiens
attaaggggggcagcgcggggtcgccatggctgagctgcagcagctccgggtgcaggaggcggtggagtccatggtgaagagtctggaaagagagaacatccggaagatgcaggtgagcggcccgaggcccagcagaggcgctgccaacgtgaaagaccagaaaggcgaggacttccggcctccccgttggccagggtctcatgttccggtgcagcgccagctgttgtgaggacagccaggcctccatgaagcaggtgcaccagtgcatcgagcgctgccatgtgcctctggctcaagcccaggctttggtcaccagtgagctggagaagttccaggaccgcctggcccggtgcaccatgcattgcaacgacaaagccaaagattcaatagatgctgggagtaaggagcttcaggtgaagcagcagctggacagttgtgtgaccaagtgtgtggatgaccacatgcacctcatcccaactatgaccaagaagatgaaggaggctctcttatcaattggaaaataaaagtatttgccagtggccatcagggctgagggcaagaatat

SEQ ID NO: 254061 - DNA, 1074 bp, Homo Sapiens
  misc_feature (791)..(791): n is a, c, g, or t
  misc_feature (794)..(794): n is a, c, g, or t
  misc_feature (963)..(963): n is a, c, g, or t
  misc_feature (1004)..(1004): n is a, c, g, or t
  misc_feature (1041)..(1041): n is a, c, g, or t
  misc_feature (1055)..(1055): n is a, c, g, or t
ggggattccatatgggcgccggcgcggagcgccgcggggcagcgcggggtcgccatggctgagctgcagcagctccgggtgcaggaggcggtggagtccatggtgaagagtctggaaagagagaacatccggaagatgcaggtgagcggcccgaggcccagcagaggcgctgccaacgtgaaagaccagaaaggcgaggacttccggcctccccgttggccaggtcatgcctgcttctcttgcgcccaacctcgcttcacacagcgcgggtttctacactgttcttctctgagccccgcaatgcctctgtgtgtttcggtcctgcttctctcacggagtatgcgtttcccagatagtgccccttgagtcattgattagtgggtcggctgccctctggtggaatttgtattgctaggttgctgacctctgaaccccatggaagaggctcctggttttcagaatttggcttcgtcagaccaccctaccctcacccactcgggcgaacctctgttcacccaaccatcggtgcaacaggtgccgatgagctagcagcaaggacaccatgaaacactacactagacattgaggataattttccccagtggtggttttaaggtcctggtgtctattctcagggaaggtgaaagcagaaagtggagagagaggtgcaaatatccacgtggccttctaactcctgtagtgctccatagtcatctctgtccccagagactttcctacctaacctctctgccctttcctccccagggcctcatgttccggtgcagcgccanttntgttgaggacagccaggcctccatgaagcaggtgcaccagtgcatcgagcgctgccatgtgcctctggttcaagcccaggctttggtcaccagtgagctgggagaagttccagggaccgcctggcccggtgcaccattgcatttgcaacgacaaagccaaagatttcantagatgctggggagttaagggagctttcaggttgaagcagncagttgggacatttgttgttgaaccaatgttttgggntgaccacttgcacntcttcccaattttggacct

SEQ ID NO: 254062 - DNA, 1802 bp, Homo Sapiens
  misc_feature (1244)..(1244): n is a, c, g, or t
gggggggcgggcccgtacgccgattccatatgggcgccggcgcggagcgccgcggggcagcgcggggtcgccatggctgagctgcagcagctccgggtgcaggaggcggtggagtccatggtgaagagtctggaaagagagaacatccggaagatgcagggtctcatgttccggtgcagcgccagctgttgtgaggacagccaggcctccatgaagcaggtgcaccagtgcatcgagcgctgccatgtgcctctggctcaagcccaggctttggtcaccagtgagctggagaagttccaggaccgcctggcccggtgcaccatgcattgcaacgacaaagccaaagattcaatagatgctgggagtaaggagcttcaggtgaagcagcagctggacagttgtgtgaccaagtgtgtggatgaccacatgcacctcatcccaactatgaccaagaagatgaaggaggctctcttatcaattggaaaataaaagtatttgccagtggccatcagggctgagggcaagaatatattttttataaggaattgggaattttagtcttttaagcaaagtttacgaatgaagaaatgaaggatggccacaagcgtaaggcatatgtcacttgcctctggacactggttattttatgtttcagtccctaaaaaatgaaatggaaaaaagtggtgctaaatcgagtcagagatattacaggagagttttagagcttattatttcctgtggccagtgcttgtcctggcagtaaggctctcccctgtaacaagccagagccctccaaggtaccagactcttcttactacacaggtactaacaggctggcaggttagagttggtggagtctgaggagagatattttctctttgttgccaacatcctgtttaccaaaagtgtcaccccaccatcttccataagctgtgaaacaaaatcaatgaggtcactaacttagaagggaaagaaagttttctgggtctttgttttcttgatttggggtaatttatacaagggcatacaagttgattttaagatgtggaactgggaggtagactagtttggataagaactttgaaatgttccttgtggatccccatttctggtcatcaagatgtggatgtacatttcttaaaattattacatgctgcatctttcagcctggagactgtgcagaaacatgagaggtgatgacacactaattatgggaagcagaattactggctgatggcccctgnaggctgtgtgtaacaaaatgacaggacaatcttgcagtaacactttccccttgaagagaagggggttttgattgtgatatatactagtatctaggaatgaacagtaaaagaggagcagttggctacttgattacaacagagtaaatgaagtactggatttgggaaaacctggttttattagaacatatggaatgaaagcctacacctagcattgcctacttagccccctgaattaacagagcccaattgagacaaacccctggcaacaggaaattcaagggagaaaaagtaagcaacttgggctaggatgagctgactcccttagagcaaaggagagacagcccccattaccaaataccatttttgcctggggcttgtgcagctggcagtgttcctgccccagcatggcaccttattgttttgatagcaacttcgttgaattttcaccaacttattacttgaaattataatatagcctgtccgtttgctgtttccaggctgtgatatattttcctagtggtttgactttaaaaataaataaggtttaattttctcccc

SEQ ID NO: 254063 - DNA, 1593 bp, Homo Sapiens
  misc_feature (1038)..(1038): n is a, c, g, or t
  misc_feature (1277)..(1277): n is a, c, g, or t
  misc_feature (1334)..(1334): n is a, c, g, or t
  misc_feature (1438)..(1438): n is a, c, g, or t
  misc_feature (1490)..(1490): n is a, c, g, or t
  misc_feature (1505)..(1505): n is a, c, g, or t
  misc_feature (1523)..(1523): n is a, c, g, or t
  misc_feature (1539)..(1540): n is a, c, g, or t
  misc_feature (1586)..(1586): n is a, c, g, or t
gacgaactgcacgggtgggattgcatggctctgccctcccagcgttgacaactcgccccgaccgcccaggaagcgcgagcttactggctccagaagtgatgatgctgggtggaagtcgcagctatctgaagaggagccggttgctatggctaataatcccttggaaggcttccatgaagtaaaccttgcttcacctacttctccggaccttcttggtgtgtatgaatcaggaactcaagagcagactacctcaccaagtgtcatctaccggccacacccttcagctttatcctctgtacctatccaggcaaatgcattagatgtttctgaacttcctacacaacccgtgtattcatcccccagacgtttaaattgtgcggaaatatctagtatcagctttcatgttacagacccagccccttgctctacctctggagtcacagctggattaactaaattaactacaagaaaggacaactataatgcagagagagagtttttacagggtgctactataacagaggcttgcgatggcagtgatgatatttttgggttgagtactgatagtctgtctcgtttacgaagcccatctgttttggaagttagagaaaagggctatgaacgattaaaagaagaactcgcaaaagctcagagggaactgaagttaaaagatgaagaatgtgagaggctttcaaaagtgcgagatcaacttggacaggaattggaagaactcacagctagtctatttgaggaagctcataaaatggtgagagaagcaaatatcaagcaggcaacagcagaaaaacagctaaaagaagcacaaggaaaaattgatgtacttcaagctgaagtagctgcattgaagacacttgtattgtccagttctccaacatcacctacgcaggagcctttgccaggtggaaagacaccttttaaaaaggggcatacaagaaataaaagcacaagcagtgctatgagtggcagtcatcaggacctcagtgtgatacagccaattgtaaaagactgcaaagaggctgnacttatccttgtataatgaattccgattgtggaaggatgagcccacaatggacaggacgtgtcctttcttagacaaaatctaccaggaagatatctttccatgtttaacattctcaaaaattggcttcagctgttctggaggctgtggaaaacaatactctaagcattgaaccagtgggattacaacctatcccgtttgtgaaagcttctgcagttgaatgcggaggaccaaaatcacntctgtatgtaacttttttacatacattcgatacattcagcagggactcgtgaaacancaggatgttgatcagatgttttgggaggttatgcagttgagaaaagagatgtcattggcaaagctgggttatttcaaagaggaactctgatgctctgcgtgggnccatccctgaactcccccaataactcaaaaatggctgaatatttttatggtnacttgatatttattnccaaggagtcaccctaanacttttttcccctttnncaaattgctctaagaagtaccatgatttcttttaaactgatctatnctgtgtt

SEQ ID NO: 254064 - DNA, 599 bp, Homo Sapiens
ggggaatggagtatgaagtgaaaggaggagtttggtttgtagagtttgagatgccagagggccatccaagtggaaagataatcaccagacaataggaaatgcaaagttgaagcttgagccaggctggagtcattgattcaggagctgtctatgagttgaagctatacaagtggattaataaaaggataacctcaagaagcaaatgattttagggcttcttttttcgttgaatttagaaaagaatcaagttaacaggaaaaggtggttcacatctgaaatttggtatttaactgcattttagacccactaaaaaagctaaaaatagttgatgaagtttggagaagttatgctgaaggttatttgggtccccgtctaaaccatgctgtctggattcacattcgctttcctattcttggattccataacataatcccatcttgtactttttagatactgatttccccacataggtacatttttgcaattgttttcctctaatgagttgtaagacagataaaatgtgattggcattaaacatcacttgggaagagtttggttctttttagcttgaggttggtggctgaatactacgggttttg

SEQ ID NO: 254065 - DNA, 372 bp, Homo Sapiens
ggggaatggagtatgaagtgaaaggaggagtttggtttgtagagtttgagatgccagagggccatccaagtggaaagataatcaccagacaataggaaatgcaaagttgaagcttgagccaggctggagtcattgattcaggagctgtctatgagttgaagctatacaagtggattaataaaaggataacctcaagaagcaaatgattttagggcttcttttttcgttgaatttagaaaagaatcaagttaacaggaaaaggtggttcacatctgaaatttggtatttaactgcattttagacccactaagctactccatgctgtctggattcacattcgctttcctattcttggattccataacattccct

SEQ ID NO: 254066 - DNA, 604 bp, Homo Sapiens
  misc_feature (64)..(64): n is a, c, g, or t
ccccgcacaacccttgcagcttgaagaagtgtagaccgatgaaaccacatggtgcgggagcccntgcagaggtgttctcacaccctcagcgacttgtgcacagtggccggatcagggttgggggcctgtcatactgggcgctcctttctctcagggaaccagtgtctttcttggtttaaaaaataaataagtaaatattgggggacctcttaaaacacttaataccagagcctcaaaggcaaaattcacctggctttgaagccaaatctgtatggtgctgagaatgaaatctgtccgtctaagatgacaataagaccttccagggaaccaggcagaaaggtgggcaggtacagtggccaatttcccagagaagatcctcaatatctgacttttgagagaatttaaatattcattcttcaaattaaggaatacaagtgaacaacctgaaaagatttttagaagctcattagctgtgtgttatttgaacgcaaaaatgaggaagagatatgagcgggaaacaggagagtataggaaggcaggccagggtgcagccaggccccagcaggggcagagcgggaagcagcgagcggaaagcaggggagag

SEQ ID NO: 254067 - DNA, 1147 bp, Homo Sapiens
ttctttagggaaacggctggttgagaggctttgatggaatcccattctctgctgtggccagaaggtggtgctagaggccagtcccacttgtatgtgaccctggcctctgccagatttcaaaccacaaagaacatttggaactgggatgtttgctttgaagcagcccgaaaacaagtgaaaggaaaccaagataactctctctccctccgctggcaaggatcaaaaataccttgtgcagggaagcccgagcctcgaggggccactgccagctaaagatgactggacaccagccatgcaccatcaggaaccagcacctgtcctcacccctgagaagagccccgggggtatcattatatccatcgcagacatctggtttgcagcaaatgtggctacacgccatcaggattatcctgccctgtggactgggctagctagttttgagatagagtcaacctccccatttttgtttgtcatgaaaacaccagctcctgcacccctgggctgtaacctgacacctgtgcaaagaaaaggaggaaaacttagaagaaaaggcagagacaggcaagacagcatctcacagcttgtcaggatcagggcattaccgactattttttcttaccaaaagagcactgaatttcctaggggaaggtgagccacctttacacctcctgtcctccctcccagcccgtcaagcgatcccatcacccagcctcattcactcagcttcttcctagtacaaaactgccatcggttgtacgtcctgagctgtgggacgtcagctttaaccctagcctgtctcagggcctcgcctcccagccccccgccccttagggtggatcgtgggtttcttcccttcctcctgcacaatcgcttcccttcactgaattcccttcaaagccaaagtttcttgagcactttttcttgtgtgcagtcttgtgtgtttgggtgttggtgtttttaaatttgctttctattcccccctgcctctctccatgtcgttacgcagctgagcactggttgggatgcattcgaatgacttcagcaagatcctgctttcctcagcccccgctctgttttatttattgtttaatatttccaatgatccaaatcaaagtgaataaacaaagagctattttattgaaaaaaa

SEQ ID NO: 254068 - DNA, 417 bp, Homo Sapiens
  misc_feature (111)..(111): n is a, c, g, or t
acccaaaatgtcctgccgaatggaataataaatgaaaaacccccggggcctccttcctcaggggtgaaggaacaggtgcctggttccctgatggtgcatggctggtgtccnagtcatctttaagcctgggcagtggcccctcgaggctcgggcttccctgcacaaggtatttttgatccttgccagcggagggagagagagttatcttggtttcctttcacttgttttcgggctgcttcaaagcaaacatcccagttccaaatgttctttgtggtttgaaatcctggcagaggccagggtcacatccaagtgggactggcctctagcaccaccttctggccacagcagagaatgggattccatcaaagcctctcaaccagccgtttccctaaagaatcacccagatcttaactgccc

SEQ ID NO: 254069 - DNA, 470 bp, Homo Sapiens
ctggcaggcagtggcagggctccctcaggcccctgattcccagcccacagctctttctactctgcagacagagttccttggagactggccctgcattcaggcagggagcagaggggtccctgcctgcagcacccagagctgaacctgaagctacaaagatgggctgatgaggtggcccatgaggtgtcagcaacatcccaaccccctgggtctccccagtgagtcagggcactgatttgctatagctggagctacatgcacctctcctcccctcagccaccttttaggggagaaaggagggcagatttgtaacctctggttctctgcagggatcctgggctggaagaaagttcataaatggatgaatgccttttaaaactccagcttttccaagcatcattcaccaaagcatttggttaggcttagagagaaaagctggatatgagaaaatagaatgtaaaataggaggg

SEQ ID NO: 254070 - DNA, 1401 bp, Homo Sapiens
gggggagctcccacagctaacatggcggcgccctgtgtgtcctacggcggagcagtttcgtaccggcttcttctctggggtaggggtagcctcgcccggaagcaaggcctctggaaaaccgcggcccctgagttgcaaacaaatgtcagatcccagatattaaggctaagacatactgcatttgtaataccaaagaaaaacgttcctacctcaaaacgtgaaacttacacagaggattttattaaaaagcagattgaagagttcaacataggaaagagacatttagccaacatgatgggagaagatccagaaactttcactcaagaagatattgacagagctattgcttaccttttcccaagtggtttgtttgagaaacgagccaggccagtaatgaagcatcctgaacagatttttccaagacaaagagcaatccagtggggagaagatggccgtccatttcactatctcttctatactggcaaacagtcatactattcattaatgcatgatgtatatggaatgttactcaatttagaaaaacatcaaagtcacttgcaagccaaaagtctgctcccagaaaaaactgtaaccagagacgtgattggcagcagatggctgattaaggaagaactagaagaaatgttagtggaaaaactgtcagatctagattatatgcagttcattcggctgctagaaaagttattgacatcgcagtgtggtgctgctgaggaagaatttgtgcagaggtttcgaagaagtgtaactcttgaatcaaaaaaacagctgattgaacctgtacagtatggatgagcaaggaatggcctttaccaaaagcgaaggtaaaagaaagactgcaaaagcaaaagcaatggtttataaacatggaaagggaacaataaaagtaaatgggaattgattaacagctttacctcccgatcacacaggacagagaacagctgatgttccctttccactttgttgaccggctgggaaagcacgacgtgacctgcacagtctcagggggcgggaggtcggcgcaggctggagcaatacgactggcaatggcaaaagccttgtgcagctttgtcaccgaggacgaggtcgagtggatgagacaagctggactacttactactgatccacgtgtgagggaacggaagaagccaggccaagagggagcccgcagaaagtttacgtggaagaaacgctaagggtttgctcccaggaaaggagaggaagagctatatatatgtgccggcatgtggcagacacacagtaaataatggctgaccagcatgagggcagtactgtcagaaatttctttgagctgtgagatggatttattttttaaatgctacctttgtaaaggtggactttttaaaaaaattaaaggggaaa

SEQ ID NO: 254071 - DNA, 1658 bp, Homo Sapiens
  misc_feature (26)..(26): n is a, c, g, or t
  misc_feature (227)..(227): n is a, c, g, or t
  misc_feature (392)..(408): n is a, c, g, or t
gagcaacgagaaacctggccggatgnaggcgctcagagccagcgcccaagacacccctcgtcaatttccaggagaaagcagcccctggagacggcgccacaggcaggacgggcgtggtctgcaggaggatctccaggcccctgccgccctccctacagtcctctctgtctgaaggctgagtcccagcattcacttctcacacgggcttctccaacgtggcagcggcncaggcctcagcatggccctgagcgcatggacacaggcacgactgcttgaaaaaggcggcggccccacggcagcctggactggccagcctgccaacagaccaccagaaacggggccaccagacagatagtccataccctgtggcttccagaggttctcctagtttnnnnnnnnnnnnnnnnngtcttcttaaccctgatgctgtctcccgaccatagattagggaagcaagatggggggataccgaatcaacttacttaacttacctcagaagtaacaaggtctactgggctatgaacaaagaactagaggaaacatgtgcaaaaacaagtcgatatctagattagacctccccacgaaacaaagtggactcctgtcccctgccactcagcggccacccccccaagatgcttggtcctaccagtaagtgctacaggtgtgtgagccccaagccccacccgcaggatcttccagccacatgaggccatttaggtccaaagcagtcggatccccctcccctccagagctggacctggggagaggctgcttcagtttggagaaaccgagtcagaatggtgcgatgccaggtgctggctgtggtggaaaggtcctatgcgagaaacccctggtgccctaagtctccaggcagaagtcagagaagcagagtggagctcccagcacaccccaggactccgtgggcaggagcgaccagaggggctggaatgctggggaggtggcctggtggcaggggaggccagggcctgcagttcttcaaggaagaggcaagtgggggcctagtgagtggcagggcggagggggcgcatggctcccgcgtcaggcatagaattcctcctgtttggtgggcttctggtaggccccgccgttggcttgtttcggctcctccaaggagtagctgccttcgtccttcttcttcatgcggtacagcatgaaacccaccaggcacacagcaaagatgagccccacgaggcctccggcaatgacccctcccagcacctctttcctgtccaggaggccctgtgaggcccccgtggccccctgatccactggggactggttccggcggtcaggctccacggccactacagccgtattctcccccgaggtttcaaaggtgaagtcctgctccccagagccctctgctgctgggagctgactggaggctccatcctcagcagccctctcggtggcagaaggacctccatcctctgtgtggggagtgtgaaggtcagcttggctgggtcctgcaggggttgaggtctcatggtggccaggctgcatgtccctgtgggggtgggaggtggcgggctcctgggccgtggtggctgtggtcgttgaggcctgatgagtggtcgggagctgtgtggtctccctgggtcggggggtggcccctcgtgccgaattcgccacccagc

SEQ ID NO: 254072 - DNA, 1157 bp, Homo Sapiens
  misc_feature (939)..(950): n is a, c, g, or t
  misc_feature (1034)..(1044): n is a, c, g, or t
  misc_feature (1087)..(1098): n is a, c, g, or t
ggcgattcggacgaggggccaccccccgaccagggagaccacacagctcccgaccactcatcaggcctcaacgaccacagccaccacggcccaggagcccgccacctcccacccccacagggacatgcagcctggccaccatgagacctcaacccctgcaggacccagccaagctgaccttcacactccccacacagaggatggaggtccttctgccaccgagagggctgctgaggatggagcctccagtcagctcccagcagcagagggctctggggagcaggacttcacctttgaaacctcgggggagaatacggctgtagtggccgtggagcctgaccgccggaaccagtccccagtggatcagggggccacgggggcctcacagggcctcctggacaggaaagaggtgctgggaggggtcattgccggaggcctcgtggggctcatctttgctgtgtgcctggtgggtttcatgctgtaccgcatgaagaagaaggacgaaggcagctactccttggaggagccgaaacaagccaacggcggggcctaccagaagcccaccaaacaggaggaattctatgcctgacgcgggagccatgcgccccctcccccctgccactcactaggcccccacttgcctcttccttgaagaactgcaggccctggcctcccctgccaccaggccaccctccccagcattccagccccctctggtcgcctcctgcccaccgaagtcccgggggtggtgcttgggaactcccactctgccttctcttgacttctggcctggagaacttaagggcaccaggggggtttgtcccataagaaccttttcccccacaggccaagaacctggggattcccacccatttctgaattcgggtttttcccaaacttgaaaacaaccccctccccccggggccccattcttggaannnnnnnnnnnnaaccccactggtttttggacccaaaaggggcccccatggggggttggaaaaaaaccccgcggggggggggctttgggggtcctnnnnnnnnnnngggaaaccctctttcgtggggaggagcaccacaactctttgtnnnnnnnnnnnncgccccctttaaatgtggccggggggcaccagagaaccccccccctttgtttttttctc

SEQ ID NO: 254073 - DNA, 2433 bp, Homo Sapiens
  misc_feature (388)..(402): n is a, c, g, or t
  misc_feature (1709)..(1799): n is a, c, g, or t
  misc_feature (2417)..(2417): n is a, c, g, or t
gctgactcggtttctccaaactggagcagcctctccccaggtccagctctggaggggagggggatccgactgctttggacctaaatggcctcgtggctggaagaccctgcgggagaagctccgcactcacacacctgtagcacttactggtaggaccaagcatcttgggggggtggccgctgagtggcaggggacaggagtccacttcgtttcgtggggaggtctaatctagatatcgacttgtttttgcacatgtttcctctagttctttgttcatagcccagtagaccttgttacttctgaggtaagttaagtaagttgattcggtatccccccatcttgcttccctaatctatggtcgggagacagcatcagggttaagaagacnnnnnnnnnnnnnnnaaactaggagaaccaaatctggaagccaaaatgtaggcttagtttgtgtgttgtctcttgagtttgtcgctcatgtgtgcaacagggtatggactatctgtctggtggccccgtttctggtggtctgttggcaggctggccagtccaggctgccgtggggccgccgcctctttcaagcagtcgtgcctgtgtccatgcgctcagggccatgctgaggcctgggccgctgccacgttggagaagcccgtgtgagaagtgaatgctgggactcagccttcagacagagaggactgtagggagggcggcaggggcctggagatcctcctgcagaccacgcccgtcctgcctgtggcgccgtctccaggggctgcttcctcctggaaattgacgaggggtgtcttgggcagagctggctctgagcgcctccatccaaggccaggttctccgttagctcctgtggccccaccctgggccctgggctggaatcaggaatattttccaaagagtgatagtcttttgcttttggcaaaactctacttaatccaatgggtttttccctgtacagtagattttccaaatgtaataaactttaatataaagtagtcctgtgaatgccactgccttcgcttcttgcctctgtgctgtgtgtgacgtgaccggacttttctgcaaacaccaacatgttgggaaacttggctcgaatctctgtgccttcgtctttcccatggggagggattctggttccagggtccctctgtgtatttgcttttttgttttggctgaaattctcctggaggtcggtaggttcagccaaggttttataaggctgatgtcaatttctgtgttgccaagctccaagccccatcttctaaatggcaaaggaaggtggatggccccagcacagcttgacctgaggctgtggtcacagcggaggtgtggagccgaggcctaccccgcagacaccttggacatcctcctcccacccggctgcagaggccagaggcccccagcccagggctcctgcacttacttgcttatttgacaacgtttcagcgactccgttggccactccgagaggtgggccagtctgtggatcagagatgcaccaccaagccaagggaacctgtgtccggtattcgatactgcgactttctgcctggagtgtatgactgcacatgactcgggggtggggaaaggggtcggctgaccatgctcatctgctggtccgtgggacggtgcccaagccagaggctgggttcatttgtgtaacgacaataaacggtacttgtcatttcgggcaacggcannnnnnnnnnnnnnnnnnnnnnnnnnnnnnnnnnnnnnnnnnnnnnnnnnnnnnnnnnnnnnnnnnnnnnnnnnnnnnnnnnnnnnnnnnnccaaccacacctccccccacaaacccaccatagccctccacctgtctcctccgcggcgcccatcggcgcttcgttgaatgcttcggactacaaaaccccgctaaacatcgctaccaaggcccccaaccccgccaacttcccaaaccctcacctccacagacctgctccctccccgacacgcaacctttggctgtgagaatatatacgacatatttgaaacaccccctcccgccgcggagaatgactccacaaccgaatacccacacaccagtgatgcaacccgcccaataccctcggggaatcggcgcgccgaccaccacatcctcacagctcacgcctgtgacacaccactcgcgcaccgaggtctcctcctccaccgcctgctccgctcgctccggaacagtctggtgatccacctcactcaacacgttctccaccacagaacgtccacataatcctcagacgtagccaaaatatatttgatacccccttctccaccactcggcgtccgcgccacacacacggtggaagttctctctctccacaccaactctcctgcgctccactactgagatatcacatgcactcgtcgcgacgatcacgcgcgcaactctcaanacgcaacctgatgatt

SEQ ID NO: 254074 - DNA, 184 bp, Homo Sapiens
tctccccctctccccaatgtatttgctctggcccttgctttttaccctccagagctaagaggtagcagagtctcttgggatgagtgattcaccctcttacttggcgaccactgatgagatcaacaacagggtgaacttataaacctattatttattgcagaacttaataaaaaatccaaagcct

SEQ ID NO: 254075 - DNA, 357 bp, Homo Sapiens
gaaaatagatcatctcaagagtagatacacagcaatactagctcaggtcaacatgacttacttccctgttactgagaccaaatgcagcatggaattatcgggacttacaatcttatgatacaaagaaaactgtaaagggaggtcatagctaacacaatgaaataagataatcaggaaagaagcgtctgcacttgctgcggcgatcggtgaagaatgttctctggatctttgtattcattgattggattcatcacggctgcatacacttcaccataggctctgcagactaattctgtagattgttttacgatctgctctttcactgtggcacttagaagaaagttcagctgtggtatc

SEQ ID NO: 254076 - DNA, 419 bp, Homo Sapiens
ctccttggaggtcctggcactgcagggcaacgggctgatggtcctgcaggtggacctgccctgcttcatctgcctcaagcggctcaatcttgccgagaaccgcctgagccaccttcccgcctggacacaggctgtgtcactggaggtgctggacctgcgcaacagcttcagcctcctgccaggcagtgccatgggtggcctggagaccagcctccggcgcctctacctgcaggggaatccactcagctgctgcggcaatggctggctggcagcccagctgcaccagggccgtgtggacgtggacgccacccaggacctgatctgccgcttcagctcccaggaggaggtgtccctgagccacgtgcgtcccgaggactgtgagaaggggggactgaagaacatccctcatcatcatcctc

SEQ ID NO: 254077 - DNA, 683 bp, Homo Sapiens
acgcaccccgggtaaaacatgggaatgacctcattgggggcccgggaaagtaaaagatgcgggctccagacgcccctcttctcataagcaagatggatctggtctgcgaaggtgcagcccccgccgcgttgaatgagggccaacaaagagacttgcacggtgcttccccaaaccgtgggcaccgtgaaattcgtgtgcgggttacaggcgttaagcgcaccgggcccgtcggcgggtaccaggaccccagccacaggctccagcggcgagtcctggccgtacacgccctcctcgctcagctcccacaccgtacggttcactcccgtgtgcggaacccgccaggacacgttgaggtacgcggtccacactgcttcagccccccgggaaccgggtgcctgcggactcagggccagcaggaagcaccatgccagcaatctggaaaagccgcagccaccgcggcaggagaccccggccccaggcggcggccccatggcgcgcgcgctccgcagttccctagcgcccctggcacgcgccctcctagcgcttggcaggaccctggtcttgagcaggtgcgcgccaggtggggaaggaatggagtgagactggggagctgcgagctacgtcggagccaggaggcacgtagcgtcagcacacaggttgccgcagatgcagctcctcggagc

SEQ ID NO: 254078 - DNA, 980 bp, Homo Sapiens
  misc_feature (826)..(826): n is a, c, g, or t
  misc_feature (834)..(835): n is a, c, g, or t
  misc_feature (846)..(846): n is a, c, g, or t
  misc_feature (848)..(848): n is a, c, g, or t
  misc_feature (907)..(907): n is a, c, g, or t
  misc_feature (923)..(923): n is a, c, g, or t
  misc_feature (930)..(930): n is a, c, g, or t
  misc_feature (956)..(956): n is a, c, g, or t
gcggctgcctctcttcgccaggaccttctgctcctgcaggaccagcggagcctctggtgctgggatctactccacatgaagaccagcctgccgccaggccttcccacccaggagctgctgcagatccaggcatcccaggacagcagaaagagaacctggggcaggctctgaagaggctggagaagctactgaaacaggcactggagcgaatccctgagctgcaggggatcgtgggggactggtgggagcagccaggccaggccgccctctctgaggagctctgccagggcctgtccctgccccagtggcggctgcgctgggttcaggcccagggggccctgcagaagctgtgcagctgaagagagggttcaaacggaagccgagaacttgacactgttcaccccaacacctcacctcccccaggacatttggaagaaagcagcgccaggattcctcggcagtcgtccccacccgcacctgcagtcccctcatgtgctgttctgctgccccactcagctcctggaccctgtcctttcatcccgctaaagcaccccctaaaaccccttcatcactttcattctcagcaaaaagtaattgagcacctcctctaggcgctggggagtccacactgaacaaaagaaacagaaaaccctgtcttccagcagttgagttctagggcagggagacagagtttacaagataaggaaaatatatatgtagtatgctgcaagttaactgctgtgtgggaaatccagcagggggtgggatgtgtgatttgaattgagggccacactgcccaggtcgtgctccgtcaaggggtgagcangaacaacnngggtggctgantnagggcttgcagctggaggcaacagcacatggcaaagggcctgagccaggatgtgctgcnataagggccactgaanggggacngttgtaggttgggggtgaggaatgtnttaaaaagatgaaattggccttct

SEQ ID NO: 254079 - DNA, 1135 bp, Homo Sapiens
gaatcctggactccgcggaccaacccttgacgggccgaaagtggtggatgggcgcggaggaaccctggcagacgctggcctgctgtatggaggtggcgaacgctgtgcgcgcctccgaccctgccgcctatgtctcccacctccccgtccatcaggacggctcttgcaacggcctgcagcattatgctgctctgggccgcgacagcgtgggcgccgcctccgtcaacctggagccctcggatgtgccgcaggacgtgtacagcggcgtggccgcgcaggtggaggtgttccgtaggcaggacgcccagcggggcatgcgggtggcacaggtgctggaaggtttcatcacccgcaaggtggtgaagcagacggtgatgacggtggtgtacggggtcacgcgctatggcgggcgcctgcagattgagaagcgcctccgggagctgagcgactttccccaggaagtcgtgtgggaggcctctcactatctcgtacgcaaggtcttcaagagtctacaggagatgttctcggggacccggcccatcaagcactggctgaccgagagtgcccgcctcatctcccacatgggctctgtggtggagtgggtcacacccctgggcgtccccgtcatccagccgtatcgcctggactccaaggtcaagcaaataggaggtggaattcagagcatcacctacacccacaacggagacatcagccgaaagcccaacacacgtaagcagaagaacggcttcccgcccaacttcatccactcgctggactcctcccacatgatgctcaccgccctgcactgctacaggaagggcctgaccttcgtctctgtgcacgactgttactggactcacgcagctgatgtctccgtcatgaaccaggtgtgccgggagcagtttgtccgcttgcacagcgagcccatcctgcaggacctgtccagattcctggtcaagcggttctgctctgagccccagaagatcttggaggccagccagctgaaggagacactgcaggcggtgcccaagccaggggccttcgacctggagcaggtgaagcgttccacctacttcttcagctgacaccccgtgagccttgtcagtgtgtaaataaagctcttttgccaccccca

SEQ ID NO: 254080 - DNA, 752 bp, Homo Sapiens
  misc_feature (72)..(126): n is a, c, g, or t
  misc_feature (139)..(238): n is a, c, g, or t
gaaagagggtctcactctgtcacccaggcttgggtaccgtggtgcaatcaccgttcactagactcggcctcnnnnnnnnnnnnnnnnnnnnnnnnnnnnnnnnnnnnnnnnnnnnnnnnnnnnnnnacgtgtcatcaannnnnnnnnnnnnnnnnnnnnnnnnnnnnnnnnnnnnnnnnnnnnnnnnnnnnnnnnnnnnnnnnnnnnnnnnnnnnnnnnnnnnnnnnnnnnnnnnnnntgaagtctctcatatggtgtccaagaaatggtgacaaatctcacaaagggactaggctcagcagggctggaatattcagggaaggtgtcaagaagaaagatgaacttgagttggcttttgagagatgcataggactcccacaggcagagtgaaataagggaattttagatgaacaaacacacagacaaaagcagaaatgcagatggtgtgactgggggatggtgaggggctgctctggctggaatggagggctggctgccacaatagtggaaatggtaaatgaggcaaataaggttggattggtaggatagcatcaaggttgccagcttattaaatcactcttccaatatgctagcacgggcctattgggaaaagtaatgcatcatgtaatcaaactagagtggccagatgtagactttagatatgttaatgcaggttgagcatctctaatccgagggggaatgtctcatatggtgtccaagaaatggacacatctcacagagggcctagactc

SEQ ID NO: 254081 - DNA, 655 bp, Homo Sapiens
aggggaggagactaagggcgtgtgtagagagccaagtggaaggagatggagagtcataaggtaagggctctcacaatgacaaaggaggggacgagaactcatgaaggcgcgagaaggggtggaatgaatactaaaaggaggatgacagtggaagaaggagagtgatgtggaatgacaggacatgagcataacgatccaagactggaaatgcaggagaagggaacagggaagaagctaagaagcagttagggatataggggcagcaacagataataggaaagaagaggcccatcagtatttccaaggactcccctaaagggtgctgcagagcacactggtgaccagacctgtacagggctgtgtcatatgaattatgctccatgcttggtatcacatgcctttccctcgcttctgaatattgagcaaacagaggtaagaccagggccaggattagagcatgcctcatgcacaaaacttacaaggaaccagaaaaatttagtgatcaagaaaaatacaatttaagtgaaaaattttaaaaacatcacaattaatgcaaacataatatcaaaatttcaaataaagacagggatcagaagaaaccaagatgtccttcagtaggtggaaggatgaataaactgtggtacatacagacaat

SEQ ID NO: 254082 - DNA, 361 bp, Homo Sapiens
  misc_feature (12)..(12): n is a, c, g, or t
  misc_feature (57)..(57): n is a, c, g, or t
agggttggactnccctgggcctcaggtctctggagggacccagggtctctggccttnaaccccctgttaggagctgctacccctccctgtgccctgtgctcaccctctcttgcttcccccaggggcagctggactccctgtgacatctaaagttatcgggggctttgctgggacagctcttggggcctggctgggttcacccccttccagctgaacaccacactgaggcagggagttggctctcttggtggagatgactttcctgggcctctggatgacaatcttccaaaggacaagtctcctactcccaaaactatttaaggaagcatgaaaaataaagatgctggttaacttcaaaaaa

SEQ ID NO: 254083 - DNA, 621 bp, Homo Sapiens
ctcttggtggacgggcccagaggaattcagagttaaaccttgagtgcctgcgtccgtgagaattcagcatggaatgtctctactatttcctgggatttctgctcctggctgcaagattgccacttgatgccgccaaacgatttcatgatgtgctgggcaatgaaagaccttctgcttacatgagggagcacaatcaattaaatggctggtcttctgatgaaaatgactggaatgaaaaactctacccagtgtggaagcggcgagacatgaggtggaaaaactcctggaagggaggccgtgtgcaggcggtcctgaccagtgactcaccagccctcgtgggctcaaatataacatttgcggtgaacctgatattccctagatgccggaagatgccaatggcaacatagtctatgagaagaactgcagaaatgaggctggtttatctgctgatccgtatgtttacaactggacagcatggtcagaggacagtgacggtgctcaccacccccgatggagaagatggaattcatctacgtcttccacacacttggtcagtattttcagttgggacgatgttcagtgagagtttctgtgacacagcccatgtgacacttgggcctc

SEQ ID NO: 254084 - DNA, 621 bp, Homo Sapiens
tggaatgaaaaactctacccagtgtggaagcggggagacatgaggtggaaaaactcctggaagggaggccgtgtgcaggcggtcctgaccagtgactcaccagccctcgtgggctcaaatataacatttgcggtgaacctgatattccctagatgccaaaaggaagatgccaatggcaacatagtctatgagaagaactgcagaaatgaggctggtttatctgctgatccgtatgtttacaactggacagcatggtcagaggacagtgacggggaaaatggcaccggccaaagccatcataacgtcttccctgatgggaaaccttttcctcaccaccccggatggagaagatggaatttcatctacgtcttccacacacttggttggcttttacaaacccctaagcttcttctttacctttccttaaaatttcaaccttctcttttcttactctataattgagaatgataacacagagagttaataacagtcaccctgctaactttccttagcatgagtgaacagtgagagataaaaatgaaatcttggttaaccttgccaaatctccaggacaccgaagagttaaaaagagagaaaaacaaaaagattaagctctttttc

SEQ ID NO: 254085 - DNA, 1259 bp, Homo Sapiens
  misc_feature (1162)..(1166): n is a, c, g, or t
  misc_feature (1168)..(1169): n is a, c, g, or t
  misc_feature (1171)..(1171): n is a, c, g, or t
  misc_feature (1174)..(1180): n is a, c, g, or t
  misc_feature (1182)..(1182): n is a, c, g, or t
  misc_feature (1184)..(1184): n is a, c, g, or t
  misc_feature (1186)..(1192): n is a, c, g, or t
caggtcttggggcgccgcggcggaaatcgcgcggatgccagaacgcgctctcagcttcgggtcctgcggctgcggctgccgccatcatggtgcggaagcttaagttccacgagcagaagctgctgaagcaggtggacttcctgaactgggaggtcaccgaccacaacctgcacgagctgcgcgtgctgcggcgttaccggctgcagcggcgggaggactacacgcgctacaaccagctgagccgtgccgtgcgtgagctggcgcggcgcctgcgcgacctgcccgaacgcgaccagttccgcgtgcgcgcttcggccgcgctgctggacaagctgtatgctctcggcttggtgcccacgcgcggttcgctggagctctgcgacttcgtcacggcctcgtccttctgccgccgccgcctccccaccgtgctcctcaagctgcgcatggcgcagcaccttcaggctgcagtggcctttgtggagcaagggcacgtacgcgtgggccctgacgtggttaccgaccccgccttccttgtcacgcgcagcatggaggactttgtcacttgggtggactcgtccaagatcaagcggcacgtgctagagtacaatgaggagcgcgatgacttcgatctggaagcctagcggatctcccactttgcatggctgtcttttacagatgggaaaactgaggcctgatgctggagattctatgagggtgctctcctcaagggtatcagacggtcgtaggttcttaagaatttgattcatcagtggcaggccatgcatagagccacgggaggtgcgtccttgttttccaggaaatgttcttagaacttggactactgattattaattgactgtgccttgggaaacagtgggaagtaacttggtgcagcactggggtattgttggcttcttgtgttggaaactttgtaatgtaaaaggaaaaactggaaatccccacgccctgtttccctttatcgtcttgtggttggactggttcaattcgtttaactcgaattcttgctcctggccgtggttaagctgtgtacagatgatggagagtttggcctcaagtttttataaactgagcgagactagtgttcaggatctcctcccttgtttaaatgtcaataaatgccccaactgcttttgtaagtccnnnnnannanaannnnnnngnanannnnnnnccctggtcggccgccctcggccccttcgaagaaccttttctaaaaccatttcgttttggccgccccg

SEQ ID NO: 254086 - DNA, 626 bp, Homo Sapiens
cccgaagctagcaggaacagcaatgaatgtccgggtgaaggctcgcaaagaatcccgggacttccgtccacttccttgaagactccattgacagaaaaacacagcaatgtgggcaactcattgaggaaggcaacaacgttgagacgcgtgtgcttcagcagccggaaccgcaaggtagggtctttaagcttcttcacatttctgctatccttgaaatactcggctaagctgcttcgggcagggttctgaggaatgaaaggaatgctcagggaacagcaggccccatcatggtaggcatccaggagcccttgtcggtctccagagtcgtaaattgcatagtactgttgcaggaagtgcaagaccagactcttcaagctgttccaaaatagcttcccttgcagggcggtaacgtcgtgggggcttcaacatcaaaggcaattggtgggggtagctcatggccatccaggcgtagtaacttgggaaatcgttcgcgaatggcgctgtcaagaacgggacagaagtgagtgatgcttcagagccaccgtgcctcctgggctgctctaggagcaaatataccaaacccgagggacagcccatcccatcctgctcatccctccactccctcc

SEQ ID NO: 254087 - DNA, 1214 bp, Homo Sapiens
ggagggagtggagggatgagcaggatgggatgggctgtccctcgggtttggtatatttgctcctagagcagcccaggaggcacggtggctctgaagcatcactcacttctgtcccgttcttgacagcgccattcgcgaacgatttcccaagttactacgcctggatggccatgagctacccccaccaattgcctttgatgttgaagcccccacgacgttaccgccctgcaagggaagctattttggaacagaaaacttgaagagtctggtcttgcacttcctgcaacagtactatgcaatttacgactctggagaccggcaagggctcctggatgcctaccatgatggggcctgctgttccctgagcattcctttcattcctcagaaccctgcccgaagcagcttagccgagtatttcaaggatagcagaaatgtgaagaagcttaaagaccctaccttgcggttccggctgctgaagcacacgcgtctcaacgttgttgccttcctcaatgagttgcccaaaacccagcacgacgtcaattccttcgtggtagacataagcgcccagacaagcacattgctgtgtttttctgtcaatggagtcttcaaggaagtggacggaaagtcccgggattctttgcgagccttcacccggacattcattgctgttcctgctagcaattcagggctatgtattgtaaatgatgagctatttgtgcggaatgccagttctgaagagatccaaagagccttcgctatgcctgcacccacgccttcctccagcccggtgcccacactctctccagagcagcaggaaatgttgcaagcattctctacccagtctggcatgaacctcgagtggtccccagaagtgccttcaggacaacaactggggactacaccagaatctgccaggctttcaccttcatctcaaggccaagggcgagatcccaggaagtggcattcatgacagtgatcgtagtccatgccctcagcaaggcagtccccctgtaatagtcctggatattaccgcggttgacgctgtattcctctgttggcgaggcgcccgggatttgaccaggaaagaggagtgcggatcctttctagctgctctggaaattagaagatgagccatgggccgagggcagcactgaactaccgcacaccaagacaatgcgggattaccagccgttgaaaacatgcgacgcgcgaca

SEQ ID NO: 254088 - DNA, 1596 bp, Homo Sapiens
tacggtccggagtgggtagggatatcgtcgacccacgcgtccggagcgcttgggagttaggttgtttgccggcgtagcggccagcgcctgagcccgcccttgatcttcgctgtggcatggcggacgaggggaagtcgtacagcgaacacgatgatgaacgcgttaatttccctcaaagaaagaagaaaggccggggtcccttccggtggaaatatggtgaaggaaaccgtaggtctggaagaggcggttctggtattcggtcttcccgccttgaggaagatgatggagatgtggcaatgagtgatgcccaggatggtccccgagtacgatacaacccctataccacccgacctaaccgtcggggtgatacttggcatgatcgagatcgcattcatgttactgtgcggagagacagagctcctccagagagaggaggggctggcaccagccaggatgggacctcaaagaactggttcaagattacaattccttatggcagaaagtatgacaaggcatggctcctgagcatgattcagagcaagtgcagtgtgcccttcacccctattgagtttcactatgagaatacacgggcccagttcttcgttgaagacgccagtactgcctctgcattgaaggctgtcaactataagattttggatcgggagaaccgaaggatatctatcatcatcaactcttctgctccaccccacactatactgaatgaactgaagccagaacaagtagaacagctaaagctgatcatgagcaaacgatacgatggctcccaacaagcccttgacctcaaaggcctccgttcagacccagatttggtggcccagaaacattgacgttgtcctgaatcgcaaaagctgtatggcagctaccctgaggatcattgaagagaacatccctgagctatgtccttgaacttgagcaacaacaggctgtacaggctggatgacatgtctagcattgttcagaaggcacccaacctgaagatcctaaacctttctggaaatgaattgaagtctgagcgggaattggacaagataaaggggctgaagctagaagagctctggctcgatggaaactccctgtgtgacaccttccgagaccagtccacctacatcagcgccattcgcgaacgatttcccaagttactacgcctggatggccatgagctacccccaccaattgcctttgatgttgaagcccccacgacgttaccgccctgcaagggaagctattttggaacagaaaacttgaagagtctggtcttgcacttcctgcaacagtactatgcaatttacgactctggagaccgacaagggctcctggatgcctaccatgatggggcctgctgttccctgagcattcctttcattcctcagaaccctgccgaagcagcttagccgagtattcacggatagcagaaatgtgaagaagcttaagaccctacttgcggttccggctgctgaagcacacgcgtcccaacgttgtgccttctcatgagttgccaaaaccagaagaagttatcctcgggtagactagcgccagaaagcattgggggttctggaagggctccagaaggaggga

SEQ ID NO: 254089 - DNA, 573 bp, Homo Sapiens
  misc_feature (15)..(15): n is a, c, g, or t
  misc_feature (186)..(371): n is a, c, g, or t
ccaccatgcagggcntacttgtcgggcttctgtaaaacaacagtgcggtatttctagaatcaagttcctgtggataatccaggcgccccatgcagccaagcatgtgtagcaaactccacattgcaacaaagatcaggttcattagaaggcaaaaattgatgtgtatgagatttccatgatcatgannnnnnnnnnnnnnnnnnnnnnnnnnnnnnnnnnnnnnnnnnnnnnnnnnnnnnnnnnnnnnnnnnnnnnnnnnnnnnnnnnnnnnnnnnnnnnnnnnnnnnnnnnnnnnnnnnnnnnnnnnnnnnnnnnnnnnnnnnnnnnnnnnnnnnnnnnnnnnnnnnnnnnnnnnnnnnnnnnnnnnnnnnagtttataggatttagaggggaagttgagaggatagcaaggccagagcctgatcatatcagggcatggtttaattattcactgaatatatgagagcttacaatatgccagatgctaaggtatgacggatacaatcagaacaagacaaacaagatagctgttatcagggagttgacattcaaaagggaattgtcagctcgtgc

SEQ ID NO: 254090 - DNA, 708 bp, Homo Sapiens
ttaattattctcttttctctcacaaagtaaaatgcttcttgtctttgtgaaaagtatctcaagttgacacagaaattctttagagcacttctactgtaaaaataaagacagggctttgtcttctatagatagggaaatgatagcaaccaattttctcattttccttggggtcagggaataatataacattagcaattctcaggtagacagagggaagatgaatttaaagtgtgcttgaaataattgataaattgatggcatctcctactatgtgtgatctgcatgcaatggaagctctcaaatgactagaggtgaccatgcaggaagacatagcaaaagcctcattccatgcagggcctactcgtcgggctgctgtgaaacaacagtgctttggtatttctagaatcaagttcctgtggataatccagggccccatgcagccaagcatgtgtagcaaactccacacctgcacaaagatcaggttcagggggagctacacagatgacatgacattcttgtcccataaacggacacgcttttttaaaaggcaaaaattgatgtggatgaagatttccatgatcatggcagtggtccgtcgacctcagcatacataagaatgccaatacagggtgctttaaatcatgttccctaggcatacattcagaaactttgattcaggaagtctagtatgggggcccaagacctaca

SEQ ID NO: 254091 - DNA, 1817 bp, Homo Sapiens
tcacctcctctcctcaccctcctttcccctcttgtccctaagtagcgaggcctgggtggcgaattcggcacgagggccgactgctgaaggctggtttgcgtcgacatggcggttaccctgagtctcttgctgggcgggcgcgtttgcgccgccgtcactcgctgtgggttcgcgacccggggggtggcgggcccaggccctattggccgggagccggaccccgattccgactgggagccggaggaacgggagctgcaggaggtggagaggtaccggcttctccccgggccctcagcttgaagcagggcctcgtgccccggcgctccaggccgcgcccccttggcgccgggtgtcctgccgctgcttgcgcagcggcccttgtttcttcttacccgttgttaggggcgcagcgtcaggtgttcagctcccctgggaccactggtcccttcattagtgacgtatttcatcatcagtttagagagttcggcatgcttacaggcagttattgttctaggtgttagctttctgggtgtacggagcagctctaagccggcaacatggcccggttgcccttgcgatcaaagagaagagggctgggcgctccatgatttagcctgaggctcttcaaacatccattctgcttccacgcatggcttctgccattggttctcttcccccagcaccctgaaacgacagaaacaagcaatccgattccagaaaattcggaggcaaatggaggcgcctggtgccccgcccaggaccctgacgtgggaagccatggagcagatacggtatttacatgaggaatttccagagtcctggtcagttcccaggttggctgaaggctttgatgtcagcactgatgtgatccgaagagttttaaaaagcaagtttttacccacattggagcagaagctgaagcaggatcaaaaagtccttaagaaagctgggcttgcccactcgctgcagcacctccggggctctggaaatacctcaaagctgctccctgcaggccactctgtatcaggctctttgcttatgccagggcatgaagcctcatctaaagacccaaatcacagcacagctttgaaagtgatagagtcagacactcacaggacaaatacaccaaggagaaggaagggaagaaataaagaaatccaggacctggaggagagctttgtgcctgttgctgcacccctaggtcatccaagagagctgcagaagtactccagtgattctgagagccccagaggaactggcagtggtgcgttgccaagtggtcagaagctggaggagttgaaggcagaggagccagataacttcagcagcaaagtagtgcagaggggccgagagttctttgacagcaacgggaacttcctgtacagaatttgagtcggggcttggcttatggagatgcctcgtgaaacacagctgggcaagtattaatgtatatggaacagcctggatttctgcatatggataagccaccttggaataggaagaggtgttgagcctggactgtgggaggaaagagctgcgtggatagattcaaacttcctgtggtagtgctcccagtctgacctctgtagaccttcagtactcactcttcttgcttaggctctctgtgtgttgaaagccatcccgtgttgcatgtgttgttacaattttctgtgatacttgcaatttatgtttgagaagaagtgaaaagtttgccttctgacctcatttccttcttgatcagtgaacactaacattttggggacaacttagtcaattggttttccttacaacaaaataaagtaaaatgtagcagtcaa

SEQ ID NO: 254092 - DNA, 333 bp, Homo Sapiens
  misc_feature (91)..(91): n is a, c, g, or t
gccacccatagaaaaggtgtgagagtgaggcctctgcacagccaggtctgtgacacatgctgctccgtgcagtgcctaaacaggtccagcnacaccatatagacagggcccgacaaggctctgtgtagctccacccacaatatgtattgagtcatatgtattatgcacattttggaaaggtaatacaaagtatttcctctgcatattaagcaccccacttaattatggggagcaccatatgggtcaagcataggaacaagtatttacttcattcctatatatttaaagacaaggtctcagtctgatgcaatcatagcccactgtgtgtagtga

SEQ ID NO: 254093 - DNA, 601 bp, Homo Sapiens
gagaggtgtagcagaaagcagtgccccaggcctccacgcgacggtgaagcaggaaccaggggctgccagcagagcagcccaggtgcgtcgccttagggacagagctgccaagtgccgagctggggctgccagagccgagccgggaacggcatttgccagagccgaggcggaagccggagcatttgggggacgggaccgcgggaacccggaaacgcctgggctgcaccgagctggcggtggctacggcgacgggagccggcggcgctgcgggtcagcggtcgcgtaggacccagcggactcggcagcctggggcgcccggcggagctgaaccgcggcccccggtggtgggctcagccggtcgagctgcgcgggaggcaaatgaagataaaacaatgttcgccaaccttacgtttccctgggaattttggtctttcagactaccagtttggttctaacaatgcgttattccagaacttttttgaagataatggccttgcattttattggtctacaaagacagcaaatgtagtctaagagcactgaatcgagtactacatgatgaaatcttaataaacctatggacacctctgctatttcatcg

SEQ ID NO: 254094 - DNA, 654 bp, Homo Sapiens
ggacggctccgtggtgcagttcaagatcaagaggcacacgccgctgagcaagctgatgaaggcctactgcgagaggcagggcttgtcaatgaggcagatcagattcaggttcgacgggcagccaatcaatgaaactgacactccagcacagctggagatggaggacgaggacaccatcgacgtgttccagcagcagacgggaggtgtgccggagagcagcctggcagggcacagtttctagagggcccgtccccagcccgggccgtccatcctcgcattgctgttgaatggtgagcacgtgaccatgccgaccacaaaggtgtctgcggaaactcgaggacattcaccacgatgattttcctctctttgatgtacttcaagtgcaactcaaaactatatctgcagggatgaatctgtaacttaaattgggccaatcagaattgttatctttgttcaggttgagttgcaagatattgtgggtacttttgtgtgctcatttgtgttttcccccccttctacaacatttttttaaccccttggttggcctctcccctgctcacttcagtcacatagagaaatggtgtttcccgcactggggatgcaactgttgaccagtattgggggcaaggtggtgggaggcagactgtccttgct

SEQ ID NO: 254095 - DNA, 1688 bp, Homo Sapiens
  misc_feature (1086)..(1086): n is a, c, g, or t
  misc_feature (1094)..(1094): n is a, c, g, or t
  misc_feature (1103)..(1106): n is a, c, g, or t
ggggcggccccgcgcacagttgcggcgggagagcggcggggccgagagcgtgactcgcccgctccgcgctgcttcccccgcgccgcctccccgcgccgctcgcgcagccatgtccgaggagaagcccaaggagggtgtgaagacagagaatgaccacatcaacctgaaggtggccgggcaggacggctccgtggtgcagttcaagatcaagaggcacacgccgctgagcaagctgatgaaggcctactgcgagaggcagggcttgtcaatgaggcagatcagattcaggttcgacgggcagccaatcaatgaaactgacactccagcacagctggagatggaggacgaggacaccatcgacgtgttccagcagcagacgggaggtgtgccggagagcagcctggcagggcacagtttctagagggcccgtccccagcccgggccgtccatcctcgcattgctgttgaatggtgagcacgtgaccatgccgaccacaaaggtgtctgcggaaactcgaggacattcaccacgatgattttcctctctttgatgtacttcaagtgcaactcaaaactatatctgcagggatgaatctgtaacttaaattgggccaatcagaattgttatctttgttcaggtaaaatgagttgcaagatattgtgggtacttttgtgtgctcatttgtgttttccccccctcctacaacatttttttaaccccaaaattatagcctgaatgttcgcttttagtctggccagggatctgactcctgagttggttgcctctcccctgctcactccagtcacatagagaattggtgtttcccgcagtggggatgcagctgttggacaggtattgggggcaaggttggtagggaggacagactgtcacttgctgttacaggcacaggtgattaaaatgctaaatattgcaaatttaagctttgtcagtatatggaaaagttgaagggaaaatactggaatgcttcttcaaaggttaaaaaataaccgagtcttttggtaatttgaccccacgtgctctctggccctcaagcatgtaacctcggggtctgaggcccaggacccncccccccnccaccccgnnnnccccactccctgctcagtacctggcgttggtacacaggcaaggattggcacaaccaaaattggcctttttctccctcttaatattgaagaaattcccacatttctcatttggtaatggtgttgtggcctcagatttcttctagtatttgcttctgatgaatgattatggtctatacataaaaaagtaagactaagtattgctgaatttgcagttatgttgtcgtgtataagagctacttccaagtgtggttacaaatgaacccatggaatgatgacttcatgttcttctcgtgggtttgtgccgtgctgctttccaaataggtattgaatttatgcattagtctggtgatttcagttctgtgaaatattttggggatctataccaattaaacatttttcataggtctgcctattggccctcccctgaggctccattgctgcctggggggccattctcttgccttttttaacgtcacctgaaaaatgacccatcatcctcttgcttggctgaaaaccttgctgaaagggtcccctttcccgcttgccggaagggcccccgggggggaactttgttgccctcgg

SEQ ID NO: 254096 - DNA, 414 bp, Homo Sapiens
  misc_feature (17)..(17): n is a, c, g, or t
  misc_feature (39)..(39): n is a, c, g, or t
  misc_feature (69)..(69): n is a, c, g, or t
aacaaaaggaaccccanggaatgaatgaccttccatgtncctccccgtgggtttgtgcccgtgcctgcntttcccaaaacaggtatggaaaattatgccattagtctggtgatttcagttctgtgaaatattttgggatctataccaattaaacattttcatagttctgcctattgtccttccctgaggctccattgctgcttggtggccattctctgcctttttacagtcacctgaacaatgacccatcatctcttgcttgcttgaaatcttgctgaaatgttctcatttcctgtttgctgtatgggctcgggtgggatgtttgttggctctgttgtgtttattcaccaatttgtacattatttgttgtcctttactactgtaaacagtaaatatagtttggtattctgtcaa

SEQ ID NO: 254097 - DNA, 629 bp, Homo Sapiens
  misc_feature (40)..(40): n is a, c, g, or t
  misc_feature (67)..(67): n is a, c, g, or t
  misc_feature (76)..(76): n is a, c, g, or t
ggatttggcacaacccaaaaattggccctttttctccccncttaaatattggagggaaattccccanatttcctcnatttggtaaatggtgttgtggcccctcagatttccttcctagtatttgccttcctgatgaatgattatggtcctatacataaaaaagtaagactaagtattgctgaatttgcagttatgttgtcgtgtataagagctacttccaagtgtggttacaaatgaacccatggaatgatgacttcatgttcttctcgtgggtttgtgccgtgctgctttccaaataggtattgaatttatgcattagtctggtgatttcagttctgtgaaatattttgggatctataccaattaaacattttcatagttctgcctattgtccttccctgaggctccattgctgcttggtggccattctctgcctttttacagtcacctgaacaatgacccatcatctcttgcttgcttgaaatcttgctgaaatgttctcatttcctgtttgctgtatgggctcgggtgggatgtttgttggctctgttgtgtttattcaccaatttgtacattatttgttgtcctttactactgtaaacagtaaatatagtttggtattctgaaaa

SEQ ID NO: 254098 - DNA, 1035 bp, Homo Sapiens
  misc_feature (909)..(909): n is a, c, g, or t
  misc_feature (1009)..(1009): n is a, c, g, or t
tcagaatgaacccccagtccccaatggggggttaacctaagaaacctacttgtcctaagaaagtaaagtatccagtagatttttttccaatgcctttgaagtgcccctaatctcctagtactgggtcatggtgaagttggaaagtgagggttcaaataaaattagatctgccccctttttaaaggcatctaagaacatcccgtagaatgttcgcattgagattaaaagcctttgaagctaatatagaagtttaatgcagaaatgtggcaagcaaaaggccaacttgcattttagagacagagcttgctagtatagaagtgcatatttctaagaaatgtctcagtaaaattcattaataaatactaatagctttttaaatttttttcctccacgtaaaatgaaaatgaacttaagacttacaaggaatgatgtgagtgggctatttttttcctaaatgcctcacagtctccaacagctcagttaagcactctgatggtctttatggagaaaaataactctgggggattctcgagtcttcttgccttctacagctttccctgtggcaccctccacccccaaccagtgtctttgagcttggtgagactctgcatacattaatatgaaaagctggaaaagaattaagggctagcgatttctacactgagtacttttaaaaaaataagattgacaatggtattcttttcaatatatggatagaaataatatctaaaatctgttctgaaaatattcctaaatcctggcagagttctgccccagtctaatgtgataaaatgatcctcactgactgagcttttttccctccccactcccaaacctttgaaatttcctgtaacaagatctgacctgtaaagatcccatatacatggaacttctgccaactcccctcanataatagacgtgtgggagagttgcttgatctcagttgctaatgatgatgggactaatcttagaagaacccgaggccttgatgggtgattcatggggacancagatttctgcattcctcttgcctgt

SEQ ID NO: 254099 - DNA, 371 bp, Homo Sapiens
ccaatgctttgaagtgccctaatctctagtactgggtaaaggcatctaagaacatcccgtagaatgttcgcattgagtttaaaagcctttgaagctaatatagaagtttaatgcagaaatgtggcaagcaaaaggccaacttgcattttagagacagagcttgctagtatagaagtgcatatttctaagaaatgtctcagtaaaattcattaataaatactaatagctttttaaatttttttcctccacgtaaaatgaaaatgaacttaagacttacaaggaatgatgtgagtgggctatttttttcctaaatgcctcacagtctccaacagctcagttaagcactctgatggtctttatggagaaaaata

SEQ ID NO: 254100 - DNA, 903 bp, Homo Sapiens
agattagggcacttcaaagcattgaaaaaaatctactgatacttactttcttagacaagtagttcttagttaaccaccaatggaactgggttcattctgaatcctggaggagcttcctcgtgccacccagtgtttctgggccctctgtgtgagcagccaggtatgagctgttttagaagcagcgtgttgccttcatctctcccgtttcccaaaagaacaaaggataaaggtgacagtcacactcctggggttaaaaaaagcattccagaaccacttctctttatgggcacaacaaagaaacgaaggctgaagttcgcctacccaaaatgaaaagtaggctttacagtcaaaagtacttctgttgattgctaaataacttcattttcttgaaatagagcaactttgagtgaaatctgcaacatggataccatgtatataagatactgctgtacagaagagttaaggcttacagtgcaaatgaggcgtcacctttgggtgctaaaattaacaagtctaatattattaccatcaatcaggaagagaataataaatgtttaaacaaacacagcagtctgtataaaaataccgtgtatcatttactctttctgcagctctatacgataggcaggagaggcttatgtggcagcacaagccaggtggggattttgtaaagaagtgataaaacatttgtaagtaatccaagtaggtgtattaaggcaccaaaagtaacatggcacccaacacccaaaaataaaaatatgaaatatgagtgtgaactctgagtagagtatgaaacaccacagaaagtcttagaaatagctctggagtggctctcccaggacagtttccagttgctgaatagtcttttggcactgatgttctacttcttcacattcatcttta

SEQ ID NO: 254101 - DNA, 353 bp, Homo Sapiens
accgggaggaaatgggactgcgaaaaaaatggagcctgactgtggcctaaaggatacttatctctacacaaagggcttctgattcaaagaggccccgggattcaaaaacacaagcagagctacaccacgtggggggcacaagctgaattccggataaagatgcctgtaaagagaagttgatgcgaatttcgcaccgcatttagaggtttagacgaagtgagctcgaatcaggccaaaagccttaggttactcctgggcgacagcgggacagagtgtcagatcaacaggtgtgaaaggctgcgaggtgagggaagaagcaggtgtcggtggaggccacagttcctccggcccag

SEQ ID NO: 254102 - DNA, 721 bp, Homo Sapiens
  misc_feature (270)..(317): n is a, c, g, or t
  misc_feature (515)..(578): n is a, c, g, or t
  misc_feature (636)..(636): n is a, c, g, or t
  misc_feature (640)..(640): n is a, c, g, or t
  misc_feature (692)..(692): n is a, c, g, or t
attactacgaggtcaaactccataaagcagggcaaagaccagcattttcctgtcttcatgaatgagaaagaggacatcttatggtgcactgaaatggaaagggtatttggtttcccagtccactatactgacgtctccaacatgagccgcttggcgaggcagagactgctgggccggtcatggagcgtgccagtcatccgccacctcttcgctccgctgaaggagtattttgcgtgtgtgtaagggacatgggggcaaactgaggtagcnnnnnnnnnnnnnnnnnnnnnnnnnnnnnnnnnnnnnnnnnnnnnnnnccaagaacatgaggatggagagaagtatcagcacccagaagagaaaaaggaatttaaaacaaaaaccacagaggcggaaataccggaggcctttgccttgcgaaaagggttggacatcatctcctgatttttcaatgttattcttcagtcctatttaaaaacaaaaccaagctcccttcccttcctcccccttccctnnnnnnnnnnnnnnnnnnnnnnnnnnnnnnnnnnnnnnnnnnnnnnnnnnnnnnnnnnnnnnnntgtttcttgctgtgactgaaacaagaaggttattgcagcaaaaatcaggtaacaaaanatangtaacaataccttgcagaggaaaggtgggaggagaggaaaaaagggaaattnctatagaaatctatatattggggttggtt

SEQ ID NO: 254103 - DNA, 478 bp, Homo Sapiens
  misc_feature (13)..(13): n is a, c, g, or t
gccagtcagaaantctaactattgaattcatgtcctcaataaaattgttctgaccaaatgagacaatgaataaaaacatggtctcatcctgcccattctattcttaatcccctccacaaagtagaaagtattgattgccaagtcaaagaggtgaggaagctatttacaaataagtttccctgcaatgcttaatcccctcctagtgttcacagattgcatcacatcagatttgaaagtaaaatggctgttattttctatttttaatagttatcatcagtgttgtgctctgccgagcattaaaacaacatacacaaagatatgagatgttatgataatccccaaactttattataaataactcaaaatcagagccaaactggctggtattctatgctttatcctttccctagcatcagtcaagggtcctggaacaaagatgagtaactattaaaatgtaagaagcctatcatattgaaat

SEQ ID NO: 254104 - DNA, 423 bp, Homo Sapiens
caggtctcatcctgcccactattcttaatcccctccacaaagtagaaagtattgattgccaagtcatcccctcctagtgttcacagattgcatcacatcagatttgaaagtaaaatggctgttactatttttaatagttatcatcagtgttgtgctctgccgagcattaaaacaacatacacaaagatatgagatgttatgataatccccaaactttattataaataactcaaaatcagagccaaactggctggtattctatgctttatcctttccctagcatcagtcaagggtcctggaacaaagatgagtaactattaaaatgtaagaagcctatcatattgaaatacctcatatgcttggtattttctactatcactttaaaatcactaaaattctgaaacagacattaagatttgggaa

SEQ ID NO: 254105 - DNA, 442 bp, Homo Sapiens
  misc_feature (21)..(22): n is a, c, g, or t
  misc_feature (102)..(102): n is a, c, g, or t
gggaacctcctcagctccttnngccagtcccaagcctggtggatctgcatctcacgcccactgcacaccgttcctctccatctgcccttccctcccaggccnccggtcgggggagcaggtgtggcaagtgttaggaactcccttctggtgacagctggtcttcctagagtgttgcttcgtcttgtagggccctcgggtttcctcactaggtattgtgtaactccctcaaaaaaaggtttatgaaatgctgaacctcaggtttcatagacgtctttgtacactaaaaattctgcagcagaatataaacattcgcagttttttgtaagctatatttttgtatatttaattgctattttaaaattttaatgcattttgctaatcactcctcaaaaataaaacatgcatgtaattgactcaaacgtgtaaataaaagcaaattttg

SEQ ID NO: 254106 - DNA, 466 bp, Homo Sapiens
  misc_feature (20)..(20): n is a, c, g, or t
  misc_feature (32)..(32): n is a, c, g, or t
ggcagcgtatcgacgtctancaaatccagacngatagtgattagacagtgccatgcttcccaataacccaggaaccactaacttctgtccattgtgaattcggtatgaacatcgataatcgtcaggaagcgcagccaatctgcgcttccacagcatcgaggtcttcctctcgagcaccctccagagataaaataatagcagcataatggtcaatgtatcttcctacatcagagtaagtatctatgaagagagatttccaacactgattcttctgtgctcttcctcagatatcagccagtattttttgcaatgtcttctccacagcggatcatgacttgatagctggctaagtcttcgactgacataacaacagttgattagatcccgatagtccaaaaaggataagatgaggagcaggggatcggtgggcagcgactctagggtcagcggcgccgtctcggtctcc

SEQ ID NO: 254107 - DNA, 751 bp, Homo Sapiens
atcagcattcctactcatttcttccacctttctcaactcccactttctgtcatctgtactttgattctgtcaaatttgttaacatttactgaatccagttaataagtgtgggacagccaatagaaaggtccagcagacagttgtgcaaacaattctagacctcagtggggaagtcagggagggagattcaggtttgggagttaggagcatgcagatagtcactataaacggcaacaatgcatgcagtagagttcagcaagggagagcagcagtgggctaaggacagaaccttggcaaataccaacatttactagcaggcacgagaagagccaccaaaggagataaagagacaagggttagagaggagaatcaggacaaactagtgttatggaagaagccaagggccagttttcagaagtacatattcctcgaatactcactcagatatcagccagtattttttgcaatgtcttctccacagcggatcatgacttgatagctggctaagtcttcgactgacataacaacagctggcagtaacccagattccaccgatagtatttaaaaaagtaagaaaacaatttaaaaataaagattaaaatattcattgttttgttttatgccttttgtttctcttacttttcacttattacccttataattacaaaactattttctaaaacctgtttaacatgttaagtagtataattgccttgttagtagtgaaactgagttcacaaataaaccctga

SEQ ID NO: 254108 - DNA, 775 bp, Homo Sapiens
  misc_feature (117)..(279): n is a, c, g, or t
  misc_feature (313)..(313): n is a, c, g, or t
  misc_feature (315)..(570): n is a, c, g, or t
aagccaggacaagctaggggtccaaaggtgtgaagaaaaagccaggtattatgttgtctcaacttggttctgctcagattccttgggcaaccagggtcttttgtgttccaacatcannnnnnnnnnnnnnnnnnnnnnnnnnnnnnnnnnnnnnnnnnnnnnnnnnnnnnnnnnnnnnnnnnnnnnnnnnnnnnnnnnnnnnnnnnnnnnnnnnnnnnnnnnnnnnnnnnnnnnnnnnnnnnnnnnnnnnnnnnnnnnnnnnnnnnnnnnnnnnnnnnncacaagttttacatagtttccctcatatacatcntnnnnnnnnnnnnnnnnnnnnnnnnnnnnnnnnnnnnnnnnnnnnnnnnnnnnnnnnnnnnnnnnnnnnnnnnnnnnnnnnnnnnnnnnnnnnnnnnnnnnnnnnnnnnnnnnnnnnnnnnnnnnnnnnnnnnnnnnnnnnnnnnnnnnnnnnnnnnnnnnnnnnnnnnnnnnnnnnnnnnnnnnnnnnnnnnnnnnnnnnnnnnnnnnnnnnnnnnnnnnnnnnnnnnnnnnnnnnnnnnnnnnnnnnnnnnnnnnatttgacttctttttcaatttggacgccctttttttctctggtaaaggtgagcatttctatcttgtttcagatcttagagaacataccttattgcgggatctggccagtagcctgcaatgcaacggggctctctctttgttcccaggcggatcggcaggttgagaaataatagacacacacaagatagtgaaagctgggtccagg

SEQ ID NO: 254109 - DNA, 451 bp, Homo Sapiens
ccgcctgcagagagcctatgaatggacatgcagtcagggaggtttcacataaccaagattcctatcccagaaaagcagatgtccatagctctgggaatggaatgcgacccttgtggacagcttacaaatgaccttaaatccctcactaacctaccaacactctcactaaacttaataataaatgctggtatatccagtgcattggtagcatcgcaggaccagaaggcagtgacccctctggacccagttttcactatcttgtgtgtgtcttttatttctcaacctgccgatctgcctgggaacaaagaaagagccctgttgcattgcaagctgctggccagatcccgcaatatagtcccagctacttgggatgctgaagcatctgtagagggagagctgccccaaatcataaatcaaaaataaaagccaattacatcaataactaaaaaaa

SEQ ID NO: 254110 - DNA, 476 bp, Homo Sapiens
acaaccaaccaaaaagccagaacttactcgtttccatagcgaagtgctttcaacgtgaatgaagaaagaacatctgctgattggatgataaaaaagcaaaatggcattaaaaggccatgatgcacagtgaagaaccagtctcccttgggtggctggactcaacactgagatactcttgaagagcagtaagcccactgtgaaatcagcacccactgttaggggacctgggggctaccattcttatttcaaattaaaacagcagcaaaaaaggaatgtttaaattctgggtagcaaactgcattaaaaatggagagagctaataatggaaagggtgtatatgataattatatttgttcagtgtgggaaataaataacaactatagtgctacactattaagagagtatgtaatcatgttattagatatgtcctataattgaaagccattatcagaatacttccttatagagttaattcc

SEQ ID NO: 254111 - DNA, 473 bp, Homo Sapiens
gggaaacagaagttggagaaatacaacagaataaaagtgtcacttacgatctctcaaaattggtcaactatcctggttttaatatatctactcccagaggaattccagacgaatggaggatctttggttccataccaatgcaggcatgtcagcagaaggatgtgtttgccaattaccttacttctaacttccaagcgccaggtgtgaagtctggcaacaagaggtcttcatctcactctagcccaggtagtccaaagaagcagaagaatgaaagcaactcagcgggatctcccgccgacatggagctcgattcagatatggaggtaccacatggttctcagagcagcgaaagttttcagtttcaaccaccattacctcctgacactcctccactcccccggggaactcctccacccgtcttcacccctccatgtggccccaggtgccaccaataaaaatcctacagaaaattc

SEQ ID NO: 254112 - DNA, 456 bp, Homo Sapiens
  misc_feature (434)..(434): n is a, c, g, or t
  misc_feature (443)..(443): n is a, c, g, or t
aggtagtccaaagaagcagaagaatgaaagcaactcagcgggatctcccgcggacatggagctcgattcagatatggaggtaccacatggttctcagagcagcgaaagttttcagtttcaaccaccattacctcctgacactcctccactcccccggggaactcctccacccgtcttcacccctccactcccaaaggggcaccccgccgctgactcccagtgactcaccccagaccagaacagcatctggagctgtgggatgaggacgcactgactctagaagaactgggaaggaacagcagaggcggatctggggcagctcttgagcaggccgaggagcgtaaaacagcgacttccgacgttcctgtgggacacaccttttaactgggcatttccgtttgccttcattcacttgttccaaatgaggttagganctcctgttnccggaggaataat

SEQ ID NO: 254113 - DNA, 406 bp, Homo Sapiens
cttcctttaatgcctagattattgaaagtttttaacatgaatagatgttgaattttctgaaagtctttgctgcatctactgagataatcgtgtggtttttgtctttagctctctttatgtgatgactgacatttgttgatttgcatatgttgaacaaagcttgcatcccagagatgcctacttgatcatagtgaataagctttttgatgtgctgctggattcaatttgccagcattttgttgagaatttttgcattgatattcatcaagaatgttggcctgaagttttcttttggtgtagtatctctgcaaggttttggtaacagaatgatgctgacatcatgcaatgagttgggtaggagtcccttttcctcattttttgggaatattttcagtaagtggtaccg

SEQ ID NO: 254114 - DNA, 1233 bp, Homo Sapiens
  misc_feature (476)..(487): n is a, c, g, or t
  misc_feature (617)..(617): n is a, c, g, or t
  misc_feature (652)..(652): n is a, c, g, or t
  misc_feature (698)..(698): n is a, c, g, or t
  misc_feature (753)..(753): n is a, c, g, or t
ctacatcagccgctgttctgtgtgtgaggccccggccatcgccatcgcggtccacagtcaggatgtctccatcccacactgcccagctgggtggcggagtttgtggatcggatattccttcctcatgcacacggcggcgggagacgaaggcggtggccaatcactggtgtcaccgggcagctgtctagaggacttccgcgccacaccattcatcgaatgcaatggaggccgcggcacctgccactactacgccaacaagtacagcttctggctgaccaccattcccgagcagagcttccagggctcgccctccgccgacacgctcaaggccggcctcatccgcacacacatcagccgctgccaggtgtgcatgaagaacctgtgagccggcgcgtgccaggaagggccattttggtgcttattcttaacttattacctcaggtgccaacccaaaaattggttttatttttttcttnnnnnnnnnnnngtctaccaaaggaatttgcatccagcagcagcacttagacctgccagccactgtcaccgagcgggtgcaagcactcggggtccctgggagggcaagccctgcccacagaaagccagggagcagccctggncccccatcagccctgcttaggacggcaccgcctgnaaggcacagctaaccactttcggcacacacccatgttaaccactgncacttttccaatgccacaggacaactcacattgtttcaactcccttctcggggtngggacagacgagacaacagcacacaggcagccagccgtggccagaggctcgaggggctcaggggctcaggcacccgtccccacacgagggccccgtgggtgggcctggccctgctttctacgccaatgttatgccagctccatgttctcccaaataccgttgatgtgaattattttaaaggcaaaactgtgctctttattttaaaaaacactgataatcacactgcggtaggtcattcttttgccacatccctatagaccactgggtttggcaaaactcaggcagaagtggagacctttctagacatcattgtcagccttgctacttgaaggtacaccccatagggtcggaggtgctgtccccactgccccaccttgtccctgagatttaacccctccactgctgggggtgagctgtactcttctgactgccccctcctgtgtaacgactacaaaataaaacttggttctgaatattttt

SEQ ID NO: 254115 - DNA, 518 bp, Homo Sapiens
  misc_feature (22)..(22): n is a, c, g, or t
  misc_feature (33)..(33): n is a, c, g, or t
  misc_feature (42)..(42): n is a, c, g, or t
  misc_feature (54)..(54): n is a, c, g, or t
  misc_feature (102)..(102): n is a, c, g, or t
ttctcggggtgggaaaagacgnagacaaccagnacaacaggnagccagccgtgnccaaaaggctcgaggggctcaggggctcaggcaccccgtcccccaaanacgaagggcccccgtggggtggcccctggcccctgctttcctacgcccaatgttaatgcccagctcccatgttctccccaaaataccgttgatgtgaattattttaaaggcaaaactgtgcccctttattttaaaaaacactgataatcacactgcggtaggtcattcttttgccacatccctatagaccactgggtttggcaaaactcaggcagaagtggagacctttctagacatcattgtcagccttgctacttgaaggtaacaccccatagggtcggaggtgctgtccccactgccccaccttgtccctgagatttaacccctccactgctgggggtgagctgtactcttctgactgccccctcctgtgtaacgactacaaaataaaacttggttctgaatatttttaaaaa

SEQ ID NO: 254116 - DNA, 730 bp, Homo Sapiens
  misc_feature (565)..(565): n is a, c, g, or t
  misc_feature (576)..(576): n is a, c, g, or t
  misc_feature (582)..(582): n is a, c, g, or t
  misc_feature (585)..(585): n is a, c, g, or t
tgaaatcggacgaattgaactagtccagaagctggcaaaagaaaactatcagtttttgcagacggacaaaaaagaacaggagaagtctgaacacgtaagccttttgcctcttggggatgcaggtttgaaggggtggaaaatgtttttgcctgattgcatgtttgaacccccaaagagcatcctccttagtaaaaatgacagctgctcatagctctaagcaagtggcttatgacacaggatttataagagactcttctcaaaagtaaattatgtagaaatatgagaatacatttaagcaaatatgaatccttatctatttatgatcctgcttgggtggctttcaagtttgattttggaagttttgccttatcatatagtttgtagaacatgaattttgaaaaaacatttcaacatatttttatgtttagtacagaggtggatctagttgccaaatgaatgtgttctaagtcactagaaatagatgaaaacacagagattattgatgctctcacccaagtgggagggtcaaaagggaagtttcccagtatcttatgaaggctgtgtntcaacaagagntatatngtnttgatatagtgctggaggaagggacgttcccgtttgtccttctggaagacaatgggacacctttttgtgccacacattgttatttcgtgacttgggtggtgttggttatgagacctaactctcaaggctgacttatcacgtggtg

SEQ ID NO: 254117 - DNA, 716 bp, Homo Sapiens
  misc_feature (536)..(536): n is a, c, g, or t
  misc_feature (677)..(677): n is a, c, g, or t
tgaaatcggacgaattgaactagtccagaagctggcaaaagaaaactatcagtttttgcagacggacaaaaaagaacaggagaagtctgaacacgtaagccttttgcctcttggggatgcaggtttgaaggggtggaaaatgtttttgcctgattgcatgtttgaacgaaagactattttattttaaattctttaggttttgggggtttttttccccccaagagcatcctccttagtaaaaatgacagctgctcatagctctaagcaagtggcttatgacacaggatttataagagactcttctcaaaagtaaattatgtagaaatatgagaatacatttaagcaaatatgaatccttatctatttatgatcctgcttgggtggctttcaagtttgattttggaagttttgccttatcatatagtttgtagaacatgaattttgaaaaaacatttcaacatatttttatgtttagtacagaggtggatctagttgccaaatgaatgtgtcctaagtcactagaaatagatgcacanaaagagattatagatgctctcaccaagtgggagggtcagaagggagttttcccagtatcttatgaaggcttgtgttccaacaagaagtatattgtttgaatatagttgctggaggaactgagagtgctgccgtcatgctgngaagactgggaccacttttctgtgccacacactggttcg

SEQ ID NO: 254118 - DNA, 380 bp, Homo Sapiens
gacaatgatacacctatgtcagatggtaatggaaagagagaaagcagcagagaaatgtggagaatacaaccttgagatgcaattgtacatatgagggtcataaagtaacagggtaaagacccaaggatagtgatggtgcctggcaggcctgaggaatggtgaaaagaccagtgtctgaaagaaaaggagcaagaaatgaagccagaaaagaaacagggttgacaatctttggcattcctggtgacgtgagaagccactgtggagttctgagaaaagtatttgacttaaatgccttgacagagcctccctggtggcggatctgagaacagactccagagacaagctcgtgccgaattcctcagcccgggggatccactagt

SEQ ID NO: 254119 - DNA, 1090 bp, Homo Sapiens
cagatttgcaagagaaaatccacatttttgcccaaaaatgtctattcttgacggagagtctaaagcagttcacagaaaaaatgcagtcagatatggagaaaatccaagaattaagagaggctcagttatactcagtggacgtgactctggacccagacacggcctaccccagcctgatcctctctgataatctgcggcaagtgcggtacagttacctccaacaggacctgcctgacaaccccgagagattgtgaaatgtaatgagatgtatcaagatatcctagaaatagagggataaagagtatggataatctttggatttggagagccgttcaagatacttccagcttcttggctcagcctggcttcctctggttcagccccacataatgattatggctatttgctgtcatttctgggctagggctcctttctaacaacctagactggaataaggccctgtcagcatggctccctttatcccagttttccgtctgggaacagtacctctgcccctgattcccaatgtgccatagttttattaactccattaaagaagcctgtatgtgttttggttagttacagttattttacaataatggtgggtaatggccccacctctgttatgagataatgttctaatcaatgtctctgcctttgtatcttttctgagggctttgtctgttctcttcattctaatgaaaggtgtattctagtgctgggtgcatatcatccaggataatattctgcccaactccatcctctgttactagatcccttaccagtcacatttgtggactggtggccagtcgtataccatccctggaaggattctgggacaatattccagggattcattgacttcttggctccttttctccatttcctttgggggaagggggaattgaccatgcttaagtgcatcctatcaaggggcagctccgtccccatggccattggatcatgagacactctgaagtcagaaggctggggcagatcacttcaagcaagcccccatgatggttctcagtcctgcttctctgtgggtacgtgcccctctgtttaaaaataaactgaatatggatgttta

SEQ ID NO: 254120 - DNA, 2243 bp, Homo Sapiens
  misc_feature (2135)..(2135): n is a, c, g, or t
  misc_feature (2148)..(2148): n is a, c, g, or t
  misc_feature (2155)..(2155): n is a, c, g, or t
  misc_feature (2176)..(2176): n is a, c, g, or t
  misc_feature (2206)..(2206): n is a, c, g, or t
  misc_feature (2227)..(2227): n is a, c, g, or t
tcggacgagggggactctgaccctcggctaccctttcctgccccactagcgtggccgcgagcctcggtgagccggccgtattcccgctctcgcttagggggcacaggcgcaggcatcggcccggccactccaagccttcggtgcgcgggcgcgtctgggatacgggcccgggaggcgccgccctccgtccgcccggtgcctctcaggaacagcgaaccggagagagcgccggagagttgggctcagtgcagagctcggcgccggggcccatgcccgtgcgcccccgcaggccggcgccatggcctccgggagtgtggccgagtgcctgcagcaggagaccacctgccccgtgtgcctgcagtacttcgcagagcccatgatgctcgactgcggccataacatctgttgcgcgtgcctcgcccgctgctggggcacggcagagactaacgtgtcgtgcccgcagtgccgggagaccttcccgcagaggcacatgcggcccaaccggcacctggccaacgtgacccaactggtaaagcagctgcgcaccgagcggccgtcggggcccggcggcgagatgggcgtgtgcgagaagcaccgcgagcccctgaagctgtactgcgaggaggaccagatgcccatctgcgtggtgtgcgaccgctcccgcgagcaccgcggccacagcgtgctgccgctccaggaggcggtggagggcttcaagggagcaaatccagaaccagctcgaccatttaaaaagagtgaaagatttaaagaaagagacgtcggggcccaggggggaacaggcacgagctgaactcttgagcctaacccagatggagagggagaagattgtttgggagtttgagcagctgtatcactccttaaaggagcatgagtatcgcctcctggcccgccttgaggagctagacttggccatctacaatagcatcaatggtgccatcacccagttctcttgcaacatctcccacctcagcagcctgatcgctcagctagaagagaagcagcagcagcccaccagggagctcctgcaggacattggggacacattgagcagggctgaaagaatcaggattcctgaaccttggatcacacctccagatttgcaagagaaaatccacatttttgcccaaaaatgtctattcttgacggagagtctaaagcagttcacagaaaaaatgcagtcagatatggagaaaatccaagaattaagagaggctcagttatactcagtggacgtgactctggacccagacacggcctaccccagcctgatcctctctgataatctgcggcaagtgcggtacagttacctccaacaggacctgcctgacaaccccgagaggttcaatctgtttccctgtgtcttgggctctccatagcttcatcgccggggagaccattattgggaggtagaggtggggagataaagccaagtggaccataggtgtctgtgaagactcagtgtgcagaaaaggtggagtaacctcagccccccagaatggattctgggcagtgtctttgtggtatgggaaagaatattgggctcttacctccccaatgactgccctacccctggcggaccccgctccagcgggtggggattttcttgggactatgatgctggtgaggtctccttctacaacgtgacagagaggtgtcacaccttcactttctctcatgctaccttttgtgggcctgtccggccctacttcagtctgagttactcgggagggaaaagtgcagctcctctgatcatctgccccatgagtgggatagatgggttttctggccatgttgggaatcatggtcattccatggagacctccccttgaggaggtgaattcaggccaaaagggctgttggctgtaatcctacgccaggcacaaggcatcttgttgccttgccacgtcctgtcacagctgggtatccttaccatgttccacgcccttgcagtgggagacaggatgtccatgttctctaccatccttttccttcccatgcagattgtgaaatgtaatgagatgtatcaagatatcctagaaataaaaaccagatgtccacctccagtgtttcatactttctggttttacacattcgctggagggataaagagtatnggataattctttnggatttnggagagccgtttcaaggttantttccagctttttgggttcagctgggtttnctctggttcagccccacatantgattttgggtatttt

SEQ ID NO: 254121 - DNA, 701 bp, Homo Sapiens
  misc_feature (534)..(534): n is a, c, g, or t
  misc_feature (593)..(593): n is a, c, g, or t
  misc_feature (619)..(619): n is a, c, g, or t
gcacgaggtagtgtttgcctatgtggaaacaacagcaaactaacaccaagtgccagagtcctggatgtgcaattggtttaagtgttcatgttctagtgaacacagcttgttcaggaacaaacactaaaacgatttgagtagaggctgctggtcaccttttgtgacctgaggaatcccaggcctgtgagaaaagcaaaaattcacattgcagcacatgatgccagaaatagcactgaatcaagaaagtagccattgcggagctgccctcttgagtctttctgtccatcccattctattctgtactgtgactttagttcaggaagttttgttttgtgttttaaatccagttctaaggccttatcacctcccctgcccataggccaacaaccatagttcctcacattagtgattagcagactctttgtggacgagtgaatttcacaaacagcacaatttcagaagaaatcgagggcacaggctcctcacttttcttcttttgacgcatcatcctgtgatgttgaaatgtcaattgangatgctgatgttgtgacgtcatcactggcacttgatactctatgaacagttgacttcgntactgcctcttacttgccttgttgtngccactagatttcttgggcactgcatagacttgatgttgcacacgtgtcgagtatcttctcactctcgcgtgttcgtcgtcg

SEQ ID NO: 254122 - DNA, 392 bp, Homo Sapiens
tataaatagggtataaaaaccattaaaaaggttaacccatggtaagatattattccccggaaacaatttagcctataccccaccatgattataaacctgtgtcctcgaccctgtgttatttacattagcctgccttaaaaaagcattgagttaatttttttaaatatcaactaaaatatcatagttctgtggtagacattgttttataatgaaataactgcaactagagaaaactgtataaaaacattaaattgtcagtatttttgtaaggttccattttgtaaagagaataatattcaaagacttttgtagcatacaaagtgaaaacttgtatctgcgaaactatacttgtattaaatgtgctttttaaataaaagctcgtaacacaacta

SEQ ID NO: 254123 - DNA, 1653 bp, Homo Sapiens
taaaatcagtcgggcaaaataggtagtgtttgcctatgtggaaacaacagcaaactaacaccaagtgccagagtcctggatgtgcaattggtttaagtgttcatgttctagtgaacacagcttgttcaggaacaaacactaaaacgatttgagtagaggctgctggtcaccttttgtgacctgaggaatcccaggcctgtgagaaaagcaaaaattcacattgcagcacatgatgccagaaatagcactgaatcaagaaaatagccattgcggactggccctcttgagtctttctgtccatcccattctattctgtactgtgacttcagttcaggaagttttgttttgtgttttaaataaaaggaaagagcaagtttgctcagtcaagtgatcagatcccgaatctagattcccagttctaaggccttatcacctcccctgcccataggccaacaaccatagttcctcacattagtgattagcagactctttgtggacgagtgaatttcacaaacagcacaatttcagaagaaatcgagggcacaggcccccacttttcttcttttgacgcatcatcctgtgatgttgaaatgtcaattgcaggatgctgatgttgtgcacgtcaatcaccgggcacttgcatactcttagaaacagttcgacttcggttactgccttctcccttgaaatccttgctgcgtgcccaccaggatttcctgtgagggcccgggaatgagcaaggcatggtctgccaccagctgacggaaagcagccttctgtacaacagatgggagggtgaagggggcagaatgaaaatcgaaccaaccttttagctgttgcaaatcagaaggagccagagaagcaggcagtctcatgcatgagaggttacccttcaggatgacagagctgagggtctttgtaggagttgctcttgctgtgtaaagcactattgtcttggggttgagccctagggcagttcttggtaggttctgctgggcagaacatatgggttaaatctcggtagagagttttcctcatcctctatccgtaagtgtccttccatgcaaggtcccactctaggtgatagacagggaccccttctactgaacctttgaggaaaggaggaaggaagaaatgcgtttagatcttggatgcagacctttcaaagggttaaatgttaaccatatggatcaaccacatgcacatccttactacagaatccgtcctttcatttcaacttatagcaagctatgatttttatatataaatattatataaataatgtataaaacattaaaagttaactatgtaagatattatttctgaaacaatttagctatatccactatgattataaactgtgtctcgacctgtgttatttacattagctgcttaaaaaagcattgagttaatttttttaaatatcaactaaaatatcatagttctgtggtagacattgttttataatgaaataactgcaactagagaaaactgtataaaaacattaaattgtcagtatttttgtaaggttccattttgtaaagagaataatattcaaagacttttgtagcatacaaagtgaaaacttgtatctgcgaaactatacttgtattaaatgtgctttttaaataaaagctcgtaacacaactaaaa

SEQ ID NO: 254124 - DNA, 1199 bp, Homo Sapiens
aagcacagtgtattcagacagatacagtgaaccaagtgcaatatgtaaggatgaaagaagaagagatgacaaagaaatccaagtaaatgccttgtctttgcaaatgtttttatattaaatcataaggaaggaactacttgccttaaatgttaatatcaaaagagttttctaacaaggttaataccttagttcttaacattttttttctttatgtgtagtgttttcatgctaccttggtaggaaacttatttacaaaccatattaaaaggctaatttaaatataaataatataaagtgctctgaataaagcagaaatatattacagttcattccacagaaagcatccaaaccacccaaatgaccaaggcatatatagtatttggaggaatcaggggtttggaaggagtagggaggagaatgaaggaaaatgcaaccagcatgattatagtgtgttcatttagataaaagtagaaggcacaggagaggtagcaaaggccaggcttttctttggttttcttcaaacataggtgaaaaaaacactgccattcacaagtcaaggaacccagggccagctggaagtgtggagcacacatgctgtggagcacacatgctgtggagattgcagtgtgtctgaggtttgtgtagtagtggaagattttaggtatgtagagcaagttgaaaatggattgagactgcatggtggcataaatgagaaattgcctgtagcatctagtctacttgaaggaagtggagacataaggagagacaaaaacaggtttgtgccataaagtattttttcaaagacaccaagatgtggtaaatgaaaattattagttcacttccctgctgccatgaaactttgccttaagaaggtgctggattccaaggtttgtaaaggcatctcggtaaagactgctttttgaatgcatatgattttgcatcagctagactgagttgattctgaccagacttgatggttttaagtcggaaccgataaattttaaaaaggagaaaaaataatttgacctagtagtataaaacatgaggctttaatggtactttgctatgaaaagaaaacactgtattccttatgcaaaacacatgtatctttcattatttataagtggcctctcttagctcagatactcaattcatacgtagtattttttaaaataattttatatctgtgtaccaccccc

SEQ ID NO: 254125 - DNA, 395 bp, Homo Sapiens
cacatgccaatagacacatcaaaaagtatagagtaaaagattaaagatatgttctataaacattctcattatgtttaatttataaggataatgtgaaagaagctcactattagtttattttcactaagccattttagtcaattgaaaggatttatcatgaatcaactgaaattattcagaggctatagcaaataataagattggcatgccctcaagttggcttttgctttaaggttgccttaattatttgtcattgtttctcaaagcatttcttgatttttttcttacctttttgttatgagagttgcatctttctatactgtagctactgaaatttttggattctcttttcccttttagcatgcttgctggccagttaattgttttctgagttt

SEQ ID NO: 254126 - DNA, 438 bp, Homo Sapiens
gaaagaccccaggcaaacctgcctctctttaaagcttcagtcatgtttacagttgcattaagcaattcttaggactcttctggctgggtattctaggattccatataggtgacagcttataggaaggggcatgggagctttcaaatgtggcatttgaatcctgactctgcccccaaataggtaactgtggctttcggcaggatactggtccttagccgtgcccagttttccatctgtacaataggtgttaacatgaggattggatgcatggtagtggtcatgccttgtgggttcccctgttttctccccaagttctgtggtccgaggcagtgagagtcacaagatgatcgacttgtccgggaatccggtgcttcggatctactacacctcgaggcctgctctgttcaccttgtgtgctgggtgagctcttctctgccc

SEQ ID NO: 254127 - DNA, 1850 bp, Homo Sapiens
actttcctctctccaattttgcaacgacgggcgcggaggaggaggttcccggaagccacgcgcagctggagcagcggcgaccgcagctggaggcccggagcgcctgcggggctggcagaggcgagggaggttgcgggtaggaagggcggactgcgcgcgccccctgcgtcccgcgcacctcggggccggtccatgctcccgacggctgcgggcttcagcatctggggccaggttggggcggcggggtccagggcgcaggtggtgcggccgatgcgccgggccggaggctgaggccgcgctgcggggctgggacagcactggcatctccagagcaggcccggggcagcaatggaggcgccgcgatgccagacgaaaatatcttcctgttcgtgcccaacctcatcggttatgcccggattgtcttcgccatcatttctttctacttcatgcccggctgccacagcactggcatcctccagagcaggcccggcgcagcaaggcaggcgccacgatgccagacgaaaatatcgtcctgctcgcgcccaaaatcaacggaacccggtttggggccatgctggacatgctgacggaccgctgctccaccatgtgcctgttggtcaacctggccctgctgtaccctggagccacgctgttcttccaaatcagcatgagtttggatgtggccagtcactggctgcacctccacagttctgtggtccgaggcagtgagagtcacaagatgatcgacttgtccgggaatccggtgcttcggatctactacacctcgaggcctgctctgttcaccttgtgtgctgggaatgagctcttctactgcctcctctacctgttccatttctctgagggacctttagttggctctgtgggactgttccggatgggcctctgggtcactgcccccatcgccttgctgaagtcgctcatcagcgtcatccacctgatcacggccgcccgcaacatggctgccctggacgcagcagaccgcgccaagaagaagtgacgctggagccccgggtcctggctgcccacctgccctgggagtcttgctgtgccacacagctccccaccccctgctaggaggtcccagtctcacgccttcctcatgtgttgttctacctgctgggatgggggtcagcctctctttggtgacgtcacgttctctgggatcctgaggacccgggcctcaaatcagggaggatacgcgggaggccccctccatccaggcggtgctcctggggtgccgggaccgggcagtgtcacaccctgcctgctcagtcctggggtccgagatgctagggacgcttgagtgagggaggtggtgtgagggccaggtttcctgaaaggcgggagtcagacctccgcccccagccagagcaagcttggggcaccatgcccaggagggaagaagccatccacagccttccctgtcaccggctcctctgtcctgcctaccctggtcctggcgggacttcactatttgacttggtttcctttcagatattcttggctcagggcctgggttgagggagcttagggaaggacgtccgtctgggtgcttttcctccagtttgctggctggcttctccgtctacccacagtgacctcacagagaggccctcctgccacccatgctcatgtggtgtccccaccgcccacttgtttgatgtcactgactgtctacatgtatttatattcttgatattttctaccctcactagaatgtaaactccatgaaggcacagacttttcttgttctcttctctatccctagagtaagaccaacttgaacctggcatatagtagctgcttaataaatactcgtctgtcaatga

SEQ ID NO: 254128 - DNA, 360 bp, Homo Sapiens
caaggcagccctggccgcgatccgcggcggcgccacgcgcgcggccggcgtcttctacccgtggcgtttccgcctgctgtgcttgctccggcgctggctaccgcgcccgcgggcctggtttatccgccaggagctcaacgtcacggccgcggcagcctgagcaccggggggtgccccttcagtcccagacggcaatgttcctcccttcaactgtccctggagccagaacactcacagagacacccctgagagggtggccacagcccaagatgaagtcatcaagacagagcccgagattaggcgcctttgtcggggacttgcggcctcacctgtttggccatgattgatgacgtgctgctt

SEQ ID NO: 254129 - DNA, 1068 bp, Homo Sapiens
  misc_feature (917)..(917): n is a, c, g, or t
agagcggcggcttctctcgcgaggacggacgccattatcgcatctccccgacaaacaccacgagaattccgcagcccacacggtgaccaaaagccagccccactgtgagttgaactctttcgtgttgaccggccactctccgtgctctggatgatgtcggaacacgacctggccgatgtggttcagattgcagtggaagacctgagccctgaccacccagttgttttggagaatcatgtagtgacagatgaagacgaacctgctttgaaacgccagcgactagaaatcaattgccaggatccatctataaagtcattcctgtattccatcaaccagacaatctgcttgcggttggatagcattgaagccaaattgcaagccctggaggctacttgtaaatccttagaagaaaagctggatctggtcacgaacaagcagcacagccccatccaggttcccatggtggccggctcccctctcggggcaacccagacgtgcaacaaagtgcgatgcgtcgtcccccagactacagtaatactcaacaatgatcggcagaacgccattgtagccaagatggaagaccccttgagcaacagggcaccggattccctggaaaatgtcattagcaacgctgtgcctgggcgtcggcagaacaccattgtggtgaaggtgccgggccaagaagacagccaccacgaggacggggagagcggctcggaggccagcgactctgtgtccagctgtgggcaggcgggcagtcagagcatcgggagcaacgtcacgctcatcaccctgaactcggaagaggactaccccaatggcacctggctgggcgacgagaacaaccccgagatgcgggtacgctgcgccatcatcccctccgacatgctgcacatcagcaccaactgccgcacggncgagaagatggcgctaacgctgctggactacctcttccaccgcaaggtggcagctgtgtccaaccctctcggggcaaggcaagcacggggaaaaaacagctgggacccgctcaccatctacgggaatccgggggtcacccttttctataaa

SEQ ID NO: 254130 - DNA, 1003 bp, Homo Sapiens
  misc_feature (873)..(873): n is a, c, g, or t
gtagcgaggcctgggtggcgaattcggcacgaggagaagacagccaccacgaggacggggagagcggctcggaggccagcgactctgtgtccagctgtgggcaggcgggcagtcagagcatcgggagcaacgtcacgctcatcaccctgaactcggaagaggactaccccaatggcacctggctgggcgacgagaacaaccccgagatgcgggtacgctgcgccatcatcccctccgacatgctgcacatcagcaccaactgccgcacggccgagaagatggcgctaacgctgctggactacctcttccaccgcgaggtgcaggctgtgtccaacctctcggggcagggcaagcacgggaagaagcagctggacccgctcaccatctacggcatccggtgtcaccttttctataaatttggcatcacagaatccgactggtaccgaatcaagcagagcatcgactccaagtgccgcacggcgtggcggcgcaagcagcggggccagagcctggcggtcaagagcttctcgcggagaacgcccaactcgtcctcctactgcccttcagagccgatgatgagcaccccacctcctgccagcgagctcccgcagccacagccgcagccgcaggccctgcactacgcgctggccaacgcacagcaggtgcagatccaccagatcggagaagacggacaggtgcaagtaatcccacagggacacctccacatcgcccaggtgccgcagggggagcaagtccagatcacgcaggacagcgagggcaacctccagatccatcacgtgggggcaggacggtcaggtgctgcagggtgcacagctgatcgccgtgggcccctcggaccccgcggcagcgggncgggaatgggtccccactccagggcaacgacatccaggttcagtaactgcagctgggcgccaatgagtggaccaccgggccggggcaccgaacggccgaacccttgcacccacgcttaacgccggagaag

SEQ ID NO: 254131 - DNA, 357 bp, Homo Sapiens
aggagaagatcctgacaggaacataatctcatgcaatttattgcagtcctctccccccacccggaatggcctgagccgaagccagctccctccgagaagtcattaccgcctgacttgcgtttgatatttagacaccttggtcacaacatcttgcattctctcgggatgctgatttctaactgctctttggcctttcctgcattggtcctcctcaggcaggggatccctgctcttctatattaatgctggctccccgtcccctgtccaccatgagtcaaagcaatgtgagtccctcaccagatgcaactgcccagtcttggactttccagcgaccagtcatgagccattcctcttttt

SEQ ID NO: 254132 - DNA, 426 bp, Homo Sapiens
  misc_feature (101)..(101): n is a, c, g, or t
ctctcccagccttcagaaattgccggtctgggagttgggggcaaaggagaagatcctgaattagacctttacgagaagcacagttttgtcttcagtttccntctcccccccacccggaatggcctgagccgaagccagctccctccgagaagtcattaccgcctgacttgcgtttgatatttagacaccttggtcacaacatcttgcattctctcgggatgctgatttttaactgctctttggcctttcctgcattggtcctcctcaggcaggggatccctgctcttctatattaatgctggctccccgtccccctgtccaccatgaggtcaaagcaatgtgagtccctcaccaagatgcaactgcccagtcttgggactttccagcgaccagaatcatgagccaaataaacctcttttctttatg

SEQ ID NO: 254133 - DNA, 825 bp, Homo Sapiens
  misc_feature (573)..(573): n is a, c, g, or t
ttttcataaagaaaagaggtttatttggctcatgattctggtcgctggaaagtccaagactgggcagttgcatctggtgagggactcacattgctttgactcatggtggacaggggacggggagccagcatccttagaaaatccacagtttctctgagccttggttttctcactaatatagaagagcagggatcccctgcctgaggaggaccaatgcaggaaaggccaaagagcagttagaaatcagcatcccgagagaatgcaagatgttgtgaccaaggtgtctaaatatcaaacgcaagtcaggcggtaatgacttctcggagggagctggcttcggctcaggccattccgggtggggggagaggaaactgaagacaaaactgtgcttctcgtaaaggtctaattctaaaaataaagacagagttagcctagtgagtgtctgcagggatgcttgtctgagtagagaagtaacagagccatgccgaggttcttgagttaggcaaccagactaagaaaagcgtgcaaagtaagccttctcctgacacgatccgcatcccaacaagatcagantttcagcttctgataaatctgttaggaagaggaagagtctgaagaaacttaaaagcttgtctcaaaatctaagtaaaacaataaagaggaagtatttgttcttgtatctggaaatttcagaaatgtgagcttcaggcaaggtttgatccagtgagtcaaagatgtcaccaagtatccgtttctttatgtccttctttctgctttccatggaatcactgggttgcaggatcttctccttgcccccaactccca

SEQ ID NO: 254134 - DNA, 751 bp, Homo Sapiens
  misc_feature (313)..(313): n is a, c, g, or t
ctctatatacagtctatgatgcacagtagctgcaaatccaagagatgagcagtcaaccatgctaacaatttctcaattctgagagagacaagtcctcgaagtctagtttcttagcaccgacttcttccatcctgttaacatcaacagtccacaacaaacacaatgccatctgtgcatcttgcatatggcttctacagagttcctcatttcttctgaccacctactatctcaggagtgaagagtgacagaattttccaaaattaccttaatcttttcagtgttaaatcctttggtgtgggtatggtatttacanatatattgaatagcagcctgtataacacagttcttctagcacagtccaaacaccaaataacaatgtggaagcactaaagtgaaggcagtatgcacaagatagtagtttagccagttagcccattcccccatttccagctgcaaaaaagtgtcccaaaatgaaatgctttcttttatatgctatagaacctctcttcataggtggcccagctataagactcccgttttggagtctgggtctaaatgaggcaacattggcaggcttttctacacgaggcaggggtgggggtagcacgccacatcctttcagcttatctctcaagcaactctcataaacgggtaacttcctctccctaacctggatgactttcattgtttccagttaattattagtacctgctcaagaactatgaaaacagagatcacaaacagcattcag

SEQ ID NO: 254135 - DNA, 634 bp, Homo Sapiens
  misc_feature (504)..(504): n is a, c, g, or t
  misc_feature (595)..(595): n is a, c, g, or t
  misc_feature (616)..(616): n is a, c, g, or t
gaaggcttctccgcccattctgacccagggcctaggacggataggcaggaacatacagacacatttacactagaggccagggatagaggatattgggtctcagccctaggggaatgggaagcagctcaagggaccctgggtgggagcataggaggggtctggacatgtggttactagtacaggttttgccctgattaaaaaatctcccaaagccccaaattcctgttagccaggtggaggcttctgatacgtgtatgagactatgctaggatatgttaaatgtatagctggcaccttagttgcatgaccacatagaacatgtgtctatctgcttttgcctacgtgacaacacaaatttgggagggtgagacactgcacagaagacagcagcaagtgtgctggcctctctgacatatgctaacccccaaatactctgaatttggagtctgactgtgcccaagtgggtccaagtggctgtgacatctacgtatggctccacacctncaatgctgcctgtgagccacggtgagagtctgggtccaggcctggccatgtggccctccagtgtatgagagggccctgtctgctgcatctnttctgttggcccatccaccgncagctttcctttactctc

SEQ ID NO: 254136 - DNA, 1250 bp, Homo Sapiens
  misc_feature (130)..(130): n is a, c, g, or t
  misc_feature (158)..(158): n is a, c, g, or t
  misc_feature (801)..(841): n is a, c, g, or t
ccgtaggaaaagcagatagacacatgttctatgtggtcatgcaactaaggtgccagctatatatttaacatatcctaggtacatacacgttcacacagctatacacgaagaatctcagcccttgtacttntgcatagtctcatacttaatcagggcanaacctgtactagtaaccacatgtccagactcctcctatgctcccacacagggtcccttgagctgcttcccattcccctagggctgagacacaatatcctctatccctggcctctagtgtaaatgtgtctgtatgttcctgcctatccgtcctaggccctgggtcagaatgggcggagaagccttccatgccctaacctgtgctcttacacagcccccctcctgctcagccccatcaccctcagagagctctgtatgtgtgtgtgcgtgcgtgtgcgcgctgcaggtgcaggcatgttggggcgtgtctcagagcctgaacttcccttccagtcagtgctggaaggaggtgggcaggggaatgatagaaaggaaggagtggattggctccacccactgtgcattctcctgttagtcttttcctcctgacccaggagtaggtggggataggagggcaccctccccatctgctgcttggcagggcatgagcaagtgtccagagcaggtctgtgggggtagtagaagagctgtctctttgggttctccctccagctgggatcaccaactggggttggcccttaggtccatgtgggacattgagatcccagattgcccatagtgggagggctgcaggaggggctgtgnnnnnnnnnnnnnnnnnnnnnnnnnnnnnnnnnnnnnnnnnggagaagcttagtgaggtcctgttcagtgggaggcagcagaggagggaatatgtcttcacccaatcccaagtgccctgaggaaacgctgtcactggctggctcaggcagctgtcttcccaccatggtcacatctgagcagagcagggggtcagggctggacacagcatgctcctgaggctggcacggcagcaggccctgggggtgaggctggtcaaagggcaggctcatctggcccaggctggggggcatctgcaggtgaggctcctggaaggctgacaacacgttgactgattcttctggggagaggccttgatacggggggatggagtgagagtgtggtgggtacacctggggcaccatatctgggccaagctgcatgctcatggaggaatcaggggccattccaaa

SEQ ID NO: 254137 - DNA, 2253 bp, Homo Sapiens
caatgacaacagcctcagcatggaggccttccagcaccgttctgtgtcctggtcgcagttcaacaaggagatcctgctgggccgtggcttcaccttttggcagtggtttgatggtgtcctggacctcaccaaacgctgtctccggagctactggtctgaccggctgatcattggcttcatcagcaaacagtacgttactagccttcttctcaatgagcccgacggaacctttctcctccgcttcagcgactcagagattgggggcatcaccattgcccatgtcatccggggccaggatggctctccacagatagagaacatccagccattctctgccaaagacctgtccattcgctcactgggggaccgaatccgggatcttgctcagctcaaaaatctctatcccaagaagcccaaggatgaggctttccggagccactacaagcctgaacagatgggtaaggatggcaggggttatgtcccagctaccatcaagatgaccgtggaaagggaccaaccacttcctaccccagagctccagatgcctaccatggtgccttcttatgaccttggaatggcccctgattcctccatgagcatgcagcttggcccagatatggtgccccaggtgtacccaccacactctcactccatccccccgtatcaaggcctctccccagaagaatcagtcaacgtgttgtcagccttcccaggagcctcacctgcagatgccccccagcctgggccagatgagcctgccctttgaccagcctcacccccagggcctgctgccgtgccagcctcaggagcatgctgtgtccagccctgaccccctgctctgctcagatgtgaccatggtggaagacagctgcctgagccagaccagtgacagcgtttcctcagggcacttggattggtgaagacatattccctcctctgctgcctcccactgaacaggacctcactaagcttctcctggaggggcaaggggagtcggggggagggtccttgggggcacagcccctcctgcagccctcccactatgggcaatctgggatctcaatgtcccacatggacctaagggccaaccccagttggtgatcccagctggagggagaacccaaagagacagctcttctactacccccacagacctgctctggacacttgctcatgccctgccaagcagcagatggggagggtgccctcctatccccacctactcctgggtcaggaggaaaagactaacaggagaatgcacagtgggtggagccaatccactccttcctttctatcattcccctgcccacctccttccagcactgactggaagggaagttcaggctctgagacacgccccaacatgcctgcacctgcagcgcgcacacgcacgcacacacacatacagagctctctgagggtgatggggctgagcaggaggggggctgggtaagagcacaggttagggcatggaaggcttctccgcccattctgacccagggcctaggacggataggcaggaacatacagacacatttacactagaggccagggatagaggatattgggtctcagccctaggggaatgggaagcagctcaagggaccctgggtgggagcataggaggggtctggacatgtggttactagtacaggttttgccctgattaaaaaatctcccaaagccccaaattcctgttagccaggtggaggcttctgatacgtgtatgagactatgcaaaagtacaagggctgagattcttcgtgtatagctgtgtgaacgtgtatgtacctaggatatgttaaatatatagctggcaccttagttgcatgaccacatagaacatgtgtctatctgcttttgcctacgtgacaacacaaatttgggagggtgagacactgcacagaagacagcagcaagtgtgctggcctctctgacatatgctaacccccaaatactctgaatttggagtctgactgtgcccaagtgggtccaagtggctgtgacatctacgtatggctccacacctccaatgctgcctgggagccagggtgagagtctgggtccaggcctggccatgtggccctccagtgtatgagagggccctgcctgctgcatcttttctgttgccccatccaccgccagcttcccttcactcccctatcccattctccctctcaaggcaggggtcatagatcctaagccataaaataaattttattccaaaataacaaaataaataatctactgtac

SEQ ID NO: 254138 - DNA, 508 bp, Homo Sapiens
gaaagggttttttcttcgtccttttggtttaaaaagtttcacgtcttggtgccttttgtgtgatgcgccttgctgatggcttgacatgtgcaattgtgagggacatgctcacctctagccttaaggggggcagggagtgatgatttgggggaggctttgggagcaaaataaggaagagggctgagctgagcttcggttctccagaatgtaagaaaacaaaatctaaaacaaaatctgaactctcaaaagtctatttttttaactgaaaatgtaaatttataaatatattcaggagttggaatgttgtagttacctactgagtaggcggcgatttttgtatgttatgaacatgcagttcattattttgtggttctattttactttgtacttgtgtttgcttaaacaaagtgactgtttggcttataaacacattgaatgcgctttattgcccatgggatatgtggtgtatatccttccaaaaaattaaaacgaaaataaagtagctgcg

SEQ ID NO: 254139 - DNA, 943 bp, Homo Sapiens
  misc_feature (893)..(893): n is a, c, g, or t
  misc_feature (896)..(896): n is a, c, g, or t
  misc_feature (899)..(899): n is a, c, g, or t
  misc_feature (907)..(907): n is a, c, g, or t
  misc_feature (916)..(916): n is a, c, g, or t
  misc_feature (920)..(920): n is a, c, g, or t
  misc_feature (937)..(937): n is a, c, g, or t
  misc_feature (941)..(941): n is a, c, g, or t
aaaaagcaggctggtaccggtccggaattcccgggatccgctcccggctcggagtgtgatctaagcaggtcgcgtaccttcctcaggtgactccggccacagcccattgtccgcggccaccggcggagtttagccgcagacctcgaagcgccccggggtccttcccgaacggcagcggctgcggcgggtccatggagaagggccctgtgcgggcaccggcggagaagccgcggggcgccaggtgcagcaatgggttccccgagcgggatccgccgcggcccgggcccagcaggccggcggagaagcccccgcggcccgaggccaagagcgcgcagcccgcggacggctggaagggcgagcggccccgcagcgaggaggataacgagctgaacctccctaacctggcagccgcctactcgtccatcctgagctcgctgggcgagaacccccagcggcaagggctgctcaagacgccctggagggcggcctcggccatgcagttcttcaccaagggctaccaggagaccatctcagatgtcctaaacgatgctatatttgatgaagatcatgatgagatggtgattgtgaaggacatagacatgttttccatgtgtgagcatcacttggttccatttgttggaaaggtccatattggttatcttcctaacaagcaagtccttggcctcagcaaacttgcgaggattgtagaaatctatagtagaagactacaagttcaggagcgccttacaaaacaaattgctgtagcaatcacggaagccttgcggcctgctggagtcggggtagtggttgaagcaacacacatgtgtatggtaatgcgaggtgtacagaaaatgaacagcaaactgtgaccagcacaatgttgggtgtgttcnggnagntccaaagnctcgggacnagtnctgactctcattagggntganct

SEQ ID NO: 254140 - DNA, 341 bp, Homo Sapiens
cgacatcctaatgcaatagcactgcaatcagacgggctaagtcaattcaattgctaactcttctgaaaacttactctggacacactaacacgaagtaccacagtggcaaaagtaataaaatcaggtgcggctcctgccaactcttaacttggaaccactaagtaggtcaggcccgaggcgggcagagccccaactggactgcgcgtcccacaccgggcacctcacatggcacaactccaaccaaacgaaacccagccgctcggagcccactccaccccctacggcgggacgttagaggccgtctccgcgtttcaccgactaggactggggctcccgatagc

SEQ ID NO: 254141 - DNA, 601 bp, Homo Sapiens
  misc_feature (475)..(475): n is a, c, g, or t
acgaggtggtacgctccggaatgcatcaactactacaagttctccagcaaaagcgatgtctggagctttggagtgttgatgtgggaagcattctcctatgggcagaagccatatcgagggatgaaaggaagtgaagtcaccgctatgttagagaaaggagagcggatggggtgccctgcagggtgtccaagagagatgtacgatctcatgaatctgtgctggacatacgatgtggaaaacaggcccggattcgcagcagtggaactgcggctgcgcaattactactatgacgtggtgaactaaccgctcccgcacctgtcggtggctgcctttgatcacaggagcaatcacaggtgtatccagaggaattgattgtcagccacctccctctgccagtcgggagagccaggcttggatggaacatgcccacaacttgtcacccaaagcctgtcccaggactcaccctccacagcanaggcagtcccgggagtgtgtgattttcatacaggttatttttacgatctgtttcctccctttcatgtctttccacttctctgggtccagggtgcatttgttactcatcgggcccagggacattggg

SEQ ID NO: 254142 - DNA, 814 bp, Homo Sapiens
ggctatgggcagaagccatatcgagggatgaaaggaagtgaagtcaccgctatgttagagaaaggagagcggatggggtgccctgcagggtgtccaagagagatgtacgatctcatgaatctgtgctggacatacgatgtggaaaacaggcccggattcgcagcagtggaactgcggctgcgcaattactactatgacgtggtgaactaaccgctcccgcacctgtcggtggctgcctttgatcacaggagcaatcacaggaaaatgtatccagaggaattgattgtcagccacctccctctgccagtcgggagagccaggcttggatggaacatgcccacaacttgtcacccaaagcctgtcccaggactcaccctccacaaagcaaaggcagtcccgggagaaaagacggatggcaggatccaaggggctagctggatttgtttgttttcttgtctgtgtgattttcatacaggttatttttacgatctgtttccaaatccctttcatgtctttccacttctctgggtcccggggtgcatttgttactcatcgggcccagggacattgcagagtggcctagagcactctcaccccaagcggccttttccaaatgcccaaggatgccttagcatgtgactcctgaagggaaggcaaaggcagaggaatttggctgcttctacggccatgagactgatccctggccactgaaaagctttcctgacaataaaaatgttttgaggctttaaaaagaaaatcaagtttgaccagtgcagtttctaagcatgtagccagttaaggaaagaaagaaaga

SEQ ID NO: 254143 - DNA, 624 bp, Homo Sapiens
  misc_feature (575)..(575): n is a, c, g, or t
ctcgtgccgaattcggcacgagctggtactacacatgaagatgtcccgctctccactgctcaaggagagagtgcctgacctgagctgggcccatcagatccagtacttacctggaataggaaaaagatggggagagtgaccaaagattacaaaaatctctgaagcttatccacttgagagagagtccctgaagatactggcctctcattcctgctatgtatgtccaatgtgactgaactctgaataaaatatacaagttataacaatgtagcaattgacccagcaaacgaggacacaaacgtgttggagggatttgagtttgatgtcatgcatataatgtgatcccactgtatgactacacaaatgttggcaaaagtgagctcagaggaaatggtaggcaagtacttcccagttttgaccagaagatggagaaaaaaagaattctcaatgttaaaggtgtctacggagaaatagacaagcgatgcacgacagatacatgtgtcagtctggtccctgcagttatatttgtaataatacacattggagcaatttcatggcccatcggtagagaatgnttgaggaatgatccattcatatcaagaagcacatttcagatcgcctgtg

SEQ ID NO: 254144 - DNA, 711 bp, Homo Sapiens
  misc_feature (63)..(63): n is a, c, g, or t
  misc_feature (563)..(578): n is a, c, g, or t
agcaaacagaggagacacagagaattcaccaatgtgctccctacttaaaaaaatatttatganaaatgtttaaagaattcagaaagcacatgaacatctaactctgagattgagatattaacaccctcagggcctcaatcaaatattataatgctaaaataaataggtactttaccaattagagaaaaatatcacataatttaactgtttcaatttcacttcctatacactgtatgatctataggctcatcaattgttgacaaaatgtcagtttctttataggaagaaaattgaaactttgctcaagtttccattagattaaatgcaaactaggatagtttgttattctcattccagaggaaaaacgaagggatgtggagtttagcgacttgctggagagagaagaactatcaactgaaggctcagttctttcactactgccatatggaaagaggttacctaaagcactcactagaggaaaattttacttagttgggaagtacatacacatcacacaaagagaaaaggaaaacaaactggtggaattttctggtgatggtagnnnnnnnnnnnnnnnnaagcactgcggtgttactaggttatcatcctctccagaatcttaaaaccagagaagccagctgtgtgaatgaacttataaagcctctttaaggcaaagtagccactagaaaaaacaacttttcttggaatctt

SEQ ID NO: 254145 - DNA, 756 bp, Homo Sapiens; identical to SEQ ID NO: 6536

SEQ ID NO: 254146 - DNA, 635 bp, Homo Sapiens
aaagtagtagacagctactggggcttaaagcaaggcctaaagattaaatctcagctctcagttaccaagtatatcgatatatcccttcttacacgaatgttatctactaggttcatgctaaagtaactgcggttcttgtgttcttgaagttgtcttgcaacatattcatcagtagttgatccttaaagcatccaaaaaggggaaaaatggaattttcatctagggtgaaagtaatataaaaggtctacagagttacttaacttctagatcaaaagaaagtcagaattctcacgtgctctgccttcaggaccaagacagcactatgctagcctaggtgttcagataaatgctcaaggtatactgatgtcaccaggcagaattcagataatggtgaccagagatcctgtctgagcaacctggtgacattagataccagacatagaacagagttcacaccacgtcacagaacacatatgaactttgtccacacaacagctgcaattctcttaactcatcctaacttaaagaaatgtaccaattcttggctttattttttaaatgtgtgacaaaatattagaaaaactcggcttggagcatcagagagctaaagaagaaacaaaaaacctgcagcccgg

SEQ ID NO: 254147 - DNA, 361 bp, Homo Sapiens
caggccaggaatatgaacttcttagagtaggggaaaaaggcaaagaaaaagagcaaaagcaggaaatgctattagatacattagcctagattctgtagcttcctctaaatctcttgctatatgagatttagtacgtaacaatttcccgtaaatcaaagacctcggaaaaatataagtcggaaccaataaaacctaaatcgtctttgcgttctcatttcacagcgaggtaaaatgtagatgcgatgcggatactgcgtcccctggcactgcctcaattcaaaagttagcactttgcgctaaggtggctctgagcactcccctccgaccccgcttcccccctagaggagcatgaatgcaccac

SEQ ID NO: 254148 - DNA, 740 bp, Homo Sapiens
ctggcggccggggagctgcgtagctcccggccccgcggccatgcccaagcggagctgccccttcgcggacgtggccccgctacagctcaaggtccgcgtgagccagagggagttgagccgcggcgtgtgcgccgagcgctactcgcaggaggtcttcgagaagaccaagcgactcctgttcctcggggcccaggcctacctggaccacgtgtgggatgaaggctgtgccgtcgttcacctgccagagtccccaaagcctggccctacaggggccccgagggctgcacgtgggcagatgctgattggaccagacggccgcctgatcaggagccttgggcaggcctccgaagctgacccatctggggtagcgtccattgcctgttcctcatgcgtgcgagccgtggatgggaaggcggtctgcggtcagtgtgagcgagccctgtgcgggcagtgtgtgcgcacctgctggggctgcggctccgtggcctgtaccctgtgtggcctcgtggactgcagtgacatgtacgagaaagtgctgtgcaccagctgtgccatgttcgagacctgaggctggctcaagccggctgccttcaccgggagccacgccgtgcatggcagccttccctggacgagcgctcggtgttcacactgaactgtggggtcgacgggaggggtgccttttacatgttctattttgtatcctaatgacagaatgaataaacctctttatatttgcaaaa

SEQ ID NO: 254149 - DNA, 837 bp, Homo Sapiens
gggggtcgttggtaaggggctggcggccggggagctgcgtagctcccggccccgcggccatgcccaagcggagctgccccttcgcggacgtggccccgctacagctcaaggtccgcgtgagccagagggagttgagccgcggcgtgtgcgccgagcgctactcgcaggaggtcttcgagaagaccaagcgactcctgttcctcggggcccaggcctacctggaccacgtgtgggatgaaggctgtgccgtcgttcacctgccagagtccccaaagcctggccctacaggggccccgagggctgcacgtgggcagatgctgattggaccagacggccgcctgatcaggagccttgggcaggcctccgaagctgacccatctggggtagcgtccattgcctgttcctcatgcgtgcgagccgtggatgggaaggcggtctgcggtcagtgtgagcgagccctgtgcgggcagtgtgtgcgcacctgctggggctgcggctccgtggcctgtaccctgtgtggcctcgtggactgcagtgacatgtacgagaaagtgctgtgcaccagctgtgccatgttcgagacctgaggctggctcaagccggctgccttcaccgggagccacgccggggcatggcagccctccctggaagaccgctcggggttcccactgaaactgggggggtccgaccggaaggggggcccttttaacaggttccattttgggacccccaagggccgaaatggaaataaccccccttttatatttggcccccggtggagaaatcaggaggagcatacataatttaaggtgaacagaatgcaagaggggacaaaga

SEQ ID NO: 254150 - DNA, 375 bp, Homo Sapiens
  misc_feature (35)..(35): n is a, c, g, or t
  misc_feature (136)..(136): n is a, c, g, or t
  misc_feature (139)..(139): n is a, c, g, or t
ccccacaatgaaacctgtctcccagaaaaaggtcnatgtcctgaggtgttctgggttcaggactttgacgtttgaatggtggggggtggtggacacaattcagcccctgacagcagcttttctctcccctccctgnacntgtcgcagctgcagtgacatgtacgagaaagtgctgtgcaccagctgtgccatgttcgagacctgaggctggctcaagccggctgccttcaccgggcagccacgccgtgcatggcagccttccctggacgagcgctcggtgttcacactgaactgtggggtcgacgggaggggtgccttttacatgttctattttgtatcctaatgacagaatgaataaacctctttatatttgca

SEQ ID NO: 254151 - DNA, 364 bp, Homo Sapiens
aatcagatatccctagataccaacctgaggcattgggacaaagggtcaggtttgaacaggttcttctgcctcctctggtctctgaggtgacattcctcatatgtctagttgcttctggtctttcacttgaagttggtagctagagaaactcatggtctgtgcttcagggccttgcggccatctctgacggacgggtctcaactctttggtactttagacatccaacaaaaaacttcagggaagattggatagctctcaactcaaccacgttctgagtactgttggagccaagagaacacttccgcttagccctctgaaggttaggtgaaaattactgacaagaggcagatgaagaggagaaaag

SEQ ID NO: 254152 - DNA, 710 bp, Homo Sapiens
cagacatccctgcacacatttgtataagtccctcaagttaaagacataatgggacttgccgggtgttgtcaggaggtcaacattccatttgtcataaatctcaggtgaggcttctacaatgcttgatgcagtctgctttacagctggtggacagtcactcaggaactaaccctgaatatctatcaaatactccggatgataacgttttctaataatagaaagccaaattccaacacaaagtcttctggtatcaaagctcttctgctcatttcagaaaacattcttgagaatgcgctcactcctgtcttctgtgattgttttgtgatgcctgagtggcattcatatctgactagtgaatttacatgaacacactctcaagtaatttagacctctgcttgaggtgagtccaaggggtcatcacgaagggcacaaacccacctggaaatgaacagaaaccctctctctcacttttatggatgaatgaccaccactctcatagactttcatcttcatgtatattttaaatgcgacttacttgcaatggtgaactccctcacacttcagcttccccatctcagtagctggccattccctcctaagcttagatcaggagcttggaagtctctttatacacctcccattttctgtcctgcaaaatcaatcttgaacacatttcttggatctgtttgcttccctctgcttccccggac

SEQ ID NO: 254153 - DNA, 379 bp, Homo Sapiens
ctgtggtggacttctcaggcagaggctcagaaggaaatgctgtgaggatgtttagcttgttgggaggtcaacttagtaggtcatgtccacagcgtattggtcttgctcttgttctaaggaaatgatgttagaatgtttagctcgctgggaggtcaacttagtaggtcacgtccacagcatgttggtcttgctcttgctgtaagagtaaaactctctttcctactgtgttttataggagaccataacagccaaggtctagtcagcctcaaacctctggtttgggggaagaagtcccctcctttataatgggggtctctccacagaggccaagtgaggttggtgcacggaggaggtgcagctttacttcattcggccctct

SEQ ID NO: 254154 - DNA, 414 bp, Homo Sapiens
ggcgtaagtacccagggaggtggtaagcaggatggaggaaaaatcagaggactggggcacctggctgccccatctctggccaaccacctccttgcctaacctagctcttgcctctcagacttaatgggaaatgagagggagggtcgggctaagccaggtatgtatgtagggataggtgatgtgaaagacccttggctccagggtggtggagactgtgcctatccctctgtggccataaccccctggggccgagtggctggtacctgcagctctagtgcccagctagcggcgcccaccccggtcccgcacaggtgtgctccgactccggcttctgctgtggcgcttggtgtccctgcgatccctttccctgcctcgttctcggtccctttccctatcccgatctcggtcccccct

SEQ ID NO: 254155 - DNA, 644 bp, Homo Sapiens
ggcctgggtggcgaattcggcacgagggggaaagggaccgagaacgaggcagggaaagggatcgcagggacaccaagcgccacagcagaagccggagtcggagcacacctgtgcgggaccggggtgggcgccgctagctgggaaaacactagagctgcaggtaccagccactcggccccagggggttatggccacagagggataggcacagtctccaccaccctggagccaagggtctttcacatcacctatccctacatacataccaaatggaaaagtggccatccttttccccccaaacacacccccttaacctatctcttgggacttagcccgaccctccctctcatttcccattaagtctgagaggcaagagctaggttaggcaaggaggtggttggccagagatggggaacagccaggtgccccagtcctctgatttttcctccatcctgcttaccacctccctgggtacttacagccttctcttgggaacagccggggccaggactgggtcacctatgagctgaatcagcatctcctcctgagtcccagggcccctgcagttcccagtctcttctgtcctgcagcccttgcctctttcccacaggttccactttatatccacccttttccttgtggtc

SEQ ID NO: 254156 - DNA, 443 bp, Homo Sapiens
cctgaatacaggaacatcggagacctattcactcccacacactctgctatagtttgcgtgcttttgtggacacccctcatgaacaggctggcgctctaggacgctctgtgttcactgatgatgaagaaacctagaactccaagcctgtttgtaaacacactaaacacagtggcctagatagaaactgtatcgtagtttaaaatctgcctcgcgggatgttactaaactcgctaatagtttaaaggttacttacaatagagcaagttggacaattttgtggtgttggggaaatgttagggcaaggcctagaggttcattttgaatcttggtttgtgactttagggtagttagaaactttctacttaatgtacctttaaaatagtccattttctatgttttgtataatctgaaactgtacatggaaaataaagtttaaaaccaga

SEQ ID NO: 254157 - DNA, 352 bp, Homo Sapiens
ctcgttcttgtccactacccctaagcctctgctgtgcccttaatcccattccaatggctccttcgactgagggatactagcctttacacagttactgtgaaaaaggggatggccagaagaaatgcatctttaagtggcagctgccaccaacacacagaagcattcattcaagatggcttaaagaagatagtgactcaatgtatgactagaaaatagagtgactcagccaagtatgaaaggaattattttctaataactcctccaagatgactagttgctgattagtatatacttgatttaattatttcaaaactggttatttttgaaggggaaggaggtgagaagcaagagg

SEQ ID NO: 254158 - DNA, 435 bp, Homo Sapiens
cagggccgaggccttcagcgttggtagaggcctcctctggagtgctcgggtctccctcgggtccgctcagttcgtcttcacgggtgctcgctaccacagaggcgtccataagggtctcgtaggcctctgaggcctgaattctccgattgctgcggttctcctctgcggctctcgcattacgccggcgcagaatccgtcaccaaggcatgtcccctgctagaggctcaaagcttacaccagtcctacggaagtatgcttgtagcctcttcagcaagcaacagctttataccgtaagaagctgctgccgctgaagctacgcaatgtcaatagagtctcggtagcaataaacaagccgttctcagctacaaagggtagttcccacgacagctgacgtgcgcgagcagccgccgacagcacttgccgcagctgcaagcg

SEQ ID NO: 254159 - DNA, 345 bp, Homo Sapiens
ctttaacagcatcttggcccatggggacctacgcaacaacaagctcaaccagctctccgtcaacctgtggcacctggcacagaggcacggctgtgcagacaccaggaccatggtgacggagctggccctcagactccctctgcaaacaaggacctgacccccgggcccatccccaggctcagggactctggtgccaaatccagaaagatctgctctgctgccctgaactcttacggcaatttagggttctcatttttcttttctttttacatatgtacaaattggtttaagctttggcctctatccaggttattctgacaatgaagtgggagttgtcagagcttt

SEQ ID NO: 254160 - DNA, 921 bp, Homo Sapiens
ggcatctgaaaaccctggccaaggacgaggccctgaagcgccagagctcgatgggcctttccttctttaacagcatcttggcccatggggacctacgcaacaacaagctcaaccagctctccgtcaacctgtggcacctggcacagaggcacggctgtgcagacaccaggaccatggtgcgctagaatacatcaagaagcaaagcaaacaaccagacatgactcatctgacggagctggccctcagactccctctgcaaacaaggacctgacccccgggcccatccccaggctcagggactctggtgccaaatccagaaagatctgctctgctgccctgaactcttacggcaatttaggtttctcatttttcttttctttttacatatgtacaaattgttttaagctttggcctctatccaggttattctgacaatgaagaaatgggagttgtcagagcattaaaatgcaatcttcactaagaagcagtctctgtgttgtctttgcacaagtggccttcggtctactcagcccgatctgatgggcctttttagcaagagagaaacaagaatgcaagtaacatctttcttctctggaaggtgtttgttttttcatagtttagaaataaggactttaaaagtggactgcttttcaaagtgccactgttccagacccattccattccagactttgtaccttaaagttagagcacacccaaagtctggaactgtgttacctgaacccctatggaggatttataaaaggcagaaatagcactccattaactctttttcctatcaaaagcagctcttgattggacttagaatctgtgttggtggatcaaaggagaaagcgaggtcaaatttgagattctctgtggcttcagtatacagtaactgaataaatgtcctgaaggagcaaa

SEQ ID NO: 254161 - DNA, 588 bp, Homo Sapiens
gcgcgtggtgatgccttgactcctcctcatagatgacacagagggtgcggctgggcttgggttctccttccagcggagcagttcacacagccagccctgactatttgcagccactttggcaaacagggcttgagacaccttggcccttttcatctcctgttggatctcgtcataaatggcagctgtgatgttgatgttggcgccgtccaccttaatagggaggtctgttgtcggtgtcgaggttttggcctgaggggttcgggaggagctgggactgctgaaggccgaggagaccatgctcacattgggattcatgctccgctccctctcatcctggtagatgcgatctcgctccacttctggcagattgaggaaattctgcatggccctcaggactagaagagactgagaggctgtccgagggtcttcttccttacgcagaatctcagacaacaatccctgtgtgcggttgaatgccactcttgcaaagacagcttgggacacactggccctcttcagctcatctctgacttgctggtagatatctggagagacttccacggaagagttggttggctctggcttaac

SEQ ID NO: 254162 - DNA, 668 bp, Homo Sapiens
  misc_feature (62)..(62): n is a, c, g, or t
cgcggcgccacggtgcctctgtgccgggctcacatcaccgagggttccagatgggtgcaagnagatgtgggtgggaaggagttagggtatcggggattgaggtgccaaagggcccggacatgccctgccatctgtctgtccctctcttgctctcctgccaccgggaagtaggagggtgagcagaaggctccagctgtatgctcgatgccaccttgagggtgcgtggctgtagggtgcatgtaagagacgatggatgggtgggtggtagggcagaaaaatcctgccctcccccgaagggagaagaggttcaaaaatgttgtgaatgaaaaagtcgaacactacccgctctcacattaacccgaccaagtcttccggagtttccctggcacccgcgcaggccctaacactagctgtctctgcttctgtatgtctcttcaaggagtcattactcccagttgggcacaagccgccttcttggcacttgaatgacaagggagtctgaggaagagggcgaggaaggggaggaggcagcgggcggggagtggagggagagaaggtagaagggtatttacatcttgcatgaacttgcggcagactggacggatctctttgctcaaggtagcactgaacatcatgactcgtgccaattcctgcagcccgggggatcc

SEQ ID NO: 254163 - DNA, 757 bp, Homo Sapiens
  misc_feature (66)..(66): n is a, c, g, or t
  misc_feature (82)..(82): n is a, c, g, or t
  misc_feature (107)..(107): n is a, c, g, or t
  misc_feature (109)..(109): n is a, c, g, or t
cctgaagtctcttcttcattagctcagcttcgctgagtttggtatgagcctcttgaagctccttancagagatgtcacctgnaggttcagtgcttccacttcgcttncnacagtctcgggccctttctcttcatcattctccttctcaaaatctgaaactctttctttggcctccttgagtgcaacttcaagtctctccaccttctgattcccttcccttaggcacagcaggagctggctcacagttaactcctcatgttcgaagtaattcttggccccatctgcagatctgctcgtgccagtggagactgttctcgtgggcccaggactatgcttgatttcttttactgacccttctgcttctccttcagccatcctaatttcaacaaaggaatcttctgaggagccgctggagttcagcttgagctgcagttcagacacgatgcccaacaggtctgccttctctgcttgtagcctcaccacctgggtcctgagctggtccttttcctgctccgcttcggccctgggaagcctggagtcatcagtggggtcctcagatgacctttctgatttcccttttagttttccaagctcttccttcaatttctcattctcatgactcaaggccattagacgctcttttgcttctttgctctgtatctcaaaaaactggcgttcttccttctgtttctctgtccaggccgaaagctcctcaaatctccctttcatggcttgattatttagcttcatggcttct

SEQ ID NO: 254164 - DNA, 1255 bp, Homo Sapiens
gttgaaattaggatggctgaaggagaagcagaagggtcagtaaaagaaatcaagcatagtcctgggcccacgagaacagtctccactggcacggcattgtctaaatataggagcagatctgcagatggggccaagaattacttcgaacatgaggagttaactgtgagccagctcctgctgtgcctaagggaagggaatcagaaggtggagagacttgaagttgcactcaaggaggccaaagaaagagtttcagattttgaaaagaaaacaagtaatcgttctgagattgaaacccagacagaggggagcacagagaaagagaatgatgaagagaaaggcccggagactgttggaagcgaagtggaagcactgaacctccaggtgacatctctgtttaaggagcttcaagaggctcatacaaaactcagcgaagctgagctaatgaagaagagacttcaagaaaagtgtcaggcccttgaaaggaaaaattctgcaattccatcagagttgaatgaaaagcaagagcttgtttatactaacaaaaagttagagctacaagtggaaagcatgctatcagaaatcaaaatggaacaggctaaaacagaggatgaaaagtccaaattaactgtgctacagatgacacacaacaagcttcttcaagaacataataatgcattgaaaacaattgaggaactaacaagaaaagagtcagaaaaagtggacagggcagtgctgaaggaactgagtgaaaaactggaactggcagagaaggctctggcttccaaacagctgcaaatggatgaaatgaagcaaaccattgccaagcaggaagaggacctggaaaccatgaccatcctcagggctcagatggaagtttactgttctgattttcatgctgaaagagcagcgagagagaaaattcatgaggaaaaggagcaactggcattgcagctggcagttctgctgaaagagaatgatgctttcgaagacggaggcaggcagtccttgatggagatgcagagtcgtcatggggcgagaacaagtgactctgaccagcaggctttaccttgttcaaagaggagctgaggacagggactggcggcaacagcggaatattccgattcattcctgccccaagtgtggagaggttctgcctgacatagacacgttacagattcacgtgatggattgcatcatttaagtgttgatgtatcacctccccaaaactgttggtaaatgtcagattttttcctcc

SEQ ID NO: 254165 - DNA, 993 bp, Homo Sapiens
  misc_feature (828)..(828): n is a, c, g, or t
aggtagcgaggcctgggtggcgaattcggcacgagggtgacttcctgctcaagccagagttgctccgggccattgtcgactgtggctttgagcatccgtcagaagtccagcatgagtgcatccctcaggccattctgggaatggatgtcctgtgccaggccaagtcgggcatgggaaagacagcagtgtttgtcttggccacactgcaacagctggagccagttactgggcaggtgtctgtgctggtgatgtgtcacactcgggagttggcttttcagatcagcaaggaatatgagcgcttctctaaatacatgcccaatgtcaaggttgctgttttttttggtggtctgtctatcaagaaggatgaagaggtgctgaagaagaactgcccgcatatcgtcgtggggactccaggccgtatcctagccctggctcgaaataagagcctcaacctcaaacacattaaacactttattttggatgaatgtgataagatgcttgaacagctcgacatgcgtcgggatgtccaggaaatttttcgcatgaccccccacgagaagcaggtcatgatgttcagtgctaccttgagcaaagagatccgtccagtctgccgcaagttcatgcaagatccaatggagatcttcgtggatgatgagacgaagttgacgctgcatgggttgcagcagtactacgtgaaactgaaggacaacgagaagaaccggagctctttgaccttctggatgtccttgagttcaaccaggtgggggatcttttgtgagtctgtgcaccggtgcattgccttggcccccctactagtggagaaaactntccagccattgccatccaccgggggatgccccaggaggagaggttttctccggatcaccggttaaagaatttccaacgacgaattcttgtggttaccaacctatttgggcccaggcattggacatccagcggggggaaaattggccttttataatgacctgcccg

SEQ ID NO: 254166 - DNA, 886 bp, Homo Sapiens
  misc_feature (573)..(573): n is a, c, g, or t
  misc_feature (775)..(775): n is a, c, g, or t
  misc_feature (781)..(781): n is a, c, g, or t
  misc_feature (796)..(796): n is a, c, g, or t
ggggaaggcgggaggctggagtagagggaagcctgcaaccggaagtgaaggcagatttccctccttcgtcgctgttgctgccgccatacgcgctctccctgtttagttatggcagagaacgatgtggacaatgagctcttggactatgaagatgatgaggtggagacagcagctgggggagatggggctgaggcccctgccaagaaggatgtcaagggctcctatgtctccatccacagctctggctttcgtgacttcctgctcaagccagagttgctccgggccattgtcgactgtggctttgagcatccgtcagaagtccagcatgagtgcatccctcaggccattctgggaatggatgtcctgtgccaggccaagtcgggcatgggaaagacagcagtgtttgtcttggccacactgcaacagctggagccagttactgggcaggtgtctgtgctggtgatgtgtcacactcgggagttggcttttcagatcagcaaggaaatatgagccgcttctctaaatacatgccccaatgtcaaggttgctgttttttttggtggtctgtctatncagaaggatgaagaggtgctgaagaagaactgcccgcatatcgtcgtggggactccaggccgtatcctagccctggctcgaaataagagccctcacctcaaacacattaaacactttattttggatgaatgtgataagatgctttgacagctcgacatgcgtcgggatgtccaagaaaatttttcgcatgaccccccacganaagcanggccatgaatgtcantgctaccttgagccaagagaacccgtcaagtctgccgcaagttcaggcaagaatccaatgggagaactttcggggatgatagagaacaaa

SEQ ID NO: 254167 - DNA, 1677 bp, Homo Sapiens
  misc_feature (1586)..(1586): n is a, c, g, or t
gggggagtagagggaagcctgcaaccggaagtgaaggcagatttccctccttcgtcgctgttgctgccgccatacgcgctctccctgtttagctcttctgttagaaatagtatctttgttttcctttgctgttcctcaatcccctactcttcaccccttgttttcacctattttgcgagaacccatccagatcccccttcccttcttcccctgccggcccagttatggcagagaacgatgtggacaatgagctcttggactatgaagatgatgaggtggagacagcagctgggggagatggggctgaggcccctgccaagaaggatgtcaagggctcctatgtctccatccacagctctggctttcgtgacttcctgctcaagccagagttgctccgggccattgtcgactgtggctttgagcatccgtcagaagtccagcatgagtgcatccctcaggccattctgggaatggatgtcctgtgccaggccaagtcgggcatgggaaagacagcagtgtttgtcttggccacactgcaacagctggagccagttactgggcaggtgtctgtgctggtgatgtgtcacactcgggagttggcttttcagatcagcaaggaatatgagcgcttctctaaatacatgcccaatgtcaaggttgctgttttttttggtggtctgtctatcaagaaggatgaagaggtgctgaagaagaactgcccgcatatcgtcgtggggactccaggccgtatcctagccctggctcgaaataagagcctcaacctcaaacacattaaacactttattttggatgaatgtgataagatgcttgaacagctcgacatgcgtcgggatgtccaggaaatttttcgcatgaccccccacgagaagcaggtcatgatgttcagtgctaccttgagcaaagagatccgtccagtctgccgcaagttcatgcaagatccaatggagatcttcgtggatgatgagacgaagttgacgctgcatgggttgcagcagtactacgtgaaactgaaggacaacgagaagaaccggaagctctttgaccttctggatgtccttgagttcaaccaggtggtgatctttgtgaagtctgtgcagcggtgcattgccttggcccagctactagtggagcagaacttcccagccattgccatccaccgtgggatgccccaggaggagaggctttctcggtatcagcagtttaaagattttcaacgacgaattcttgtggctaccaacctatttggccgaggcatggacatcgagcgggtgaacattgcttttaattatgacatgcctgaggattctgacacctacctgcatcgggtggccagagcaggccggtttggcaccaagggcttggctatcacatttgtgtccgatgagaatgatgccaagatcctcaatgatgtgcaggatcgctttgaggtcaatattagtgagctgcctgatgagatagacatctcctcctacattgaacagacacggtagaagactcgcccattttggaatgtgaccgtctgtccttcaggagaggacaccaggggtggggtaaaggagacactnactgcccccacccctgaacagcccccaccccatgggcttccatcttttgcatcaccaccactcctgaacccccatttctgatttgtcagaa

SEQ ID NO: 254168 - DNA, 750 bp, Homo Sapiens
  misc_feature (36)..(36): n is a, c, g, or t
  misc_feature (92)..(92): n is a, c, g, or t
  misc_feature (125)..(125): n is a, c, g, or t
  misc_feature (448)..(456): n is a, c, g, or t
  misc_feature (474)..(545): n is a, c, g, or t
  misc_feature (595)..(620): n is a, c, g, or t
gtggccacccaaccctattggcccgaggcatggacntcgagcgggtgaaacattgccttttaaattatgacatgccctgaggaatcctgaanaccctaccctgcaatcggggtggccaagagcanggccgggtttgggcaccaaagggcttgggctatcacatttgtgtccgatgagaatgatgccaaagatcctcaatgatgtgcagggatcgctttgaggtcaatattagtgagctgcctgatgagatagacatctcctcctacattgaacagacacggtagaagactcgcccattttggaatgtgaccgtctgtccttcaggagaggacaccagggtgggggtgaaggagacactactgcccccacccctgacagcccccaccccatggcttccatcttttgcatcaccaccactcctgaacccccatttctgatttgtcagaannnnnnnnnaacaaaactaaaaatgannnnnnnnnnnnnnnnnnnnnnnnnnnnnnnnnnnnnnnnnnnnnnnnnnnnnnnnnnnnnnnnnnnnnnnnattggaagcccgcctcggcccacaaaaaagctttcaaaaccattcttttnnnnnnnnnnnnnnnnnnnnnnnnnnaacctgggaatcacatattttttggaaaaccctgcccttggaaaagggctcgggaatttcccttttaaaaggggcccggcggggacccgaagggaactgggggaaaccccagggggaagtggggaccccc

SEQ ID NO: 254169 - DNA, 628 bp, Homo Sapiens
ggtaactaggagtcaaatatggcatgaagaactgaaaccccaaagaaattcaacaattgaagtgagaggtataaataagaaattgaagagtaaatacataacaacagggctgcaactgggacaaatatgggaagcaagggaaaagaacacctcacttggtttagggcttcccaaaagggtggcattgaagccaagacccaattacctccatgcctgggagccatgcccatgctgacgttgttgacagccatcctgtctcctcccttctgctttcaccaggacgtaacttgggttcccaaaaggccactggtcttctgacatctcctctgtgcacttccaattcccacccaccagtgagggcactcaggcccatgtttccctcagggctggctgcaccagggtttcccctcaaagtgttccttctgatagtgaccagacagaactcccaggattgaagcaccaggctggagttgcctgaatggccaggacagatgacagaaattgtgtttttaatatagatataacctaatatttggacttatactcaaggtattatgatgttatagactgggagactaggatgcactttccagaataatggggattaaaacaatccttttgtactcaa

SEQ ID NO: 254170 - DNA, 400 bp, Homo Sapiens
agagaaacaggccggagacgcagcaggccaaggctgcatagctcagagaagggtaaagatggaccagcagacccagtcctgcccactgaggaaagacaaagccagaggcagcaccaggacatggatctgaagtctcctggcccaacatggactctgctcggatgaaggaggcagccacagccagggtgctctaggggcacagaggggcttgaggaaggaaaactaccattgtcaactctcacccaagctaaaggctccaggccaccagtgccacacactcactattcttctgcagcccaggcccactgctctgtgtcttgcgaccggcagcctgctcagcgtcttcagccccagtgtgaggcgtgcagggcagggagtgatacacgttgggggagccaac

SEQ ID NO: 254171 - DNA, 420 bp, Homo Sapiens
  misc_feature (109)..(189): n is a, c, g, or t
  misc_feature (362)..(376): n is a, c, g, or t
caaccctgcaaatcaaaaattacttcaaaataaaaaggtacacaactaaattactaaatataaactactcaaggagactgcaaaggcatgggaaaacaaattccactgnnnnnnnnnnnnnnnnnnnnnnnnnnnnnnnnnnnnnnnnnnnnnnnnnnnnnnnnnnnnnnnnnnnnnnnnnnnnnnnnncaagtacaaatgacttactctcataagttcttttgcttaaactgattttctgaagccccaaaggcatataatctgctttaatgaattcatttaataaactattttaaattaggtgcaattgttgttttaaaaataaatgttaaacatttattcagcacaaagtggtctattcnnnnnnnnnnnnnnntaggctaggcgcggtggctcacgcctgtaatcccagcactttgg

SEQ ID NO: 254172 - DNA, 441 bp, Homo Sapiens
gcacgaggtggggctccatggggactgtcaccctggccctggaggtgcagccgctggcagcagcctcagcaggctggggtgggaggcaggagaaggcagagctgggaagccctccacccctgcctggctcctgcagtcgctgacttgctctgtcccatgtcccatcctcggctgtcagggctgctgactctgctcagccaacagctagctccctcgctcgcctgctctcttcccctctgttcccacgccagctcctgcccctggaaccagagatgacaggcccagggcagtgaatagcacattcaggaactctagggcacccggacccccccacccacttgcctcctgaggcctcagtggggaggggcaagcaggggtcttccccaaaggcacagatgaagccactagcttcagcctagcccggagaagggcgcctgcggg

SEQ ID NO: 254173 - DNA, 829 bp, Homo Sapiens
gaggagttctgccccgagtgctcggtggagttcaccctcgatgtgcggtgcaatgaagaccagacgcgacatgtcacgtctcgagacctcatctccaacagcccccgggtcattccggtgacatcccggaaccgagataatgaccccaatgactacgtggagcaggatgacatcctcatcgtcaagttgagaaagggccaggagctgagacttcgagcctatgccagggctttggcaaggagcatgccaagtggaaccctactgcaggggtggcttttgaatacgatccagacaatgccctgaggcacacagtgtaccccaagcccgaggaatggccaaagagtgagtactcggagctggatgaggatgagtcgcaggctccctatgaccccaacggcaagccagaaaggttttactacaatgtggagtcctgtggctctctgcgtcctgaaaccattgtcctgtcagccctctcaggattgaagaagaaactgagtgatttacaaactcaattaagccacgagatccagagtgatgtgctaaccataaattaactgcagcttgcctgcttcagcatcgtttctgagaatctagtctactgttgggtgagcttcttggcaggacatcagtaccaactagaagtgggtcatagatagattaccagggatgcagtggtgtttaggcaggataggtctttactggccctgactgctgtttataattggcagcagtgctccccagatcccagaaggtccctgctggagtgtttccagtgcacctgtagggaaccaactagacttctctcctggttagtccagctctttactct

SEQ ID NO: 254174 - DNA, 1496 bp, Homo Sapiens
gggaccgcggagcagacgcggaggctggtggcccctgggcgagatgccgtacgccaaccagcctaccgtgcggatcacggagctcactgacgagaatgtcaagttcatcatcgagaacaccgacctggcggtggccaattcgattcggagggtcttcatcgctgaggttcccataatagccattgactgggttcagattgatgccaattcctcagtccttcatgatgaattcattgctcacaggcttggattaattcccctcattagtgatgacattgtggacaagctgcagtactctcgggactgcacatgtgaggagttctgccccgagtgctcggtggagttcaccctcgatgtgcggtgcaatgaagaccagacgcgacatgtcacgtctcgagacctcatctccaacagcccccgggtcattccggtgacatcccggaaccgagataatgaccccaatgactacgtggagcaggatgacatcctcatcgtcaagttgagaaagggccaggagctgagacttcgagcctatgccaaaaagggctttggcaaggagcatgccaagtggaaccctactgcaggggtggcttttgaatacgatccagacaatgccctgaggcacacagtgtaccccaagccccgagggaatggccaaagagtgagtactcggagctggatgaggatgagtcgcaggctccctatgaccccaacggcaagccagaaaggttttactacaatgtggagtcctgtggctctctgcgtcctgaaaccattgtcctgtcagccctctcaggattgaagaagaaactgagtgatttacaaactcaattaagccacgagatccagagtgatgtgctaaccataaattaactgcagcttgcctgcttcagcaaaaacggagattcaggccagcagctggatatgggggtctctcttcagactcttctcgtttctgagaatctagtctactgttggttgagcttcttggcaggacatcagtaccaactagaagtgggtcatagatagattaccagggatgcagtggtgtttaggcaggataggtctttactggccctgactgctgttaataattggcagcagtgctccccagatcccagaaggtccctgctggagtgtttccagtgcacctgtagggaaccaactagacttctctcctggttagtccagctctttactctaaaccctttctgtccaaaatgagtcattttcagttgtaccttagatgtctggtgttgaggatcaagtgccatagcctttattcagggggcctataaacccttccagttcttgccccagggctggcctgctagcgcttcaaattcccaggtgtccctaatttgagaagtaaccttttggaatagcattagaccctggctgtcccctccccaccaaataaacatgatatttcattctctgtccagcagtcatgaaccccttcacctccaatgacctgatcatttagtttggtgggg

SEQ ID NO: 254175 - DNA, 1727 bp, Homo Sapiens
  misc_feature (1415)..(1453): n is a, c, g, or t
ggcatgagacctcctttggagaagaggtggaggtgcacaacctacttatcattgaccaacacacctttgaagtgcttcatgcccaccagtttctgcagaatgaatatgccctcagtctggtttcctgcaagctgggcaaagaccccaacacttacttcattgtgggcacagcaatggtgtatcctgaagaggcagagcccaagcagggtcgcattgtggtctttcagtattcggatggaaaactacagactgtggctgaaaaggaagtgaaaggggccgtgtactctatggtggaatttaacgggaagctgttagccagcatcaatagcacggtgcggctctatgagtggacaacagagaaggagctgcgcactgagtgcaaccactacaacaacatcatggccctctacctgaagaccaagggcgacttcatcctggtgggcgaccttatgcgctcagtgctgctgcttgcctacaagcccatggaaggaaactttgaagagattgctcgagactttaatcccaactggatgagtgctgtggaaatcttggatgatgacaattttctgggggctgaaaatgcctttaacttgtttgtgtgtcaaaaggatagcgctgccaccactgacgaggagcggcagcacctccaggaggttggtcttttccacctgggcgagtttgtcaatgtcttttgccacggctctctggtaatgcagaatctgggtgagacttccacccccacacaaggctcggtgctcttcggcacggtcaacggcatgatagggctggtgacctcactgtcagagagctggtacaacctcctgctggacatgcagaatcgactcaataaagtcatcaaaagtgtggggaagatcgagcactccttctggagatcctttcacaccgagcggaagacagaaccagccacaggtttcatcgacggtgacttgattgagagtttcctggatattagccgccccaagatgcaggaggtggtggcaaacctacagtatgacgatggcagcggtatgaagcgagaggccactgcagacgacctcatcaaggttgtggaggagctaactcggatccattagccaagggcagggggcccctttgctgaccctccccaaaggctttgcctgctgccctccccctcctctccaccatcgtcttcttggccatgggaggcctttccctaagccagctgcccccagagccacagttcccctatgtggaagtggggcgggcttcatagagacttgggaatgagctgaaggtgaaacattttctccctggatttttaccagtctcacatgattccagccatcaccttagaccaccaagccttgattggtgttgccagtttgtcctccttccggggaaggattttgcagttctttggctgaaaggaagcnnnnnnnnnnnnnnnnnnnnnnnnnnnnnnnnnnnnnnnatctcacactcatgcattgtcctcttttatttagatcggcagtgtagggagtgtgggtagtggggaagagggttaggagggttcatgtctgtgaagtgagacttctttaactttctttctatgctctgagagcatcaaggctagaggctgatggcaagcatgggtagctgggtgtaaacctgggaatggtgatgatcccagcaaagcttttggtctgaatggctcttggcaaaaaagcggccgtgaatggcgcggttacaatatatttaaaaaa

SEQ ID NO: 254176 - DNA, 1673 bp, Homo Sapiens
  misc_feature (12)..(12): n is a, c, g, or t
  misc_feature (23)..(23): n is a, c, g, or t
  misc_feature (58)..(58): n is a, c, g, or t
  misc_feature (77)..(77): n is a, c, g, or t
  misc_feature (110)..(110): n is a, c, g, or t
  misc_feature (264)..(264): n is a, c, g, or t
  misc_feature (284)..(311): n is a, c, g, or t
  misc_feature (738)..(746): n is a, c, g, or t
  misc_feature (751)..(808): n is a, c, g, or t
  misc_feature (980)..(988): n is a, c, g, or t
  misc_feature (992)..(992): n is a, c, g, or t
  misc_feature (1214)..(1253): n is a, c, g, or t
  misc_feature (1305)..(1305): n is a, c, g, or t
  misc_feature (1329)..(1329): n is a, c, g, or t
  misc_feature (1515)..(1515): n is a, c, g, or t
ccctcccaaagnctttcctgctncctcccctctctcaccatcgtcttcttggcatggnaggctttcctaagcagctnccccagagcacagttccctatgtggaagtgggncgggttatagagacttgggatgagctgaaggtaaacattttctccctggatttttaccagtctcacatgattccagccatcaccttaagaccaccaagccttgattggtgttgccagttgtcctccttccggggaaggatttttcagttctttngcttaaaggaagctgtcgtnnnnnnnnnnnnnnnnnnnnnnnnnnnnatggtgtatctcacactcatgcattgtcctctttttatttagattggcagtgtagggagttgtgggtagtggggaagagggttaggagggtttcattgtctgtgaagtgagaccttccttttacttttcttctattgcctctgagagccatttgcctagaggcctgactgccaagccatgggtagcctgggtgtaaaacctggagatggtggatgatccccacgccacagcccttttgtctctgcaaactgccttcttcggaaagaagaaggtgggaggatgtgaattgttagtttctgagttttaccaaataaagtagaatataagacgaacacaccctcaccctaccctatcgcctacacctttccccaccaatacccatcccccaaccaaaaccacaccacacatcctccccacctcccccaannnnnnnnncgtgnnnnnnnnnnnnnnnnnnnnnnnnnnnnnnnnnnnnnnnnnnnnnnnnnnnnnnnnnngggtcccaccccacacggtatatttgcccatcccgtcaaaaaccaacgcattccccttagaccaacctctccggtgttcttttcaccacaaaatgcgccctttgcgcgtttttcttcccgccacccccgacaaaacaaatggccgccctcctgttgcccccttctattacannnnnnnnnggtntctctttgaaaagaccccgagctcctccgtccagaaatgtgtgggtgttctctccgcccaccccacagtgcgccgacgcatatattttatgccgccgtgcggccgcacacacccctcctacacctctattacaccctcccccgcccgttctttttttccctcctccacttgtttgtgaccccacgaactctcatttgccacaaatattatcaggcgaaacannnnnnnnnnnnnnnnnnnnnnnnnnnnnnnnnnnnnnnngccaccttgggtcaccacacttatattcccctctcactccctatacaccctncacaccacaggtgtgtttctgccncctctcgctctccctcccccatgtcacaccactgtcctccccccgcgtcccccgagaacccccacggcaacaaaaatcgcaccgtctacatccacaagaaaataaagtgtgttgacatggccacaccacgccactattgtcatgaatgatctcttccacatcacgccgtggcatttattccaaaanccccgcctctgtggttacgcacgaattatgtgtctcgccgcataatataccaatcgcactgtttccgccgcgtgcagccaccaaacccacgctctctcgcgatcataacacccaacccacttcaccttatgcgcgcccccacccacccccacttcttt

SEQ ID NO: 254177 - DNA, 384 bp, Homo Sapiens
aaaccaggaaaaagcacaccagtgaaaaagggggtggcatatatatttctaatgtggcttgtgagagacaaggtttgaatatggcccaggaacttcagaggtactgtcatcacaatggctggcagaagcaaaaataccatagctctctgaagcgccaaggcttgcggagaacacctgtgactgcaggtggctctacttgaaaagaactgcacccctttcctcttcaatggggggcaccgtgttccacagtgggtcagaggtgaacagggtgctttcaagtttagttttataattttgaagaactggattgtgagcactgacaagttcccaatttagcccgttaaaaacataaaagtggtcggctttccctcctttaacataaac

SEQ ID NO: 254178 - DNA, 415 bp, Homo Sapiens
cccggtagtgctggctgccgccctgcgccgagctgtagtgcgacgtggccgcctgctgctgcatcatggagactgggggactgcatgttgatgttggtccgagacacgtagttgccgatggtgccttgcccctgcatggggacgccctgcgaggcgggtcccgcgtggctgtagccgggcccagagatgctcatggaggtggtgggcagcgtgttaggcgccgtctgctgcatggacacgtggctcggccctggcatggggagcagggagtggtgtcaggcactggggagccaggtcaccacttctgaaggtgaagacaccccaacccttcaagtgactttgggaagagttgctatcaacagcactattaatgattaagtgactaataaataagtggccgggagcagtggctcat

SEQ ID NO: 254179 - DNA, 2148 bp, Homo Sapiens
  misc_feature (2123)..(2124): n is a, c, g, or t
gggtggcgattcggacgaggcggggagccaggcctcggggcctcggagcaaccacccgagcagacggagtacacggagcagcggccccggccccgccaacgctgccgccgggatgctccagaccttgtatgattacttctggtgggaacgtctgtggctgcctgtgaacttgacctgggccgatctagaagaccgagatggacgtgtctacgccaaagcctcagatctctatatcacgctgcccctggccttgctcttcctcatcgttcgatacttctttgagctgtacgtggctacaccactggctgccctcttgaacataaaggagaaaactcggctgcgggcacctcccaacgccaccttggaacatttctacctgaccagtggcaagcagcccaagcaggtggaagtagagcttttgtcccggcagagcgggctctctggccgccaggtagagcgttggttccgtcgccgccgcaaccaggaccggcccagtctcctcaagaagttccgagaagccagctggagattcacattttacctgattgccttcattgccggcatggccgtcattgtggataaaccctggttctatgacatgaagaaagtttgggagggatatcccatacagagcactatcccttcccagtattggtactacatgattgaactttccttctactggtccctgctcttcagcattgcctctgatgtcaagcgaaaggatttcaaggaacagatcatccaccatgtggccaccatcattctcatcagcttttcctggtttgccaattacatccgagctgggactctaatcatggctctgcatgactcttccgattacctgctggagtcagccaagatgtttaactacgcgggatggaagaacacctgcaacaacatcttcatcgtcttcgccattgtttttatcatcacccgactggtcatcctgcccttctggatcctgcattgcaccctggtgtacccactggagctctatcctgccttctttggctattacttcttcaattccatgatgggagttctacagctgctgcatatcttctgggcctacctcattttgcgcatggcccacaagttcataactggaaagctggtagaagatgaacgcagtgaccgggaagaaacagagagctcagagggggaggaggctgcagctgggggaggagcaaagagccggcccctagccaatggccaccccatcctcaataacaaccatcgtaagaatgactgaaccattattccagctgcctcccagattaatgcataaagccaaggaactaccccgctccctgcgctatagggtcactttaagctctggggaaaaaggagaaagtgagaggagagttctctgcatcctccctccttgcttgtcacccagttgcctttaaaccaaattctaaccagcctatccccaggtagggggacgttggttatattctgttagagggggacggtcgtattttcctccctacccgccaagtcatcctttctactgcttttgaggccctccctcagctctctgtgggtaggggttacaattcacattccttattctgagaatttggccccagctgtttgcctttgactccctgacctccagagccagggttgtgccttattgtcccatctgtgggcctcattctgccaaagctggaccaaggctaacctttctaagctccctaacttgggccagaaaccaaagctgagcttttaactttctccctctatgacacaaatgaattgagggtaggaggagggtgcacataacccttaccctacctctgccaaaaagtgggggctgtactggggactgctcggatgatctttcttagtgctacttctttcagctgtccctgtagcgacaggtctaagatctgactgcctcctcctttctctggcctcttcccccttccctcttctcttcagctaggctagctggtttggagtagaatggcaactaattctaatttttatttattaaatatttggggttttggttttaaagccagaattacggctagcacctagcatttcagcagagggaccattttagaccaaaatgtactgttaatgggttttttttaaaaattaaaagattnnataaaaaatattaaataaaacatg

SEQ ID NO: 254180 - DNA, 268 bp, Homo Sapiens
gggaaatcaagataatcatgaaagccctgaaggatatagaagaagttgaaaaatatttcctttttattaaaagacataactaatcataatcatttgaaatatcctttatgatatatgatcacacccgaagaaccccaccatctagtcaacaaataatgcagtttcactagaacgtgaatttgaacattttttcataattgtcaggcagttttataaaaataaagcagtttccttaggaaaaaacaatctgccaattagaatacatatc

SEQ ID NO: 254181 - DNA, 726 bp, Homo Sapiens
agtacagctgtgttcatcagatatgggtatatgtggacaaccataaggacaccaatgtgtatagatggaaggataacttcctgggttttttccacattgaatgtggctaggtacatatctcaatttaaaataaattgtggaaagccaaaaaagtatggtcaagctaacctggggtggcttttacctgatgcctacaagcacagaaaaatagtttttaattaaatatccacagtcaaaatgataccttatgtattttattccaacaacatttggtttataaaggaatacaaacaggcacaaaacatggttcagaagatttattaagtaaacttgctaaaatatggacagatacacttagcagtcaaacagttgaatattcattgctacctcattaaagtttttgtatctgtattaccaggtccaaacataaaaaccacctctgttcaatatgttcagagagctgtatgttctttgttcttgtatgtacattttaaaaaaacacctctttccagtcttgctaaccaagaatattagtcatataaaagaacttagaatttttttccccaagtacaagctatcttttggctccaaaacagttctgaaggttttatttatattttatcttatcccgagggaccaacagcagggcatacctttggccaggccttcttggcagaaagacacagagccgtaaagggaaaaaataaaattgccataaaggtatag

SEQ ID NO: 254182 - DNA, 1021 bp, Homo Sapiens
cggaaaactgatacagtcaggttaacatctgtggtcacaccaagaccctttggctctcagacaaggggaatctcatcactccccagatcttacacgatggatgatgcttggaagtataatggagatgttgaatacattaagagaactccaaacaatgtggtcagcacccctgcaccaagcccggacgcaagccaactggcttcaagcttatctagccagaaagaggtagcagcaacagaagaagatgtgacaaggctgccctctcctacatcccccttctcatctctttcccaagaccaggctgccacttctaaagccacattgtcttccacatctggtcttgatttaatgtctgaatctggagaaggggaaatctccccacaaagagaagtctcaagatcccaggatcagttcagtgatatgagaatcagcataaaccagacgcctgggaagagtcttgactttgggtttacaataaaatgggatattcctgggatcttcgtagcatcagttgaagcaggtagcccagcagaattttctcagctacaagtagatgatgaaattattgctattaacaacaccaagttttcatataacgattcaaaagagtgggaggaagccatggctaaggctcaagaaactggacacctagtgatggatgtgaggcgctatggaaaggctggttcacctgaaacaaagtggattgatgcaacttctggaatttacaactcagaaaaatcttcaaatctatctgtaacaactgatttctccgaaagccttcagagttctaatattgaatccaaagaaatcaatggaattcatgatgaaagcaatgcttttgaatcaaaagcatctgaatccatttctttgaaaaacttaaaaaggcgatcacaattttttgaacaaggaagctctgattcggtggttcctgatcttccagttccaaccatcagtgccccgagtcgctgggtgtgggatcaagaggaggagcggaagcggcaggagaggtggcagaaggagc

SEQ ID NO: 254183 - DNA, 1070 bp, Homo Sapiens
gagcgactggcaggggtgtagtcacgcagggaagagctgtgcagcacactcatagatgcagacttacccacggatgtgccaggcctgcggctgctgctgccgccttctggaatatctaaagtgctttcacttggctcatcagggtctggaggattactgagtagactgtgaacatctcctcgacgacgttgtctgtgcctcctccgatactgaaattcagcatattcctctggtgatgcaaatcctaaatattccccaatccccatgttcccacccagcaaaactgcgccttggagcttctggtgagtctgcaggagctactccccgagccacagatgccaggaattcttgcctcttctgctgtacaaggcatgctgctttgatgatcttgtggcggggtgtgcgaaggtaaggcctattgactttctgggcaaggtcttcagtgaccatttctaggtctgtttgcattagttcaaaaatttctttctttgtgcttttaggttccaagaaaaatccatatggataagaacacttgagaatgcgccgagtttttaagagcacatgaactgcatcttcaatgaaagtggtatctggacagcctccttcagtttctttgagagctctgctcaattgctccatcttttctttggctgttttaagaaggcgttgttctagctgataactatgctcatggtttttaaatcttgtataatagtgcataaatctgtcaagttcctgaaatcgtttgtgttttttctcagcctccacagtcatttccttggattgctcctccacgtgttgaatgacttcatagcgagtacatctgtaataacctccagtggacgaactatgttttttccactcttcaaggcaaatccagcaaaagtcatacttgcacttagcacactgcatgtgattgcagccttcattcttctgtattggagacttacagttggcacaaggcttggagttagttaataaccagagacaattgtcggcatcctcgtaggcttcactaactcccacaagttcttatggtttcatttcggttatttttcacagccaattct

SEQ ID NO: 254184 - DNA, 357 bp, Homo Sapiens
tccaaacatggcggctccactagggggtatgttttctgggcagacacccggtccccctcaggccccgccgggccttccgggccaagcttcgcttcttcaggcagctccaggcgctcctagaccttccagcagtactttggtggacgaggtggagtcatctttcgaggcttgctttgcatctctggtgagtcaggactatgtcaatggcaccgatcaggaagaaattcgaaccggtaagcattccctctgtgtacacaatggtctgggcttcagcagaatttcctagatgctaattttatacttcatgtggttcagtcctgcttttatcctaagacaaacattttaggggacctaatt

SEQ ID NO: 254185 - DNA, 836 bp, Homo Sapiens
tttgttgtggttgttaaaaaggaatctgtgtcatcagattcacaagtctaacttcgcttaagactagaacaatacttacttggtttatccaagctacagacatgttataaagtactcaagaaattaacagcttataaaaatagtggaaaatttttcaatgggagcataaaactaaaatgaactcattatctggcaaagagttcttccaaaatgtcaagtccacaggaaggaatgtgtggccaacctcacgcatcagcccactcataggccaactgcctctgccctttcgctcacgttggcttcagaggtgcagggatgttggcagatgcctgctccaggtaggccaaggagccctgagggatgtcggcgggctttttgtgctgcacgttgatgtcctccagcacctgctgccaatgcctcagctttgtcaagtgcttctggactagtgcatctttccgctgtaattcattccttagttctgacacatcctctttgataacttgctctggtttctggacagataactgcaatcttttttgtaagaaaaaacattctgtctgtcttgcaatatccagaaacttctggatacactgatcaacaccggttcgaatttcttcctgatcggtgccattgacatagtcctgactcaccagagatgcaaagcaagcctcgaaagatgactccaactcgtccaccaaagtactgctggaaggtctaggagcgcctggagctgcctgaagaagcgaagcttggcccggaaagcccggcggggcctgagggggaccgggtggctgcccagaaaacataccccctagtggagccgccatcccgggaat

SEQ ID NO: 254186 - DNA, 624 bp, Homo Sapiens
aaagaataactttttttgcctctttagattacatagaagcattgtagtcttggtagaaccagtatttttgttgtttatttataaggtaattgtgtgtggggaaaagtgcagtatttacctgttgaattcagcatcttgagagcacaagggaaaaaataagaacctacgaatatttttgaggcagataatgatctagtttgactttctagttagtggtgttttgaagagggtattttattgttttttaaaaaaaggttcttaaacattatttgaaatagttaatataaatacataattgcatttgctctgtttattgtaatgtattctaaattaatgcagaaccatatggaaaatttcattaaaatctatccccaaatgtgctttctgtatccttccttctacctattattctgatttttaaaaatgcagttaatgtaccatttatttgcttgatgaagggagctctattttctttaccagaaatgttgctaagtaattcccaatagaaagctgcttattttcattaatgaaaaataaccatggtttgtatactagaagtcttcttcagaaactggtgagcctttctgttcaattgcatttgtaaataaactttcttgcgcattt

SEQ ID NO: 254187 - DNA, 387 bp, Homo Sapiens
taaattataaaataccataaattggcatttggcccctggtttaattggtaaatggtattccctaaaattaaatggcaggaacccatatgggaaaatttccacttaaaaatcctaatcccccaaaatgtgcttccctgtatccctcccttcctaccctattattctggatttttaaaaatgcaagttaatgtacccatttatttgcttgatgaagggagctctattttctttaccagaaatgttgctaagtaattcccaatagaaagctgcttattttcattaatgaaaaataaccatggtttgtatactagaagtcttcttcagaaactggtgagcctttctgttcaattgcatttgtaaataaacttgctgatgcatttaaaaaac

SEQ ID NO: 254188 - DNA, 316 bp, Homo Sapiens
cgcagctgacccttagctgattgttcccacttgcacctctccaccggcactagaactcctgagacaccagtaactccagattatttaaagagaaaagtccaagccagaaatcttctagcactttgtaaacccagtgaataacctcttggagtatggctttatataaaccaaggtttttaattgtaaagtataagtgccattagaaaatgcacagggcatatctttgttaaagtagatttttcaatgttttacagaattacattttcaaaaaaaggtttttataatgaagttgtttattaaaaacttctgaatgatg

SEQ ID NO: 254189 - DNA, 1135 bp, Homo Sapiens
aaagaccaatgagggaccaggaaaaaaagtgatgtcccctttccctgccacctccagcctctgccagcaatgagctgtccccctgccaccctacacagtagctggtcagggctgagtacagtcctgggggtaaggggatgacatgcccaggtgtcagctcaaaggatctctgcatcatcttgaggtgggaggcagggaaaggagcgccaatgaggttccctgcaacccccgccctccagcccaccgcccaaccttttacaaatggcattttcttaattgaaaatccgggaagcaggtgtgattacttttttgctcgtagatattgtcctaagttggaattctcccactgccctaaaactttccctagtagtcctttaaactcccccctccctttttggtagctgttttctccgtcctctctccacctgccctcttatctaggagctgtttgtaagcacgatttttttaacaggtcatattgtacaggatcaatattttgcttttttaacaaggatatttatggtaataagaaactttgccttaggcagggtgttggccagaaaagtccagattcctctgggatcccaccctggcctctcctggaactctgaacctgctgtggaaggaattggccatgaccttcacctctggagagtagggtctatggcgagggaaaagggtgttcaccatgataacctagtgcctccatagaggggtttggaaaaattccagtccgatttctttgtgtgtcagctgacttccttagctgattgttcccacttgcacctctccacctttggcactagaactcctgagacaccacttctcatgcttctccctccctaccagcggtcaaggctttggagccactcttttgtaactccagattatttaaagagaaaagtacaagacagaaatcttctagcactttgtaaacacagtgaataacctcttggagtatttttggctttatataaaacaaggtttttaattgtaaagtataagtgccattagaaaatgcacagggcatatctttgttaaagtagatttttcaatgttttacagaattacattttcaaaaaaaggtttttataatgaagttgtttattaaaaacttctgaatgatgtgttaaaa

SEQ ID NO: 254190 - DNA, 448 bp, Homo Sapiens
  misc_feature (48)..(48): n is a, c, g, or t
  misc_feature (74)..(74): n is a, c, g, or t
  misc_feature (85)..(85): n is a, c, g, or t
cccaaaagaggggttgggaaaaaatcccagcccggattcctttggggngtcagctgacctcccttagctgattngtccccacttngcacctctcccacccttgggcacctagaactccctgagacacccacttcctcatgcctcctcccctcccctacccagcggtcaaggccttgggagcccactcttttgtaacctcccagattatttaaagagaaaagtacaagacagaaatccttcctagcactttgtaaacacagtgaataacctcttggagtatttttggctttatataaaacaaggtttttaattgtaaagtataagtgccattagaaaatgcacagggcatatctttgttaaagtagatttttcaatgttttacagaattacattttcaaaaaaaggtttttataatgaagttgtttattaaaaacttctgaatgatgaa

SEQ ID NO: 254191 - DNA, 1317 bp, Homo Sapiens
ggcgccagctgggtaggtggtcaagcttgtgggcccttgagtttttacaactttcttcggcccttagaccccatcatcgccagttcatttcctttctgtccactttaagttctttctcctgaatcccttcattcttcaattatgtgcttgtagagtttgacagttgcctgttataaggcaggtgtgagctgctgactaggctggctggattcccatcctactttctccttcctcttctagttcctggccattttctatccaagatgtggtacaacctcttaccctgcaagttcagagacccctggtctctgtgtacggtgtcagatgcctcctgggtctcagaactgctgtggtcacttttcgtccctttcacggtgtatcaagtaaggtggcttcgtcctgttcatcgccaactaggggaagcgaatgaggagtttgcactccgtgtacaacagctggtggccaaggaattgggccagacagggacacggctcactccagctgacaaagcagagcacatgaagcgacaaagacaccccagattgcgcccccagtcagcccagtcttctttccctccctcccctggtccttctcctgatgtgcaactggcaactctggctcagagagtcaaggaagttttgccccatgtgccattgggtgtcatccagagagacctggccaagactggctgtgtagacttgactatcactaatctgcttgagggggccgtagctttcatgcctgaagacatcaccaagggaactcagtccctacccacagcctctgcctccaagtttcccagctctggcccggtgacccctcagccaacagccctaacatttgccaagtcttcctgggcccggcaggagagcctgcaggagcgcaagcaagcacctatatgaatacccaagaaggagattcacagagagacgagccccaggaggctgactgaactccaaaggaacaggatggcacccagagccgcaagaccggaaaatggggggcagcccctcccccaactccacaaaagggttggatggggggggcgggcaaaaaagggaaggtggagggtccccccaatggcaccatttagattcatggggttttccttccacaggaaaagaaaggacagcgcgacaaaaactgccttgtgcgggccgccctcgggccctccaaaaaagcttttcaacaaccattcccctttgggggcccggggcgcccccgtaagggtaaagtgcaacactggggcccaaagccgtgttctcccaaaggaagaaccggggccccataaaacaggaggcctggggaatctcccac

SEQ ID NO: 254192 - DNA, 1570 bp, Homo Sapiens
  misc_feature (1500)..(1517): n is a, c, g, or t
tcaggacttcgggtcccctcaccccggtgcggatgcccaaagactccgccttcccaagagcccctgcggccgggcgcgaaaatggcggcggcggcgacggccgggcgctcctgaagcagcagttatggagcttccctcagggccggggccggagcggctctttgactcgcaccggcttccgggtgactgcttcctactgctcgtgctgctgctctacgcgccagtcgggttctgcctcctcgtcctgcgcctctttctcgggatccacgtcttcctggtcagctgcgcgctgccagacagcgtccttcgcagattcgtagtgcggaccatgtgtgcggtgctagggctcgtggcccggcaggaggactccggactccgggatcacagtgtcagggtcctcatttccaaccatgtgacacctttcgaccacaacatagtcaatttgcttaccacctgtagcacccctctactcaatagtccccccagctttgtgtgctggtctcggggcttcatggagatgaatgggcggggggagttggtggagtcactcaagagattctgtgcttccacgaggcttccccccactcctctgctgctattccctgaggaagaggccaccaatggccgggaggggctcctgcgcttcagttcctggccattttctatccaagatgtggtacaacctcttaccctgcaagttcagagacccctggtctctgtgacggtgtcagatgcctcctgggtctcagaactgctgtggtcacttttcgtccctttcacggtgtatcaagtaaggtggcttcgtcctgttcatcgccaactaggggaagcgaatgaggagtttgcactccgtgtacaacagctggtggccaaggaattgggccagacagggacacggctcactccagctgacaaagcagagcacatgaagcgacaaagacaccccagattgcgcccccagtcagcccagtcttctttccctccctcccctggtccttctcctgatgtgcaactggcaactctggctcagagagtcaaggaagttttgccccatgtgccattgggtgtcatccagagagacctggccaagactggctgtgtagacttgactatcactaatctgcttgagggggccgtagctttcatgcctgaagacatcaccaagggaactcagtccctacccacagcctctgcctccaagtttcccagctctggcccggtgacccctcagccaacagccctaacatttgccaagtcttcctgggcccggcaggagagcctgcaggagcgcaagcaagcactatatgaatacgcaagaaggagattcacagagagacgagcccaggaggctgactgagctcaaaggaacaggatggcacccagagccgcaggacggagactgggggcagccctcacccaactcacaacaggctggatgggtgggtggtaaaaagggaaggatgaggctcccccaatgtcacattaaattcatggttttcnnnnnnnnnnnnnnnnnnctcgagactagttctctctctctctccctcgtgccgaattcgccacccaggcc

SEQ ID NO: 254193 - DNA, 1670 bp, Homo Sapiens
gggccagtaactataacggttcctaaggtagcgaggctgggtggcgcgagagcggcccatgggcaacatcatgatcgatcctgtcctcggtaccgtgggctttgggtctggcctccacgggtgggccttcaccctgaagcagtttgccgagatgtatgtggccaagttcgccgccaagggggagggccagttggggcctgccgagcgggccaagaaagtagaggacatgatgaagaagctgtggggtgacaggtactttgacccagccaacggcaagttcagcaagtcagccaccagccccgaagggaagaagctgcacgcaccttctgccagctgatcctggaccccatcttcaaggtgtttgatgcgatcatgaatttcaagaaagaggagacagcaaaactgatagagaaactggacatcaaactggacagcgaggacaaggacaaagaaggcaaacccctgctgaaggctgtgatgcgccgctggctgcctgccggagacgccttgttgcagatgatcaccatccacctgccctcccctgtgacggcccagaagtaccgctgcgagctcctgtacgaggggcccccggacgacgaggctgccatgggcattaaaagctgtgaccccaaaggccctcttatgatgtatatttccaaaatggtgccaacctccgacaaaggtcggttctacgcctttggacgagtcttctcggggctggtctccactggcctgaaggtcaggatcatggggcccaactatacccctgggaagaaggaggacctctacctgaagccaatccagagaacaatcttgatgatgggccgctacgtggagcccatcgaggatgtgccttgtgggaacattgtgggcctcgtgggcgtggaccagttcctggtgaagacgggcaccatcaccaccttcgagcacgcgcacaacatgcgggtgatgaagttcagcgtcagccctgttgtcagagtggccgtggaggccaagaacccggctgacctgcccaagctggtggaggggctgaagcggctggccaagtccgaccccatggtgcagtgcatcatcgaggagtcgggagagcacatcatcgcgggcgccggcgagctgcacctggagatctgcctgaaggacctggaggaggaccacgcctgcatccccatcaagaaatctgacccggtcgtctcgtaccgcgagacggtcagtgaagagtcgaacgtgctctgcctctccaagtcccccaacaagcacaaccggactgtacatgaaggcgcggcccttccccgaacggcctggccgaggacatcgataaaggcgaggttgtccgcccgtcaggagctcaagccagcgggcgcgctaccttggccgagaagtacgagtgggaccgtggctgaggccagcaagatctggtgctttgggcccgacggcaccggccccaacatcctcaccgacatcaccaagggtgtgcagtacctcaacgagatcaaggacagtgtggtggccggcttccagtgggccacaaggagggcgcactgtgtgaggagaacatgcggggtgtgcgcttcgacgtccacgacgtcaccctgcacgccgacgccatccaccgcggagggggccagatcatccccacagcacggcgctgcctctacgccagtgtgctgacc

SEQ ID NO: 254194 - DNA, 436 bp, Homo Sapiens
ggtctctctggaatgaacaccccaatggcaacatggggcaaaaacttccttgaactctctgaagcccagagtttgcccaatttgcaacatccaggaagaaaggaaccaggggagggagggaaagaagactgggctgactgggggcgcaaatctggggtgtctttgtcgcttcatgtgctctgctttgtcagctggagtgagccgtgtccctgtctggcccaattccttggccaccagctagggagaattggaagactggaagtgtcaagatctcaagctttcctccctctcctcctaagcagggaccccgcctccaccctgtctgtgcacccgaccacctgttgtacacggagtgcaaactcctcattcgcttcccctagttggcgatgaacaggacgaagccaccttacttgatacaccgtgaaagggacgaaaa

SEQ ID NO: 254195 - DNA, 621 bp, Homo Sapiens
  misc_feature (15)..(15): n is a, c, g, or t
  misc_feature (32)..(32): n is a, c, g, or t
  misc_feature (44)..(44): n is a, c, g, or t
  misc_feature (63)..(63): n is a, c, g, or t
acaaggacgaggagnataccaccttatgctgnaaagtccctgtntgcaagagaaaaacaaaancctggtctattctaggacccatgtgtggttcggggtctgttgggacatagtgctcagtccaaaaaaatggcctcccatcagtttaaaaaattccccctttgtcaggttgtcacttaggcaagagtgtgaccaaaacttaggatgttagcgccactctccgttactatcattttggatttccagtctcagcatgtcactcatcggtttcggtgtcctcgtggtcacacatttctttcagctcttgtcattccagttgaagagagaccatctgacgttctaaagatggcttcatgcaaacatttaaaacctttgagagaatacagtgcaccagggagactattcttatgactactgagagggttaacaccaagaatttggagtatgctccttagccagggtccccataaaccagaccacctaaactcaaatagaccattctttgacttaactcagtggtcttttcgttaattccctacaacagactctctataacacctgatgttttctccataggccttaagtgccagcatctgcacaggtactttcctgctcgtgccg

SEQ ID NO: 254196 - DNA, 409 bp, Homo Sapiens
cagaccagaccagaccagagggatcggaggctcaggccccctgagctgggcctctaagaaccacagccacagagtcaggctctgcagacccagaggtaaggctgcctggctgccccccccagacactcctctccttgcctgcaggctgccctctcccatggccaccctagacagagacaccacccgtgatactctgagggagccagactttcacatgcaacggggcatttggggctggttcgggtcagtgtctacgggtggtggatttagtgaccaccctcctcccacttctttctctgcacgaggagttgggagcctgcctggtggagttgagtgatgcccgtcatgtgcacttgggtctaccaatgtgcttaaggccagatgggcttcctaagagacgggtgggtgg

SEQ ID NO: 254197 - DNA, 367 bp, Homo Sapiens
  misc_feature (174)..(208): n is a, c, g, or t
accgcaaaacgctgaacagaaatcacaaaaaccttcattcttgtttataatacttgatcccttattaccaccatatacataacatttaagtattttcttcataaatattttagagcaaaaagaatgtattttgttgcaatggtggcccacatctgtacaaaacaacataagcannnnnnnnnnnnnnnnnnnnnnnnnnnnnnnnnnnaaaaatgattaagaaaaagtgcaaagaataacagtattaagattttttgcattttacagtaactatggttcaagtgtgaatatttatcagggatatataatcccaggttttaattaaagattcaaaaagaaaccacactcccaagttactgcacaaaca

SEQ ID NO: 254198 - DNA, 612 bp, Homo Sapiens
  misc_feature (80)..(80): n is a, c, g, or t
cagcagtggagtagacaagaataacagtgtggcccaatcccatatgggccctagtgtgggggttccatttcttaaacccnaccttctcgtacccagccatgaatcgcatagctaatcctaaagcttgcatttgcctttttaaagtttagttcccctagttcccacagatcaccttttacctgatttataatcgggggtggtcggccgaacacaatttcacagggtgaaagcccagtcaatttggtaagggtacacctgacttggagaaaggccatgggcaagacctgatcccacataagatgaggttcttgacaaaacttcagcagatgttttagtgtctggttcatccattgtacctttcctgagctctgtgggtggtagactatgtgcagtttccactttatctttagcagctgcgacagctgctgaactacttcagccatgaatgctgggccattatctgatcctaaagttagaggcagtccaaacctaggaataatgtcttttagcaacagtctggttacttcttgggctttctctatcctggtagggaatgcctcgacccaccctgagaaagtgcaaacaaacactagcatgtactgataaccccgt

SEQ ID NO: 254199 - DNA, 1187 bp, Homo Sapiens
  misc_feature (1131)..(1131): n is a, c, g, or t
  misc_feature (1139)..(1139): n is a, c, g, or t
gggagcccgcgcgctcgcagcttctcgctctcgcctgcctgcccgctcccttgcttgctcgcgctttcgctcgccctctcctcgaggatcgaggggactctgaccacagcctgtggctgggaagggagacagaggcggcggcggctcaggggaaacgaggctgcagtggtggtagtaggaagatgtcgggcgaggacgagcaacaggagcaaactatcgctgaggacctggtcgtgaccaagtataagatggggggcgacatcgccaacagggtacttcggtccttggtggaagcatctagctcaggtgtgtcggtactgagcctgtgtgagaaaggtgatgccatgattatggaagaaacagggaaaatcttcaagaaagaaaaggaaatgaagaaaggtattgcttttcccaccagcatttcggtaaataactgtgtatgtcacttctcccctttgaagagcgaccaggattatattctcaaggaaggtgacttggtaaaaattgaccttggggtccatgtggatggcttcatcgctaatgtagctcacacttttgtggttgatgtagctcaggggacccaagtaacagggaggaaagcagatgttattaaggcagctcacctttgtgctgaagctgccctacgcctggtcaaacctggaaatcagaacacacaagtgacagaagcctggaacaaagttgcccactcatttaactgcacgccaatagaaggtatgctgtcacaccagttgaagcagcatgtcatcgatggagaaaaaaccattatccagaatcccacagaccagcagaagaaggaccatgaaaaagctgaatttgaggtacatgaagtatatgctgtggatgttctcgtcagctcaggagagggcaaggccaaggatgcaggacagagaaccactatttacaaacgagacccctctaaacagtatggactgaaaatgaaaacttcacgtgccttcttcagtgaggtggaaaggcggttttgatgccatgcccgttactttaagagcatttgaaaatgagaagaaaggctcgatgggttgtggtggaatgccccaaacatggactggctgcaccatttatggtctcctatgaaaaggaaggtgaatttgntgcccagntttaatttacaggtctgctcatgccaatgggcccatgcgggataaccg

SEQ ID NO: 254200 - DNA, 2329 bp, Homo Sapiens
  misc_feature (1215)..(1216): n is a, c, g, or t
  misc_feature (1225)..(1238): n is a, c, g, or t
  misc_feature (1985)..(1986): n is a, c, g, or t
  misc_feature (2016)..(2016): n is a, c, g, or t
  misc_feature (2021)..(2021): n is a, c, g, or t
  misc_feature (2031)..(2031): n is a, c, g, or t
  misc_feature (2159)..(2159): n is a, c, g, or t
gctgggtggcgaattcggcacgaggcgaggacgaggggactctgacccagcctgtggctgggaagggagacagaggcggcggcggctcaggggaaacgaggctgcagtggtggtagtaggaagatgtcgggcgaggacgagcaacaggagcaaactatcgctgaggacctggtcgtgaccaagtataagatggggggcgacatcgccaacagggtacttcggtccttggtggaagcatctagctcaggtgtgtcggtactgagcctgtgtgagaaaggtgatgccatgattatggaagaaacagggaaaatcttcaagaaagaaaaggaaatgaagaaaggtattgcttttcccaccagcatttcggtaaataactgtgtatgtcacttctcccctttgaagagcgaccaggattatattctcaaggaaggtgacttggtaaaaattgaccttggggtccatgtggatggcttcatcgctaatgtagctcacacttttgtggttgatgtagctcaggggacccaagtaacagggaggaaagcagatgttattaaggcagctcacctttgtgctgaagctgccctacgcctggtcaaacctggaaatcagaacacacaagtgacagaagcctggaacaaagttgcccactcatttaactgcacgccaatagaaggtatgctgtcacaccagttgaagcagcatgtcatcgatggagaaaaaaccattatccagaatcccacagaccagcagaagaaggaccatgaaaaagctgaatttgaggtacatgaagtatatgctgtggatgttctcgtcagctcaggagagggcaaggccaaggatgcaggacagagaaccactatttacaaacgagacccctctaaacagtatggactgaaaatgaaaacttcacgtgccttcttcagtgaggtggaaaggcgttttgatgccatgccgtttactttaagagcatttgaagatgagaagaaggctcggatgggtgtggtggagtgcgccaaacatgaactgctgcaaccatttaatgttctctatgagaaggagggtgaatttgttgcccagtttaaatttacagttctgctcatgcccaatggccccatgcggataaccagtggtcccttcgagcctgacctctacaagtctgagatggaggtccaggatgcagagctaaaggccctcctccagagttctgcaagtcgnnagacccagnnnnnnnnnnnnnngaaggcctccaagactgcagagaatgccaccagtggggaaacattagaagaaaatgaagctggggactgaggtgggtcccatctccccagcttgctgctcctgcctcatccccttcccaccaaaccccagactctgtgaagtgcagttcttctccacctaggaccgccagcagagcggggggatctccctgcccccaccccagttccccaacccactcccttccaacaacaaccagctccaactgactctggtcttgggaggtgaggcttcccaaccacggaagactactttaaatgaaaaaaagaaattgaataataaaatcaggagtcaaaattcatcgtcttcaagcccctctttctagccttttctactactctctgcttggtcaaggtttgtgccccactacagaacagggctaaattagccaccaccactgaaaactcagccgaatttttttataccactctgatgtcagcattttttccatctgtttggggctttttcctcttttttccattctccccaaatattttatctggcttcaaaattaagaggattatttttcagattgtttttattcagtgtggccgattcctcatctgattcaggctgtccagtcaggcccctcccattttaggagctggagccctcatttatgaagagattctcatctatggaaatggatcctcatttgtaaatcttttttcttccattttcacaaagctgtaaagaaataatcccccccnnccctcccctttctctctggagtcagtgggntcttncctcgctccntcttacacagacctgagctggaagctcaactggttttgttccctgtttgaaatattgtgatctccctcccatgaaagaaaaaccaagaaccagaggcgtagactgactgaagacacaacccctggctntctgaagctatggacttggattggattgcatgggggtttgtagagaaaggtgacaaatttcagtacctctggcatgctgtcccaggaaactagggctcccactaacttatgaggtttttaaacacattgaaaatgacatgacattaaaataaatttggatttgctcataa

SEQ ID NO: 254201 - DNA, 781 bp, Homo Sapiens
  misc_feature (49)..(49): n is a, c, g, or t
  misc_feature (75)..(75): n is a, c, g, or t
  misc_feature (77)..(77): n is a, c, g, or t
  misc_feature (88)..(88): n is a, c, g, or t
  misc_feature (96)..(351): n is a, c, g, or t
ggaagcgtgtcggcgtatcgcactggaaggatatcgctcctatagcgantggtacggcaccctcgaggttctctntntagatgagtcntgtctgtnnnnnnnnnnnnnnnnnnnnnnnnnnnnnnnnnnnnnnnnnnnnnnnnnnnnnnnnnnnnnnnnnnnnnnnnnnnnnnnnnnnnnnnnnnnnnnnnnnnnnnnnnnnnnnnnnnnnnnnnnnnnnnnnnnnnnnnnnnnnnnnnnnnnnnnnnnnnnnnnnnnnnnnnnnnnnnnnnnnnnnnnnnnnnnnnnnnnnnnnnnnnnnnnnnnnnnnnnnnnnnnnnnnnnnnnnnnnnnnnnnnnnnnnnnnnnnnngcaatctacaactggatttgtgctttgcaatttacgctttcgaacatgcaggaatgtagtttgggcatttgtctggaacttcggattctcgggactccagggtggccaaggcgcggaggtgactcaatgacattgaccggcctggatgcacgtgggttgctgagccgatgctgggaaggtacggggtttgcccggtgcaggccgccggaactcacgcacgcccctgtctctctcactcctggggtcggctctggccggtggcctccagctcagctagcggccggacgcgcagcccgccgactagccctccaggtcctagcgcctcgtgccgaattactgcagcccgggggatccaactagtctagagcggccgccacccggggtgagcttcagcttttggtcccttttagtgggggttaatttccagccg

SEQ ID NO: 254202 - DNA, 732 bp, Homo Sapiens
gtggcggagggacagagacccctgtgggttgtgaggccgccccgggcggtggcagcaagaagagggactccctggtgactgctggctcatcgcacctcattatcaaggatcttggagaaattcattcaaggcttttggatcacagaccagttattcaaggtgaaactcgttattttgtaaaagaatttgaagaaaaacgtggtcttcgagaaatgcgagttcttgaaaatttgaagaacatgatccatgaaacaaatgaacatactcttcccaaatgtagagacacactgcgggacacactcagccaggttctccagagattgcaagcagctaatgactcagtctgtagactccaacagagggaacacgaacgaaaaaagattcatagtgaccactcagaagctagtgagaaacagcatatgctccagagggacaactccatgaaggagcaacccaacacaagggctgaagtggatgaacagcacacgccatggaaaggcttaaagaacactatgctgagatggagaaggacctatcgaaattttcaaccttttaagagcttgaaccaccacactcacaaactaatgagaagatgttcacctctcttctgagtggcactcttatatcataagagagagtttctactggcattctgattggatatttaaagaagggtgccacatctttccagctctaagtgcctatatatgattatttgaatgaagaggagta

SEQ ID NO: 254203 - DNA, 801 bp, Homo Sapiens
acgtttggaagcagttcccttaaggaaccaaacaaggcaggaaattctgggataaatctggtgttcacattacacaacaaaatgattgtacttcaagaaggaaagaaacagcaactcacgtggggcatggttttttagaactgatcaattttctgggttcttctcctggaggtgtgcaaagtccagagaagccagtgctggacaaggaaaaaaagccacaagattagacttggctcacagcccacaaaataaactacttagaactacctttacttctcctcttttgggaatttggaaaaaatctcagttcttccacaaacccaatggaagccagctactgcagaaggggttcaggcagacctttccttaatgtccatgttgaacaggaccctaggtgctgttactttcccatggcatctcctcttccacagtagaacagaggcatgcccagggagccccccatcatcctcctggacccaaacacctaagtcaggtactttgctccccaatcttaggaaggggcttcagagaccaaaatgtggccttctttcagacgtcatgaacatcagctagactcacagacattttgacagacatatcagggtcaacagatccaaaacagtctcatcccactcccctgaatctagttctttcttgcctgtttactcttccctataaaagaaaattcctttatgcctgacctttgctatgcttgcagatcttatggctggagtattctcccaattacaacacctcctcccttactgcagtgttcctgtgaataaagtcattccttaccta

SEQ ID NO: 254204 - DNA, 557 bp, Homo Sapiens
  misc_feature (419)..(419): n is a, c, g, or t
  misc_feature (468)..(468): n is a, c, g, or t
  misc_feature (501)..(501): n is a, c, g, or t
gggagacgtttggaagcagttcccttaaggaaccaaacaaggcaggaaattctgggataaatctggtgttcacattacacaacaaaatgattgtacttcaagaaggaaagaaacagcaactcacgtggggcatggttttttagaactgatcaattttctgggttcttctcctggaggtgtgcaaagtccagagaagccagtgctggacaaggaaaaaaagccacaagattagacttggctcacagcccacaaaataaactacttaggaactacctttacttctcctcttttggggaatttgggaaaaaatcttcagttcttccacaaacccaatgggaagccagctactgcaggaagggggtttcagggcagaccttttccttaattgttccatgtttgaaacagggaccctagggtgntgtttaattttccccttgggcttttccctttttcccacagttagggacngggggcttgccccgggggagcccccctttcttncttctcgggggccccaacatttaggttcaggtatttttgtttccccttttttgggg

SEQ ID NO: 254205 - DNA, 989 bp, Homo Sapiens
aaattcccttttcatattgtgtgcttcccaaagctatagtcatagatttcttccagaaactattgtcataattgtcactggagtgcttaaatatacgtactatactgacaaaatacatggaagtgagttataatgaggcagaaacaaaatcctcggtaacattgatgatactctaccgatcaccgtggttttggaaagtcagtcaacagttgtattattgcactcaatttcattgtgacattttatttaacttcttcatcttggtggtccttgcccagttattttgcctcattagacatcaagaaatggagaaagactgaaagttaatatcttaagtgcttgttcttcatgtttccttcttgttatttatgctattctctttgtggctccattcttctttcaatcttctcagcttataaccgtctttcccttatgctaaggatagcccttacactcatcccatctatgctgtcaagggctgctggttggtgctggtacaaggagcccactcagcagttttcttacctttgcctgccctgcctttcatggaataagaaaggcaacgttttgcagcttccaaatttctgaagaaactaatctcagattggcagttaaagtcaaaatgttgccaaatatttattccttttgcctaagtttggctacccggttcaattgctttttatttttaatgtcttgactcttcagagttcgtacctcaaaagaacaatgagaacatttgctttgctttctgctgaatccctaatctcaacaatctatacctggactgtccagttctcctcctgtgctatcttctcttctatccaagtagaatgtacgccaggagctccttccctctagcaatttctactaaaatgtccaagtagaatgtttccttttacaatcaaattactgtatttattaatttgctagaatccagtaaatcattttggtagctctggctgtgctatcaataaaaagatgaaagcccc

SEQ ID NO: 254206 - DNA, 826 bp, Homo Sapiens
gtttgagaagtggttctactgcaaggacctcggcacgcagttggcccccatcatccaggagttcttcagctctgagcagtacagaacagggcccatccctgaccagctgctcaaggagccaccattccctctgagcacacgatccatcatggagcccatgtccctggatgcctggctggacagccaccacagggagctgcaggcaggcacaccactcagcctgtttggggacacctatgagacccaggtgatcgcctatgggcaaggcagcagcgaaggcctgagacagaatgtggacgtgtggctgtggcagctggagggctcctcggtggtgacaatggggggacggcgcctgagcctggcccctgatgacagcctcctggtgctagctgggacctcgtatgcctgggagcgaacacaaggctctgtggccctgtctgtgacccaggaccctgcctgcaagaagcccctggggtgaccctcttgccatggcctgaagcagccacaggtgtgccaagcaccctcgagtgccatccctgccaaacaactctcccagcccccactacctctctgtgtactgccgctgtgtcccccacagacctgcacattgttgtcacccaccctcctgcccttctcagcccagatgccatgcccctgggcgggcagcagctccccatcttctctggcagactcagcccactgccttgccagtcttgccaggtggtctacccccggccccgctcctgcccattcctctgtccctgcagactcagtgcagcacttccacaccaagaaggccctcaataaaggcttcctgaggaacgtt

SEQ ID NO: 254207 - DNA, 598 bp, Homo Sapiens
  misc_feature (187)..(195): n is a, c, g, or t
cagacacatcatagagtgaaagctaattaaaaataatcttctaaaacacagtaggtagtactaatgattgctattgaatattcctccagagtgggttagaactacctacagctagcacaaaaggcagtcgtcagagctctagatctccttcacatacttcactatcagcaaggtaagcgaagggttnnnnnnnnntctgcttaactctcacagctgtacactaagtgattccagccacttcactgtcagacatctcactagtcagcatcatatagattagatgcagaaacagccagcagaacaagaatttccttctgacttctgctggtgtcactatttccagtatagcccaagtgctctgtgactatgagctatttcagtaggataaaacagaaataaatttgggggctacatctagcatttgggggtgaacccccaagttgggggaatttaaaaacatgtaagggcagcttagatgtacagacatatagaatatgatttttgtgattcaaaccacactgtggtattttacataatcaggatttgactttatgaagctttattttgataaaaaggaaacccctttttttctgcagcc

SEQ ID NO: 254208 - DNA, 189 bp, Homo Sapiens
  misc_feature (20)..(20): n is a, c, g, or t
  misc_feature (25)..(25): n is a, c, g, or t
acagcaacaaaaactcttcnccaanccaggaaagctggtctatgatttattacttggtctacccggtaaacacaactttgtactttatatatcacaagacttcattgtactatcgaaggtgtacttcacttcaaagcaacccaatggaggagatgatgtagagtttatgttgcatgacttatagattgg

SEQ ID NO: 254209 - DNA, 2220 bp, Homo Sapiens
  misc_feature (1637)..(1662): n is a, c, g, or t
  misc_feature (1843)..(1843): n is a, c, g, or t
  misc_feature (2071)..(2071): n is a, c, g, or t
tgggtggcgaattcggcacgaggaaggccttccgccacaaaccctacctggcggcgcaccggcgcatccacaccggcgagaagccctacgtctgccccgactgcggcaaagccttcagccagaagtccaacctggtgtcgcaccggcgcatccacacgggcgagcggccctacgcctgtcccgactgcgaccgcagcttcagccagaagtccaacctcatcacccaccgcaagagccacatccgggacggcgccttctgctgtgccatctgtggccagaccttcgacgacgaggagagactcctggcccaccagaagaagcacgatgtctgagacggtgggcggggccgtgttggctgagagagggctggggtccttcgtggtgggagtcgcagtgggctgggggtgcctgcctagtgctggagtaggggacaatgggaatcctagaggggatggaagacgcggggagtgagctgggtgggccctgctagcgagagaggtcaaccccggtggccagggaacccacttccaagcgcagggacgccggcctccagctggtgtgtgctaaggctccgtcctgactgccctgtgccctggaaaagcagcaatagcatccgccccttagagccctctggctagaggagccaccagtggaaaggaagaccctccatcctctggtattaacgccttaatgcccctgtcttttactgtaaggtacttaagatcatttttgggagcaggcgtgggagagtcctgtaaatgaatgctctgggctagatacagcttggagaaactgctggccctgttagacagcacttggggcctttgccagcagcaagaggtgaaacgaaagccactcttacctctcccttccccttcccacctgccccctgcgtaggcacccagacttggagagacccgtctgctgttaatacttccatcctcttccttcccaaagagcagaccccaaggcatttactccttggtctgtctcgctttatctgtcgcccctcccagcgctgagagcctcccctggctgtcagcagcactgtgtccaggctcttgtctgaacaccgcagcccctccttcgctccttccagagctcagcatgtcacagcaaggactgccgcattggtgatggagggccagctgaggggaagttgctggtgagtttccttttctccatttctagcatatggacacctgggcctctgcttgagcacttaggtgacaggaacttccgcacctcctgaggccctggatgattctaattgttagaaattctaattgttagaaatccttccttataatgaatgaattctgctttcctataatttctacctattgggccttgttctgttctctggaactaaacagaacaaccatttacccctccttttcaaactagagaataaagatttggttttagaaaaccgaaaccccatatgaaaacaacagaacaagaataaacgcccgcagatctaaacaaaaaaaacatagaggattgactcgtccggcgccctcactttttgacatcgcttttttgggccctctgccccccccaccaaacctcaacccgggttgaagtgcgggtgtccaagggacgatccactatcataaactcgggccctaggcctnnnnnnnnnnnnnnnnnnnnnnnnnngggaaaaatcctctggggcccccacaccccacatgccccgagggacagatcccgaagggcgatctccccgagagatcatcataaaccggggatttctagagacccagacgccctggtattgttaactgtaccggctgctgcaattatggcgcccccccagtcaaagcgaaccggatggggnaatatcattttagctgccccactggccgccaaactggatagcccctattattgggaacctcctctcatacccaacttccacatctgccgctaaccgtgaaacaccaccacccgtggttcgccccagttcgccacctcccgcccttttgcctccacgcgctgtacccacgccgtgtggcggaacaaacctcgccgacattgacacaaagtgcctccctcttgttgatcnctcccacgcgccggacaaactagcctcgcccccagtgaacatccaggccccgcagggcggatcatggaccatataccttctctgcatcaccggcctccctatagacacacactcccgctctgctgagtgatatacacgcccgccagggc

SEQ ID NO: 254210 - DNA, 737 bp, Homo Sapiens
ggcacgagccagcacaaacctaatcaatcagtgtatcagtgcatctggtggcaacagctcagcccattcaaagagcaaggattcaggaaaggcacactgatggtggggagcctcttaagagcctctaatgttctcccaaaaccagagttgagagtcggagtgccagtcgtcggggcccactattcctgaataagggacatgcaagggccagaagtagcttgactctcgcctaaatatctgtgcctttgcctgtcctttctcccactctactgaaacccggaacagattcccgcttgccttctgatgaagagaggttaggtaaagagagtttggaggaaaaaagacaccaggaggcaggctgcggggtaggagagggttctgagaggaggcagcaatccagaatacctccttttctagccagcatcccttgaacttttgaaaggttgtgcctaccactggctggcacaccagggcaatgatttccctgcagaaggaaggaaagaatgtttcacccttgcatccttcttggagaagctacagcctgtgctcagttgagtggttccacactcagactttggctttatggttttcccttcctcctggtctttgccctgaccttgatcaacaggggtgtgtctttactccacccttcaccctagttccaccaaggttcacacaccagatgtaactgtttttcagctgagttgtatggattcttcagtccactgttacacctg

SEQ ID NO: 254211 - DNA, 394 bp, Homo Sapiens
  misc_feature (11)..(11): n is a, c, g, or t
  misc_feature (37)..(37): n is a, c, g, or t
  misc_feature (214)..(214): n is a, c, g, or t
cccatttaagnggtaagccattttgtgccctttaacncccaccccttcaccccctagttcccacccaaggttccacacacccagatgtaactgtttttccagcctgagttgtatggattaaccttcagtcccactgtaaatacacccgggatggggtggggttggggttgtttagggagaagcagcccagacttgctttgtgaactgaatgtanttttatgcaattttgagtggcctttcaaccctaagatgaatggttttgttttactggttgttgttatatagttttgagtattctgtgtttgaaagtttgggaataataatattcacttctatatgatgcctgtaaacacaacagtatttataaatgagtaaataaaactgtgttttaaaa

SEQ ID NO: 254212 - DNA, 498 bp, Homo Sapiens
  misc_feature (36)..(36): n is a, c, g, or t
  misc_feature (62)..(62): n is a, c, g, or t
  misc_feature (73)..(73): n is a, c, g, or t
  misc_feature (84)..(84): n is a, c, g, or t
  misc_feature (90)..(90): n is a, c, g, or t
  misc_feature (141)..(141): n is a, c, g, or t
acaacaggctgtaaccttcctcccaaagaaggatgncaagggtgaaaaacaattctttcccntcccttcctgnaagggaaaatnaattgnccctggtgtgccaagcccaagtggtaaggcaacaacctttcaaaaagttcnaagggatgactggcctagaaaaggaggtattctggattgctgccctccctcctcagaaccctctccctaccccgcagcctgcccccctggtgtcttttttcctccaaactctctttacctaacctctcttcatcagaaggcaagcgggaatctgttccgggtttcagtagagtgggagaaaggacaggcaaaggcacagatatttaggcgagagtcaagctacttctagcccttgcatgtcccttattcaggaatagtgggccccgacgactggcactccgactctcaactctggttttgggagaacattagaggctcttaagaggctccccaccatcagtgtgcctttcctgaatc

SEQ ID NO: 254213 - DNA, 501 bp, Homo Sapiens
gtgctcagttgagtggttcacactcagactttggctttatggttttccttcctccttgtctttgccctgaccttgatcaacaggggtgaaaagaaccaccctgaggtttccatgcctctcccattttagtggtagcattttgtgtctttactccacccttcaccctagttccaccaaggttcacacaccagatgtaactgtttttcagctgagttgtatggattaacttcagtccactgtaaatacacctgggatggggtggggttggggttgtttagggagaagcagccagacttgctttgtgaactgaatgtatttttatgcaattttgagtggcctttcaaccctaagatgaatggttttgttttactggttgttgttatatagttttgagtattctgtgtttgaaagtttgggaataataatattcacttctatatgatgcctgtaaacacaacagtatttataaatgagtaaataaaactgtgttttaactttgaa

SEQ ID NO: 254214 - DNA, 555 bp, Homo Sapiens
attccaggaggagtgggatctcggccctgtccagagcgagttaatgtgtccatctgcccaaccctgtcctgagaaaggacctggttttggccaggacctgacaaatacccaatggcagcagtgtcaacagacgggagtccagccagggtgggtgcccttgtcattgaggttagggacagctatccccaggttatgcctggccccacccagcagggagttggggtccccccacaggctgtgagctctgtgggccctgggatgtgatctagctcagatgccctctcatccttgatgtcatagttgagtgcacccaagtggcacccactggcggccaggggcacagcctggtggtggtggcaatagaactgtgcccctcctcagctcctcgcttcccctcccacagccccagccttactccaccatgcggacaatcattttgtacggatcacgggagcaatgctgtacggttttgtacactggtggtttgtttcctagaaaacccattgtgtctctggatttctagcacattactaaaagagcctctgctttgtaaaa

SEQ ID NO: 254215 - DNA, 1007 bp, Homo Sapiens
aggtagcgaggcctgggtggcgaattcggcacgaggctcggcagcatggcgtccgtgacgctgagcgaggcggagaaggtgtacatcgtgcatggcgtccaggaagacctccgtgtggatggccgtggctgtgaggactaccgatgtgtcgaagtggaaactgatgtggtgtccaacactagtgggtccgccagggtcaagctgggtcacacagacatcttggtgggagtgaaagcagaaatggggacgccgaagctggagaaaccaaatgaaggctacttggagttctttgttgactgttcagccagtgctacccctgaatttgaaggtagaggaggtgatgaccttggcaccgagatcgctaacaccctctatcggatatttaacaataaaagcagtgtcgacttaaagaccctctgcattagtcctcgggagcactgctgggttctctatgtggatgtgctgcttctggaatgtggtggaaatttgtttgatgccatttccattgctgtaaaggctgctctcttcaatacaaggataccaagggttcgagttttggaggatgaagaggggtcgaaggacattgaattgtcagatgacccttatgactgcatacgactaagtggtggagaatgccccctgcattgtcactctgtgcaagattggctaatcggcatggtggcggatgctactcttcaggaggaggcctgctcgctggccagcttggctgggtgtcggtgaccagcacaaggaagttgtgacgtggcatgaggaaagtggggtaaaggcaccctggaacccagagagcattcttccagatgatggaaaactgccaaagcgcgtgggtctagggaactgattgcctcccttgccaaagggttccgcaccaaggaaaaaaaccctggggccccaaaagaccaaaaagttgggatttcccggggagaattttcgcaattcaactgggttcaaactgggggaccggcctttcacctttttccctcttaaaa

SEQ ID NO: 254216 - DNA, 810 bp, Homo Sapiens
gggagatgacgtgcggctcgtggggcagctcggcagcatggcgtccgtggcgctgagcgaggcggagaaggtgtacatcgtgcatggcgtccaggaagacctccgtgtggatggccgtggctgtgaggactaccgatgtgtcgaagtggaaactgatgtggtgtccaacactagtgggtccgccagggtcaagctgggtcacacagacatcttggtgggagtgaaagcagaaatggggacgccgaagctggagaaaccaaatgaaggctacttggagttctttgttgactgttcagccagtgctacccctgaatttgaaggtagaggaggtgatgaccttggcaccgagatcgctaacaccctctatcggatatttaacaataaaagcagtgtcgacttaaagaccctctgcattagtcctcgggagcactgctgggttctctatgtggatgtgctgcttctggaatgtggtggaaatttgtttgatgccatttccattgctgtaaaggctgctctcttcaatacaaggataccaagggttcgagttttggaggatgaagaggggtcgaaggacattgaattgtcagatgacccttatgactgcatacgactaagtgtggagaatgtcccctgcattgtcactctgtgcaagattggctatcggcatgtggtggatgctactcttcaagaggaggcctgctcgctggccaacttgctggtgtcggtgaccaaccaggggagttgtgacctgcatgaggaaaaatggggaagggcagcctggaacccaaaaacatcttccaaatgatggaa

SEQ ID NO: 254217 - DNA, 830 bp, Homo Sapiens
ggggcagctcggcagcatggcgtccgtggcgctgagcgaggcggagaaggtgtacatcgtgcatggcgtccagttcagccagtgctacccctgaatttgaaggtagaggaggtgatgaccttggcaccgagatcgctaacaccctctatcggatatttaacaataaaagcagtgtcgacttaaagaccctctgcattagtcctcgggagcactgctgggttctctatgtggatgtgctgcttctggaatgtggtggaaatttgtttgatgccatttccattgctgtaaaggctgctctcttcaatacaaggataccaagggttcgagttttggaggatgaagaggggtcgaaggacattgaattgtcagatgacccttatgactgcatacgactaagtgtggagaatgtcccctgcattgtcactctgtgcaagattggctatcggcatgtggtggatgctactcttcaggaggaggcctgctcgctggccagcttgctggtgtcggtgaccagcaagggagttgtgacgtgcatgaggaaagtggggaagggcagcctggacccagagagcatcttcgagatgatggagactggcaagcgtgtgggcaaggtactgcatgcctccttgcagagtgttctgcacaaggaagaaagcctggggcccaagagacagaaagttggattcctgggatgatttgcacatcaactgctcaactgtggattggtttttacttttccttttaaaccggttcgtatatatttttcttcgctgttacgaatttacagcagcatttgtacatgtaaaattaaaggctattttctggtctga

SEQ ID NO: 254218 - DNA, 899 bp, Homo Sapiens; identical to SEQ ID NO: 172636
  misc_feature (630)..(630): n is a, c, g, or t

SEQ ID NO: 254219 - DNA, 238 bp, Homo Sapiens
cgttcgttcattctcaagcctctgtttcatctgctgcaccttctgagctgtggtggcctttctgtcctctcgaatacgtttccgtagagcactatgaggaaataaaaacaagtgaaaggaagtgcacacagagcaggacttgagtactctaacacagaggacctaggcgcaaataaaaccatccacatagttttcaccctatttgaacactggaataatgaggggaaaagcctcaata

SEQ ID NO: 254220 - DNA, 668 bp, Homo Sapiens
  misc_feature (38)..(38): n is a, c, g, or t
  misc_feature (75)..(75): n is a, c, g, or t
  misc_feature (83)..(83): n is a, c, g, or t
  misc_feature (93)..(93): n is a, c, g, or t
aggcagatccggaaacttggctccaacctcgtgggccnaccggtctgtaggtgtgagggccttcctcgagctggntgctgtcnaaggtctccntgctgccaactgggggtttgaagttcacgtcagcctctccatgcaagcgcatccagctgcagggttcctgagggccttcctctgcaaccaggacagtctggcctggtgcccaacttctcgggaagagcctgcggaggaggtctccgagtcagagcacatggcctcaggggggggagagtgcagaggatggggaggcagctatggggccttggtcagagctctgggcctgtgtgggctgaggctgggggttcctgggcagggcccgggacctgggacacagcttgctcaaggcctcactccagtcaaagtcttcctcgctatcggagcccatctcatcgtaggcagatgccacactggaggccacctccagggcctgaaacgtcccgctcttaggggccagtagtcgggtggggggtggagcgccatccttcagggccacccagttcccgtcggggctctgcaaaactggggccaggtttgtttcatccagcctgtccacactcttccagctgggcagagcagactctgctctcgggtgttggccttggtcccttggctgcctcgatggagcctcc

SEQ ID NO: 254221 - DNA, 593 bp, Homo Sapiens
gggatgcctactgcttccgtgtgcaagatgtggcctgccgatgccgtggctttgtgggtgacgggatcagcacgtgcaatgggaagctgctggatgtgctggctgccactgccaacttctccaccttctatgggatgctattgggctatgcaaatgccacccagcggggtctcgacttcctggacttcctggatgatgagctcacgtataagacactcttcgtccctgtcaatgaaggctttgtggacaacatgacgctgagtggcccagacttggagctgcatgcctccaacgccaccctcctaagtgccaacgccagccaggggaagttgcttccggcccactcaggcctcagcctcatcatcagtgacgcaggccctgacaacagttcctgggcccctgtgcaggcagtgctggcgcctgaagccccacctgtggcggcaggcgtgggggctgtgcttgccgctggagcactgcttgggctttggtggccggagctctctacctccgtgcccgaggaaagcccatgggttttgggcttctcttgccttccaggcggaagaatgatgctgatgacgacttctcaccgtggg

SEQ ID NO: 254222 - DNA, 1189 bp, Homo Sapiens
  misc_feature (25)..(26): n is a, c, g, or t
  misc_feature (50)..(50): n is a, c, g, or t
  misc_feature (78)..(78): n is a, c, g, or t
  misc_feature (115)..(115): n is a, c, g, or t
  misc_feature (956)..(976): n is a, c, g, or t
caaggacagccctacactggtcaanntaatagtctggaagtccctatacntgtgaaagctctcagtccttcttgcccntgctaataaaggactttctctgtaaggcctcatgganccgtaagtagctgcttcatgggtggtatcatggtgctgaagctgaaggctagaatttgattctcgtaagtggctatgctgaactacggaagttgctggactgatgttaggagtagcacagcgagatgtgctcaaatcacattgatcgagtaatttgagtagctcttcttcggttggaccacctacatccttatcttcacgttaaccatatccatagcagtggtcagatcccacatttgaatactgccatttgtatggcctgtgaacaagtagcgccttggtcttgagcccatcctactggatccctcacattccctcactgtaaatgaggatattgtagtacagtcaacagcctggatctcacatattctgcaaaagaaaagcagaaagagccctgatgggaatgagcaattatttaaaaagaagctatgaaactaaaaagacagaaagaaagaaagcaaacatgttatactagaaaagacttttaaaaaatcatttaaaatttatgtgtaaatctttaaaatctgaaaccagaaaaaatatacagctctatggagatggcccatattgtatccatcattaggataatactcaacttcaaaaaaagatttttatgactttttagttgattttcataaaagataaaagaacctgagagagaacaatttttatccacattgacggatcaggaaacaatgggataacatcagcaaatgattgttccaaagtcacgtaagggctaactgaattgtacttgactgaattagttatcccagcctacttcaaaagagttgagggagtttattaaaaaagaaaaatcagtataggcaaacgcaaggtcnnnnnnnnnnnnnnnnnnnnntacaatccacatgaatttgagaagcatacaggaatagaatatgaagcttagatgagcttcctagtaggccggacaaaaaggagggaaaaagataattcctacatgcccacatgtagtgataaagactatcctagtctcattcttgagctcaaggtttgtgaatacaggaataaacaaaccaaagtatttttcctgactctcatgcaacaatca

SEQ ID NO: 254223 - DNA, 133 bp, Homo Sapiens
tccagatgatttaacagtcctctttagaatagggacacacttgtcacatattgctgtcccccctttaagggacctcagtctcccaaggaaacttatttgcctgttaaacctcgtgccgattcctgcagcccgg

SEQ ID NO: 254224 - DNA, 2184 bp, Homo Sapiens
aagcctgtgatggagtcgtacacactcctgctgagcccaccggagactcaagatgaaggctggacccttgcgctgtccctggctctaacctacagactggggcctggctccgtcttactggcccccaggtctccatggagactgcagaaacccccgcctgctggaggcctgccacactcacagttaccagctagacagtggggcttactaagacaagcacgacctaaaacagagtctcccctgggaacctactccccacccaagcatttgctaaagtctgatcacagggaggttattttgtctctctgtctcggtttctctgagccactgagacagatggctgtccgctttgaggctctgcagagctgtggcaccccatggtgtgtctgcagtgttctgggcacatgcatgggcacccatcgttgagagtgcagctgggaagaactctgaaccagaagtcatcagagctgaggcatggccttgaacatgtcactcagtctctggggcttctgtttcacaaatgcatgagggggccaccagcccagtggctttaaaccaggggcaggttgtccctccaggcagcattggaaatgtgtgtgtgttgagggggtcacagtgactgtgggggcacccctggcatctagtgggcatcccacaatgtgcagaacagtctctgacagcaaagaattggtccattcaatgccaattgtagtacctttgagacattctggctgagccaatgccttctccctgtcagagtcccccagagcagagagggtcaggcttccctggaccttggctcccagagcaagccaaaataaagactacactgttgccttgggggcttgtcgggccagggccaagacggtctgcgtgctgcagggccaggacagaaatagccacacatgccggtgagaacaaagagcctctttctttctcatgttgacatcgactttctgtgccaagtcctttgggtataaggatgctagggaattcctataggcaccaaacagaaggaaagctaggggcttggactactgggtataggacttgctctagctctcaggtcctagcccaagctcaatgcaaacacagcccctccggcttcttctgtttctgtgaggttctggaatcccttcctctgtgtccgtgagtctgacagaatcgatgatgttcccttagagctgggaaatccatgtgtttattcacggagggaactcaccattacctcccttgtcttctttgcctgccttggagaaatccagagtcttcggaatggcaaaggcagctcctggatttccctggagggaaggcactagctgagggaagtagctcccttcattcatgatgcacagtttacgcagcagacacacaactgcgcctactatttgctcggtgccctgcaaggtgctgcctaactttgatttgttatttcagctctctccaggatagtgccaaatggtgcaatgggaaacctgttttgctggggggctctagatcactggctccagaactcccggctgccagggtagcccctacccccagccccttgctcctggacagcagtgggtctcacctttagcctctgcccccagttctggtctgacccaacagaggggctctatgatattaagaaggggcccttcctgctctgtgcctcaacctattctccataatagggagtctaatcctattccttccctgcctgatgaggatggtgtgaggatgaggaggacggcatctcatttggggctttttggcagtgggcctcattttaatcctgcagggctgcctgccagtggatctatccagctgcttccttgtagccaagaatgagttcaatgaattgtgattcactgattttattgattttgttttaaaacagggagactggtatttttgaagctgctatcattttctatttctttattaatttctttgtaatcatcttattaaagttttcttatttagtgggagagggagctttgtttaagtttggaatttgcctaaggcagaagttataaggcttcataaccttttgtatgtattgccaatatttgcttgggagattacgtataatgcggctcacccccaccaactttaccccctcccccgcccttcccatcccccactgcacttaactcatgtaagaagtctgccccgtgctggtccgccggcatgttg

SEQ ID NO: 254225 - DNA, 647 bp, Homo Sapiens
  misc_feature (42)..(86): n is a, c, g, or t
gtggaggatggggcatgctgtcatctcaagtctgctgcggcnnnnnnnnnnnnnnnnnnnnnnnnnnnnnnnnnnnnnnnnnnnnnactgcacttcactcatgtaagacgtctgcccggtgctggtccaggcgggcatgtgagtttgtagcctctgctccaaaggatggtttacacattattttttcattaccttcagtattcctgtgaatggttcaagagagaaagtcttcatttactaagatttgggttctgcctcccaagtgacaatacggggctgagatccctctcagcttctttgagatgtggccaccataagcatcatcgttgtagggacagtctcattgctgtcttctagcagacagaagagttaggtgccagaaaggacaatcttgatggtgggtcccctccctgaaggactttaagaaggcataaaggggttggggtggagggtggcgtgtgaaggaggaggcccttgattaggtcagtggtccctgggagccatcggcgagaggcctccagccgggtgacagtctgggctctcgggtactaatctttctaatatggcagtggttgtggcacttctgacttgaattgataattctcatatctaataaaaccaagaagtacctcgttgatatcttatag

SEQ ID NO: 254226 - DNA, 573 bp, Homo Sapiens
  misc_feature (61)..(61): n is a, c, g, or t
  misc_feature (266)..(292): n is a, c, g, or t
  misc_feature (438)..(438): n is a, c, g, or t
gactgtccccttaccaacgaatgatgcctttatggtggccaacatctcaaagaagctgaanagggatctcagcccccgtattgtccacttgggaggcagaaccccaaatcttagtaaatgaagactttctctcttgaaccattcacaggaatactgaaggtaatgaaaaaataatgtgtaaaccatcctttggagcagaggctacaaactcacatgcccgcctggaccagcaccgggcagacgtcttacatgagtgaagtgcagtnnnnnnnnnnnnnnnnnnnnnnnnnnntaaaggtggtgggggtgagccgcagcagacttgagatgacagcatgccccatcctccacccagaaaactaggtattttttatacgtaatctcccaagtttcaaatattggcaatacatacaaaaggttatgaagccttataacttnctgccttaggcaaattccaaacttaaacaaagctccctctcccactaaataagaaaactttaataagatgattacaaagaaattaataaagaaatagaaaatgatagcagcttcaaaaataccagtctccctgtt

SEQ ID NO: 254227 - DNA, 459 bp, Homo Sapiens
ttcaatttcccctaaaaatttggggttcttgccctcccccaaatgaacaaataacgggggccttaagaaccccctcctcaagccttcctttgaaaatgtggccccccccataaagccatccatccgttgtagggaacagtcctcattgcctgtccttcctagcagacagaagagttaggtgcccagaaaggacaatccttgatggtgggtccccctccctgaaggactttaagaaggcataaaggggttggggtggagggtggcgtgtgaaggaggaggcccttgattaggtcagtggtccctgggagccatcggcgagaggcctccagccgggtgacagtctgggctctcgggtactaatctttctaatatggcagtggttgtggcacttctgacttgaattgataattctcatatctaataaaaccaagaagtacctcgttgatatcttatagaaaa

SEQ ID NO: 254228 - DNA, 733 bp, Homo Sapiens
aggtagcgaggcctgggtggcgaattcggcacgagggagacacagccttataagctgagggagtggagaggcccggggccaggaaagcagagacagacaaagcgttaggagaagaagagaggcagggaagacaagccaggcacgatggccaccttcccaccagcaaccagcgccccccagcagcccccaggcccggaggacgaggactccagcctggatgaatctgacctctatagcctggcccattcctacctcggaggtggaggccggaaaggtcgcaccaagagagaagctgctgccaacaccaaccgccccagccctggcgggcacgagaggaaactggtgaccaagctgcagaattcagagaggaagaagcgaggggcacggcgctgagacagagctggagatgaggccagaccatggacactacacccagcaatagagacgggactgcggaggaaggaggacccaggacaggatccaggccggcttgccacaccccccacccctaggacttattcccgctgactgagtctctgaggggctaccaggaaagcgcctccaaccctagcaaaagtgcaagatggggagtgagaggctgggaatggaggggcagagccaggaagatcccccagaaaagaaagctacagaagaaactggggctcctccagggtggcagcaacaataaatagacacgcacggcagccacagcttgggtgtgtgttcatccttg

SEQ ID NO: 254229 - DNA, 1466 bp, Homo Sapiens
gggtccggaagccgggacgatgtccgcatgacaaccgacgttggagtttggaggtgcttgccttagagcaagggaaacagctctcattcaaaggaactagaagcctctccctcagtggtagggagacagccaggagcggttttctgggaactgtgggatgtgcccttgggggcccgagaaaacagaaggaagatgctccagaccagtaactacagcctggtgctctctctgcagttcctgctgctgtcctatgacctctttgtcaattccttctcagaactgctccaaaagactcctgtcatccagcttgtgctcttcatcatccaggatattgcagtcctcttcaacatcatcatcattttcctcatgttcttcaacaccttcgtcttccaggctggcctggtcaacctcctattccataagttcaaagggaccatcatcctgacagctgtgtactttgccctcagcatctcccttcatgtctgggtcatgaacttacgctggaaaaactccaacagcttcatatggacagatggacttcaaatgctgtttgtattccagagactagcagcagtgttgtactgctacttctataaacggacagccgtaagactaggcgatcctcacttctaccaggactctttgtggctgcgcaaggagttcatgcaagttcgaaggtgacctcttgtcacactgatggatacttttccttcctgatagaagccacatttgctgctttgcaggggagagttggccctatgcatgggcaaacagctggactttccaaggaaggttcagactagctgtgttcagcattcaaagaaggaagatcctccctcttgcacaattagagtgtccccatcggtctccagtgcggcatcccttccttgccttctacctctgttccaccccctttccttcctttcctctctgtaccattcattctccctgaccggcctttcttgccgagggttctgtggctcttacccttgtgaagcttttcctttagcctgggacagaaggacctcccagcccccaaaggatctcccagtgaccaaaggatgcgaagagtgatagttacgtgctcctgactgatcacaccgcagacatttagatttttatacccaaggcactttaaaaaaatgttttataaatagagaataaattgaattcttgttcccataaatgggggagtctgtctgtctagctagatctcttcatgttaagaggcgtgccaaggtccagcttaacatctacttgacccagagggaagatggagccacagatgaaatacagatctttgttgagatccattatgagtacaaagtattttagcagaaattcaagatggaatctgatgctgcatcccccactcctggagctccagatgtgtgtgctctgttcagactctctttccttatcagaagccttaactgccctcagaagaataaaaatattcccttagc

SEQ ID NO: 254230 - DNA, 403 bp, Homo Sapiens
cttcttgaaatttaaacaactccactgtggacttggcatctggatggttcaccaccaggaggtacatggcattatcttcatctgtgaatgtgctaatcccatgagggttaaatgaagatacatcaaatttacttccagtgattccaggactgttggggttgaagctctttattccaggatactttaatccagagctaatgaaagccagtccattaggcagtatctccaagtcttcagagccagtttcgattcctttaactaaattacagttaggaagttctacgggttgtacctctcggagagcattaagtcgtgtttggtaagaagactggtggttcctgaagagtgccagtcccatccccaagagggtgagcgcaatcagcttcgccatggtcggggatag

SEQ ID NO: 254231 - DNA, 1755 bp, Homo Sapiens
aatcggcgctgccaaaaccggctgcggctgcaggcaggcagagcctcctagcccgtcggtgtctgcgcccatcgatccctttgtctatccccgaccatggcgaagctgattgcgctcaccctcttggggatgggactggcactcttcaggaaccaccagtcttcttaccaaacacgacttaatgctctccgagaggtacaacccgtagaacttcctaactgtaatttagttaaaggaatcgaaactggctctgaagacttggagatactgcctaatggactggctttcattagctctggattaaagtatcctggaataaagagcttcaaccccaacagtcctggaaaaatacttctgatggacctgaatgaagaagatccaacagtgttggaattggggatcactggaagtaaatttgatgtatcttcatttaaccctcatgggattagcacattcacagatgaagataatgccatgtacctcctggtggtgaaccatccagatgccaagtccacagtggagttgtttaaatttcaagaagaagaaaaatcgcttttgcatctaaaaaccatcagacataaacttctgcctaatttgaatgatattgttgctgtgggacctgagcacttttatggcacaaatgatcactattttcttgacccctacttacgatcctgggagatgtatttgggtttagcgtggtcgtatgttgtctactatagtccaagtgaagttcgagtggtggcagaaggatttgattttgctaatggaatcaacatttcacccgatggcaagtatgtctatatagctgagttgctggctcataagattcatgtgtatgaaaagcatgctaattggactttaactccattgaagtcccttgactttaataccctcgtggataacatatctgtggatcctgagacaggagacctttgggttggatgccatcccaatggcatgaaaatcttcttctatgactcagagaatcctcctgcatcagaggtgcttcgaatccagaacattctaacagaagaacctaaagtgacacaggtttatgcagaaaatggcacagtgttgcaaggcagtacagttgcctctgtgtacaaagggaaactgctgattggcacagtgtttcacaaagctctttactgtgagctctaacagaccgatttgcacccatgccatagaaactgaggccattatttcaaccgcttgccatattccgaggacccagtgttcttagctgaacaatgaatgctgaccctaaatgtggacatcatgaagcatcaaagcactgtttaactgggagtgatatgatgtgtagggcttttttttgagaatacactatcaaatcagtcttggaatacttgaaaacctcatttaccataaaaatccttctcactaaaatggataaatcagttatgtcaattgtcagatattaaataacagtgtgtgaccccaaaagtacttaccctaaaacatgtgttgcctgaaagcacatgtgtgtatcgctgccttgccatgtcttgttcagaagacacaggggagcagggttagctcacgtgtctttagaactccagtactcacccagggactccagttcacaggccagaaaacatatgcattatgaagttcccctctactccatgcacatagtaagtctgactatggcagtcagacttacttactcccattttcccttcgatatatgactttttctcagtaaatattaacctgaactattccaaaaaa

SEQ ID NO: 254232 - DNA, 542 bp, Homo Sapiens
ggatggcctggccagcacggtgaggagcctgggcgagacccagctggtgctctacggtgacgtggaggagctgaagaggagtgtgggcgagctccccagcaccgtggaatcactccagaaggtgcaggagcaggtgcacacgctgctcagtcaggaccaagcccaggccgcccgtctgccttctcaggacttcctggacagactttcttctctagacaacctgaaagcctcagtcagccaagtggaggcggacttgaaaatgctcaggactgctgtggacagtttggttgcatactcggtcaaaatagaaaccaacgagaacaatctggaatcagccaagggtttactagatgacctgaggaatgatctggataggttgtttgtgaaagtggagaagattcacgggtctaaatgaattgcgtgtgcagggcgcggatttaaagtccaatttctcatgaccaattgagcagttggcaccacctgaacaccaaggcattgtattttcatgcccaggtaacttatttacaattttggttttttgg

SEQ ID NO: 254233 - DNA, 962 bp, Homo Sapiens
  misc_feature (57)..(66): n is a, c, g, or t
  misc_feature (639)..(703): n is a, c, g, or t
  misc_feature (789)..(789): n is a, c, g, or t
  misc_feature (807)..(816): n is a, c, g, or t
ggtgggttggggggacccttttctttctagttgtctttaaggaaaattaattttacnnnnnnnnnngttctggccgaaatttttatgagatatctctcacttgtcttccactttgaaccggttaaagctcatagctgtcagctctgaatgaggaggggagaagcccctgggtctttctttgaaaggaatccgctgcttgagggctgcctccctcatggtgtgcgtgtcgtttctcttcctgacgcatcttgtgatatcagaggtaactatgcaaagcatccaggcggttctgaatgtgaagcactacacccagcagagtcccggtgccctctgtccccactgccggcccatgttctctctccggaggtcaccaaggaatgcacaggtttcgactaccagaaaggggagtccttgggttctttcaaaaaattcgtgaggagagctgtctacagtggaatagggggtctccctggggaatgcaggccaagtccttttattttaacatgatgtccatgaagaggtttgccgtctgggcagccctgtcggcaaggagcgtgcatactgcgtttgtgtaattgtttgctgtatctcccttccctctgagctgtattgttctttaatggctgtcttgcccttccnnnnnnnnnnnnnnnnnnnnnnnnnnnnnnnnnnnnnnnnnnnnnnnnnnnnnnnnnnnnnnnnngttttgtttagtttactgtgaaatgaactgtatggcttatttacagtatttttaattcttaataaacacttgagctttgttcctangccaaaaaccacaaaccnnnnnnnnnnccttggtcggccgcctcggcccccccaaaaagctttctaagccctttcgttttggcggcgcgggccccagaagggaaagggaaacatgggccataagctgttttccaaaggaaattcctggtccatgaactaggggcttgtgaatt

SEQ ID NO: 254234 - DNA, 2274 bp, Homo Sapiens
  misc_feature (1690)..(1703): n is a, c, g, or t
tcccggtccccgaatcctcgggatatcgtcgacccacgcgtcgcttttgagtcatcttgagaagctcccaacataaacaagacctcacagagaaagctgtgaagcaaggggagagtgaggtcagccggatcagcgaagtgctgcagaaactccagaatgagattctcaaagacctctcggatgggatccatgtggtgaaggacgcccgggagcgggacttcacgtccctggagaacacggtggaggagcggctgacggagctcaccaaatccatcaacgacaacatcgccatcttcacagaagtccagaagaggagccagaaggagatcaatgacatgaaggcaaaggttgcctccctggaagaatctgaggggaacaagcaggatttgaaagccttaaaggaagctgtgaaggagatacagacctcagccaagtccagagagtgggacatggaggccctgagaagtacccttcagactatggagtctgacatctacaccgaggtccgcgagctggtgagcctcaagcaggagcagcaggctttcaaggaggcggccgacacggagcggctcgccctgcaggccctcacggagaagcttctcaggtctgaggagtccgtctcccgcctcccggaggagatccggagactggaggaagagctccgccagctgaagtccgattcccacgggccgaaggaggacggaggcttcagacactcggaagcctttgaggcactccagcaaaagagtcagggactggactccaggctccagcacgtggaggatggggtgctctccatgcaggtggcttctgcgcgccagaccgagagcctggagtccctcctgtccaagagccaggagcacgagcagcgcctggccgccctgcaggggcgccctggaaggcctcgggtcctcagaggcagaccaggatggtctggccagtacggggaggagcctgtgcgagacccaactggtgctctacgctgacgtggaggagctgaagaggagtgtgggcgagctccccagcaccgtggaatcactccagaaggtgcaggagcaggtgcacacgctgttcagtcaggaccaagcccaggccgcccgtctgcctgctcaggacttcctggacagactttcttctctagacaacctgaaagcctcagtcagccaagtggaggcggacttgaaaatgctcaggactgctgtggacagcttgggtgcatactcggtcaaaatagaaaccaacgagaacaatctggaatcagccaagggtttactagatgacctgacgaatgatctggataggttgctttgtgaaagtggataagattcacgaaaaggtctaaatgaattgcgtgtgcagggcgcggatttaaagtccaatttctcatgaccaaaaaatgagtggttttttcccatgtgtcccctaccccccaattttttgtcccctcttaaagagcagttgtcaccacctgaacaccaaggcattgtattttcatgcccagttaacttatttacaatatttaagttctctgcttctgcatttggttggtttcctgaagcgcagcccctgtgaataacaggtggcttttcatggatgtctctagtcagagaaaaatgataaaggcttaaattgaggattaacagaagcagattaacctcagaaatcctgtctggctggcagatttcaagtnnnnnnnnnnnnnnggtgggttggggggacccttttctttctagtggtctttaaggaaacattaattttacttttttttggtccgggccgaaattgttatgagatatctctcactggtcttccacttggacccggttaaagctcatagcttgtcagctctgattgaggaggggagaagcccctgggtctttcttcgaaaggactccgtgctgagggtggctccctcatggggtgcgtgtcgtactcttcctgaagcatctgggatatccggagtactaggcagaagctcagggggtcgagattgaggacatcaccccgagagtccgggtgccttggtcccattgccgccatttaccttccgagtaccgaggaggccaggtcgactacacacggatcttgggttctaaaaagttgcgagacctggtacaggacaggggcccgggaataggacagctaatataaattcatgtagagttcgtggacctgagagacgataggatagagaggatacccaagatgataggtaccaaaaagggatcgagcagactatgatgtatagacatgtatttctaattattttcttgc

SEQ ID NO: 254235 - DNA, 598 bp, Homo Sapiens
gagacactatgtacacacacaagaagagaagtgtaggtaaagaatagcatgagtcgccaacttttctaaatatattttaaacatgagctactttattctactaaaatatgttaagatgtggaaatccagcaagttctaaatatagtgggaagtttattgggttgcaagtgcaggaacatgttagaggagcatatatctactaaagtcactccatcagtgataagctgcggcccaagagctcatgcttcaaaatagctgggtaagtgttatgacaggaggcaagagaacatagttaaactagtatagcatatatatgtgtctcatggttactctcagtgcctgtttactaaccaaccaaaaatcccgtgaattcattgctgcctttacaaacatcgcaatgagtaagacatttttcaccatcttcagcaattcctgacaatacattgtatgccattgggagtcattctttgttttgaataagtggctgacttcctccccatagtcagccatctcccatctcctcactggatttcattttgaatagcaaatcgcgcctgtgaaaataagacccttgcttctaggccaaccaaaatgtttc

SEQ ID NO: 254236 - DNA, 494 bp, Homo Sapiens
agagaaacatgagattgagttttaaaatctataaaaaacatattaatcatgctctcctctatagcagaatcagatatttagacacagaacaggattttatgtaaattgctttaaggttggggaggtggaacagggtatcttttcatcaattagaaggaaaggttgaaacttctgaatacctttataggggtttctcttactaatcggctcttgctagaactgctaaaccaacccaacttgctcagagatctcatattgaagcaacatacaggcaatccacatctttctttccctttgaagcatagccattggatgggatgagggacagggcctgttgggttcacagggccttgcactgcatgggcacatacttaaaagctcttgtgcatggaatccctgtctgttagccacaggcctctttagctctatacattcaaaataactactgtagtagaaaatagataagcttcagctgagttggcttttgatagtgg

SEQ ID NO: 254237 - DNA, 681 bp, Homo Sapiens
aaccatacttaacatagagtccattttctccagtaagttctccctcaaaaccagtcataagctttcacatataagctcttcccacaactattttgaagaaaatttgcttctgtacacgttctccttactcatttaaaatgagattttgtagttatttggtgacaaactattatttagatgactttgtccaaatatgtactgatatcagacaaaaagtaaatatctgcaaatatctgaggctgtctcaatttagacaataagaattttattcacatgactactgaagttaactgttgattcaaataagatgttctatgttgattaatgccattactccacaaatagtccctttttccaaagctacgttcaaatttcgtatggcatgcatttcacaatgaggacccggattcagggagtaggttagaaagcctatgatgagtcatgacaagctgactttgactaatagtcatcccattaaaaaaatgaaagccacaaacatggacagaaaccagtcatagaatattttaggatataatgcatagaatgattccctcaaacaaatcagtcctccagaagcacaggatgaaaaggatgtttgggaaatattttctgtaaggtcaccatattaaaaattatcctatacctatctttatttttttcagtcttcccaacaaagaatct

SEQ ID NO: 254238 - DNA, 560 bp, Homo Sapiens
cactatatgttcaaacagcagcaacctgaggggtgggtcacggaatagcatgattggtcggcctattataactaagtctcgagaggtgaaactcttggttcgtcattggacaagttcagtacgtaaagttcacctttgttctaaatatagttggactattatgaggttcaatgtacactatcatgtatgtgcagaatatgtgtactaaagtctactcttacaaatcatcacttggcggctcatgtagctcacgtatgaatagcctatcaatgttgacccagttaattcagcgcgtctctttggacactcatcacaggattcagtgagtcttctcagtgcgtctacaaacatctgcaatgagtatgaagttatttcgcaataacttaactgttccagtcattaatccagaatgacattggcagtaaatgtatgtttgcaaaaagtggaaaatttccccggcacagtaatgtatcccacctctcctaaatggactgcagtctttatcgcaaatcacgattgtgcaagtacaacagttgcttctagaacaggcaaaaccttcc

SEQ ID NO: 254239 - DNA, 2011 bp, Homo Sapiens
  misc_feature (1483)..(1500): n is a, c, g, or t
  misc_feature (1509)..(1547): n is a, c, g, or t
  misc_feature (1594)..(1666): n is a, c, g, or t
  misc_feature (1686)..(1686): n is a, c, g, or t
  misc_feature (1719)..(1784): n is a, c, g, or t
  misc_feature (1941)..(1949): n is a, c, g, or t
  misc_feature (1983)..(1983): n is a, c, g, or t
cggcagtaactactaacggtcttaaggtagcgaggctgggtggcgaattcggcacgaggaggtagcggtggtagcaggctatggtgatgtgggcaagggctgtgcccaggccctgcggggtttcggagcccgcgtcatcatcaccgagattgaccccatcaacgcactgcaggctgccatggagggctatgaggtgaccaccatggatgaggcctgtcaggagggcaacatctttgtcaccaccacaggctgtattgacatcatccttggccggcactttgagcagatgaaggatgatgccattgtgtgtaacattggacactttgacgtggagatcgatgtcaagtggctcaacgagaacgccgtggagaaggtgaacatcaagccgcaggtggaccggtatcggttgaagaatgggcgccgcatcatcctgctggccgagggtcggctggtcaacctgggttgtgccatgggccaccccagcttcgtgatgagtaactccttcaccaaccaggtgatggcgcagatcgagctgtggacccatccagacaagtaccccgttggggttcatttcctgcccaagaagctggatgaggcagtggctgaagcccacctgggcaagctgaatgtgaagttgaccaagctaactgagaagcaagcccagtacctgggcatgtcctgtgatggccccttcaagccggatcactaccgctactgagagccaggtctgcgtttcaccctccagctgctgtccttgcccaggccccacctctcctccctaagagctaatggcaccaactttgtgattggtttgtcagtgtcccccatcgactctctggggctgatcacttagtttttggcctctgctgcagccgtcatactgttccaaatgtggcagcgggaacagagtaccctcttcaagccccggtcatgatggaggtcccagccacagggaaccatgagctcagtggtcttggaacagctcactaagtcagtccttccttagcctggaagtcagtagtggagtcacaaagcccatgtgttttgccatctaggccttcacctggtctgtggacttatacctgtgtgcttggtttacaggtccagtggttcttcagcccatgacagatgagaaggggctatattgaagggcaaagaggaactgttgtttgaattttcctgagagcctggcttagtgctgggccttctcttaaacctcattacaatgaggttagtacttttagtccctgttttacaggggttagaatagactgttaaggggcaactgagaaagaacagagaagtgacagctaggggttgagaggggccagaaaaacatgaatgcaggcagatttcgtgaaatctgccaccactttataaccagatggttcctttcacaaccctgggtcaaaaagagaataatttggcctataatgttaaaagaaagcaggaaggtgggtaaataaaaatcttggtgcctggnnnnnnnnnnnnnnnnnnctcgaggcnnnnnnnnnnnnnnnnnnnnnnnnnnnnnnnnnnnnnnncatggtcatagctgtttcctgacccagctttcttgtacaaagtggtnnnnnnnnnnnnnnnnnnnnnnnnnnnnnnnnnnnnnnnnnnnnnnnnnnnnnnnnnnnnnnnnnnnnnnnnntgcagtacccggggaattancccgcctaatgagcgggcttttttttgtgatcnnnnnnnnnnnnnnnnnnnnnnnnnnnnnnnnnnnnnnnnnnnnnnnnnnnnnnnnnnnnnnnnnncttacagggggtggttttgtttgcccggatcaaaaactaccaactcctttttcccaagggaacctggctttacaccaaagccccaaatacccaaaacggttcctttcaaaggggagccggtatttaggggcaccccctttcagaaaacttgggtgannnnnnnnntaaaataccctccgctctcggttaatccccgggntcacaatggggggtgtcttcccccgagc

SEQ ID NO: 254240 - DNA, 1429 bp, Homo Sapiens
ggcctgggtggcgaattcggcacgaggcccagttcctgttcccagactgaggcccagcccccttcgcccgtttccatcacgagtgccgccagcatgtctgacaaactgccctacaaagtcgccgacatcggcctggctgcctggggacgcaaggccctggacattgctgagaacgagatgccgggcctgatgcgtatgcgggagcggtactcggcctccaagccactgaagggcgcccgcatcgctggctgcctgcacatgaccgtggagacggccgtcctcattgagaccctcgtcaccctgggtgctgaggtgcagtggtccagctgcaacatcttctccacccaggaccatgcggcggctgccattgccaaggctggcattccggtgtatgcctggaagggcgaaacggacgaggagtacctgtggtgcattgagcagaccctgtacttcaaggacgggcccctcaacatgattctggacgacgggggcgacctcaccaacctcatccacaccaagtacccgcagcttctgccaggcatccgaggcatctctgaggagaccacgactggggtccacaacctctacaagatgatggccaatgggatcctcaaggtgcctgccatcaatgtcaatgactccgtcaccaagagcaagtttgacaacctctatggctgccgggagtccctcatagatggcatcaagcgggccacagatgtgatgattgccggcaaggtagcggtggtagcaggctatggtgatgtgggcaagggctgtgcccaggccctgcggggtttcggagcccgcgtcatcatcaccgagattgaccccatcaacgcactgcaggctgccatggagggctatgaggtgaccaccatggatgaggcctgtcaggagggcaacatctttgtcaccaccacaggctgtattgacatcatccttggccggcactttgagcagatgaaggatgatgccattgtgtgtaacattggacactttgacgtggagatcgatgtcaagtggctcaacgagaacgccgtggagaaggtgaacatcaagccgcaggtggaccggtatcggttgaagaatgggcgccgcatcatcctgctggccgagggtcggctggtcaacctgggttgtgccatgggccaccccagcttcgtgatgagtaactccttcaccaaccaggtgatggcgcagatcgagctgtggacccatccagacaagtacccccgttgggggttcatttcctgcccaagaagctgggatgaggcagttggctgaagcccacctgggcaagcggaatgtgaaggtgaccaagctaactgaggaaccaagcccagtaccctgggcatggtcctgggatgggccccttcaagcccggatcactaccgcctactgaaaacccaggtctggcgtttcaccccta

SEQ ID NO: 254241 - DNA, 1514 bp, Homo Sapiens
aaggagcgaggcctgggtggcgaattcggcacgaggccatcacgagtgccgccagcatgtctgacaaactgccctacaaagtcgccgacatcggcctggctgcctggggacgcaaggccctggacattgctgagaacgagatgccgggcctgatgcgtatgcgggagcggtactcggcctccaagccactgaagggcgcccgcatcgctggctgcctgcacatgaccgtggagacggccgtcctcattgagaccctcgtcaccctgggtgctgaggtgcagtggtccagctgcaacatcttctccacccaggaccatgcggcggctgccgttgccaaggctggcattccggtgtatgcctggaagggcgaaacggacgaggagtacctgtggtgcattgagcagaccctgtacttcaaggacgggcccctcaacatgattctggacgacgggggcgacctcaccaacctcatccacaccaagtacccgcagcttctgccaggcatccgaggcatctctgaggagaccacgactggggtccacaacctctacaagatgatggccaatgggatcctcaaggtgcctgccatcaatgtcaatgactccgtcaccaaaagcaagtatgacaacctctatggctgcccggagtccctcatagatggcatcaagcgggccacagatggggatgattgccggcaaggtagcggtggtagcaggctatggtgatgtgggcaagggctgtgcccaggccctgcggggtttcggagcccgcgtcatcatcaccgagattgaccccatcaacgcactgcaggctgccatggagggctatgaggtgaccaccatggatgaggcctgtcaggagggcaacatctttgtcaccaccacaggctgtattgacatcatccttggccggcactttgagcagatgaaggatgatgccatgtgtgtaacattggacactttgacgtggagatcgatgtcaagtggctcaacgagaacgccgtggagaaggtgaacatcaagccgcaggtggaccggtatcggttgaagaatgggcgccgcatcatcctgctggccgagggtcggctggtcaacctgggttgtgccatgggccaccccagcttcgtgatgagtaactccttcaccaaccaggtgatggcgcaaattgagctgtggaccatccagacaagtaccccgtggggttcatttcctgccaagaaggtggatgaggcagtggtgaagccacctgggaagggcggagtgaggttgaccaggcaactgagaagcaagccagtactgggcatgtcagtggatgcctcagcggtcaatacgtaagggagcaggcgggttaacccagtgcgctgcaggcccggctccaccagacgagacaacttgatggggcggcccacacaccggggacaaagcgcgcgacggcaagcaggggaaacacaaccgggagcagcgaaacggagcagaaagaaaaggaaatagcggcgcacagaaccacgtgcgcaa

SEQ ID NO: 254242 - DNA, 978 bp, Homo Sapiens
gggccggacgaaatccgcggaccgggctttaggttcgccggaatcccacgctcccgacttctgcttccgggtcggagccatggcggtggcaaattcaagtcctgttaaccccgtggtgttctttgatgtcagtattggcggtcaggaagttggccgcatgaagatcgagctctttgcagacgttgtgcctaagacggccgagaactttaggcagttctgcaccggagaattcaggaaagatggggttccaataggatacaaaggaagcaccttccacagggtcataaaggatttcatgattcagggtggagattttgttaatggagatggtactggagtcgccagtatttaccgggggccatttgcagatgaaaattttaaacttagacactcagctccaggcctgctttccatggcgaacagtggtccaagtacaaatggctgtcagttctttatcacctgctctaagtgcgattggctggatgggaagcatgtggtgtttggaaaaatcatcgatggacttctagtgatgagaaagattgagaatgttcccacaggccccaacaataagcccaagctacctgtggtgatctcgcagtgtggggagatgtagtccagacaaagactgaatcaggccttcccatctgcttggcgatagctctggataagatcatgtgtgaatggccaaagtcttcgatgccctgccagctgctgttccattgatctaagcccagacagtgggtgctcccacagcacttggttcatctctccactgtggcatttaatatactgtatcacaaatatgccttcccttcttcttggtggtgttcttgagtaagataatctggactggcccccgtctttgcttccctgcctgctgctgccccatttgatcaagagaccatggaagtgtcagagattcagaatccaagattgtctttaagttttcaactgtaaataaagtttttttgtatgcgt

SEQ ID NO: 254243 - DNA, 758 bp, Homo Sapiens
  misc_feature (143)..(144): n is a, c, g, or t
ctccactcacgccagaacaagtgtctatcctagcacagtcttttccagagtctcagtgtcctaccagcattctcattttgtcctccacatgtttattggtcacttttgatcttcacattcagcccttctctaaactgggtgcnntgggcaccgggtgtgtcaggctctgtgttggggggaagcaagccaggcctggtgccagccctcagggagctcaccgtctatgagggagaccagatccatgcaaggccctaacccagtacccaactcatgcaagtacctagtgccagtccttagagcagaggagacctgtaaacattcattcctgtactttaacaacttgacatcaggagattttacattgaaactttctcttcctgtggatgttagatcggatcaggtgctcatggggagttctgatgcttctcatcccagtagctggactacagagacaggaagcagcctgcagagaaaatgaagtagtccagggtttcagtgtgagttaatgtgtgttgtggcttgtggtgctttcgatagggagagagatgggctgaccatctataataccattatttatatagtcatcagagttgtgtatttgctaaactttataaatacatgtgtattttagaacaacacagtctttttgttagaatgttatgctcaccatttacgctgcccttcataggagtagtggtcctgagaggtcatgtttattgagcgctggtcatgtgcccgtcactgttctgggcttctac

SEQ ID NO: 254244 - DNA, 1688 bp, Homo Sapiens
ggagaaaaagttttcttttctggagtcccaaacgaggtgcgggacggaagagggggtgaaggccagaggctcggggcttcaagaccgctgtctggagtccccctttccaggccatgtcggggcccacctggctgcccccgaagcagccggagcccgccagagcccctcaggggagggcgatcccccgcggcaccccggggccaccaccggcccacggagcagcactccagccccaccccagggtcaatttttgcccccttccatctgagcagtgttaccaggccccagggggaccggaggatcgggggccggcgtgggtggggtcccatggagtactccagcacacgcaggggctccctgcagacagggggggccttcgccctggaagcctggacgccgagatagacttgctgagcagcacgctggccgagctgaatgggggtcggggtcatgcgtcacggcgaccagaccgacaggcatatgagcccccgccacctcctgcctaccgcacgggctccctgaagccaaatccagcctcgccgctcccagcgtctccctatgggggccccactccagcctcttacactaccgccagcaccccggctggcccagccttccccgtgcaagtgaaggtggcacagccagtgaggggctgcggcccacccaggcggggagcctctcaggcctctgggccccttccgggcccccactttcctctcccaggccgaggtgaagtctgggggcctggctataggagccagagagagccagggccaggggccaaagaggaagctgctggggtctctggccctgcaggaagaggaagaggaggcgagcacgggccccaggtgcccctgagccagcctccagaggatgagctggataggctgacgaagaagctggttcacgacatgaaccacccgcccagcggggagtactttggccagtgtggtggctgcggagaagatgtggttggggatggggctggggttgtggcccttgatcgcgtctttcacgtgggctgctttgtgtgttctacatgccgggcccagcttcgcggccagcatttctacgccgtggagaggagggcatattgcgagggctgctacgtggccaccctggagaaatgtgccacgtgctcccagcccatcctggaccggatctgcgggctatggggaaggcctaccaccctggctgcttcacctgcgtggtgtgtcaccgcggcctcgacggcatccccttcacagtggatgctacgagccagatccactgcattgaggactttcacaggaagtttgccccaagatgctcagtgtgcggtggggccataatgcctgagccaggtcaggaggagactgtgagaattgttgctctggatcgaagttttcacattggctgttacaagtgcgaggagtgtgggctgctgctctcctctgagggcgagtgtcagggctgctacccgctggatgggcacatcttgtgcaaggcctgcagcgcctggcgcatccaggagctctcagccaccgtcaccactgactgctgagtcttcctagaagtacctgctgggttctcagttccagttcccatcctttgattgatcactctccctgacatccacctgtatgactttgtcaccaaatgctgtcttctctttctccaatcaagaaataataatccctcgagtttac

SEQ ID NO: 254245 - DNA, 421 bp, Homo Sapiens
  misc_feature (173)..(249): n is a, c, g, or t
  misc_feature (281)..(298): n is a, c, g, or t
ccaaaaggcaaatctaattgtgtcactttgcaaattgtttgagtttatctgtcgttccattagagtgtgagttcttcatcagcgtgaacactcattcactcagtgcctaggagaccatagggattcagtatatgttgaacaaatgatttcaattcagagaattgtcagtgaannnnnnnnnnnnnnnnnnnnnnnnnnnnnnnnnnnnnnnnnnnnnnnnnnnnnnnnnnnnnnnnnnnnnnnnnnnnnaacctggacaacatagaaagactctgcctttnnnnnnnnnnnnnnnnnnttggtcgtatgtggtagcatgtgcctgtagtcccagcttctcgggtggccaaggtgggaagatagcttgagcacaggatttcgaagttacagtgagccatgagtgcaccatggcacatcagtc

SEQ ID NO: 254246 - DNA, 1050 bp, Homo Sapiens
  misc_feature (103)..(119): n is a, c, g, or t
  misc_feature (972)..(973): n is a, c, g, or t
  misc_feature (975)..(975): n is a, c, g, or t
  misc_feature (980)..(980): n is a, c, g, or t
  misc_feature (988)..(988): n is a, c, g, or t
  misc_feature (995)..(996): n is a, c, g, or t
  misc_feature (1004)..(1004): n is a, c, g, or t
  misc_feature (1006)..(1006): n is a, c, g, or t
  misc_feature (1009)..(1009): n is a, c, g, or t
  misc_feature (1011)..(1011): n is a, c, g, or t
  misc_feature (1015)..(1015): n is a, c, g, or t
  misc_feature (1025)..(1025): n is a, c, g, or t
  misc_feature (1027)..(1027): n is a, c, g, or t
  misc_feature (1030)..(1030): n is a, c, g, or t
  misc_feature (1040)..(1040): n is a, c, g, or t
tgtaactttcagtctttccgggtgttccttttttacaaaaacaaaaaggcacataaaaaccttccccgctgtcatttccacagatggatggttttcaggcagnnnnnnnnnnnnnnnnnatagagctacatgcttcattccaggacgtcttgcttccccacatgctgcggtgctttcctaccagggtagagttccaaactccaagactgaagtacacaaagagggggtgggtgtcggatgcagagtgtgtggcctgatgctccacggcgtgcaggacggggggctaatagtaggtttccttctccacccagccgccagggcgtcgcctgatgatgagttttctgacttcgtcatatacgaagatgagaagagagtaggggaaggcacagaaccaccaggtaggtttgaggggatacatcctaagagcaacacccattccagggcagtaggaaaggaaagcagccagggctgtctcttcaaagaggccaaatatcaagatcttgttcttcatcccctgctggaagaccgaattcctcctggtcttacagatgaccaagtcggcccactgcaccaccacgatactgacgaagaaggctgtgtggcaggtgaactccacgattttcctctgctcataggtccactgctgcccgtagctgtcttccacatcgttgatccagcggtcatcccagtccactcggaggcccaacaggtgaattgggaggaagccgttctcagccagaatcacaaagtaagtaaagaagcctcccagggcctggatcattccaatctgcccataggccatgctgatcagccgctcattcacaagtttgtctgttttgggatttctgggctgtctcttcatgatgtcactctcagcctgctcataagccagggagatggcaggaaccatgtcagtgcccaagtcaatgcagaggatggtgacagtccccagtggtagtggaatgtttgcannanaaatntcaggaangggtganntcgggatntnacngntaangtatagcatngnttnctcagttatnaagatagacg

SEQ ID NO: 254247 - DNA, 1034 bp, Homo Sapiens
  misc_feature (859)..(859): n is a, c, g, or t
  misc_feature (963)..(963): n is a, c, g, or t
  misc_feature (1023)..(1023): n is a, c, g, or t
cctgggtggcgtgtgaatgactctccagctttgaagaaagagacattggggttgctatggggattgctggctcagatgtgtccaagcaagctgctgacatgattcttctggatgacaactttgcctcaattgtgactggagtagaggaaggtcgtctgatctttgataacttgaagaaatccattgcttataccttaaccagtaacattcccgagatcaccccgttcctgatatttattattgcaaacattccactaccactggggactgtcaccatcctctgcattgacttgggcactgacatggttcctgccatctccctggcttatgagcaggctgagagtgacatcatgaagagacagcccagaaatcccaaaacagacaaacttgtgaatgagcggctgatcagcatggcctatgggcagattggaatgatccaggccctgggaggcttctttacttactttgtgattctggctgagaacggcttcctcccaattcacctgttgggcctccgagtggactgggatgaccgctggatcaacgatgtggaagacagctacgggcagcagtggacctatgagcagaggaaaatcgtggagttcacctgccacacagccttcttcgtcagtatcgtggtggtgcagtgggccgacttggtcatctgtaagaccaggaggaattcggtcttccagcaggggatgaagaacaagatcttgatatttggcctctttgaagagacagccctggctgctttcctttcctactgccctggaatgggtgttgctcttaggatgtatcccctcaaacctacctgggtgggttctgtgcctttcccctactctcttctcatcttcgnatatgacgaagtcagaaaactcatcatccaggcgacgcccctggcggcttggggtggaagaaaggaaacctacttattagcccccccgttccttgcacgcccgntggaagcatcagggcccacacacttctggcatcccgaaaaccccaccccccctctttttnggggaccttct

SEQ ID NO: 254248 - DNA, 2514 bp, Homo Sapiens
gtggtaaccggccggaattccgggatatcgtcgacccacgcgtccgctcctcgctcactggtgaatcagaaccccagactaggtctccagatttcacaaatgaaaaccccctggagacgaggaacattgccttcttttcaaccaattgtgttgaaggcaccgcacgtggtattgttgtctacactggggatcgcactgtgatgggaagaattgccacacttgcttctgggctggaaggaggccagacccccattgctgcagaaattgaacattttatccacatcatcacgggtgtggctgtgttcctgggtgtgtctttcttcatcctttctctcatccttgagtacacctggcttgaggctgtcatcttcctcatcggtatcatcgtagccaatgtgccggaaggtttgctggccactgtcacggtctgtctgacacttactgccaaacgcatggcaaggaaaaactgcttagtgaagaacttagcaagctgtggagaccttggggtccacatccaccatctgctctgataaaactggaactctgactcagaaccggatgacagtggcccacatgtggtttgacaatcaaatccatgaagctgatacgacagagaatcagagtggtgtctcttttgacaagacttcagctacctggcttgctctgtccagaattgcaggtctttgtaacagggcagtgtttcaggctaaccaggaaaacctacctattcttaagcgggcagttgcaggagatgcctctgagtcagcactcttaaagtgcatagagctgtgctgtggttccgtgaaggagatgagagaaagatacgccaaaatcgtcgagatacccttcaactccaccaacaagtaccagttgtctattcataagaaccccaacacatcggagccccaacacctgttggtgatgaagggcgccccagaaaggatcctagaccgttgcagctctatcctcctccacggcaaggagcagcccctggatgaggagctgaaagacgcctttcagaacgcctatttggagctggggggcctccggagaacgagtcctaggtttctgccacctctttctgccagatgaacagtttcctgaagggttccagtttgacactgacgatgtgaatttccctatcgataatctgtgctttgttgggctcatctccatgattgaccctccacgggcggccgttcctgatgccgtgggcaaatgtcgaagtgctggaattaaggtcatcatggtcacaggagaccatccaatcacagctaaagctattgccaaaggtgtgggcatcatctcagaaggcaatgagaccgtggaagacattgctgcccgcctcaacatcccagtcagccaggtgaaccccagggatgccaaggcctgcgtagtacacggcagtgatctaaaggacatgacctccgagcagctggatgacattttgaagtaccacactgagatagtgtttgccaggacctcccctcagcagaagctcatcattgtggaaggctgccaaagacagggtgctatcgtggctgtgactggtgacggtgtgaatgactctccagctttgaagaaagcagacattggggttgctatggggattgctggctcagatgtgtccaagcaagctgctgacatgattcttctggatgacaactttgcctcaattgtgactggagtagaggaaggtcgtctgatctttgataacttgaagaaatccattgcttataccttaaccagtaacattcccgagatcaccccgttcctgatatttattattgcaaacattccactaccactggggactgtcaccatcctctgcattgacttgggcactgacatggttcctgccatctccctggcttatgagcaggctgagagtgacatcatgaagagacagcccagaaatcccaaaacagacaaacttgtgaatgagcggctgatcagcatggcctatgggcagattggaatgatccaggccctgggaggcttctttacttactttgtgattctggctgagaacggcttcctcccaattcacctgttgggcctccgagtggactgggatgaccgctggatcaacgatgtggaagacagctacgggcagcagtggacctatgagcagaggaaaatcgtggagttcacctgccacacagccttcttcgtcagtatcgtgggtggtgcagtgggccgacttggtcatctgtaagaccaggaaggaattccgtcttccagcaggggatgaagaacaagatcttggatatttggcctcctttgaagagacagccctggcctgctttcctttcctactggccctggaaatgggtgttgcttccttaggatgtatccccctcaaccctaccctggtgggttctggggccttccccctacttctccttctcatccttcggaaaaggaccaaagtcagaaaaaactcatccttcaggcgaaccccccttggcggcctggggtggaaaaaaggaaaaccttccttttaaccccccc

SEQ ID NO: 254249 - DNA, 897 bp, Homo Sapiens
  misc_feature (813)..(814): n is a, c, g, or t
  misc_feature (817)..(824): n is a, c, g, or t
  misc_feature (826)..(826): n is a, c, g, or t
  misc_feature (828)..(828): n is a, c, g, or t
  misc_feature (830)..(830): n is a, c, g, or t
  misc_feature (835)..(835): n is a, c, g, or t
ggcctgggtggcgaattcggcacgaggctgagaacggcttcctcccaattcacctgttgggcctccgagtggactgggatgaccgctggatcaacgatgtggaagacagctacgggcagcagtggacctatgagcagaggaaaatcgtggagttcacctgccacacagccttcttcgtcagtatcgtggtggtgcagtgggccgacttggtcatctgtaagaccaggaggaattcggtcttccagcaggggatgaagaacaagatcttgatatttggcctctttgaagagacagccctggctgctttcctttcctactgccctggaatgggtgttgctcttaggatgtatcccctcaaacctacctggtggttctgtgccttcccctactctcttctcatcttcgtatatgacgaagtcagaaaactcatcatcaggcgacgccctggcggctgggtggagaaggaaacctactattagccccccgtcctgcacgccgtggagcatcaggccacacactctgcatccgacacccaccccctctttgtgtacttcagtcttggagtttggaactctaccctggtaggaaagcaccgcagcatgtggggaagcaagacgtcctggaatgaagcatgtagctctatggggggaggggggaagggctgcctgaaaaccatccatctgtggaaatgacagcggggaaggtttttatgtgcctttttgtttttgtaaaaaaggaacacccggaaagactgaaagaatacattttatatctggatttttacaaataaagatggctattataatggaaaanntgnnnnnnnnanananaaaancccttgtcgggccgcctcgggccctcaagaagcttttctagaacatttcgttttggcgcgct

SEQ ID NO: 254250 - DNA, 885 bp, Homo Sapiens
gttacttcctttatgtgactgacagtcagctttccattgagatataacattcacagatgatccccaagtatccttgtcatcagaagctttggaccttttctgccactgacttgtggctgatctgtaacacaataaatacataattttatttcatgttgtctgtccacctctgaataagcagtggcatgaccaaaaagactggtagaaggagagaatttcttggccaaatccttcataccaggtaccacttcttgagtaactgagagttgactgtcttctatggtgactacatagaagatatttccaaaggttctgttatgcagtgaagacattcagattatttgtaagaatttcaccaacacccttgcgtattgaaatgcttaaccattaacagggaaaaaaaaggagaaaaccgaacaaaacagagacatttacttgaaatgggagggttgctaatgtgaagagtgtttctgttttattacttataagagaaaagcaggaaaacttttgctttgataagaaagacaccagagtggtgattctagttgatgccacaggctaacacaatcgtgtaatcatgttgagttgtagaaatatatggccctaaaaaccattctctttcccttatatatataaatatgtgaacactgcctagtaacattttaatagatttaagatgcatttgtacattctcagcatactagaagaaaatgttttttctctttctgagttaacttcatagcatagagaaccagcactgtgcaggtttcagcatttcagataagggcatgattaattgtgtaacttaatgccctggtattcattgctgaggttcatatcaagaatagaaaaatcgaaagatgggtttgggcgacattgtcttcc

SEQ ID NO: 254251 - DNA, 2119 bp, Homo Sapiens
  misc_feature (1380)..(1507): n is a, c, g, or t
  misc_feature (1599)..(1607): n is a, c, g, or t
  misc_feature (1839)..(1884): n is a, c, g, or t
  misc_feature (1914)..(1975): n is a, c, g, or t
cgtttattggtcgactctgcagagaaatcctgcggatcacagacccaaaaatgacatgtcacatagaccagctgaacacttggtatgatatgaaaactcatcaggaagtgaccagcagccgcctcttctcagaaattcttaccaccttgggaacctttggtctaaatggcttagacaggcttctgtgctttatgattgtaaaagagttacagaatttcctcagtatgtttcagaaaattatcctgagagacagaactgttcaggacactttaaaaaccctcatgaatgctgtcagtcccctaaaaagtattgtcgcaaattcaaataaaatttatttttccgccattgccaaaacacagaagatttggactgcgtatctcgaggctataatgaaggttgggcagatgcagattctgagacaacagattgccaatgaattaaattattcttgtcggtttgattctaaacatctggcagctgctctggagaatctcaataaggctctcctagcagacattgaagcccactatcaggacccttcacttccttaccccaaagaagataacacacttttatatgaaatcacagcctatctggaggcagctggcattcacaacccactgaataagatatacataacaacaaagcgcttaccctattttccaattgtaaactttctatttttgatcgctcagttgccaaaacttcaatacaacaaaaatctgggaatggtctgccgaaaaccgaccgacccggttgattggccaccacttgtcctgggactgctcactctgctgaagcagttccattcccggtacaccgagcagttcctggcactgattggccagtttatctgctccacggtggagcagtgtacaagccagaagatacctgaaattcctgcagatgttgtgggtgcccttctgttcctggaggattatgttcggtacacaaagctacccaggagggttgctgaagcacatgtgcctaatttcatttttgatgagttcagaacagtgctgtaactgtttttcctacttcttcaatggaaggattgtccttagatcttcccaccatcacaaatgaatttgaagatgaaaagaaactcagttgctcatacaactgcattttttctgtctattatgggaaacatcagacgttctgagtaagatatatctcatggcattagttaatataactgatattgtttaaatcatggtattacatgcaatttatatcagataaaagcagaacacatttttgtactgcctctcttaaatgctgaatgtaactgttatgtataaatccatttagttttatgttctaaagaactatttgtgcaactccagattttcagtaaaatagtattactagtacccnnnnnnnnnnnnnnnnnnnnnnnnnnnnnnnnnnnnnnnnnnnnnnnnnnnnnnnnnnnnnnnnnnnnnnnnnnnnnnnnnnnnnnnnnnnnnnnnnnnnnnnnnnnnnnnnnnnnnnnnnnnnnnnnttttctaaggccttcaggacgaaaaacaaacataaaaatcctttggcgccggccccttcgcccttaacaaacccttaccaggctcttttttnnnnnnnnncccctcccgcaaaggaaaagggggttactttcccctcccaaaaaaaccccgccaaagacacctttggcccttccctcgaaaaaaaccccggggggcccctcccggtgttttacaaaattcacaatggcgtccctttttgtccccccggtcttcttccatgccgatccttttgcgccccttttgaaacattatcgctcaccctgttcgcaaacatatcgatcctcgggggggnnnnnnnnnnnnnnnnnnnnnnnnnnnnnnnnnnnnnnnnnnnnnnacaatggcccgtaattggccgctttttctnnnnnnnnnnnnnnnnnnnnnnnnnnnnnnnnnnnnnnnnnnnnnnnnnnnnnnnnnnnnnngttttgcacaaagtgcgcccaaacacaaacccctcttatctcggcccccccttttttaaacataaaagggggcggaaaacctccccccgtgtattggcctcctcgcccccaaaaataatattttgtgcccacaaacccttcacg

SEQ ID NO: 254252 - DNA, 628 bp, Homo Sapiens
ccgggcaacgttgaaaagttgcatcagcaaaagggtataaaaaccaatagtataatgttctgaaagaagaagcatgcaaaggagcatttcttccactatcaatgtcaaaaactctcctgaaagaatgaaaaatgactattttgtaattatcataccaaattagatttcaagcaggtatacaaataacaacttagctagaccttttatttgatctgaaatggcagcatggaaggagctagagaaacctgggattatctagtacaactctcttgttttataggcaaggaaacagaagctcccaaaactatggtgataatctcaggatcacatatctaaattagtggagagccagggtaagacatcaggactgtttattctcctgtttattctactatctagcttattgtcctcccaaatttactaagcactcactgattaagaagaaattaaagataaatgggaagtcaggagtagaatttaggctcttgaaaatttgtaacattataacatcttggatgattagcttggaaaagaaacaattaactgaagctttattagacactgaattcttaccagcaaataagagtgtaaagactactacaagttgatagaatgcatgacccaaaat

SEQ ID NO: 254253 - DNA, 360 bp, Homo Sapiens
  misc_feature (97)..(105): n is a, c, g, or t
gcttcgtgggaatgcccagagccccagtgtgcttgtggagagcatggacagacttcgtggtgttcattgtttgatgatttttaatcgttactattannnnnnnnnattctaatgtctctgttctaaaacgtaagactcgggggttggggcgaagggaaacccatccagtcctgtgattctattgcaagcttcaaggggcttttgtttgaaagacccggatgctggattccccaagaacaagttaccctctggggtgaggctattccagcgagctgcgacatttccccatgggggcccactcccctctcttccccagcaggctgtagtttctaagctgtgaacatttcaagatttcagagg

SEQ ID NO: 254254 - DNA, 738 bp, Homo Sapiens
ccaccccaaaatgtctctgggactacacccgtgtactcctatcccctggcgtgggcaggcctgggactaaaatcccagaaaatgggcaaggttgcccttcataggtatatacctaggccataaggtctgtcttactaggagccacaactcccttgctgcgagaaagcaagcagtcatgtcagaaaggcccaagagacaagtaactaagaacagcctctggaccacaaaaataaactcaaaatggttcacagacttaaaacataaaatgcaaaactatgaaactcccagaagataacatagggtaaaatccaggtgatcttggatttggcagtgacaaaatacaccaaaggtataatccgtgaaagagaaaattgataagcaggacttcattaaacttaaaaatctctgctctgtgaaagaccccagaaaaatataataaaaagttacttgacagatgacaaacatccttaagaagtataagtgtatatgtaagatataacaatacattcaaggacatgcttaaagtcatccacagggaggtctttcaaaggaaatactgatatgtccagaaggccagcgctcgggagctaatgtccaacacaatctctggtcgcagtcctgccaataccatagctttatattcctctgatggactgagttctgtgcggacaatatctagctttccagaaagggtactgttgcaggcaggacagatagctggtgagcgactaaactcac

SEQ ID NO: 254255 - DNA, 1326 bp, Homo Sapiens
gtgcgtgacactatgcgtggctcaaattctttttactttgaaggccctgctagaaacttgctgctgctctaattcacgacttggagagacaaaactaaaaaagctgttgctgggttcaggtgctgtgggagaacccgcaaaaaatggtctgaactgaaaatctccatctccatcgccccgatttcgaacaggtgtattatccaaaggaaacttggagttgttacctaatgggaagccaagaacaccagactgtgcaatcatggatggttcaagggtgccttcatggttagcaatagtgatgtttcgtagcctaaggctatcatagaggccttggagcttttgatactgacgattgcgctccataagtttctcagagatgtcactgaactttttcttgtattcttctagtactttcttcatggaggtaacctcccctttcatagaggtcaattctacatccttgctttgtatttgctgagtatatatcttctccatctgtttcagatggccctcagccttgctgaaattgtattcttgatagagacgttcctgatgtacctgatatgtccagaaggccagcgctcgggagctaatgtccaacacgatctctggtcgcagtcctgccaataccatagctttatattcctctgatggactgagttctgtgcggacaatatctagctttccagaaagggtactgttgcaggcaggacagatagctggtgagcgactaaactcaccactgccatgctgatcacagaagatgtgagagcaggcagtgacccatgcatagccagagagtttgatgcgacactttcgataattacaaagcagcatgtcttcacacaaagacataataggatagtgaggtctccagaagctgaagagagtccataaaagaaaaacgcagtactcatctacagtatatccaggatttacagcaccaaagaggtccagactggaacagcgaaactcagatctggtttcagtctcttgaaattttactcctctggcatcacatgaatccagcttctatctagaaatccagttgaaccacaggatctatcaattatctaggatcatttgtgtaatgaagagaacttaaggcagcttatcttgatcaaaattcaagtaccaggctttaggtaccatcagcctttaaccctttctgttgagaatatccaaatccaagcccatatgattttcagggggtctacagatgggccagttctggactggcacacagggtgctggacttccctcctcagtggatttcatcttcaaccagcccaccaaaacggagagggaaagaaagtggagagacag

SEQ ID NO: 254256 - DNA, 680 bp, Homo Sapiens
  misc_feature (44)..(44): n is a, c, g, or t
ggcaaccatgggatccagtgtgtgtccccccctcaggaatgtanccccacagtggccttcccttgctggtgggcagtgtatccctgatggcagggtacaagtacccattaatgaagggtctgcaacataaagccttaaaaagacacacactaagaaaactgtaaaaccttgaacattgttatttatattttttaaaatggaaaagatcactatgtttgttgtgctaaccacttatttgattctgttttgtggtggacatagatgattacgtttgagctttgtattttgtgaaaaccttaatgaaatgaattccaaagatagtcacgttgagcgtgaagactttttttcttacattcctgtcttatttttaccaacacgagcaggcattctgcgcttccactggactgagtatgggggagtcctgctcccctcctgtctcacaccttccccaggaggaaggcctcatgcactgcggttattgcatcatttcctagtgcttcatgtcattatcactggtggggaaacaaagctaaattttattaacaaagacaactctcagacctatataataggaggaggacgtccagaatccaacaaaattcaaacggagcccatgctgttctcctgaacaagatttgggctaaatacggcctgtttattgaggctgttttaatgatgct

SEQ ID NO: 254257 - DNA, 1784 bp, Homo Sapiens
  misc_feature (1566)..(1594): n is a, c, g, or t
acttccggtgagcctctggggcgtaccggcttggcgcggcggcagcggcagcggcggctgggagagcggtcggcggggtttcttcgttgcattgcctgagaggagcggagtctgccaggtggtgtccatcatgttctctttcaacatgttcgaccaccctattcccagggtcttccaaaaccgcttctccacacagtaccgctgcttctctgtgtccatgctagcagggcctaatgacaggtcagatgtggagaaaggagggaagataattatgccaccctcggccctggaccaactcagccgacttaacattacctatcccatgctgttcaaactgaccaataagaattcggaccgcatgacgcattgtggcgtgctggagtttgtggctgatgagggcatctgctacctcccacactggatgatgcagaacttactcttggaagaaggcggcctggtccaggtggagagcgtcaaccttcaagtggccacctactccaaattccaacctcagagccctgacttcctggacatcaccaaccccaaagccgtattagaaaacgcacttaggaactttgcctgtctgaccaccggggatgtgattgccatcaactataatgaaaagatctacgaactgcgtgtgatggagaccaaacccgacaaggcagtgtccatcattgagtgtgacatgaacgtggactttgatgctcccctgggctacaaagaacccgaaagacaagtccagcatgaggagtcgacagaaggtgaagccgaccacagtggctatgctggagagctgggcttccgcgctttctctggatctggcaatagactggatggaaagaagaaaggggtagagcccagcccctccccaatcaagcctggagatattaaaagaggaattcccaattatgaatttaaacttggtaagataactttcatcagaaattcacgtccccttgtcaaaaaggttgaagaggatgaagctggaggcagattcgtcgctttctctggagaaggacagtcattgcgtaaaaagggaagaaagccctaagtgaggactgttggctgattggaaaataataaaagaatcatttgcaacatcttggcttttagtcactggcactgacagggacgagcctcatcagagaatactctgttacttaagatttatttagagttacctaagaattattaagtttgacttggaagtggagcagcaggactttgtagttgtatgcttgatttggggaaagacaaagagctgtccctgagggcctgtagatagctgcctcctcacctcttccacgctttcagcttgaggggagctcccactgcctcagcaggagcaattctgcatccctaattctgtcaaaacctatgaaggtgactaaattgtctaacatgaagtgttctttctttttcttcatttatcctttcttttcctacatcaattgcataggtgtcagtctttggcctaaaaaaaggctttaaatagacatgtgttctataagtagtggctgtcccactactgtggctgcaatttaagtatttgacaaagaatgnnnnnnnnnnnnnnnnnnnnnnnnnnnnnaaaaacaccactcagaagaacctgatctgaatgagtttgcacttttattctcatttcatatggacataactggctccttagtgaacctgttcatagtgaaacaactccatggagaagcaaacatgtgaatgttagaatgaacaaatgctaaagagatgttcctctccttcttccctactccccgactccc

SEQ ID NO: 254258 - DNA, 867 bp, Homo Sapiens
ggctggtacggccggaatttgggatatcgtcgacccacgcgtcgggcagcgcggctgggagagcggtcggcggggtttcttcgcttgcattgcctgagaggagcggagtctgccaggtggtgtccatcatgttctcttacaacatgttcgagcaccctattcccagggtcttccaaaaacgcttactccacacagtaccgctgcttctctgtgtccatgctagcaggccctaatgacaggtcatgatgtggagaacaggagggaagataattatgccgacctcgggcctggaccaactcagacgacttaacatgctgttcaaactgaccaataagaattcggaccgcatgacggcattgtggcgtgctggagtttgtggctgatgagaggcatctgctacctcccacactggatgatgcaagaacttactcttggagagaaggcggctgatccaggtggagagacgtaaacattcaagtggccacatactccaaatttcaactacagagcctggactaacagagcaattcaacaaagccccaaaggcgaataagaaaacgcacaccacgaacatcgcaagcatgaccaccgaggaaggcagagacaacaaaacactaatgaaaagacactagacaaatgccgagtggactggcgaaccacaaaccgacaacgaacaaggaaccaaagaaagaagaaaacgacaacgtaggaaaatggagcaccgacaaggcgacaaagaacaggaaggaaccgacacaggaaggagatcaccacaacgagagaacaaacacagagacagtagaacatagggcacaccgcaaaccgagaccacgaacagaaccacaagaacaaccaggacaagaagca

SEQ ID NO: 254259 - DNA, 1168 bp, Homo Sapiens
catgatcccatgagtcacagctatcctctgtctttaagaatgactgttttatagcttacatggtacctgggaaattgctgacttgcagctgaaatgtatgaataccaaagaatttctatcacaatattcacagatctctgtatcagctctacttggaggtcaagcaggcttgggagagtatagactgctctgcctgccctagagtggaagcattgaacaaagccacaaaaaccccagagatcacagatctaacttttcaatggcccacaggaccaggttcaggacaggtaggacaccaggcaaaccacttgttcccttgcgcttcattgtgcaaaagctggtctgttcctctggccagaccctccttagtacaggatctcggaccacaaaccaaggagtctcgtggccttggattcccagaccctaggatggtatccctctgacagctggaaccaggcaagggggaacacacctcagcctcagagcagcctctggacactctccaggtaacatgaaaataacttgtgcaaacacagcccccatgccagaaagtccagtgccctaggaagggctatcctgaattctgaccctgatggccaaaggagaatgcagcaagacagtgtcaggtttggccaaatgtgaccctgctcagagctataccacttgaatactggcacaaaagaaaggaccaaggtaaagcaaatttatttgggaggaacaattcccttcaaaagtagatccctatctttaggagacaaaaggcaacactgtgatgaacccacaccccctagtttggggggccacaggcccaaccccactgctgtgggctctagcctcagtagccagatccaggtaaacctcagtttcaagaataaaggtgagccacagacatgcagcaccaccagagacaacaacaccccgtggcaagaagaccatgttctggactgtctccgtactgccacggtaaggcaggaggcatgctgtgaccccttgtgctccatgcccattgcacaggccagttcaattccctaccatctgccacccatgctcttctttgggactacaactctggccgaggtgggtaggcagcatatgttacattctaagtaaaacagctagagggtaaaacactccaatgccaatttacaaaaagggctctgtgttatcc

SEQ ID NO: 254260 - DNA, 1042 bp, Homo Sapiens
ggcctgggtggcgaattcggcacgagggatggctgcgcggtgctccacacgctggttgctggtggttgtggggaccccgcggctgccggctatatcgggtagaggggcccggccgcccagggagggcgtggtgggggcatggctgagccgcaagctgagcgtccccgcctttgcgtcttccctgacctcttgcggcccccgagcgctgctgacattgagacctggtgtcagccttacaggaacaaaacataaccctttcatttgtactgcctccttccacacgagtgcccctttggccaaagaagattattatcagatattaggagtgcctcgaaatgccagccagaaagagatcaagaaagcctattatcagcttgccaagaagtatcaccctgacacaaataaggatgatcccaaagccaaggagaagttctcccagctggcagaagcctatgaggttttgagtgatgaggtgaagaggaagcagtacgatgcctacggctctgcaggcttcgatcctggggccagcggctcccagcatagctactggaagggaggccccactgtggaccccgaggagctgttcaggaagatctttggcgagttctcatcctcttcatttggagatttccagaccgtgtttgatcagcctcaggaatacttcatggagttgacattcaatcaagctgcaaagggggtcaacaaggagttcaccgtgaacatcatggacacgtgtgagcgctgcaacggcaaaggggaacgagcccggcaccaaggtgcagcattgccactactgtggcggctcccggcatggaaaccatcaacacaggccccttttgtgatgcgttccacgtggtagaaaatgtggtggccgccgcctccatcatcataatccccctggggggggctgcagggggacccggacaagcccagccaaaaaaagccagtggaggatcccctgtggcctggcaggaaatcaaaggatggcccaaaccgggaagaatgcctgtgtgggaaaaaagggaaaatttttctttacgcg

SEQ ID NO: 254261 - DNA, 545 bp, Homo Sapiens
  misc_feature (200)..(497): n is a, c, g, or t
taatagcttactcttgtgagcgtattacaaatatgatcccatttactccttgctttatgaagtaggtaccattatttttcccttttacagaggatgaaagtgagatactagaagtttccaaacctagcgagtctcagtaagaagtttcacttcacaaacagataggagaaatgatagtggatcagaagcatgatttaaannnnnnnnnnnnnnnnnnnnnnnnnnnnnnnnnnnnnnnnnnnnnnnnnnnnnnnnnnnnnnnnnnnnnnnnnnnnnnnnnnnnnnnnnnnnnnnnnnnnnnnnnnnnnnnnnnnnnnnnnnnnnnnnnnnnnnnnnnnnnnnnnnnnnnnnnnnnnnnnnnnnnnnnnnnnnnnnnnnnnnnnnnnnnnnnnnnnnnnnnnnnnnnnnnnnnnnnnnnnnnnnnnnnnnnnnnnnnnnnnnnnnnnnnnnnnnnnnnnnnnnnnnnnnnnnnnnnnnnnnnnnnnnnnnnnnnnnnntaaatatattaattcaaaaaaattactggccgtcgttttccgtcgtgg

SEQ ID NO: 254262 - DNA, 1234 bp, Homo Sapiens
gaggacctggaggacctgtacagccgctacaagaagctgcagcaagagctggagttcctggaggtgcaggaggaatacatcaaagatgagcgaacctgatggtcatcggacaatttctggaggctgtggatcagaatacagccatcgtgggctctaccacaggctccaactattatgtgcgcatcctgagcaccatcgatcgggagctgctcaagcccaacgcctcagtggccctccacaagcacagcaatgcactggtggacgtgctgccccccgaagccgacagcagcatcatgatgctcacctcagaccagaagccagatgtgatgtacgcggacatcggaggcatggacatccagaagcaggaggtgcgggaggccgtggagctcccgctcacgcatttcgagctctacaagcagatcggcatcgatcccccccgaggcgtcctcatgtatggcccacctggctgtgggaagaccatgttggcggcggtggcacatcacacaacagctgcattcatccgggtcgtgggctcggagtttgtacagaagtatctgggtgagggcccccgcatggtccgggatgtgttccgcctggccaaggagaatgcacctgccatcatcttcatagacgagattgatgccatcgccaccaagagattcgatgctcagacaggggccgacagggaggttcagaggatcctgctggagctgctgaatcagatggatggatttgatcagaatgtcaatgtcaaggtaatcatggccacaaacagagcagacaccctggatccggccctgctacggccaggacggctggaccgtaaaattgaatttccacttcctgaccgccgccagaagagattgattttctccactatcactagcaagatgaacctctctgaggaggttgacttggaagactatgtggcccggccagataagatttcaggagctgatattaactccatctgtcaggagagtggaatgttggctgtccgtgaaaaccgctacattgtcctggccaaggacttcgagaaagcatacaagactgtcatcaagaaggacgagcaggagcatgagttttacaagtgacccttcccttccctccaccacaccactcaggggctggggcttctctcgcacccccagcacctctgtcccaaaacctcattcccttttttctttacccaggattggtttcttcaataaatagataagatcgaatccattta

SEQ ID NO: 254263 - DNA, 1053 bp, Homo Sapiens
  misc_feature (917)..(917): n is a, c, g, or t
  misc_feature (934)..(934): n is a, c, g, or t
ggggagatcatcccaggccacacagaggccggcttggtcactatggaggagataggcatcttggtggagaaggctcaggatgagatcccagcactgtccgtgtcccggccccagaccggcctgtccttcctgggccctgagcctgaggacctggaggacctgtacagccgctacaagaagctgcagcaagagctggagttcctggaggtgcaggaggaatacatcaaagatgagcaaaagaacctgaaaaaggaatttctccatgcccaggaggaggtgaagcgaatccaaagcatcccgctggtcatcggacaatttctggaggctgtggatcagaatacagccatcgtgggctctaccacaggctccaactattatgtgcgcatcctgagcaccatcgatcgggagctgctcaagcccaacgcctcagtggccctccacaagcacagcaatgcactggtggacgtgctgccccccgaagccgacagcagcatcatgatgctcacctcagaccagaagccagatgtgatgtacgcggacatcggaggcatggacatccagaagcaggaggtgcgggaggctgtggagctcccgctcacgcatttcgagctctacaagcagatcggcatcgatcccccccgaggcgtcctcatgtatggcccacctggctgtgggaagaccatgttggcaaaggcggtggcacatcacacaacagctgcattcatccgggtcgtgggctcggagtttgtacagaagtatctgggtgagggcccccgcatggtccgggatgtgttccggcctggccaagggagaatgcaccccgccatcatctttcatagaacgagattggatgcccatccgccaccaagaaaattccgatgcttcagacagggggcccgacaaggggaaggttcagnaggaatccctgcctggnaacctgcctgaaatcaccatggaatgggaatttggatccagaaatggccaattggcccaaggttaaatccatgggcccccaaaaccggaacccgaccccccccgggaaatcccgggccc

SEQ ID NO: 254264 - DNA, 190 bp, Homo Sapiens
aataaatactcaatatgcagattttccccttttttctcactggtacctactgcaatgcccagaagcactggctctccatgctgtggaacatgcccaacactacgctaggcaatgagagatactgatgagcaaaacacacttgtggcctcatggaatgaatggaaggagggagatagcacataagtatttc

SEQ ID NO: 254265 - DNA, 355 bp, Homo Sapiens
ccaaatggaacgatcaatgcaagtacttaagtagcaacttgcatccttctcattcaccagaaaatcatgtatcagttcaggagcatcaggtataagatgttcaaaatttctatagatggtatagatggccaaaacagcatttcttctaacatagctgtgtcgatgctccaaacatgcacgaatagctggcattaaaggttctagcaattctgcttctttcaatttgcaaagaaaacgaagagtagatcctcgaataaattcattaggatgttgaagatcctttctgtatgcatcacatacaaggatcatctcatgtaaaagtctcccatctggagttgactcgtgccgaattcct

SEQ ID NO: 254266 - DNA, 596 bp, Homo Sapiens
  misc_feature (43)..(83): n is a, c, g, or t
  misc_feature (166)..(300): n is a, c, g, or t
cccagcaggacggtaaagctgcggccattaaatggtaatcccnnnnnnnnnnnnnnnnnnnnnnnnnnnnnnnnnnnnnnnnntctgcttttttgtgcacttacaataagaaagagcactttcacagttattttatcaggcctgtcatgccaacagggtaacaggnnnnnnnnnnnnnnnnnnnnnnnnnnnnnnnnnnnnnnnnnnnnnnnnnnnnnnnnnnnnnnnnnnnnnnnnnnnnnnnnnnnnnnnnnnnnnnnnnnnnnnnnnnnnnnnnnnnnnnnnnnnnnnnnnnnnnnntgcattgtgaagaatctgcaattccagttctgggaaatcatcccaaaggaaatcatctgtgggatacgcagctattgatttaaagagcgagtactatggaccatcatgagctttgaaatcttgggtataacttgaagatttgttcacaggcacaatacgtttaaaaagcgacgtataaaagaatttattgcctgtagtcccagctactgaggatgccaccagcaaaccgagttacctccccactttgtgtaggtggcaaagaaggaacatccaatcggaaaaggcaatcaggtttt

SEQ ID NO: 254267 - DNA, 1242 bp, Homo Sapiens
  misc_feature (1033)..(1033): n is a, c, g, or t
cccccgcctcttggaggtagaaggcgtgtcagggcattgggctaaatccaggaggccccttgagatcccagccagatagggctccagacttcaacaactccctgggccagcatctagaggatgctcaagggaaaatggtaggtttccagtctggatgctgggggaccccaacccagggtgagaaactggctaggctgaaaccaatgtgccctaagcttccagaggctccgaagggcagagtgctttagcccatgccgcacagctggtcagaggcccagagtcccacttgtgaggctcttgcctgtcctgctgctgctactcctgtgctaatggggaacaggcaagggcagcaaggggagcccaggcggggagggtggggcttattagaggagacaagaaagtgcattgggtccgggctgggaggcaggaggctgtgctccagtcatgccactgcccgcaggaacttagattagcctttttccttctcaaggcctcagtttcccccatctgtcacatgagaagggtggacttgattctttgcaattccttctaccattaaggttctagggaaatagaaaaggatgaagccggcctcatggcctcatggcaaagaaagggctatgttagaaaagaaactcgcccctgagtgaatcggccatgggcccaaggggacactcagcccagtggacctgaactctgccctgcagcagggggtcccacccaccctctgcccattgcgggtcaggccggcccaggcatgagggaaggcacttgggggataagtggggaagggaagcaggaggggacccgagtctggtttggcatcgaagtccctctgctcatggtttggggaagcaacgtagacaaaggggtgagactttgctcctaggtgtggctcccaggtccaaagcctctcctaggcccacaactcctgtggtgacgctgccacataggcctgcgggctccccactggtgttggcacattgaacataagttactcgggacctgaggcagcccaggacagcagtctgtntacgtggccctgggccacaccatttgtcacaagatggtggggcccctggcagcagaatcccgggtgtctacgcagtgcagggccaccttggggctggagccaggcctccgggggtaggtgccctcccgcaccaggcgccggcaccgcacatcctggcccacgctgacgctctgcagtgccgggaggtggaggagcagcgcctcaggcag

SEQ ID NO: 254268 - DNA, 727 bp, Homo Sapiens
ggcaggccgtctccccggcattctggaaggtaaagaggcctttgttctcaggcccagtgggattaaatccagaagcccccttggagatcccaggccagatgaggctccagaactgcagcaactccttggggcagcatctagaggatgctcaggggaaaatgggtaggttcccagtctggatgctgggggaccccaaaccaagggtgagaaactggctaggctggaaccaatgtgccctaagcttccagaggctccgaagggcagagtgacttagcccatgccgcacagctggtcagaggcccagagtcccacttgtgaggctcttgcctgtcctgctgctgctactcctgtgctaatggggaacaggcaagggcagcaaggggagcccaggcggggagggggggcattagaggagacaagaaagtgcattgggtccgggctgggaggctccttctcaaggcctcagccccatctgtcacatgagaagggtggacttgattctttgcaattccttctaccattaaggttctagggaaatagaaaaggatgaagcgggcctcatggcctcatggcaaagaaagggctatgttagaaaagaaactcgcccctgagtgactgggccatgggcccaaggggacactcagcccagtggacctgaactctgccctgcagcagggggtcccacccaccctctgcccattgcgggtcaggccggcccaggcatgag

SEQ ID NO: 254269 - DNA, 463 bp, Homo Sapiens
ttccttctttactttgacagcagcccgaagttttacagaaagtcttgcatgcatcaattatgggcctgtatccagtgcaacggcacaggttaccaccaagggcatcagttaactgatccagagtgggctctgggtggttcctgagcagcgtgtagatggacatcaccatcccaggtgtgcagaagccacactgggtgccatgacacttggcaatcctctcctgaacaggatgaattctggtgtgggtgcttcctatgccttctactgtggtgacggcagcaccatacagagaacagatgggaatcagacaggcattggctgggtgatgccttatcctcttggtgatggggttgtatcgtaacatcatcactgaacaagcaccacagcctcctcctccacagccatacttagttcctgtgagtcgaagcttcttcctcaaataaggcaacagcattgtttcagg

SEQ ID NO: 254270 - DNA, 1078 bp, Homo Sapiens
ctggggcctttctgtgcctgcaccagcgccaacaataacacgtactggtgcatgaggaccatcaatgagactcacaatttcctcttctgtgaatttgcaactggcttcctagagtactttgatctcaacacagacccctaccagctgatgaatgcagtgaacacactggacagggatgtcctcaaccagctacacgtacagctcatggagctgaggagctgcaagggttacaagcagtgtaacccccggactcgaaacatggacctgggacttaaagatggaggaagctatgagcaatacaggcagtttcagcgtcgaaagtggccagaaatgaagagaccttcttccaaatcactgggacaactgtgggaaggctgggaaggttaagaaacaacagaggtggacctccaaaaacatagaggcatcacctgactgcacaggcaatgaaaaaccatgtgggtgatttccagcagacctgtgctattggccaggaggcctgagaaagcaagcacgcactctcagtcaacatgacagattctggaggataaccagcaggagcagagataacttcaggaagtccatttttgcccctgcttttgctttggattatacctcaccagctgcacaaaatgcattttttcgtatcaaaaagtcaccactaaccctcccccagaagctcacaaaggaaaacggagagagcgagcgagagagatttccttggaaatttctcccaagggcgaaagtcattggaatttttaaatcataggggaaaagcagtcctgttctaaatcctcttattcttttggtttgtcacaaagaaggaactaagaagcaggacagaggcaacgtggagaggctgaaaacagtgcagagacgtttgacaatgagtcagtagcacaaaagagatgacatttacctagcactataaaccctggttgcctctgaagaaactgccttcattgtatatatgtgactatttacatgtaatcaacatgggaacttttaggggaacctaataagaaatcccaattttcaggagtggtggtgtcaataaacgatctgtggccagtgtaaaaga

SEQ ID NO: 254271 - DNA, 777 bp, Homo Sapiens
aagaaactccgcaagctgctcaagcgcctgcagaacaacgacacgtgcagcatgccacgcctcacgtgcttcacccacaacaaccagcactggcagacggcgcctttctggacactggggcctttctgtgcctgcaccagcgccaacaataacacgtactggtgcatgaggaccatcaatgagactcacaatttcctcttctgtgaatttgcaactggcttcctagagtactttgatctcaacacagacccctaccagctgatgaatgcagtgaacacactggacagggatgtcctcaaccagctacacgtacagctcatggagctgaggagctgcaagggttacaagcagcgtaaccccccggactcgaaacatggacctgggacttaaagatggaagaagctatgatcaatacaggggacaactgtgggaaggctgggaaggttaagaaacaacagacgtggacctccaaaaacatagaggcatcacctgactgcacaggcaatgaaaaaccatgtgggtgacgtccaacagacctgtgctattgcccacgaagcctgagaaagcaagcacgcactctcagtcaacatgacagattctggacgataacccagacgagcacagataacttccagaagtccattttagaccctgcttttgctttggattatacctcagcatgctgcacaaaatgcatttttgccggatccaaaagtcaccactaacccctcgccccagaaacctccccacaggaaaaaccggaaaaaaacccaaccg

SEQ ID NO: 254272 - DNA, 1019 bp, Homo Sapiens
  misc_feature (696)..(696): n is a, c, g, or t
aagtagcgaggcctgggtggcgaattcggcacgagggtccgcagtcgctccatccgctcagtggccatcgaggtggacggcagggtgtaccacgtaggcctgggtgatgccgcccagccccgaaacctcaccaagcggcactggccaggggcccctgaggaccaagatgacaaggatggtggggacttcagtggcactggaggccttcccgactactcagccgccaaccccattaaagtgacacatcggtgctacatcctagagaacgacacagtccagtgtgacctggacctgtacaagtccctgcaggcctggaaagaccacaagctgcacatcgaccacgagattgaaaccctgcagaacaaaattaagaacctgagggaagtccgaggtcacctgaagaaaaagcggccagaagaatgtgactgtcacaaaatcagctaccacacccagcacaaaggccgcctcaagcacagaggctccagtctgcatcctttcaggaagggcctgcaagagaaggacaaggtgtggctgttgcgggagcaaaagcgcaagaagaaactccgcaagctgctcaagcgcctgcagaacaacgacacgtgcagcatgccaggcctcacgtgcttcacccacgacaaccagcactggcagacggcgcctttctggacactggggcctttctgtgcctgcaccagncgccaacaataacacgtactggtgcatgaaggaccatcaatgagactcacaattttcctctcctgggaattttgcaactggcctccctaaagtacctttgatctcaacacaagaccccctacccacctgatggaatgccagtgaacacccctggaaaaggggatgttcttccaaccaagctaacccgttacaaggttcactgggaaccttgagggaaccttggcaagggttttaacaagccaggggggaaccccccccggaaccttccaaaaaattggggaaccctgggggacctttaaaaagaagtgggggggaaaagccct

SEQ ID NO: 254273 - DNA, 353 bp, Homo Sapiens
ctcctccgttccttgggtcccgtcgtctgtgatactgcagcgcagccatggcagaaccgcagcccccgtccggcggcctcacggacgaggccgccctcagttgctgctccgacgcggaccccagtaccaaggattttctattgcagcagaccatgctacgagtgaaggatcctaagaagtcactggatttttatactagagttcttggaatgacgctaatccaaaaatgtgattttcccattatgaagctttcactctacttcttggcttatgaggataaaaatgacatccctaaagaagatgaatagcctgggcgctctccaggagttaccacaatggcttcagaccctcgg

SEQ ID NO: 254274 - DNA, 1012 bp, Homo Sapiens
aagcaagctggtacccggcccggaatttcgggattatcgtcgaaccacgcgtcggggccgaggcgtagtgtgggtgactcctccgttccttgggtcccgtcgtctgtgatactgcagcgcagccatggcagaaccgcagcccccgtccggcggcctcacggacgaggccgccctcagttgctgctccgacgcggaccccagtaccaaggattttctattgcagcagaccatgctacgagtgaaggatcctaagaagtcactggatttttatactagagttcttggaatgacgctaatccaaaaatgtgattttcccattatgaagttttcactctacttcttggcttatgaggataaaaatgacatccctaaagaaaaagatgaaaaaatagcctgggcgctctccagaaaagctacacttgagctgacacacaattggggcactgaagatgatgcgacccagagttaccacaatggcaattcagaccctcgaggattcggtcatattggaattgctgttcctgatgtatacagtgcttgtaaaaggtttgaagaactgggagtcaaatttgtgaagaaacctgatgatggtaaaatgaaaggcctggcatttattcaagatcctgatggctactggattgaaattttgaatcctaacaaaatggcaaccttaatgtagtgctgtgagaattctcctttgagatttcagaagaaaggaaacaatgtgattcaagatatttacataccagaagcatctaggactgatggatcactgtcccgattcaaattattcttcagtccatttccccttcctatttcagctgttccttttcacctaactgttcagtcattctggttttcaagcagtgctttatctcatgtccttgaatatagttgtgtaactttattttttaggtaataattagaacagttcccttcagaggctgcatttgccttcttctgccacctaaatattacttcccttcaaatctgcctttgaatcatcattttt

SEQ ID NO: 254275 - DNA, 1184 bp, Homo Sapiens
  misc_feature (29)..(29): n is a, c, g, or t
  misc_feature (34)..(34): n is a, c, g, or t
  misc_feature (58)..(58): n is a, c, g, or t
  misc_feature (88)..(88): n is a, c, g, or t
  misc_feature (95)..(95): n is a, c, g, or t
  misc_feature (142)..(142): n is a, c, g, or t
  misc_feature (151)..(159): n is a, c, g, or t
cagtccctggaataaaagttgtgtaaacnttaanttttcagggtaataattagaacangttccccttccagaggcctgcatttgcccnccttccngcccaccctaaatattacttccccttcaaatcctgccctttgaatcntcatttttnnnnnnnnnttaacatgtttttgttgtagttatcttctggggtttcaattcctcagaaacaacttttttcacaacggaaaggaaagaacactagtgttctttcagtaaagtacaaagtgtttattttacaaaagagtaggtactcttgagagcaattcaaatcatgctgacaaggatactgatagaaaaagtgatttcttcttattataaagtacatttaaagttcaaggactaaccttatttatttgggaaaggggaggaggaaggaaatgatatggtacccagacactgggctaggctgcaactttatctcatttaatactcccagctgtcatgtgagaaagaaagcaggctaggcatgtgaaatcactttcatggattattaatggatttaagagggcatcaatcagctcaactcaagatttcataatcatttttagtatttagattgtgcctcaaagttgtagtacctcacaatacctccactggtttcctgttgtaaaaaccttcagtgagtttgaccattgtgctcttggctcttgggctggagtaccgtggtgagggagtaaacactagaagtctttagtacaaaactgctctagggacacctggtgattcctacacaagtgatgtttatatttctcataaagagtcttccctatcccaaggtcttcatgatgccagtagccatatatgataaattatgttcagtgataacttagttatcagaaatcagctcagtggtcttccccgccatgattcacatttgatgagtttttaaaaatcaaagtgattttgaaaatctctaatggctcagaaaataaaaacatccagtttgtggatgactatatttagatttctctagactctagtggaagacctttggaaaggccatgccaaccgtgcttgtactgctagaagcactttatgtttcctttttgggtgaaatggatttatgtgagtgctttaaacaaatagcaatacttatagactgaaataaaatgaaacttcaaataagactatgtttaatttgt

SEQ ID NO: 254276 - DNA, 423 bp, Homo Sapiens
  misc_feature (249)..(249): n is a, c, g, or t
gcacgagtgcgcttccactacgacgaggtgcgcggcctggtgccgaccaacgccatcttcatcacggtgctccgcgaccccgcccgcttgttcgagtcctccttccactacttcggggccggtggtgcccctcacgtggaagctctcggccggcgacaagctggaccgagttcctgcaagacccggatcgctactacgaccccaacggcttcaatggcccactacctccgaaacctggctcttcttcgnacctgggctatgacaacagcctgggaccccagcagcccgcaggtgcaggagcacatcctggaggtggagcgtcgcttccacctggtgctccttcaagagtacttcgacgagtcgctggtgctgctgaaggacctgctgtgctgggagctggaggacgtgctctacttcagctcc

SEQ ID NO: 254277 - DNA, 673 bp, Homo Sapiens
  misc_feature (85)..(85): n is a, c, g, or t
cacccaatcaggcagtcagaaggcgcggcagggggtgatgtgggtggaggtagtgcttcttggcattctcaccgcagcctgggtnccgggtgccattctgacctcagccatgcagggtcgggggatgcgatggggcgctgcacgggctctcagaggcccctcacctatggccatggccttgactgtgggggcctctgtccaccgatgatctcccttcatcccctacaggtgggccggtccagggtggtgggggcacagtggacccgggcagtgaccacagggtcatgacccgcggcccccgcagacggactgcatgctgttcccccacatctccccctgtgaagtgcgcgtgctcatgctcctgtactcgtccaagaagaagatcttcatgggcctcatcccctacgaccagagcggcttcgtcagtgccatccggcaggtcatcaccacccgcaagcaggtgtgccagccaagcacagcccctctggggacagagggggattagaccccactgccctggttgggcagccagacttggtgtgggcggagtgtgatgcgatggctggagcaaggagctgcaggggagcccggaggatgccgggcgggttcccaccagggctccatggaaaagcggccactgggcggctctgcagggctggagggtgggtcttgg

SEQ ID NO: 254278 - DNA, 1417 bp, Homo Sapiens
aagtagcgaggcctgggtggcgaattcggcacgaggctggcctgccagcccccgaggcccgcagcctccgcggatccgggcccgctcggcccctcccatggaaggtgctcgggtcttcggggcactgggtcccatcggtccctcctcacctgggctcaccctcgggggtctggccgtgagcgagcaccggctcagcaacaagctgctggcttggagcggcgtcctcgagtggcaggagaagcgcagaccctactctgactccactgcaaagctgaagcggaccctgccctgccaagcctacgtgaaccaaggcgagaacctggagaccgaccagtggccgcagaagctgatcatgcagctgatcccgcagcagctgctgaccaccctgggccccctgttccggaactcccagttggcacagttccacttcaccaacagagactgcgactcgctcaaggggctctgccgcatcatgggcaacggcttcgcgggctgcatgctgttcccccacatctccccctgtgaggtgcgcgtgctcatgctcctgtactcgtccaagaagaagatcttcatgggcctcatcccctacgaccagagcggcttcgtcagtgccatccggcaggtcatcaccacccgcaagcaggcagtgggacctggtggtgtcaactcaggcccagtccagatcgtcaacaacaagtttctggcatggagtggtgtcatggagtggcaggagcccaagcctgagcccaacagtcggtccaaagaggtggctgccatcccacgtctacgtgaaccagggggagatcctgaggaccgagcagtggccaaggaagctgtacatgcagctcatcccgcagcagctgctgaccaccctagtgccgctgttccggaactcgcgcctggtccagttccacttcaccaaggacctggagacactgaagagcctgtgccggatcatggacaatggcttcgccggctgcgtgcacttttcctacaaagcatcgtgtgagatccgcgtgcttatgctcctgtactcttcagagaagaaaatcttcattggcctcatcccccatgaccagggcaactttgtcaacggcatccggcgtgtcattgccaaccagcagcaggtcctgcagcggaacctggagcaggagcaacagcaacgagggatgggggggtagtggttaccccgggctgggcccctccaggagtcacagatgaggcccccgcagagactgtgcttgggagcctgtggccagcagcccccactgcacccctgcccccaggtgacacgcttctgagcaggggcccctggggacttcaactgcccagcaacatggaggatggtgtcctgaggcctccaaggacggtccccacccctctacgtttccccaataaagccttttaaaaacctgaa

SEQ ID NO: 254279 - DNA, 989 bp, Homo Sapiens
  misc_feature (666)..(666): n is a, c, g, or t
  misc_feature (827)..(827): n is a, c, g, or t
  misc_feature (877)..(920): n is a, c, g, or t
tgggtggcgatttcggcacgagggcaagagaaacccaaacctgcctcagtggatgccaacaccaagctgacgcggtcactgccctgccaggtctacgtgaatcatggcgagaacctgaagacggagcagtggccccagaagctgatcatgcagctcatcccccagcagctgctgaccaccctgggccctttgttccggaactcaaggatggtccagttccatttcaccaacaaggacctggagtctctcaaaggcctctaccgcatcatgggcaacggcttcgcgggctgcgtgcacttcccccacacggcgccctgtgaggtgcgcgtgctcatgctcctgtactcgtccaagaagaagatcttcatgggcctcatcccctacgaccagagcggcttcgtcaacggcatccggcaggtcatcaccaaccacaagcaggtccagcagcagaagctggagcagcagcagcgaggaatggggggacagcaggcacccccagggctggggcccattctggaggaccaagccaggccctcacagaatctgctccagctccgcccaccgcagccccagcctcagggtaccgtaggggcctctggggccacggggcagccccagccccaaggtactgcccagcccccgccaggtgcccctcaaggccctccntggagcagcttctggcccacccccctcctggacccatccttcggccccaagaaccctgggggccaaccctcagctgcgaaggcctcctcctcaacccaccaccggcggaaagactgggggtgccccccaaccccaggggctcccctccaccaacctccagncaacccaggggggctcctgggggctggctggccttccgcccggaccaaannnnnnnnnnnnnnnnnnnnnnnnnnnnnnnnnnnnnnnnnnnnaaaattcccgtggaattccaccccaacccttgggccccaagggcccccgggggcccccggcaacaaaat

SEQ ID NO: 254280 - DNA, 539 bp, Homo Sapiens
gggaagctgtacatgcagctcatcccgcagcagctgctgaccaccctagtgccgctgttccggaactcgcgcctggtccagttccacttcaccaaggacctggagacactgaagagcctgtgccggatcatggacaatggcttcgccggctgcgtgcacttttcctacaaagcatcgtgtgagatccgcgtgcttatgctcctgtactcttcagagaagaaaatcttcattggcctcatcccccatgaccagggcaactttgtcaacggcatccggcgtgtcattgccaaccagcagcaggtcctgcagcggaacctggagcaggagcaacagcaacgagggatgggggggtagtggttaccccgggctgggcccctccaggagtcacagatgaggcccccgcagagactggtgacacgcttctgagcaggggcccctggggacttcaactgcccagcaacatggaggatggtgtcctgaggcctccaaggacggtccccacccctctacgtttccccaataaagccttttaaaaaccc

SEQ ID NO: 254281 - DNA, 636 bp, Homo Sapiens
  misc_feature (19)..(19): n is a, c, g, or t
  misc_feature (135)..(135): n is a, c, g, or t
  misc_feature (149)..(150): n is a, c, g, or t
ggaatgctgggtcggaacncagctcaaataaaagaaataacccctataatgaaattcatagttgaaccagtaatcagcactgctaaaaggaatggggtatcgggcagggactgtaaccaaacatctattcactanatccagtaaaaaanntgaattcttgaactttgtttctggatccagcagctctattatttgcaaagacaagataatccatccatatcttctgtactatatcacatctcatagccacccctaatgctgcctcatatgcctccactgtttctttaatacttgattgaagaggatgacaaaggcagtaaatcagccacaaataaggaacttggtggttaaacatatcatcatcaaaattccctttacataaacgagatggaatgtcaattggtcctggaatatttaagagataccgaaacagatccaagttattatacttctcaaaccccggtttaaagaaggatgcaataaatttccgcaaaaatggaagaagattatcgcctcgattctgtaagatgaagaatttgcacatatgataaaaaacctctgcattctgaggatttcaaatgcagtaagccacactgctctggctttgtcatgctgatttgtttgcaaatataatgc

SEQ ID NO: 254282 - DNA, 614 bp, Homo Sapiens
  misc_feature (18)..(18): n is a, c, g, or t
  misc_feature (22)..(22): n is a, c, g, or t
  misc_feature (31)..(31): n is a, c, g, or t
  misc_feature (72)..(73): n is a, c, g, or t
  misc_feature (91)..(91): n is a, c, g, or t
  misc_feature (150)..(150): n is a, c, g, or t
  misc_feature (182)..(182): n is a, c, g, or t
  misc_feature (197)..(197): n is a, c, g, or t
gcggcatactgacaaaanacgnccaaagggngaatgctgggtctttggaacacagctcaaattaaagaaatnnacccctattatgaattcnatagttggaccagtatcaagcactgctaaaagaaatggggtatcgggcagggactgtanccaacatctattcactaatccagtaaaaaatntgaattcttgaactntgtttctggatccagcagctctattatttgcaaagacaagataatccatccatatcttctgtactatatcacatctcatagccacccctaatgctgcctcatatgcctccactgtttctttaatacttgattgaagaggatgacaaaggcagtaaatcagccacaaataaggaacttggtggttaaacatatcatcatcaaaattccctttacataaacgagatggaatgtcaattggtcctggaatatttaagagataccgaaacagatccaagttattatacttctcaaaccccggtttaaagaaggatgcaataaatttccgcaaaaatggaagaagattatcgcctcgattccaaatgcagtaagccacactgctctggctttgtcatgctgatttgtttgcaaatataatgc

SEQ ID NO: 254283 - DNA, 1192 bp, Homo Sapiens
  misc_feature (106)..(173): n is a, c, g, or t
aatacctggggccatctccctcaggaggccaccctttgcctttcccgagatctttgttttttgtcttttttctgagatggagatttgctcttgttgcccagggtgnnnnnnnnnnnnnnnnnnnnnnnnnnnnnnnnnnnnnnnnnnnnnnnnnnnnnnnnnnnnnnnnnnnnaaaacaaaagtcccaattaagaaccttcgaactctgttttgaggcaaaggggagtagttcttggtaggtgcaggaatagtagtgtcatttggaatactggtcatctttctgacatcacagtagaaaccaaaccttggatttagattcaaaaggagggaaatgggtcttttcatcaaggcaactccccttctccaagtcacttacatcatagataaattttagcttcccagtaactgagggatttgtttcctaacgccattggaggccttcatccctctctacgataaggttgcagaaatgggaagagctacccgtggttgcttttgattacccttaggaagtgagacagtgtttttgaaaatatgtatttctcccatttctccctctccttccctgacacttctctgggctgcacagcagaaacgttggtaaaagggcagtttggtttcaacacagcagacctgatatgggatcccttagccactttagtcaaacagccctgacagagtctataattgagttcaggccccccaccttgcctaataactgcaaatcgcatgttcagccagcagcctcctaagcccaccttcctcccccattagagaacacccatccctaggtgctctccaggctgtgtcattggcagggcttcacatgcaggaggcctctctcaggtgagtccaggttaaactgttgagttgtggcttcaacagatatgtatggcatgctgggatgtgccaggtgcctgcgttgtgccagttgctggagaggtagtgtgagcagagcagctgaaatcttgccatcaagcaaccctcattctcatgcctgtaggtttccattgctctgtcccaaggaacttgcgtgccagagatgccacaacttcatgtccctgtctcttgcaagctccccgtgctgccagtacttcatgccttggatgtggtccccaccagcccagtggctggggtcagcttaggctctgcttcccagtggacgggtgtgctaagggtttattataatgt

SEQ ID NO: 254284 - DNA, 387 bp, Homo Sapiens
gcggggtgaaagaggcgaagcgagagcggaggccgcactcccgcactgcgcagggaccgccttggaccgcagttgccggccaggaatcccagtgtcacggtggacacgcctccctcgcgcccttgccgcccacatgctcacccagctcaagggctttggaattctgtggccacactgcgaggagatcggttctgggtcggaggctacaggaagactcccactccctgaaatctggagtgaagaacgccgccatccagccaccattccaaggaggtgcaggagaacagctctgtgataccatttaacttgttgacattacttttatttgaaggaacgtatattagagcttactttgcgaaggaagaaggttggttccggtggactcgc

SEQ ID NO: 254285 - DNA, 1738 bp, Homo Sapiens
  misc_feature (868)..(876): n is a, c, g, or t
cttgccccagaagagattgaacacatcgggaagtagatcttaccccacaaaaactcagccaggttgtgtgaactatagagaggggtggtcagtgctttcttgggaccattttccgacaggagttcacattcaaatcatcccatccttgccaataagtgtcatccttccagtgaacactcagtggcccatggcattttataggcatacctcctatgggttgtcaccaagctaggtgctattggtcatctgctcctgttcacaccagagaaccaggctacaagagaaaaagcagaggccaagagtttgagggagaaatagtcggtgaagaaacccgtatccataaagacccgattccaccaaatgtgctttgagaaggataggccttcattaacaaaatgtatgtctggttccccagtagagctctactgcctcaacccaaggggatttttatgtctggggcagaaacactcaagttgattagaaagaccaggccaatgtcagggtacctggggccaaacccacctgctagtgtgaattaaagtactttaattttgttttctgtggaggtggaaaagcaacattcatagtctttggagaaatgcttagaaattcagcatttgacccttgctgtgaattaagcccaattaattcctgtttgtctacatatgatctgtctgtggcaaaagtttaatcagaggaaattctttcccagtctgtcgatttatgcctcagccacttgcctgtgctacaattcattgtgttacctgtagattcaggtaatacaaactatatataatcatcaagtaatacaaactaatttagtaatagcctgggttaagtattattagggccctgtgtctgctgtagnnnnnnnnnttcacatgatgcacttcaaattcaaataaaaatccttttggcatgttcccatttttgcttagctcaattagtgtggctaaccaagagataactgtaaatgtgacattgatttgctcttactacagcttcagtgattgggggaggaaaagtcccaacccaatgggctcaaacttctaaggggtactcctctcatccccttatccttctccctcgacattttctccctctttcttcccatgaccccaaagccaagggcaacagatcagtaaagaacgtggtcagagtagaacccctgaagtattttttaatcctacctcaaaatttaacagttacctgagagatttaacattatctagttcattgaatcattgtatgtggtcatggataaattgcacaccttggaattcgctttctaaaggaaatcaaatgaatggaggaactttccaaacaccactttacttgtgttatatagccaatataactatctctactgaatgtcattgaaaaactaaaaaattaaacttatttacacatcctactgtctagtaataagctgagtataagatgacagtgtaatctccctgaaagcaggagctactttctttcgtaatctatttccatccccatttccctgtcctgtctccctgtattcactcccaagctcagttctgaatagacattcctgctcagagatactcccaactgatgcagaaaccaaataaagaggtaggtattccaagaattcaaaaatggacattagtaaagaataaaacatttatttgagcttggaattatgtggatcatctatatggcctaaaaatatatggactatgcctgtgtacctgaatacgtatgtagtcag

SEQ ID NO: 254286 - DNA, 1194 bp, Homo Sapiens
  misc_feature (17)..(17): n is a, c, g, or t
  misc_feature (64)..(64): n is a, c, g, or t
  misc_feature (74)..(74): n is a, c, g, or t
agaaacaaaattaaagncttaaatcaacactaaccagtgggtttggcccccgggtaccctgaanatggcccggnccttcctaatcaactgaatgtttccgcccccagacataaaaaacccccctgggttgaaggcaataaaactcctacggggaaacccagacatacattttgttaaatgaaaggccctaacccttcctcaaaagccacatttggtggaaatcggggtctttaatggaaacggtttccttcaccgactatttcctcccctcaaactcttggcctctgctttttctcttgtagcctggttctctggtgtgaacaggagcagatgaccaatagcacctagcttggtgacaacccataggaggtatgcctataaaatgccatgggccactgagtgttcactgtgaggatgacactattggcaaggatggatgatttgtatgtgaactactgatgagaaatgctccagagtaggtactgaccagccttctctagtgttccagacacctgtctgagtttcttggggtaaagatcatttccagcatgtttttagtctcatctgggtgcaaggacaagtcgtgtatcttctgtatgctctcaacacactgtccttgcaatgtcttcacgtggaatcgtctcagaagtgtaacgaggatggctttcatcatcaccatggcgatgtactttcctgcacagccacggggcccaaagccaaatggctgaaagtacctataaggaacattctttgcaaaattttcaagagtaaattcattgggtttggggaaaaactcgagtctgtgcatccttccaatattcaggataatgtttgtcccctttttcactgggtagccatcgattacatcatcttctaaggctttgcgcatgaccaagtccacgacaggctggtaccgcatgctctcataaatgaagttttccatcacttttaatttttgtatagcatcaatctttatgtctctctcaccaataacagtctggatttcctttattattgcctcttcaacattagggtgctttgcaatgagaaatagcatgaagaacaaagagacagacatggtgtcaggagctgcgatcagcatttccaatatgcactggttcacattctctcttgtcaggtcaccacgtttctctgctaaaagcaactcagtggcaaagtccatacattcttcca

SEQ ID NO: 254287 - DNA, 482 bp, Homo Sapiens
  misc_feature (63)..(63): n is a, c, g, or t
cccacttgattgtcccacttgtgaggatgaccactatttggccaagggaatggatgattttgnatgtgaacctacttgatggagaaaatgctcccagagtgggtaactgaccagccttctctagtgttcccagacacctgtctgagtttcttggggtaaagatcatttcccagcatgtttttagtctcatctgggtgcaaggacaagtcgtgtatcttctgtatgctctcaacacactgtccttgcaatgtcttcacgtggaatcgtctcagaagtgtaacgaggatggctttcatcatcaccatggcgatgtactttcctgcacagccacggggcccaaagccaaatggctgaaagtacctataaggaacattctttgcaaaattttcaagagtaaattcattgggtttggggaaaaactcgagtctgtgcatccttccaatattcaggataatgtttgtcccctttttcactgggtagcc

SEQ ID NO: 254288 - DNA, 424 bp, Homo Sapiens
  misc_feature (401)..(401): n is a, c, g, or t
  misc_feature (407)..(407): n is a, c, g, or t
gaacactagagaaggctggtcagtacccactctggagcatttctcatcagtagttcacatacaaatcatccatccttgccaatagtgtcatcctcacagtgaacactcagtggcccatggattttataggcatacctcctatgggttgtcaccaagctaggtgctattggtcatctgctcctgttcacaccagagaaccagggctacaagagaaaaagcagaggccaagagtttgagggagaaatagtcggtgaagaaaccgtatccataaagacccgatttccaccaaatgtgctttgaggaaggatagggcctttcatttaacaaaatggtatgttctgggtttccccagtaggaggctctaactggccttcaacccaagggggattttttttatggtntggggngcagaaaacactcaagt

SEQ ID NO: 254289 - DNA, 542 bp, Homo Sapiens
aatccaagccttgtctaaaggcctcaagtgccccactgatattcttcagagcaaggtaagcacccaggctcaaaaaggtcagaggctcagagctattgatggccaaagcttgaagtagcagcttagtggcatcaagatgaaggccgtaatgaatcaaaaggttggccaagttgacaagaggaacatcttggtattgaagtggagctaaattcaaagccctctgaagacaggcaatagcaaaagtgctatttcctactgctctccagtatagtccagcttcattgagtatgagccagataggagcatttggcttattaatagcatgaaataagaaagatcgtgcatggtcatctggcaggctttcagatccatgcgaacctctaattctttgactaagtaggacagagtgtggctttttctgaagtcagttatggaacagtcaggggtttgggcctcttcttctgtagaataatcatcactgctgagttcgtggatcctgagtcctttgttttccggaggcagaaaatacgttggcaattccc

SEQ ID NO: 254290 - DNA, 427 bp, Homo Sapiens
aagccctgtctaaagccctcaatgccccactgatattcttcagagcaaggtaagccatttcccaggctcaaaaaggtcagaggctcagagctattgatggccaaagcttgaagtagcagcttagtggcatcaagatgaaggccgtaatgaatcaaaaggttggccaagttgacaagaggaacatcttggtattgaagtggagctaaattcaaagccctctgaagacaggcaatagcaaaagtgctatttcctactgctctccagtatagtccagcttcattgagtatgagccagataggagcatttggcttattaatagcatgaaataagaaagacccaatttcttcttctgggatagtatagttattaatacgggaaagcaaaatttttcgtgcatggtcatctggcattttggctttcagatcca

SEQ ID NO: 254291 - DNA, 457 bp, Homo Sapiens
tcaaatcagagtgatatcaatgattcggtcaagtcttctcccgtagcccattctattctctggatttggggcagggactctgatgcatatagggacaaacagcatattctatggcctaaaagagcagattgtacagaaagctaccctagagtccctgttggtggggaattgccaacgtattttctgcctccggaaaacaaaggactcaggcaagtggtgatggatttggcaaagcacctgattctgcatgattgtcatctaagcggttctttgagagcaccagccttggacttgaaaagttaagtctttatcttgaagtcacccaaactttgaaaatatgaatcttgttcctttttcttgtgccaggatccacgaactcagcagtgatgattattctacagaagaagaggcccaaacccctgactgttccataactgacttcggaaaaagccacact

SEQ ID NO: 254292 - DNA, 350 bp, Homo Sapiens
  misc_feature (149)..(168): n is a, c, g, or t
agggccaacagtaagtaaagctatgtggatatgaagataaaaaaacttctaagatgttataaggggtgtccaatcggcttccctgggccacactggaagaactgtcttgggccacacataaaatacactaatgatagttgatgagcttnnnnnnnnnnnnnnnnnnnngaactcacaatgttttaagaaagtttataaacttgtgttgagccacaggctggacaagcttgctgtaagagcttgagattgtgtaagaggtatctatataattttggaaagctaccaccataaatgctcagtgcagagataaaccctgagaagagaaagaagcaatactgtgtatcattaag

SEQ ID NO: 254293 - DNA, 1040 bp, Homo Sapiens
  misc_feature (884)..(892): n is a, c, g, or t
ggcctgggtggcgaattcggcacgagggagaactcgcgcgtctcccactacatcatcaacagcagcggcccgcgcccgccggtgccaccgtcgcccgcccagcctccgcccggggtgagcccctccagactccgaataggagatcaagagtttgattcattgcctgctttactggaattctacaaaatacactatttggacactacaacgttgatagaaccagtttccagatccaggcagggtagtggagtgattctcaggcaggaggaggcggagtatgtgcgagccctctttgactttaatgggaatgatgaggaagatcttccctttaagaaaggagacatcttgagaatccgggacaagcctgaagagcagtggtggaatgcggaggacagcgaaggcaagagagggatgattccagtcccttacgtcgagaagtatagacctgcctccgcctcagtatcggctctgattggaggtaaccaggagggttcccacccacagccactgggtgggccggagcctgggccctatgcccaacccagcgtcaacactccgctccctaacctccagaatgggcccatatatgccaggggttatcccaaaaccgagtccccaaggcctacgaccaaaacagccttggcttttggaggtccgcgaacctgggtaaaggggtagaaagattaatggtgaagggggccaggcgggaaagggggaatgcgaaatgggcaaacggagggtcacctttccccattcccgccaagggcccgcccggcgccgaatctaacgaaaagccgcggtgggggacatggcccgccgagcggacgcgcggagagagcgctatggtagacgcacgggacaagccagcgccagttttccctagnnnnnnnnnggcccgccgcacagcgagcggttctcgcccgcagtgcacctaaccccacacttcatgactaattaaaccggaggccgccatcgcccgtgggctgtcaatagtccgtggtgatacaaacaccgcccctgcttgcggcggccgcgatcgt

SEQ ID NO: 254294 - DNA, 946 bp, Homo Sapiens
ggcggacggtcggaattcccgggatatcgtcgaccacgcgtcgatgaagagcctctgcagcccttcccacagctgcaaggaaccaagggaggccagcaggtggacagggggcctcagcctgccctgaagtcccgccagtcagtggttaccctccagggcagtgccgtggtggccaaccggacccaggccttccaggagcaggagcagagggcagtgggcaggggcagggagagccctgcatttcctctacgcccaggttccggaaggtggtgagacaggccagcgtgcatgacagtggagaggagggcgaggcctgagccctcacacatgcccacgctcccctgacactgaagaggatccacaactccttggagaaacaccctcacgtctgttgccgcacacattcctctcagctccgccccatacccgtcactacaggctcacctcccacccctgtcactacgggctcaactcccatcccctgtcactacagcctcacctcctacagcttaagtcccaggcccatgtctgctgtccaagggctcaagactttctaacttgggatgtggtagagggactgtaggtacctttgggggctacagcagcctagtttgattctcaatctagccctgcgcatcactgtggacggaatgaaaacagagcttcccgtgcagaaaggtcaaggctccgacgccgggacacttgcgtgaacgtcttggtctctcccaggttcatttcctggaacagcagggcaaggaaccagtgggccccaatggaggagggacctcaggccagccgggaggtggagggtggagataggttgcacttcacctacaccggcaggcttagggtggccaacctctgggccagcgaatacagggaggggagaaaaatcttggtgtgggagaaagataagctaagtgtcggtgaaacacctttttcgacg

SEQ ID NO: 254295 - DNA, 1420 bp, Homo Sapiens
  misc_feature (55)..(89): n is a, c, g, or t
ggtcagggaaaggaatgcctgggagtgggggtgcaggcgggcagcactgagggannnnnnnnnnnnnnnnnnnnnnnnnnnnnnnnnnntgcagcttctcaagtgagactgacctgtctcacccagcagccactgcccagccgcactcccaggcaagggccagtgcgcctgctcctgaccactgcaatcccagcgcccaaggaaggccacttctcaactggcagaacttctgaagtttagaattggaattacttccttactagtgtcttttggcttaaattttgtcttttgaagttgaatgcttaatcccgggaaagaggaacaggagtgccagactcctggtctttccagtttagaaaaggctctgtgccaaggagggaccacaggagctgggacctgcctgcccctgtcttttccccttggttttgtgttacaagagttgttggagacagtttcagatgattatttaatttgtaaatattgtacaaattttaatagcttaaattgtatatacagccaaataaaaacttgcattaacaattggtggggtttgtgtcacagaatcgatcaaatcagtgtcgggctccttgctgtggctgtacacttgaaaatggaatggaatctccaggagtgagggtttccatggaagccagcactatccttggggacaccactgaccattaacagattaggaagatgtgcccattttacacacagagaagcagcccagagttcagtgccctgcttcagggcagagaccaagttggggagtcaggaactgaaagctgtcttagccagtttgggggcagggtggggtctcaggcctttgccccctggtggactccaagtataaggcatatatgaaggctagtgagctggggttgggatgggatggcagggtgaaaggtcagcatattcctgcctgcaaacccctcccccagccttgattgcaggtcagaaggctgcagggggatgtccctatgctggctgtgagttcccagccactcccttgtggtcaggccagcaagtctggtctgcaatggaacagtgaccaagaacgtgcctcctacctctctatcagagcccggggctaaaccgatgactctgtgccccagtgccagcactgtactttgaacagaagatctccaagacccatgcccgagtcatctgtgttctccatcacctgcaccaaacaagatctggcctagagcaaaggcttgggggtatttgcaacagtgagcttcggagggccaaggaaacaaagtgcccagtgctctgccctgtgctaccttcccctaaactggggttgggctactgcttccaccaaataacaactagaatttgaattgctgagcccaaggaaagaaaaacaaaacaggccaaggggaccaggccctcgtgccgaattcgccacccaggc

SEQ ID NO: 254296 - DNA, 556 bp, Homo Sapiens
  misc_feature (27)..(27): n is a, c, g, or t
  misc_feature (36)..(36): n is a, c, g, or t
tgaagaaagctgcaggggaaaaggggncctgggggnaaggggcggggcagggtccctccagtgctgcccgcctgcacccccactcccaggcattcctttccctgagttgtgtggttgccagtaagacgcagaaatgccacagggcatagggggcacagccaccaccacaagaggcttctggggagatcagggtaagaaaaggaaatgggtaccagtcttaggggtgggccagcgagcaagttcatagcttgcctccagcccctctggagtccacacttgggaacgggagctaatactgttcggcactgcagtgtgactccgcacatacaagtagggcttggaggggcagccccttctcctggaaaggggtgggggaagaagagggcttctcagaggctaaaccttctgccttcatggccccagcagaacacagggctgaagagttggagaggaaggctggaactgacccgagatccccatggctgcctgggactggagtcaaatgggaaccccagcctctttccacttggcctaggggatgccgcctctttctcca

SEQ ID NO: 254297 - DNA, 382 bp, Homo Sapiens
ccccccagcgccccccaaggaaagccccacctccctcaaccgggcaagaacctcctgaaagtttaagaattgggaattacctcccctacctagtgtccttttgggccttaaattttgtccttttgaagttgaatgccttaatccccgggaaagaggaacaggagtgcccagaccccccggtctttcccagtttagaaaaggctctgtgccaaggagggaccacaggagctgggacctgcctgcccctgtcttttccccttggttttgtgttacaagagttgttggagacagtttcagatgattatttaatttgtaaatattgtacaaattttaatagcttaaattgtatatacagccaaataaaaacttgcattaatttttt

SEQ ID NO: 254298 - DNA, 996 bp, Homo Sapiens
gccattggtagagcaaattccagtggtggtaaatcaagaactctaaagttcagtagagacaggtgttttgaatgtcaaggaaatcactgaggtagatttgggattacaataagacagctgccctgtgaggtcataagagcttttgtgaggcttactccaggggttctcagtcttggcattactgacattttgaattggatgtgttcttgctcctgatgtgtgggttgtgtactgtaggatgtttagctgcacccctgaccgctatgcataaatgccggtactgtcccccgaagttgtgacaaccaatgtctccagacattgccacatataacctggggaaaaaaattgccccaagttctgagccactgggtagaactaagggtagtttagggacaatgttaatgaaagcctctccaaagtcccatagtctttttaataattaattctgcagaatttgctctttaaaaacatatttttaaaggcaagaccagcctattcataaaaattgcagttgtttccacataagaactttggatatttaaagaaaaatgtaatttgaaatgaaaagcccttataaatccctttatactcatcagtcattataacagtaaatgaaatgaagaaaaagcatttggtctcactcttctgtgctgatctctttaactcctgaatatcctcaatttgatgagcccactatccaatgagactggatagttatcagcacaattgattcatggggttgagatgtttaaatctccttcatatttaaaatgatcgattttaaacttgatgatgttaattcttcttagttcctggtaagcagctcatcttagtgctaatgacaagttcagatgttaaaaaaatctttatcatttatggctaattttatcctttgccaaatcatatctattttcttcaagagagcaaaatacatttcctgattttaaagtattctatttttaaatatatcttcacattcctgtagtaaaagactgc

SEQ ID NO: 254299 - DNA, 485 bp, Homo Sapiens
  misc_feature (29)..(29): n is a, c, g, or t
  misc_feature (68)..(68): n is a, c, g, or t
  misc_feature (84)..(84): n is a, c, g, or t
  misc_feature (216)..(216): n is a, c, g, or t
tggaaaaggaaaaagcccccctataaaancccccttaaaacctccatccaggccattaataaacaggnaaaatggaaaatgganagaaaaaaagccatttggggtcctcacctcctcctgtgccggatcctccttaaacctccctgaatatcccctcaatttggatggagcccccaccatcccaatgagactggatagttatccagcacaattgantccatggggttgagatgtttaaatctccttcatatttaaaatgatcgattttaaacttgatgatgttaaatcttcttagttccctggtaagcagctcatcttagtgctaatgacaagttcagatgttaaaaaaatctttatcatttatggctaattttatcctttgccaaatcatatctattttcttcaagagagcaaaatacatttcctgattttaaagtattctatttttaaatatatcttcacattcctgtagtaaaagactgcaa

SEQ ID NO: 254300 - DNA, 578 bp, Homo Sapiens
  misc_feature (45)..(115): n is a, c, g, or t
aggggggccccggataatacgccaaactggcccaagtccggacgnnnnnnnnnnnnnnnnnnnnnnnnnnnnnnnnnnnnnnnnnnnnnnnnnnnnnnnnnnnnnnnnnnnnnnntttctattgacttaaagtgttgcacattggtttgtttattttttgctctttccaggatttttatttctttaaaataattcatacaaatggttacagtcacaaacatgattttaaccaaaatattgctagcctaccacatcagcaggacggcactggtgcaggcggggacgctgccaccctccacgtccccaggacagacgtcgatgggcagcgggcacgctgggcaccgcccaagcttttccttttggagctgcttcgtgatgccgtcttcatttggaacaagggggggttcatgccaaaattaggaaaaacagcctttgttttgtttttctaaattattctaaaaataagacaagcaggtagaaaaaacaatgcactgtgtggcataaaaagaaaaacgggaaggattcattgtcctgagaagtttgccaactgcctcattctggggcacgttccaacatac

SEQ ID NO: 254301 - DNA, 1054 bp, Homo Sapiens
gggtccaggaggtggctaaccacttgcatcacatgcagcagtccattgtggccgtgctcatcatgcctctggggcatggtgacattgtcatctgtgtgaagggtacactgtgccacagcaggaaaagcttgccagatgagaagctgggaaaggggaggctatgtatttcgtacaactgttgtcaggatatcaatggctgtcgcacaaagccctgcaggaatcttgtctgctggggcctgcattatgctaaccagagtgggaatcagcctcatttgcattgggccctgacaggcttcaatctgggacagcctccttgaagatgtctggagccagtgaggcgacgacgggatcattactgtactttaggaaaatggcgatgtgaagggccagattttgctttccatgcttgctgtgaattcggggtctactgtacaaacgatgcacagggtctccatcaccaggttgaggacctctgagctgaactgggctgctaggtgaattaagccatcaaggatgctggggaggaagggctggagcacgtgggtactctctgagactttcagttggtcacaataaccccagatggctctcactgcagaaattcgaactgatgggggctgtgtctcgtgaagaccactaactgttgcctgtaggaactgctggatcagttcaggggacatagcaacagtgaaccgactggcagcccaaagtgcccggcccaagaggaaaggagacactgagaggttgaggtctgcaaggatgacattggtcaggaacccatgcatgtcaaaatgaatcctgccatttttcacactgtcagtgatgatggccttcactgagcctagggcaagcatgcatgcctcatggatcttccaccagtgctcactgccactgtttttggtttgctcagcttcttgtaaatgtcgagtggctgcagcagccagggctgctgcactttcattcctggaaatctgtggccacagccaggcaacaagtcttgagctgctcggacgcgtgggtcgacgatatcccgagattccgggaccgtacccac

SEQ ID NO: 254302 - DNA, 710 bp, Homo Sapiens
  misc_feature (290)..(307): n is a, c, g, or t
  misc_feature (691)..(691): n is a, c, g, or t
atggaatgtctacatgatgtgacacagtctacaagtctctctacacatttctggaatccacagggctctggaaacagagaggtgttcatcagctcatatggtggcacagtatccctttaagtgaagtgcagctattatggtcattatttatcccagttagtagaaatattcatgtgtttgttacaggaggttgctgtgtttgattaaaatactgttcccaggcctcatcagggataagtaccatcaatatatgtttaagttttttactaaatcatttttaaatcgtggtnnnnnnnnnnnnnnnnnnacgtaaaatttgccatttgaactattttaagtatacagttcaatagcatcaaatacactcaaataactatgcagttttcacggccgttcattcattttgtgaaactgaaactctgtattcattaaacaacaactcctcatgcttcctccccttaatccctgacaatcactatctgtgtcgtgtctctgtggatttgactaagtacctcatgtgagtggaatcatacactatttgtccttttgtgactggtttatttcacttagcataatgtccttgatgtttatccatgttgtagcatgtgtcagaatctccttacttgaaatttttattttttcttacttcaacattcaaggggaatctgccttgactttttggagggccaantaggatttccattgtatgt

SEQ ID NO: 254303 - DNA, 822 bp, Homo Sapiens
  misc_feature (51)..(99): n is a, c, g, or t
gggaccaggcgcactccatctccatacattagcacactaatccgcggcccnnnnnnnnnnnnnnnnnnnnnnnnnnnnnnnnnnnnnnnnnnnnnnnnncctgtagcacacaccgtcccttccctagagcccaggatgtgattctgaatctacagtcagactggaccacctctcccccatgcccccagaatgtgcacaggggctccctcgcctacaatagatggattagattcctccctactcttcccacactgtcagagtctgactggtgtgaagttccggtggttttgtgtgtattttactaccagggtcggctagataaggaggagctttcattacatcctggaagtctgtcccccgcacacacgcacagacgtgctcccttcccccaacatctgatctaattctctctctgctttgctgaggctgtgctggcctaagaggattagagcatttgctaaacgggaccaggacaggcagggtcagagaacccgctgtggggagacccaaggccaggatggccactatggggcggcagaggaagcgagacacggagaggggtgtggagtgctcaggagaggcactcgtcggcttagcagcaatcaatgtgcacaaagtaaccatgaagttttattcatttttaaatttacaatgtccagctaagttatgagaattcaaaagaattgaactaggttcctggaaacaaaataaacagatcaactgaattctatgtgcaagacaaacatttttttaaaataaggaatttaaaataccatgtaaaatatcagtcaataataaaaatgaagtgcaagaaataaatct

SEQ ID NO: 254304 - DNA, 670 bp, Homo Sapiens
taattaaaagaaaggggccccccttccccatgccccaaagggccacaggtctcttggccacaaaaaggaataaatccctccacttctcccaacggtaaagtctaatggtgtaagttccggtgtttttgtggatttcactacaagggtgggaaaataagaaggagctttcttaacatcctgaaagtttgtccccggaaaaaagcaacagcggtcctcccttccccaaaatgtgataaaatcctctctctgcttgctgaggctggcctggcctaaaagaattagagcatttgctaaacgggcccaggacaggcagggtcagagaacccgctgtgggcagacccagggccaggatggccactagggggcggcagagaaagcgacacgcggagaggggtgtggagtgcttaggagaggcactcgtcggcttagcagcaatcaatgtccacaaagtacccatgaagttttattcatttttaaatttacaatgtccagctaagttatgagaattcaaaagaattgaactaggttcctggaaacaaaataaacagatcaactgaattctatgtgcaagacaaacttttttttaaaataagaaatttaaaataccatgtaaaatatcagtcaataataaaaatgaagtgcaagaagtaaatctacagaaagatgcaaa

SEQ ID NO: 254305 - DNA, 903 bp, Homo Sapiens
tttcgtcggtggtaggctgctaccatgaggttgaatcagaacaccttgctgctggggaagaaggtggtccttgtaccctacacctcggagcatgtgcccaggtaccacgagtggatgaaatcagaggagctgcagcgtttgacagcctcggagccgctgaccctggagcaggagtatgccatgcagtgcagctggcaggaagatgcagacaagtgtaccttcattgtgctggatgccgagaagtggcaggcccagccaggcgccaccgaagagagctgcatggtgggagatgtgaacctcttcctcacagatctagaagacctcaccttgggggagatcgaggtcatgattgcagagcccagctgcaggggtaagggccttggcactgaggccgttctcgcgatgctgtcttacggagtgaccacgctaggtctgaccaagtttgaggctaaaattgggcaaggaaatgaaccaagcatccggatgttccagaaacttcactttgagcaggtggctacgagcagtgtttttcaggaggtgaccctcagactgacagtgagtgagtccgagcatcagtggcttctggagcagaccagccacgtggaagagaagccttacagagatgggtcggcagagccctgctgatggctgggccttgtgggcagccactctgtgtgagcagggtgttgggcccatacacttcaaagaccagagccctgcactgggagagtgctcctggcccaggctgggaatcacctttcgaggcccttcagactctggcggggcttgctgtggcctccctccagctagtggtgtggctgagcagactccagcgccagggccagttcccttctcccctcccggccaaacccagacccagactctaggaagctggaatggagg

SEQ ID NO: 254306 - DNA, 626 bp, Homo Sapiens
cacacagagtggctgcccacaaggcccagccatcagcagggctctgccgacccatctctgtaaggcttctcttccacgtggctggtctgctccagaagccactgatgctcggactcactcactgtcagtctgagggtcacctcctgaaaaacactgctcgtagccacctgctcaaagtgaagtttcgtaagacagcatcgcgagaacggcctcagtgccaaggcccttacccctgcagctgggctctgcaatcatgacctcgatctcccccaaggtgaggtcttctagatctgtgaggaagaggttcacatctcccaccatgcagctctcttcggtggcgcctggctgggcctgccacttctcggcatccagcacaatgaaggtacacttgtctgcatcttcctgccagctgcactgcatggcatactcctgctccagggtcagcggctccgaggctgtcaaacgctgcagctcctctgatttcatccactcgtggtacctgctgggcacatgctccgaggtgtagggtacaaggaccaccttcttccccagcagcaaggtgttctgattcaacctcatggtagcagcctaccaccgacgaaatcgtcccccgcagaaaaaaaagg

SEQ ID NO: 254307 - DNA, 704 bp, Homo Sapiens
accccagcccccgagcccgactccgtacccttgagcatctccgcccaaagccaggccttcacctcgccatccccagcactaagcagatgtcgatcggtggaaaccatgctatagacgggcccatcatgggctaaagagaaatgcagaactgagtgagccaatcccacccaaagtcctgaagccagactccacaggtatacccaccttggaaagtcaccaccggcttcttaccctctttggcttctgagctcaaagcagaggacaagctgaagatggcaatctgcccgtaattgttgccagccgccagaaacttcccacatggtgagacgctctgggagaagatggtcatatggagccgctgcaaggcctggaacacctctgtctgacccagaggcaccgcgagcggcacagctcgctccatctccagaactacaagtcccagagtgctccgcgcgcgacgcaacctcacgaggccttacgtgcctagagcggttcctctccgtggcgccctaccgccttcggcgcgaaggtggctggtgcgtaccgtcccgaaccctaggagccgaggtgagcgccgcgaagacccccgacattaagaagtggtgtccaccgcagcccccttaagccggataccctcccccaccccgaggagcaagcctgccttccgccacgcgccgcccgtcttccgcgcccgcgcagaacct

SEQ ID NO: 254308 - DNA, 1669 bp, Homo Sapiens
  misc_feature (1270)..(1298): n is a, c, g, or t
  misc_feature (1323)..(1327): n is a, c, g, or t
  misc_feature (1329)..(1334): n is a, c, g, or t
  misc_feature (1337)..(1337): n is a, c, g, or t
  misc_feature (1341)..(1344): n is a, c, g, or t
  misc_feature (1348)..(1350): n is a, c, g, or t
  misc_feature (1352)..(1355): n is a, c, g, or t
  misc_feature (1360)..(1360): n is a, c, g, or t
  misc_feature (1363)..(1364): n is a, c, g, or t
  misc_feature (1366)..(1369): n is a, c, g, or t
  misc_feature (1372)..(1373): n is a, c, g, or t
tggctttaggcgggcacagccgcgaggttctgcgcgggcgcggaagacgggcggcgcgtggcggaagggttcgggacggtacgcaccagccaccttcgcgccgaaggcggtagggcgccacggagaggaaccgctctaggcacgtaaggcctcgtgaggttgcgtcgcgcgcggagcactctgggacttgtagttctggagatggagcgagctgtgccgctcgcggtgcctctgggtcagacagaggtgttccaggccttgcagcggctccatatgaccatcttctcccagagcgtctcaccatgtgggaagtttctggcggctggcaacaattacgggcagattgccatcttcagcttgtcctctgctttgagctcagaagccaaagaggaaagtaagaagccggtggtgactttccaagcccatgatgggcccgtctatagcatggtttccaccgatcgacatctgcttagtgctggggatggggaggtgaaggcctggctttgggcggagatgctcaagaagggctgtaaggagctgtggcgtcgtcagcctccatacaggaccagcctggaagtgcctgagatcaacgctttgctgctggtccccaaggagaattccctcatcctggctgggggagactgtcagttgcacactatggaccttgaaactgggactttcacgagggtcctcccggggccacacagactacatccactgcctggcactgcgggaaaggagcccagaggtgctgtcaggtggcgaggatggagctgttcgactttgggacctgcgcacagccaaggaggtccagacgatcgaggtctataagcacgaggagtgctcgaggccccacaatgggcgctggattggatgtttggcaactgattccgactggatggtctgtggagggggcccagccctcaccctctggcacctccgatcctccacacccaccaccatcttccccatccgggcgccacagaagcacgtcaccttctaccaggacctgattctgtcagctggccagggccgctgcgtcaaccagtggcagctgaacggggagctgaaagcccaggtgcctgggctcctccccagggctgctcagcctcagcctcaaccagcagcctgccgcgcctgagtgcaaggtcctgacagctgcaggcaacagctgccgggtggatgtcttcaccaacctgggttaccgagccttctccctgtccttctgatctctgacgacacccccagccagctcagggttttagagtgnnnnnnnnnnnnnnnnnnnnnnnnnnnnnacaataaagtttcaggctttttaannnnnannnnnnaancaannnnaaannncnnnnaaaanaannannnnaannccctccaggcatttatgtccgggggcggaaaaaaagggaatggaatgccccctggcctaaccggttcccggacccagttttcttggaacaaagggggaaaatctcccgggtccccctaaagggggggcgcaattattttttcgaaaagccagggctaacccgggatttaatggaaccggcgtgacaaaacgcggggaaattttacacccgccctaaaggagggcggggttttttcttttcgcgagaaccacaaaggatactctccctgggaagaactcatttctttctccgcaagg

SEQ ID NO: 254309 - DNA, 1529 bp, Homo Sapiens
gtgagcaggagaaatgtttacgttcacaaagaccagagcccacgaggggctgagcctgctgccaaaagtgcttttggtcagctgcccagctgtgccacagcgggcaccgaggcaggaggcgccagaggaacctttcacatgggctgcgggagcccgagcttcctgacccccagcccgggagcggagagggacgctggagcccaggccgaccgcacaccgccctggagcgacttcgcccaccagagtcggctgcccagcccgtgggtgctgcgctccgaaggcagagatgcagtgtggagggggggcgtcgggagcgagagagacaaggggtccgagggccccgcccggggcctgcccagcctgccccttgcgggcttctcgccgctgctgtccacccagctcttccactttggaaagggtgtctcctgggggggcaggcaggctggcctcttcagcccccacctggggctgcctctgcagggcccctccttctcggccttcagggaggcccaggccggacccagccctgtctttggaagcccacacttgctggcaaagaaggacggcggcccctggccaaccaggaaggcacaggcagggctgagtttgcatgacaggaggagctcgggctcggaggaaagcattttagacctgaggtatcgacgaagggtcaacagggatgaccaggagcaggacgccttgggcagtgacgccagtgacttcagcgacacctccacggaggacagtggcggcagctcagtagtgaaggtctaagccctcgagctgtgggttcgcgtcctgggttgcgtgcattcgtggaaagcggcgtagccgtgcgtgtgtgtgatggttccgtggctgcaaggaagggaaacagtctattatacatagccctgtatatatgtacaccaacatgaaacttttatttaacagacgtgtcctggtaaatatgatttttgtagctttttgtaaattatttaaagtgatgtaaaagatatttttggaaaatactgttgttcaattttgtagggtgttcctaactgcagttttctgtgttctgcatacaagtcttagcttaggaaacatttggttcttaccatcacagccaggttcacagaggctctgatgctttttggttgattgctggtgagaatggccggcggtggctgcagtggtagcctgaggaaggccaagctgccctccctgggaatcactcagatgccccaagatgtccgttgggaagctcccaggacagcactttttatacagaggacaccgcctcggccccacgtccttagaggccagagcacatctgaaaactgcaatcacagccgtccgctggaaaaacgtttcgaagcacagtggccagcgagcgagcacgtggctactccctgttgcatgtcaaatccacacagatgtcagcggcagctgctcggcagcccagccctgggcctgggtgggttcatgtccaatcttgttcgatcactagatgattctaacatcgaaataaacctctttttatatggcaa

SEQ ID NO: 254310 - DNA, 968 bp, Homo Sapiens
atgagccaccgcacctggcccttctaacgttttttcatcatagtcccaaaaaccaatactttacaagtggttttggaaaggcaccacttttgtggcatgttctggttgggagagggagtcacagttcctactccccccaccagctatgcttctgctctgagaaggtggttatttatacaaacatggacatactcactcccaagggctgatgagatgctgaattttctttgggggcattcattaattgtcccagctgcagcgactggagcaagtctggaagctgcctgtgctatagacacacccagatgtccctgggttctcatcctagggccttctttgcgttccaagtcaggggacactcgcttcaatgagaaagcaactgaattgaggctatggagaggtagggagagctgagttctgactccacctgtgcagaactctctgcccccatgtgtacctgggactggaacagactgtgaatatatgcagaagggttcaagaactctggtgtgtgacctataagaggcgcaggtctctctactggaaagtctaaggaacctgggggaggatgcacgaggctgaaaggatgcacctggcatatctctcactgtgctcttaccgcatcagcaacccccaacttttgggcctactctgccccccatgcgtgaataccctgcttggatgctgtgcttttccggtttgtctctaagcccctttctccagggcatgttggtttccctggcctctcagtgtcctaactggagcccagagtgccttgttctgagccaggagacggctgagcactggccctccacacctaagcgtcctttacattaacttattggtcttgtataacacctggtgccattgccaagtggctgtgtcctcagctacagagctggaattgtgtggggtttagtgctaaatacttcaataaagtctgttttttgtgattggctgaaaaaaaa

SEQ ID NO: 254311 - DNA, 242 bp, Homo Sapiens
acaagacaagggaccctttaatcacgattatgtgaggtattctattgtatataatctttctgtatagaatctccaatacatattatttgacataagcagcaaaagcataccaatagaaagaataatttgatcactacattgttctatttgtcagaaatgtcctttataaaaataaagacatactattaaatggtaaataataattaaaaataacgtgaaaatagtcaataaaaatgactatg

SEQ ID NO: 254312 - DNA, 644 bp, Homo Sapiens
  misc_feature (568)..(569): n is a, c, g, or t
tcaccatggaatgaaaaatattgttatacaatacattgatctgtcaaacttccagaaccatggtagccttcagtgagatttccatcttggctggtcactccctgactgtagctgtaggtgaatgtgttcttttgtgtgtgtgtctggttttagtgtcagaagggaaataaaagtgtaaggaggacactttaaaccctttgggtggagtctcgtaatttcccagactattttcaagcaacctggtccacccaggattagtgaccaggatttcaggaaaggatttgcttctctctagaaaatgtctgaaaggattttattttctgatgaaaggctgtatgaaaataccctcctcaaataacttgcttaactacatatagattcaagtgtgtcaatattctattttgtatattaaatgctatataatggggacaaatctatattatactgtgtatggcattattaagaagctttttcattattttttatcacagtaattttaaaatgtgtaaaaattaaaaccagtgacttctgttaaaaataaaagttgtagttttttatcatgctgaanntatatctgtaagttaaaagtgtctttttacctacgccatgaaatgtcagactggaaacccttgtgtgtgttaacc

SEQ ID NO: 254313 - DNA, 363 bp, Homo Sapiens
cccaaatagcaaatatacaaaatagaatacatacagcctttcatcagaaaataaaatcctttcagacactagagagaagcaaatcctttcctgaaaacctggtcactaatcctgggtggaccaggttgcttgaaaatagtctgggaaattacgaaactccacccaaagggtttaaagtgtcctccttacacttttatttcccttctgacactaaaaccagacacacacacaaaaaaacacattcacctacagctacagtcagggagtgaccagccaagatggaaatctcactgaaggctaccatggttctggaagtttgacagatcaatgtattgtataacaatatttttcattccatggtga

SEQ ID NO: 254314 - DNA, 1125 bp, Homo Sapiens
  misc_feature (110)..(110): n is a, c, g, or t
  misc_feature (667)..(667): n is a, c, g, or t
gaagggtacagccatggtccaaaaaccatatcccaggcaaaaagtacaattaaatcaaaaagagcagtgttctgttgccgggatcttctgacaagattaaaaaatcttanaatgcctcttcagtgaagccatctttggagttagtcattactctcaccttatctgtcatcttgacttcaacctgatattcctcttcttttggtccagaccctcaaattttaaaagtagcttcaagttaaggaaaggtcatttttccacagttcagttctctgaaaaacttccatctcccactgaaagtcacagtccaggagtgaagtaatcacatgctagaacatcagggccaattggaaagtcattatgaacacttgcattggtcgatcttatttatcaccacaagcctgaaaatgcaatgtcctgaaaaaggtgacctctctgtgcacacgtaatttttaaaaaggagagggtaatatgaaggggactgaggcttgatcaccaaaaatcagcacaatgaaaacaaacaataatgaataatgagcactagaattcaaattaccagatgtttcaaagagatggggtgccagttttcaattccgttttgaacaccacattacaaaagaactatttttaaaaataaaaaaggattgagggaaaagaacaaaatggaaangaatatctaaactgttgaatgaccccccgtttgttcctgataaacttcaatcacatcttcttcctccattcccagttcttttggagtatgattatcagcaattctctgaccctcaaagagaaacctgagtgaattcattggaacaccctgtctttgacagtatgattctttgagtttcttgagatgtgttgtcattttcactttgaagtgaatctcactgctatcctgtccaatgactttgagtttaatatattcaccttccttcttatcccccaagtcctcagttgaaggttttgcctcctggtcagacatgatgacggtggcttcacccgggggtctccgcacagcagcggcctcgggtaagcagaacctcgctccggggtttacaaatccttctcccttccccacagcacaacaccgcggctgcagtaacttccgctacgcctcgcgtcactccc

SEQ ID NO: 254315 - DNA, 829 bp, Homo Sapiens
  misc_feature (642)..(642): n is a, c, g, or t
gggggggaagggagaaggatttgtaaaccccggagcgaggttctgcttacccgaggccgctgctgtgcggagacccccgggtgaagccaccgtcatcatgtctgaccaggaggcaaaaccttcaactgaggacttgggggataagaaggaaggtgaatatattaaactcaaagtcattggacaggatagcagtgagattcacttcaaagtgaaaatgacaacacatctcaagaaactcaaagaatcatactgtcaaagacagggtgttccaatgaattcactcaggtttctctttgagggtcagagaattgctgataatcatactccaaaagaactgggaatggaggaagaagatgtgattgaagtttatcaggaacaaacggggggtcattcaacagtttagttttaaaatttgagggtctggaccaaaagaagaggaatatcaggttgaagtcaagatgacagataaggtgagagtaatgactaactccaaagatggcttcactgaagaaaaggcattttaagattttttaaaaatcttgtcagaagatcccagaaaagttctaattttcattagcaattaataaagctatacatgcagaaatgaataccacccactagagaccacctccatcccaattnaaaaatggcgggcccgcctctggccctctaagaaaactttcttaaaaccatttctttttggccgcgcggggcgcccactgaggggaaagggggaacatggggccactagaccggggtttccccaaggaaaaaacccctggggacaatggaactaaaggggctttggggattttctcccaccccaaac

SEQ ID NO: 254316 - DNA, 1542 bp, Homo Sapiens
  misc_feature (483)..(523): n is a, c, g, or t
gaaggcattaggatatgaacagcctgtgtataaagcaggctggtaccggtcggaattcccgggatatcgtcgaccacgcgtcggggagaaggattgtaaaccccggagcgaggttctgcttacccgaggccgctgctgtgcggagacccccgggtgaagccaccgtcatcatgtctgaccaggaggcaaaaccttcaactgaggacttgggggataagaaggaaggtgaatatattaaactcaaagtcatcggacaggatagcagtgagattcacttcaaagtgaaaatgacaacacatctcaagaaactcaaagaatcatactgtcaaagacagggtgttccaatgaattcactcaggtttctctttgagggtcagagaattgctgataatcatactccaaaagaactgggaatggaggaagaagatgtgattgaagtttatcaggaacaaacggggggtcattcaacagtttagatattcnnnnnnnnnnnnnnnnnnnnnnnnnnnnnnnnnnnnnnnnnaaaaatagttctttgtaatgtggtgttcaaaacggaattgaaaactggcaccccatctctttgaaacatctggtaatttgaattctagtgctcattattcattattgtttgttttcattgtgctgatttttggtgatcaagcctcagtccccttcatattaccctctcctttttaaaaattacgtgtgcacagagaggtcacctttttcaggacattgcattttcaggcttgtggtgataaataagatcgaccaatgcaagtgttcataatgactttccaacttggccctgatgttctagcatgtgattacttaactcctggactgtgactttcagtgggagatggaagtttttcagagaactgaactgtggaaaaatgacctttccttaacttgaagctacttttaaaatttgagggtctggaccaaaagaagaggaatatcaggttgaagtcaagatgacagataaggtgagagtaatgactaactccaaagatggcttcactgaagaaaaggcattttaagattttttaaaaatcttgtcagaagatcccagaaaagttctaattttcattagcaattaataaagctatacatgcagaaatgaatacaacagaacactgctctttttgattttatttgtactttttggcctgggatatgggttttaaatggacattgtctgtaccagcttcattaaaataaacaatatttgtaaaaatcatactaatgcttattttattttaattgtatagaaagaaaaaaatgcctaaaataaggttttcttgcataaatactggaaattgcacatggtacaaattttttcttcattactgtacagtgatgatgttaatgactttgaagcactgaaagttactgaagtgccttctgaatcaaggatttaattaaggccacaatacctttttaatactcagtgttctgtttttttaaaaacttgatattcctgtatggtgcatatatgatacagttacctaatcatgttgaataaatgggcatgcc

SEQ ID NO: 254317 - DNA, 1923 bp, Homo Sapiens
  misc_feature (673)..(729): n is a, c, g, or t
  misc_feature (1329)..(1329): n is a, c, g, or t
  misc_feature (1337)..(1337): n is a, c, g, or t
  misc_feature (1719)..(1809): n is a, c, g, or t
tgtacggtccggaatttcgggatatcgtcgacccacgcgtcgctcgggagcccacccggacgaagggggagagtagacagcagaaccagcggcggcggctaagcagagactgtagtagcggcgacagcgacgacggcagcgatggctggggcggggccagccccgggactcccgggtgcaggaggacccgtggtcccgggtcctggcgctggcatcccgggcaaaagcggcgaggaacgcttgaaggaaatggaggcggagatggccctgtttgagcaggaagttctgggggctccagtacctggaatcccaactgctgtgcctgcggtgcccactgtccccacggtccccacagtagaagcgatgcaggtcccagcggctcctgtgatccgcccaattatcgcgaccaacacataccagcaggtccagcagactctggaggcccgagcagctgctgcagccacagtagttcctcccatggtgggtggccctccttttgtaggccctgttggctttggccctggtgatcggagtcacctggacagcccagaggctcgagaagccatgttcctgcggcgggcagctgtggccccccagagggcccctatcctgcgtccagccttcgtcccccacgtgctacagagagcagattccgctctctcctctgcagcannnnnnnnnnnnnnnnnnnnnnnnnnnnnnnnnnnnnnnnnnnnnnnnnnnnnnnnnctgcctgggccccctggaccacccatgatgctgccaccaatggctcgggctccagggcccccgctgggctccatggctgcactgaggccccctctggaagagccagcagcaccccgagagctgggcctaggcctggggttgggcctgaaagagaaggaagaggcagtggtggcggcggcggctgggctggaggaggctagcgcggctgtggccgtgggggcaggaggtgccccagctggccctgcagtcattgggcccagcctgccgctggccctggccatgccattgcccgagcctgagcccctgcccctcccgttggaggtcgtccgcggcctcctgccccccctgcgcattcctgaactcctgtccctgcgtcctcggccccggccccctcggccagaaccaccccccaggcctcatggctcttgagggccccagagcccctgggtgaagacaagaagaaggggaagccagagaaattgaaacgggcattcgcacagcggcagggagcagctgggaggaccccagcctgctggagtgggatgcagataacttccggatctaatagatagagggatctgggcaatgaggtgaacgatnacatcttngaacgcgccttcagccgcttcccatccttccttaaggccaaggtgatccgtaacaagcgaacaggcaagaccaagggctacggcttcgtcagcttcaaggaccccagcgactacgtgcgcgccatgcgtgagatgaatgggaagtatgtgggctcgcgccccatcaagttcgcaagagcatgtggaaggaccggaatctggacgtggtccgcaagaagcagaaggaaaagaagaagctgggcctgagatagggtctgtggccaggcacccgctcccacctggccgggcgctggctcctccctcagttctctttggaaaacccccagctgtccacccatcccctgccccaaaaccagtttcaataaatttacgttcatttccnnnnnnnnnnnnnnnnnnnnnnnnnnnnnnnnnnnnnnnnnnnnnnnnnnnnnnnnnnnnnnnnnnnnnnnnnnnnnnnnnnnnnnnnnnnctttctacaccattccctttgggcccgcgggcccaacccggcaaggccaaaatggggccattaccctgtctaccaagcgaaacccctgcgaaatgccctttggggtggggcact

SEQ ID NO: 254318 - DNA, 1297 bp, Homo Sapiens
tgtcgacagtaaaacccaggaagtatcatacaaacaaaaacccaaccaaacaatagtactccttccactctatgcttaacggaagaattctcacaccagccagttaaacaatgaaattattaaacaagcagcctactgggactgcatgctgagctaaaatgcaggtgtgctgacttcttggagctggagcagaggaaaacatcaaaaagcatatctggaatctatcacagctttctttcttaagcaaataaaaatgcaaattagtttcataaccacaattcaatttatcaaactttttctgaagaattttcactttaattatgtatacataacaggaaataaaactttttcacaaacactctcaaggcttacgattatcaagaaaatgacaaaagtaaaagcaggaggaactattaaacacactggcggggaggtcaatttccgttatctggctcttaaaaagtaaagaaaatcaccatatacattaagtacaaaaacctgcattgaatgacaactgctggtgtattgacttgatcagaaatgaagaccaagaatatgataaagccctatgataatattcaccgggagcactcccctcagtgtgtgtacactaacaggttggcaaagtttctggagcattagcttatagaaacacaggagtccttggttagctgcattatatggaacgttctcttctgaaatgcacccacgattcagtttcacttacaaattgcaaactaaagttatctcttcagaaaaatatctgtttggcatctcctggactttgttccattggacagtagggacattttaatttgctaccattaaacattttattcagggcatctcttgatataatatgaccacagaccaatttcatgggtggattgttatctgttgtttgctgacgaagaatggggcaggcaaatatagagtgataccagcactttttaccaaggtccacttcaataggtaattcatctttctggttccaaactccagtacactgcctctgttcaatcacggctttgatgttaattaaagctgacagcgccacacaacctgctgagaaactgacactgagaggggactccacgaagagccccagaagggcacaagcatcccgtgtaaagatgtcacagatatcagcccactggtttgcatcaagtaggtgaacatatggtgagttctcaatcccttgtctcaggtacacaaggcttcccatcaaaacctgaatgtctgatgatttagggcaaatgctctgaaaatttttagcatagtgtaatgcctctcgctg

SEQ ID NO: 254319 - DNA, 436 bp, Homo Sapiens
  misc_feature (19)..(19): n is a, c, g, or t
  misc_feature (31)..(31): n is a, c, g, or t
  misc_feature (45)..(45): n is a, c, g, or t
  misc_feature (84)..(84): n is a, c, g, or t
aaccccgcggtgcggggcnggctgccgggcnggcgagggagcccngcgcttcccttcacatggccctgttttcccagctgcttnccctgggggatccagactgtgaagcaggaagacagatataataaatatactgcatctttttaagatgtgcaattttattctgaggaaacataaattatgttttgtattatatgactttaagagcccacattaggttttatgattcatttgccaggtttttaaatgttttcacaaaactgttacgggacttcaactagaaataaaatggtgtaaataaagaccttgctatctctaaattatggatgttaaagatttgaaatgttttgtactttgattatttttatttcttatactctgttttcttttatattgatatcttgcccacattttaaataaatgtacttttgaactt

SEQ ID NO: 254320 - DNA, 966 bp, Homo Sapiens
  misc_feature (728)..(728): n is a, c, g, or t
  misc_feature (754)..(754): n is a, c, g, or t
  misc_feature (794)..(914): n is a, c, g, or t
caccttgatgttcccatttaacagataggaaaacgggggcagggagaagaggaactgtaactcccagtttccttccccttgcacccagaaacaggttctctgagcccctctccccatcccatggagggtggggatgggtcttacgcacccagaccgtgttcctccagggagaatgtgctacgaaacctagcggataaggcctttgaccggcccatctgcgaggccctcctggaccagaggttcttcaatggcattggcaactatctgcgggcagagatcctgtaccggctgaagatccccccctttgagaaggcccgctcggtcctggaggccctgcagcagcacaggccgagcccggagctgaccctgagccagaagataaggaccaagctgcagaatccagacctgctggagctatgtcactcagtgcccaaggaagtggtccagatgggtgaggccaaagatggcagcaacctctgcttcagcaaatgattgtgtaaccctggggcacttgtccctctctggacctgattcaccgatttggaaggttgtagccctagctgatactcaatggactaggcctcctcacttgtcactagtgtttcaggctggcgcagtggtcaatgcctgtatccagcaactcggaggcgagtgggtgctcactgagtcgggagtcgagaccactggcacctgtgaacccttctctacatgcacaatacgggtggggnccgtgctcaaccgggggtgcgcaacntacctggtggtggacgacgtcgtcccggtacgtacccttnnnnnnnnnnnnnnnnnnnnnnnnnnnnnnnnnnnnnnnnnnnnnnnnnnnnnnnnnnnnnnnnnnnnnnnnnnnnnnnnnnnnnnnnnnnnnnnnnnnnnnnnnnnnnnnnnnnnnnnnngaacgaaaccgacaaccagaacatagagcagtagaacggagccagacgccac

SEQ ID NO: 254321 - DNA, 586 bp, Homo Sapiens
gatcccccgggctgcaggaattcggcaccttgacgtgcccatttaacagataggaaaacgggggcagcgagaagaggaactgtaactcccagtttccttccccttgcacccagaaacaggttctctgagcccctctccccataccatggagggtggggatgggtcttacgcacccagaccgtgttcctccagggagaatagtgcctcctcggaccagaggttcttcaaaggcattggcaactatctgcgggcagagatcctgtaccagctgaagatacccccctttgagaaggaccactcggacctggaggccctgcagcaacacaggccgagcccggagctgaccctgagccacaagataaggaccaagctgcagaatccagacctgctggagctatgtcactcagtgcccaaagaagtggtccagttgggtgaggccaaagatggcagcaacctctgcttcagcaaaagattgtgtaaccctggggcacttgtccctctctggaccttgattcaccgatttgaaagttcgagccctagctgatactcaatagactaggccctctcacttgcaataagtgtttca

SEQ ID NO: 254322 - DNA, 591 bp, Homo Sapiens
  misc_feature (134)..(246): n is a, c, g, or t
cttgttgccacggtggaagtgaatggtggcatcttgggttacttgaaacctccatatcttgggttaaggcagttttcttactaagcctctgtggagctgggactgcagggacaaacagccatgcccagttaatnnnnnnnnnnnnnnnnnnnnnnnnnnnnnnnnnnnnnnnnnnnnnnnnnnnnnnnnnnnnnnnnnnnnnnnnnnnnnnnnnnnnnnnnnnnnnnnnnnnnnnnnnnnnnnnnntgagccaccgtgcccagccagaatgtgttctcttaagtacagtcacggagtgtgatatgtagggtgtgcaaggcagcaggcagtgaggtggtggtggtgctagaattgaggaaagacaggtcacatttcattatgaaatgtgtcatcactttttgattaagattagggatttaatcctacagaaaatgcagcatccctggtgatagcagaagagctgttacttttagtgacatttgaaataaccctacagaggaggaaagaacaggtgtaaagttgtagaaatatgagaaaggaagacaacccaggaagtgccagaaaaattcctcgtgccaattcctgcagccc

SEQ ID NO: 254323 - DNA, 758 bp, Homo Sapiens
  misc_feature (29)..(29): n is a, c, g, or t
  misc_feature (34)..(34): n is a, c, g, or t
gaactcttacaactcagtattaaaaaggncaaancgcctatttaaaaagtggccaaggctcagcacagacacttctccagggaacatacacatatggccaacagcacccagcaaaggtgcttgatagcatcactcatcagagaaatgcaaatccaaatgacaccagaggctacttcacactcattagaatgattataaccagaaagtcagataataactagtgttggcaagaatgcgcagaaattggaaccctcttacttactggtgggaatgtgaaatggtgcatggacgtgggaaaatagtttggcagttcctcaaaaatatacagttaccatatgacccagtaattctactcctaggtatataatgagagaattgaaaacatatgttcacacaaaaacttgtacgcaactgttcatagcaccattgttcataatagccaaaaaccagaaataatccaaatgtccaaatgatgtgtgaataaacaaaatggggtctatccatacagtggaatattattcagccagaaaaaggaacgcagtactgttatatgctgcaacatgaatgaaccctgaaaacccgctaagtgaaatcagacagacccaaaaagacaaatactgtatgattacacttatatgaggcccctagaataggcaaattcacacagacagagagcacaacaaagtttacctttatgaatacagagcgtctgtttgggatgacgaaaaagttctagaaatggatagtgtcgatggttg

SEQ ID NO: 254324 - DNA, 1707 bp, Homo Sapiens
  misc_feature (16)..(16): n is a, c, g, or t
  misc_feature (815)..(815): n is a, c, g, or t
ggtgcatggacgtggnaaaatagtttggcagttccctcaaaaatatacagttaccatatgacccagtaattctactcctaggtatataatgagagaattgaaaacatatgttcacacaaaaacttgtacgccaactgttccatagcacccattgttcataatagcccaaaaacccagaaataatcccaaatgtcccaaatgatgtgtgaataaacaaaatggggtctatccatacagtggaatattattcagcccagaaaaaggaacgcagtactgttatatgctgcaacatgaatgaaccctgaaaacccgctaagtgaaatcagacagacccaaaaagacaaatactgtatgattacacttatatgaggcccctagaataggcaaattcacacagacagagagcacaacaaagtttaccagtataacaaaggttaccaaagactagggggagagacaggtaggaagttatttttttatgaatacagagcgtctgtttgggatgacgaaaaagttctagaaatggatagtgtcgatggttgcacaacatagcaaatatactaaaagccactgaatagaacatttcaaaaggcatgaattttatctcaatatttagaaggaaaaataaatattcttagaagaaacaatattaccatcataaatggaaaaccggtaataataaaatacatacataaatattaagatttacaatgtctattagcaagtcaccctaactcatcttacagaccaccagtaggacaattacccctttgggtgacatgaaaaaggctgccagggggcttatgtccagtgcncagggtccagcatggcaacatattttgtaaaaagttccagcaggctgtggacagcaggaataggctgttgaggggttgggcacagggtcaggtgctggacactagaacaggactccactccgacattccgggtacacagaacttcccagtgggaagagctagccacacagtggcagaagcttggaaaacaacccatcccagccctacgctctctgaatgtgaccttgggtgcaagctgggtttgtatgaacttactggcatttttaacaagacagtgtgtacgggagcatttcaactgcaaagaccactgaactggacactgtcggcgtgacagtatcaagtaaccattaggcagagcaaaacgtaaataaaagtactctgtgatggggtagtcagtcagatggggtggggtcggctagggggcagtgaggacaactagatgccgaggtagacagaccaagaccagctttctgtgtaatgcaaagtcaaattaaatagacgtgagtggatggaaagacgtaccttattcttgcataagaagacaacggcatgaagacatcacagggaaggttaaggtaaacatgcagcctggaatagccaggagaattctggaaaagtagaataatgaggtagggcttcccttcgctattttgaagtgcagattacactatgtaaaaccattaggaactggcacgtgaatagacagatcaatagttaatagctgtattagccagaaaatggtgtaaggacaacaggctaactaaccctgtcacttgttatgctaaaattaagtctagatagagtcctccaaaataaaaataaaaagagttaggagaaaacatggggtttaacaacaacaacaaaatcttcagctggattagccttttcaaac

SEQ ID NO: 254325 - DNA, 389 bp, Homo Sapiens
gtttgaaaaggctaatccagctgaagattttgttgttgttgttaaaccccatgttttctcctaactctttttatttttattttggaggactctatctagacttaattttagcataacaagtgacagggttagttagcctgttgtccttacaccattttctggctaatacagctattaactattgatctgtctattcacgtgccagttcctaatggttttacatagtgtaatctgcacttcgctattccaggctgcatgtttaccttaaccttccctgtgatgtcttcatgccgttgtcttcttatgcaagaataaggtacgtctttccatccactcacgtctatttaatttgactttgcattacacagaaagctggtcttggtctgtct

SEQ ID NO: 254326 - DNA, 1411 bp, Homo Sapiens
cgaagcacaagactctggccttgatcaggatgggcgggtcatcggtggcatctgcttccgcatgtttcccacccagggcttcacggagattgtcttctgtgctgtcacctcgaatgagcaggtcaagggttatgggacccacctgatgaaccacctgaaggagtatcacatcaagcacaacattctctacttcctcacctacgccgacgagtacgccatcggctacttcaaaaagcagggtttctccaaggacatcaaggtgcccaagagccgctacctgggctacatcaaggactacgagggagcgacgctgatggagtgtgagctgaatccccgcatcccctacacggagctgtcccacatcatcaagaagcagaaagagatcatcaagaagctgattgagcgcaaacaggcccagatccgcaagtctacccggggctcagctgcttcaaggagggcgtgaggcagatccctgtggagagcgttcctggcattcgagagacaggctggaagccattggggaaggagaaggggaaggagctgaaggaccccgaccagctctacacaaccctcaaaaacctgctggcccaaatcaagtctcaccccagtgcctggcccttcatggagcctgtgaagaagtcggaggcccctgactactacgaggtcatccgcttccccattgacctgaagaccatgactgagcggctgcgaagccgctactacgtgacccggaagctctttgtggccgacctgcagcgggtcatcgccaactgtcgcgagtacaaccccccggacagcgagtactgccgctgtgccagcgccctggagaagttcttctacttcaagctcaaggagggaggcctcattgacaagtaggcccatctttgggccgcagccctgacctggaatgtctccacctcggattctgatctgatccttagggggtgccctggccccacggacccgactcagcttgagacactccagccaagggtcctccggacccgatcctgcagctctttctggaccttcaggcacccccaagcgtgcagctctgtcccagccttcactgtgtgtgagaggtctcctgggttggggcccagcccctctagagtagctggtggccagggatgaaccttgcccagccgtggtggcccccaggcctggtccccaagagctttggaggcttggattcctgggcctggcccaggtggctgtttccctgaggaccagaactgctcattttagcttgagtgatggcttcaggggttggaagttcagcccaaactgaagggggccatgccttgtccagcactgttctgtcagtctcccccaggggtggggggtatggggaccattcattccctggcattaatcccttagagggaataataaagctttttatttctca

SEQ ID NO: 254327 - DNA, 620 bp, Homo Sapiens
  misc_feature (38)..(38): n is a, c, g, or t
  misc_feature (146)..(146): n is a, c, g, or t
aaagagcagaaagacagtggagagaatctgctggaaanaaagtagaggataataaagctagttccagaaaaagggttgaatggctacaactttctagttatgtaacatctcttaatagaatattgggtaatcttacacggatgaanaattacatccttaaggtaaaaactcccattttcacacatttctatctctctacatagtaatgataataggcaatatgctaagtgctttatgcatattatttaattcttataattattctagtcataataaggtagataagctgaggcacattttgaaatcttcagtagtataacttctcactccacactgttaactagtgatttgcaactggggtaagcacattataaaaatgggcacactgatgaaaattaagtttggattttggtaaaaaaattgacactcctggggatacaaattccatttgcctatgtcattcttctctgtgaaagagttaaaagattttctatactaatgaataaggtatttagagttcttaacgggtgatgtagaagtaagtagtatgtgttcttggatgacacaaagattcttcaatattggaaaatacttcttaaaataatattattgtgagccag

SEQ ID NO: 254328 - DNA, 973 bp, Homo Sapiens
ggtcaattcatgttcccttccggttcccattggtgccctccaaaaagggttttcccaaccaaaggtcatccattgatttaccctggagtatttcaataagcccaaaccaccagcaagccagataccaccaaggttagtcaccactttaaaagaagatgagctggagaacgaagcagccctctgatggacccagtcagtgcagtcgggactcagggagacacccggggacccctgcccagctccctgccggaggaaagactagggaagggaagccggggggaatgaagggcgtcggcagagagagtaacaagtagaaacttcgccgatctgggagcaggccgagaaactctgttgagctgctaaagaattcttcattctcatgtgattttcttcatttctgtcttcccagttactaccaaggagctaaggaaagttcaggaatactttgtttagtgtcgccataacatctccaaccatgcattaagtttaaccaagagctgcaatattccagattcttaaattctcaatggcaaccaatttatgctcaagttgaaaatctggcaagcaccgtacgccttcagcacacgcgtgggtccggattttcccatcacacacacgctctcccccgtccaaggtgcctgtttacttctggtctgcgtgggctcaggtttcaaagagcttgctgaaggcggcccccacctcggcgatcatgtcggaggtggtggtggagcgaccgtgcttctggaaggcttggtggttgcactgcctggtgagagagcaggcgccaaacgcggccaccaggagagggctggacccatttgttttctgtggtccagcaaggagcgcccagtgtaccaggacgcccagggagcccgacaggaggtccccttgccctccacacctgcggctgctgcccctcgtgccgaattcgccacccaggcctcgttctttttgtttttctcttgcggtaggt

SEQ ID NO: 254329 - DNA, 1100 bp, Homo Sapiens
  misc_feature (1030)..(1030): n is a, c, g, or t
  misc_feature (1062)..(1062): n is a, c, g, or t
aaagggcgaggcctgggtggcgaattcggcacgaggggcagcagccgcaggtgtggagggcaaggggacctcctgtcgggctccctgggcgtcctggtacactgggcgctccttgctggaccacagaaaacaaatgggtccagccctctcctggtggccgcgtttggcgcctgctctctcaccaggcagtgcaaccaccaagccttccagaagcacggtcgctccaccaccacctccgacatgatcgccgaggtgggggccgccttcagcaagctctttgaaacctgagcccacgcagaccagaagtaaacaggcaccttggacgggggagagcgtgtgtgtgatgggaaaatccggacccacgcgtgtgctgaaggcgtacggtgcttgccagattttcaacttgagcataaattggttgccattgagaatttaagaatctggaatattgcagctcttggttaaacttaatgcatggttggagatgttatggcgacactaaacaaagtattcctgaactttccttagctccttggtagtaactgggaagacagaaatgaagaaaatcacatgagaatgaagaattctttagcagctcaacagagtttctcggcctgctcccagatcggcgaagtttctacttgttactctctctgccggcgcccttcgttcctcctctgcttcccttccctagtctttcctccggcagggagctgggcaggggtccccgggtgtctccctgagtcccgactgcactgactgggtccatcagagggctgcttcgttctccagctcatcttcttttaaagtggtgactagcttggtggtatctggctgctggtgtttggcttattgacatactccagggtaatcaatgatgactttgtttggaaacccttttggaggcaccatggggaacagaaggaaacatgagtgacgctgacccttggagtgtgtggggtgggggagctctgagacgccttcctgtcccacgcttcttccggtgttccgtgttcttaaaaagggggtncccatgattaacccaaccggccccagcaaggnaagaaccggaaccggggacgggcaagggtgaagggttt

SEQ ID NO: 254330 - DNA, 696 bp, Homo Sapiens
  misc_feature (407)..(407): n is a, c, g, or t
aagcccccggaggagccctgaagttcaaccagcctggccgactgctgtctgacaccagcagcttggtctgaagggaggggcaggcactgatggcatccacccttggagctagggagtcactggtgataatggacttggccctggacgcctgcagccggtacttgaggtccttctctgtcagctgagtcacacccggaatcatcacagtccctgtccgcatgcaagccacactgaccagccaccactccgggagccgtgggagtaccagcatcattctgtccccaggctgcaggccgcatgcaccccccagcacattggctgccttcctggactgcttccccagctcctcaaagctccacttgatctctgctcctgtgccattgacccaccagaaggcaggagggggncggtgtccagcctcttccagccgactccacacatccagcacatcatgggcgaagttgaagtactcaggcaccagctgccttcccaggctgatggcttcccaggtggccacgatcttctgaggaacaggtagaggtgctggcttcccatgagacccacagaatgccctggagttcctcagtgcctggaggactaggtgtctcagccatggtctctgcttcagctgagcagagcagggctgagtggctgtaaacactcagctccctcagaaaacagcctcccacagggaac

SEQ ID NO: 254331 - DNA, 1362 bp, Homo Sapiens
ggggccgttccgtggcgggaactgaggcgactgtggggacatcagtgatcgtaagtctcctgggcccgttattctcagattaggtgacggagctaagacttcgagaccatctcgtcctttttgtatcgcggaaacctgaggaacgagccggcggcggtgacctgcacgagaagccaggctaactgggtgaagtaccatgcaagcatttcttaaaggtacatccatcagtactaaacccccgctgaccaaggatcgaggagtagctgccagtgcgggaagtagcggagagaacaagaaagccaaacccgttccctgggtggaaaaatatcgcccaaaatgtgtggatgaagttgctttccaggaagaagtggttgcagtgctgaaaaaatctttagaaggagcagatcttcctaatctcttgttttacggaccacctggaactggaaaaacatccactattttggcagcagctagagaactctttgggcctgaacttttccgattaagagttcttgagttaaatgcatctgatgaacgtggaatacaagtagttcgagagaaagtgaaaaattttgctcaattaactgtgtcaggaagtcgctcagatgggaagccgtgtccgccttttaagattgtgattctggatgaagcagattctatgacctcagctgctcaggcagctttaagacgtaccatggagaaggagtcgaaaaccacccgattctgtcttatctgtaactatgtcagtcgaataattgaacccctgacctctagatgttcaaaattccgcttcaagcctctgtcagataaaattcaacagcagcgattactagacattgccaagaaggaaaatgtcaaaattagtgatgagggaatagcttatcttgttaaagtgtcagaaggagacttaagaaaagccattacatttcttcaaagcgctactcgattaacaggtggaaaggagatcacagagaaagtgattacagacattgctggggtaataccagctgagaaaattgatggagtatttgctgcctgtcagagtggctcttttgacaaactagaagctgtggtcaaggatttaatagatgagggtcatgcagcaactcagctcgtcaatcaactccatgatgtggttgtagaaaataacttatctgataaacagaagtctattatcacagaaaaacttgccgaagttgacaaatgcctagcagatggtgctgatgaacatttgcaactcatcagcctttgtgcaactgtgatgcagcagttatctcagaattgttaacgtgaatatatctggatggggggttttgtaaataatgaagttgtaataaaaataaaatgaccaaaagcaccttt

SEQ ID NO: 254332 - DNA, 617 bp, Homo Sapiens
  misc_feature (90)..(90): n is a, c, g, or t
agagatcaggcataaatctcccctcaagaaaacttccccatattatgcccaaaatcaaacctgccaccttctgggcgaccaaaattcacnaaagggcggtgacttctaaaatcatcaggcgggctcctaaaatcctcaccaggaggtctaaaattgtcaggaagtctagggtcctcctccggagcttccctaaggtcttcctctgggagctgcctgaagtcctcatcagaagggcatctaaaatcttcctcctgggggctcctgaagtcctcatcaggagggtgcctaaagtcttcatcaggagggcccctgaagtcttcatctggtgggtgcctgaaatcttcctctcgggagcgcctgaaatgctcctgacggcggccgccgtgaaatgctcgcggggggcggtctccggaagtgctccgggggcgggcgcctgaaatgctctgggggtggccgcctgaagtgctctgggggtggccgccggaagtgctctgggggaggccgcctaaaatgctctggaggtggtctccggaaatgctctgggggtggccgacggaaatgctcctgaggtggcctccggaaatgctcctggggtgactgcctgaagtcctcctcag

SEQ ID NO: 254333 - DNA, 2201 bp, Homo Sapiens
aaggtagcgaggcctgggtggcgaattcggcacgaggagatggcggtgcaggagtcggcggctcagttgtccatgaccctgaaggtccaggagtacccgaccctcaaggtgccctacgagacgctgaacaaacgctttcgcgccgctcagaagaacattgaccgggagaccagccacgtcaccatggtggtggccgagctggagaagacgttgagcggctgccccgccgtggactccgtggtcagcctgctggacggcgtggtggagaagctcagcgtcctcaagaggaaggcggtggaatccatccaggccgaggacgagagcgccaagctgtgcaagcgccggatcgagcacctcaaagagcatagcagcgaccagcccgcggcggccagcgtgtggaagaggaagcgcatggatcgcatgatggtggagcacctgctgcgttgcggctactacaacacggctgtcaagctggcgcgccagagcggcatcgaggacctagtgaatattgagatgttcctgacggccaaagaggtggaggagtccctggagaggcgtgagacggccacctgcctggcctggtgccatgacaacaagtcccggctccggaagatgaagagctgcctggagttcagcctcagaatccaggagttcattgaactcatccggcagaataagagactggacgctgtgagacatgcaagaaagcacttcagccaagcagaagggagccagctggacgaggtgcgccaggccatgggcatgctggccttcccgcccgacacgcacatctccccgtacaaggaccttctggaccctgcacggtggcggatgctgatccagcagttccggtacgacaactaccgactacaccagctgggaaacaattctgtgttcaccctcaccctgcaggctggcctctcagccatcaagacaccacagtgctacaaggaggacggcagctccaagagccctgactgccctgtgtgcagccgctccctgaacaagctggcgcagcccctgcccatggcccactgtgccaactcccgcctggtctgcaagatttctggcgacgtgatgaacgagaacaatccgcccatgatgctgcccaacggctacgtctacggctacaattctctgctttctatccgtcaagatgataaagtcgtgtgcccgagaaccaaagaagtcttccacttctcacaagccgagaaggtgtacatcatgtaggccccacgtcgtgaagcgcacgcctcggggacgggctgcagtgggcggggaggccacgcctttcctcctgtcccacgctccagcctgccgcggcgtttctgtttcttgcgaccaaagatccgtgagcaacgataaatactcttaggaagagagaaaataaggtttcataagtttgtacttgaaaacatttggattggtaggattttgtaacacgtcaaccatttgatgcttctgaaaagtactttcaacttgcgaaggaaactcttctttaaagactgacctaaacaccgagggaaacttaagaacgtttaaaatataggagtccgtgatttccctgtgttttcagtttctttccttctgtgaacgatgagacttggagaacgggctggtccttcaccacttcctgttggccctggcctggccggggaaggtggcagcggcaccggactgacctgcagtgacccgcgatgccgcgccacgagggacacttatggcttcattcgagagctgctgccaaaacgcctggcgccgccaccgtcgggggctggcttcgaggacgcccgcctgcctcgcgggtcgtgtccgcgggactgtgttcgtacgtgcatagtttcgatatcacatcgcggggctgtgttcgtagctgcgtcgtttcgatatcacaccctctgtgtgccgccttacttcctgcttcgagaatgtataacgtggaaatccacgggaccaaatttctgcagaggccttgccggatggttccataactgtagagtctaattgctatccattacagaaattaatcgttcagttgaaagaagtactgatgacttttcaaaacaaatgaaccaccgtagctgacagagaaccgtatcgtagaggtttgtagttagtgcttatttttgcatgttgatgttgactagctaataaactgtaaatgtaaaccatgcgaataaaatggttttctatttctcaaa

SEQ ID NO: 254334 - DNA, 423 bp, Homo Sapiens
  misc_feature (12)..(12): n is a, c, g, or t
  misc_feature (35)..(35): n is a, c, g, or t
  misc_feature (40)..(40): n is a, c, g, or t
  misc_feature (49)..(49): n is a, c, g, or t
  misc_feature (106)..(106): n is a, c, g, or t
ccctgcctcgcngggccgtgcccgcgggactgtgnaccgnaccgtgcanagtttccgatatcacatccgcggggctgtgttccgtagctgcgtcgtttcgatatcnacacccctctgtgtgcccgccttacttccctgcttcgagaatgtataaccgtggaaatcccacgggacccaaatttctgcagaggccttgcccggatggttcccataactgtagagtcctaattgctatccattacagaaattaatcgttcagttgaaagaagtactgatgacttttcaaaacaaatgaaccaccgtagctgacagagaaccgtatcgtagaggtttgtagttagtgcttatttttgcatgttgatgttgactagctaataaactgtaaatgtaaaccatgcgaataaaatggttttctatttctca

SEQ ID NO: 254335 - DNA, 1091 bp, Homo Sapiens
gaggggggcagcggcgagggacagggctcaccctcccagctgctgtctgacgatgaaaccaaagacgacatgtccatgtcctcctactcggtggtcagcacgggctccctgcaatgtgaagaccttgcagacgacacggtgctggtgggcggggaggcctgcagccccacagcgcgcatcggcggcaccgtcgacaccgactggtgcatctcctttgagcagatcctggcctccatcctgacggagtccgtgctggagaacttctttgagaagagagtggacattggactcaagatcaaggacctttccggctgatgcctgcagctgtgaggcctggcccaaggtgtcatcagtggggctggcctcatctcctcctgcctttcctcccttatcagtttctctttaaaggtgtgcccctcctgctctcccaggagcagtgagttgtgagtggaaagaaggctggtgcagacccagctgccttagacagattccctgggcctgcatctcctggcgccggctgcttctgggcccaggaagaggctgtggctcccaccttccttacacctggtgggagcccgcctcgcaccagctgcacctgcctagcattagaggctctcagatctgcccttgcttgcctcatacctctgtgctccacactgcggccaggccagctgagtccctccatccgtggatgctttcctgcagctatgtggtatgggggtcattcctgcctcttggcaccaggttggggggcatgtgcttgttgggcaccaaagtgatggaaccctcaggtgctctccgggagcctgaacctcctgactgaggaacatgggcagaacatgtttattgcacagagtgggcgctgcgcacaggcgtggctgtacacgtgctctcagctcatcatcctttccagtaactttaaaaaaacatccctcaggtcctgatatatttccttggattcatttcacttggctagaaattacactgtgctcaatgccttaataaatccctgaaagtacaacttcttcccaggccaagtatggggctctggctgtgttctggaagttcgacacttagtcctccacgtgggt

SEQ ID NO: 254336 - DNA, 1040 bp, Homo Sapiens
ccagagagagcaccaaggccagaaaagctctaatcttagcaaggttcatttgttccagcgggcttcccacaggttgtaagaaagttggagccacagcctcttcttgggcccaaaaccaagcggccccaagaaccactcacaactcactgctcttggaaaagcagaaggggcacacctttaaagagaacctgataaggaaggaaagccaggaggagatgaggccagccccactaatgacaccttgggccaggcctcacagctgcaggcatcagccggaaactccaggctgctcatggtcactggcggtgctgaactgtctctccactttcggtccttgatcttgagtccaatgtccactctcttctcaaagaagttcaccagcacggactccgtcaggatggaggccaggatctgctcaaaggagatgcaccagtcggtgtcgacggtgccgccgatgcgcgctgtggggctgcaggcctccccgcccaccagcaccgtgtcgtctgcaaggtcttcacattgcagggagcccgtgctgaccaccgagtaggaggacatggacatgtcgtctttggtttcatcgtcagacagcagctgggagggtgagccctgtccctcgccgctgcccccctccaccaccacctggctctcctgtggggctgttccgaggtgtgtgtctccgcctgctttggcttgggggtctcctgcagctgggggctgaagctccctggctgcgtcctgatgcagttcgggtgctgttggctcgtcctcctcagtggcacagtccctgggcttcctgcctgtgcgggctgagaacttcttccccacctctccgatgcggagcaggaggctggccacggtggcgatggcgtggtacaggtcctgctccatggggtcttcactgaacatgttgtaaagcgtcttgacagctcaatgaactgctcctggttcatcttgggaagatccttaatcgtctccttctgagcctctttctccgacgcgtggtcgacgatatcccggaattccggaccgtacagccc

SEQ ID NO: 254337 - DNA, 741 bp, Homo Sapiens
cacttggctagaaattacactgtgctcaatgccttaataaatccctgaaagaaataaaaaccactgtgtgcaatgccttgctgtggcccccaaccactgcttaggcctcccaacttctccccaggccaagtatggggccctggctgtgttctggaagttcaagacacttagtcctccacagtgggtgggaagagtgcaaggtctgccagggtcagatgggagacgcagaacctgctggtgcaagctgggcaggtcctggaccaaccttgcattcagggggatgccctgagcttccacaggtcttcatgggcaggggttgtgggtcctggtgaaggaagtgcatcctcaggcctgggctgtagcaagctgtcctgcccttgggttcaagaaccagactgtggagcccaaaggtgaccgcaggggggcccccagggctggagcccacaaggataccctcactttgcatgaggagctgaaactgaccagtgtccagtgtttagccccacatggggctgctcttgcttctactaaaagatacagcagttacccccttatccacaggggatacagtggatatctaaaaccagacccccagtggatgtctaaaaccacagataataacaaaccttatacatactgttttttcctatgcatacatacctgtgattaagtttatgaattaggcaccttaagagattgacaacaataactaataataaaatgtaacggttatactgtaaa

SEQ ID NO: 254338 - DNA, 1435 bp, Homo Sapiens
  misc_feature (129)..(192): n is a, c, g, or t
  misc_feature (448)..(448): n is a, c, g, or t
gggacagagagccgagctctggagcctcagcgagcggaggaggaggcgcagcggccgacggccgagtactgcggtgagagccagcgggccagcgccagcctcaacagccgccagaagtacacgaggaannnnnnnnnnnnnnnnnnnnnnnnnnnnnnnnnnnnnnnnnnnnnnnnnnnnnnnnnnnnnnnnagccggctggggcgggtggcatcatggacgagaaggtgttcaccaaggagctggaccagtggatcgagcagctgaacgagtgcaagcagctgtccgagtcccaggtcaagagcctctgcgagaaggctaaagaaatcctgacaaaagaatccaacgtgcaagaggttcgatgtccagttactgtctgtggagatgtgcatgggcaatttcatgatctcatggaactgtttagaattggtggcaaatcaccagatancaattacttgtttatgggagattatgttgacagaggatattattcagttgaaacagttacactgcttgtagctcttaaggttcgttaccgtgaacgcatcaccattcttcgaggggatcatgagagcagacagatcacccaagtttatggtttctatgatgaatgtttaagaaaatatgggaatgcaaatggtttggaataatttacaggatcttttgactatcttcctctcactgccttggtggatgggcagatcttctgtctacatggtggtctctcgccatctatagatacactggatcatatcagagcacttgatcgcctacaagaagttccccatgagggtccaatgtgtgacttgctgtggtcagatccagatgaccgtggtggttggggtatatctcctcgaggagctggttacacctttgggcaagatatttctgagacatttaatcatgccaatggcctcacgttggtgtctagagctcaccagctagtgatggagggatataactggtgccatgaccggaatgtagtaacgattttcagtgctccaaactattggtatcgttgtggtaaccaagctgcaatcatggaacttgacgatactctaaaatactctttcttgcagtttgacccagcaccttgtaaaggcgagccacatgttactcgtcgtaccccagactacttcctgtgatgaaattttaaacttgtacagtattgccatgaaccatatatcgacctaatggaaatgggaagagcaacagttactccaaagtgtcagaaaatagttaacattcacttgtcatcaacagccgtgaccactttagaatgaaccacttcattgcatgctgaaacgacattgttggtcaagaaaccagtttatggcataacgctatttgaagagaccattgcgttatctgagagacagcagatattcagatgtgcacattaacacctcgagtacactatcttcatatagctatt

SEQ ID NO: 254339 - DNA, 1838 bp, Homo Sapiens
cccgggatcgccattacagagagccgagctctggagcctcagcgagcggaggaggaggcgcagcggccgacggccgagtactgcggtgagagccagcgggccagcgccagcctcaacagccgccagaagtacacgaggaaccggcggcggcgtgtgcgtgtaggcccgtgtgcgggcggcggcgcgggaggagcgcggagcggcagccggctggggcgggtggcatcatggacgagaaggtgttcaccaaggagctggaccagtggatcgagcagctgaacgagtgcaagcagctgtccgagtcccaggtcaagagcctctgcgagaaggctaaagaaatcctgacaaaagaatccaacgtgcaagaggttcgatgtccagttactgtctgtggagatgtgcatgggcaatttcatgatctcatggaactgtttagaattggtggcaaatcaccagatacaaattacttgtttatgggagattatgttgacagaggatattattcagttgaaacagttacactgcttgtagctcttaaagttcgttaccgtgaacgcatcaccattcttcgagggaatcatgagagcagacagatcacacaagtttatggtttctatgatgaatgtttaagaaaatatggaaatgcaaatgtttggaaatattttacagatctttttgactatcttcctctcactgccttggtggatgggcagatcttctgtctacatggtggtctctcgccatctatagatacactggatcatatcagagcacttgatcgcctacaagaagttccccatgagggtccaatgtgtgacttgctgtggtcagatccagatgaccgtggtggttggggtatatctcctcgaggagctggttacacctttgggcaagatatttctgagacatttaatcatgccaatggcctcacgttggtgtctagagctcaccagctagtgatggagggatataactggtgccatgaccggaatgtagtaacgattttcagtgctccaaactattgttatcgttgtggtaaccaagctgcaatcatggaacttgacgatactctaaaatactctttcttgcagtttgacccagcacctcgtagaggcgagccacatgttactcgtcgtaccccagactacttcctgtaatgaaattttaaacttgtacagtattgccatgaaccatatatcgacctaatggaaatgggaagagcaacagtaactccaaagtgtcagaaaatagttaacattcaaaaaacttgttttcacatggaccaaaagatgtgccatataaaaatacaaagcctcttgtcatcaacagccgtgaccactttagaatgaaccagttcattgcatgctgaagcgacattgttggtcaagaaaccagtttctggcatagcgctatttgtagttacttttgctttctctgagagactgcagataataagatgtaaacattaacacctcgtgaatacaatttaacttccatttagctatagctttactcagcatgactgtagataaggatagcagcaaacaatcattggagcttaatgaacatttttaaaaataattaccaaggcctcccttctacttgtgagttttgaaattgttctttttattttcagggataccgtttaatttaattatatgatttgtctgcactcagtttattccctactcaaatctcagccccatgttgttctttgttattgtcagaacctggtgagttgttttgaacagaactgttttttccccttcctgtaagacgatgtgactgcacaagagcactgcagtgtttttcataataaacttgtgaactaagaactg

SEQ ID NO: 254340 - DNA, 1090 bp, Homo Sapiens
  misc_feature (6)..(6): n is a, c, g, or t
  misc_feature (9)..(9): n is a, c, g, or t
  misc_feature (16)..(16): n is a, c, g, or t
  misc_feature (21)..(23): n is a, c, g, or t
  misc_feature (28)..(28): n is a, c, g, or t
  misc_feature (37)..(37): n is a, c, g, or t
  misc_feature (39)..(39): n is a, c, g, or t
  misc_feature (48)..(48): n is a, c, g, or t
  misc_feature (53)..(53): n is a, c, g, or t
  misc_feature (56)..(56): n is a, c, g, or t
  misc_feature (61)..(61): n is a, c, g, or t
  misc_feature (63)..(64): n is a, c, g, or t
  misc_feature (72)..(72): n is a, c, g, or t
  misc_feature (84)..(84): n is a, c, g, or t
  misc_feature (87)..(87): n is a, c, g, or t
  misc_feature (89)..(89): n is a, c, g, or t
  misc_feature (124)..(124): n is a, c, g, or t
  misc_feature (127)..(127): n is a, c, g, or t
aaaaantanccggtgngtgcnnncccanaaccccacnancaggagctnagcanganattgntnnacctggangcagagttgcangancnaagatgccccgtgtactccagcctggcaacagagnagnccatctcaaaaaaaattttttcctgagagaagcctgagttgaccagctctggggtttgtaaggcaggtctgttttctcctaggccctgagttttctgaatctctgggtttgctttgttggcaaggagccagggaatcctgacctgagccagaccttaagctctatgggtatttagctggccattcaagtataaggcaaggtggtgtacctgctggcactatccagatggaggcaccaaacacccacatacctggcccaaccagacttctcccgtgagccaggcaaaggaattgtcatctgccaactgtcctactcatattcctctcagtccttcttgggggtaagctgattacctgaaggacagctgaacccctggggtagcctcctatccaccactgcttaagtgcctatgggaatgtgggtctgcaccttgtcccctcataggatggtaccaagcatttagtgcacagtggccccatcatagcctgcagcctcatcatttcccatctggacctggtacaaatgcacgtcacaggctcagctcctccccactagcatcttctctaccttcaagaaccaggcagccctgccatgtcacaataggccaggggagtttccaaagatgtgggtggcaaatgcccctatagaaacaccagtacctgaaagcactgtagccctggacctgcctccttccctcggggccatacttctgtttccaatctgctgggccaccagccactttagtgacccctgcctacttccttcctgttggatatcatacttccatctggctgcctttgcttaagccatctttgtggtagaggggccctggaattgcagctgtactgaggatgatgttattcacagcccctggcccacccactaatactactgcacagagtcaggatctcacatttcaccccaggctcaactgaggatgtggcttattaaacacggaagtgc

SEQ ID NO: 254341 - DNA, 814 bp, Homo Sapiens
  misc_feature (50)..(50): n is a, c, g, or t
gaggcccggaagggccggggaaaagccaaggcataggccacaaaggctgnccgctcgcctggatgcggctcctgcacccccagccccaggtgggcacacacctgctccagccacacctgggcggccgccaggtccaccccagggccctcaccagctgctggcgccaacatcgggtcagggggcacctcgctgcctgaaaaggaagtgacgaaggagtgggccagggtcccggccaccggcacacctcgcagctggcccgctagcacgttgctgctgctgtcgaagccgcccaggtagctgtaggtggaggctgtcaggcccccatcggggccctgagcccgcctcaggcccatctctagcagccgcttctctggccctgcgatcaagcgaagccgcgctgcgttggtggccaccaggctggcgtagctgaccaggcagagcagcggtgtctccagcagctgcaccaccaggagcggcccggacacctgcaggagcggcactccggggaaggcgagggagccctcgggcagggctcgcaccgtcacctcggagcagtcgagggcccgaaggtgctcgaagaacgcaggatccgtgtctgggggcagcaccgaggccaggaactgcacgtcggcgtcccgcaggcggaaggcgcgcaggaagcgcacacagtcgcgcaagccggcggccaaggcgaaggcgccgccgaacgggcagcggcggaagaagagctcgaactcggcggcgtcccgcgcccggcccgcgcgccaatagcccaacgccatggtggcctggtagaggtcagtgagcagcggcc

SEQ ID NO: 254342 - DNA, 1162 bp, Homo Sapiens
tgggggcaccaacgcagctcgtgcgttgattgtaggctagagaatggcggcaagagagggccttaagcgggcgcaggccccttagggggccttacagcttccacttacatctacttgggcggtgagtgtttggtgcggggcaaggcaagggccgggaaggaggagccccatcttggcccgagtcccccaaatcccaccgccttcctcccccaggcttcgacagcagcagcaacgtgctagcgggccagctgcgaggtgtgccggtggccgggaccctggcccactccttcgtcacttccttttcaggcagcgaggtgccccctgacccggtcagtccctcctctaaaccctgctgtctccaggcgacaggccccaagccagcccttgccctggcgagagtgtgccacccaggcaggtcaccccagtgctgtcccaggaagctggcacgggctgcattacctttgctctcaaactagggtgtccctggctgctcccaggcctcatcctgcattcctggcccccattcttcaccgactctgttccacagatgttggcgccagcagctggtgagggccctggggtggacctggcggccaaagcccaggtgtggctggagcaggtgtgtgcccacctggggctgggggtgcaggagccgcatccaggcgagcgggcagcctttgtggcctatgccttggcttttccccgggccttccagggcctcctggacacctcctccgtgcagctgtgtgagccgctcccatccctggcagagtctagagccttggcccagctgtccctgagccgactcagccctgagcacaggcggctgcggagccttttccccacagcttgtcctgtgttgtttgtgtcgtttgttcacccagcccacggtgcgcctcccgggctgcggctgggctggagtcgggaatctgagctcgaggtagcaggaagatttgcatcccagtgaaagcacaggccctggctccccgggcttcagggtgggcagcaccactgtgtggttggctgagggtggagggtggggacttggagcagaggcccagtccagccagccccggggagtacgagcatcttggtggaagcggaagcgggcaggtcttacatggccggaggaaggggtggggcgatcccgggaattccggac

SEQ ID NO: 254343 - DNA, 511 bp, Homo Sapiens
agacgttgcctgggagcaaggctgctttccggctcctgggctctgacgggtctccactcatggacatgctgcagttagcagaagagccagtgccacaggctgggcaggagctgagggtgtggcctccaggggcccaggagccctgcaccgtgaggccagcccaggtggagccactactgcggctctgcctccagcagggacagctgtgtgagccgctcccatccctggcagagtctagagccttggcccagctgtccctgagccgactcagccctgagcacaggcggctgcggagccctgcacagtaccaggttggggggaggcccaccctgtcattctgccctgtgcgcccccgccctcaccctgcccaccgctcctgtcctctgctccctgcaggtggtgctgtccgagaggctgcaggccctggtgaacagtctgtgtgcggggcagtccccctgagactcggagcggggctgactggaaacaacacgaatcactcacttttccccac

SEQ ID NO: 254344 - DNA, 348 bp, Homo Sapiens
aagacccagctcccctccagggctcctcacacagccggccgtcctgtccaggcgaaaggcttcagctcctaaagagcccttctcagataatccctcagaaaaaagaaaagtagcgccttcacccctgacccaaccaagccaaaccaatccctgcccaaaataagcctctttacatatttcatcaaaccgtgctccggtatctctactgacatcttagaggacacacagaagtttattgtgtgattattatcatatggaaccttcaagtatctggagcccatactatgaaagaatttttaacacatctcttaagaccacaaaccacatcacagataaaggagctattcc

SEQ ID NO: 254345 - DNA, 1359 bp, Homo Sapiens
  misc_feature (426)..(435): n is a, c, g, or t
ggaatcacagttgatagttatatggtgacattagtggcttaaattctaaataactggaaactgtataataggcaaaactgtgaggcaaataaaatgcttctcaaatctgtgtggctcttatggggttaatttgatttggacctgtattaatttcttatggctgctataactaacaaattaccacaaacttggtggtttaaaacaacacacatttattctctttctgttctggaggccagaagtctaaaatgagattcactgggctgcagttcactgggcaaggccatgctcctctggaggcttccatgatgcatcccatattcagtgtttcccgagtaagccccacccatgcaggtctgcagttttacctcaacaggcttttgcactcagtggctctctcctgtggtttctatctgttctcttcannnnnnnnnnaataactgctttattgagatataattcacatgccacacaattcacctatacagtatacaattcagtagtgtttactatattcagagttgtgcctatcatttttctcacccccaaaagaaaccctatgcccgttagtattcactctgttttctcacaactctaggtaaccactaatctactctccatctctatagatttgcccatgctagacatttcatataaatggaatcatacatgtggtctttttcactgagtatattttcaaggtgcatcccagctgtggcatgaatcagcatctcattcctttttattgccaaataatattctatcatatggatatgtcgcattttatgtatccattcatcagctgatggacatttgggttgtttgtactttttggctaccatgaataatgctactatgaacttttgtgtacaaatcttatgtggacttgttttcatttctcttggatgtatattcctaggagaatggctggattatacagtaactctttcctcataactttgcatatcaaaattatatccatctttcagaacccaaattcagtgttatttccaaagtgttccaacatctcccactcaaaatgaatcttctccctagtactcccattgtttagtacctaattgttcttaccagtttgtcttagagctcagtcattcctacacagcacttttcttcattatactgctaatttcattacactgtaagagtggggacaagctgttcttcttgtataccagaaagtagtgagtgcactgctgtgaagaaagcaggaactcaaaagttaagaattttgaatgagcctataaaatgtgtctaataaataataatgttcattttcaaatctcaacaattaaatgtttaacaaataacacttgaaataaatgtttattagaaaaacca

SEQ ID NO: 254346 - DNA, 684 bp, Homo Sapiens
gtcccaggccaatggtgaacatgctgcattttatgtttggattgtgctgtaataagagcctcttccttccctcagaggatgtggctgggcttctatcctagagatggagtagaaggcacaactggtttgatagttactattttctgacctgtttgctgaagtgatttgcgaattgactttcctagggtgttgcctgagtcctttgaaatctccttctgacatctttcccttctgttgtgaaatatgttaagccacaggccaaactgctataagatcgaagtttgtttttttctcacctaataatagagagggtatcagatggtctagggcagatttaactctacaaggttatcaggaactttgtttccttctgtcttattcagccattcccagtatgttttcttacccataagatcaaagcagactcatcagctccatatctgcattccactggggaaagagagagagaaaagagcagatttttaaaaaaagatatgactgagcattgctcagatcactgtggccacactttgctgaaagagatgctgggacatagaacctcttatctgggcagtcatgtgctgagttaaaactcagggattctgtgactacaagatgaaagacaatttggttgctgagatgcagttaatggcttctgttacagggagctcaatggacgtgccc

SEQ ID NO: 254347 - DNA, 828 bp, Homo Sapiens
  misc_feature (104)..(173): n is a, c, g, or t
  misc_feature (425)..(425): n is a, c, g, or t
  misc_feature (509)..(509): n is a, c, g, or t
  misc_feature (616)..(616): n is a, c, g, or t
gagggcaggctgatgtttcctgaatgggcccctgggtgttgcttgtccctgactctccatttccccatctgagtggatttggacctaatagggcactggagctnnnnnnnnnnnnnnnnnnnnnnnnnnnnnnnnnnnnnnnnnnnnnnnnnnnnnnnnnnnnnnnnnnnnnngtgtctgtgaaatgcgggttgaatgtagatgtttggcagcagctactccttgttgagctctcacagtgaactctactgcctctgccctccttccccgcctcccctggtgcctagcgacaggtctagccacttcctcctgagcccctctcccttttctgtggctggctgcctgcccgcctggcgctggacctttcatgtaacggcaatcagcatgtatattctggtctgccctgattctacacttaattctgnttccagtagtattttcctgtaccgtcagagtttacaaacacattttgacgaggcttttttctcaggatttcttaacctttccanaaggaagtccctatgcatggggtttctagacgtctataaatgctctgaaaatcgcattcttcttgtggaacgcataacttttcatctgctttgttcgtgcttaaaanaagatcactgattgaattgattgcattgatctatgccactgcgcttaaacctaaggatatgtagcccaactcttgggctggtaaactggtttgactactttaaatcgtccagcttgtaacaatccttgaaaattagggtcccatggtattccttgtagcggatatgccttgtcagttggcctctatgggtttaaaacctttcttaacaggct

SEQ ID NO: 254348 - DNA, 1001 bp, Homo Sapiens
tatgcttttccaaccaagccagaaacctgtgtcatcttttcaccccaccttcaatcaacaagtcctcaatcaacaagtcctactgactgcacatcttaaatatatctttatcagtccacaagtccttccaattatatttcccaagtatatctagaacttatccacttatatccccactgctactaccttagtttagggctatattctcttgaaaaaaagtgtccttacttcctgccaatccccaagtcatcttccagagtaaaatgcaaatcccatcaggccacttggatgaaaacccttcaaggattactggatagaattcaggctttcccctccagcccccaatcatagctcacaaaccttccttgctatttgttcttaagtaaaaaatcatttttcctcctccctccccaaaccccaaggaactctcactcttgctcaagctgttccgtccccttaccacccctgatacaactgccaggttaatttccagaattcttgcaagactcagttcagaagtcaccttctttcgtgaatgttttgattccctgaggctactttattttggtatggctgaaaaatcctagattttctaaacaaaacctgtttgaatcttggttctgatatggactaggagagagactgggtcaagtaagcttatctccctgaggctgtttcctcgtctgttaagtgtgaatatcaatacctgcctttcataatcaccagggaataaagtggaataatgttgataacagtgcttggcacctggaagtaggtggcagatgttaacgcccttcctcccttgcactgcgccccctgtgcctacctctagcattgtaacgaccacatagtattgaaatggccagtttacttgtctgccttcctttccaagaccgttggtgcctagaggactagaatcgtgtcctatttaactttgtgttcccaggtcctagctcaggagttggcaaataagaattaaatgtctgctacaccgaaaaaaa

SEQ ID NO: 254349 - DNA, 543 bp, Homo Sapiens
ccacaattccctgagatctcccaggtggcagctgcctccccaagacaggctcactcaccatgaccaagctgagcgcccaagtcaaaggctctctcaacatcaccaccccggggctgcagatatggaggatcgaggccatgcagatggtgcctgttccttccagcacctttggaagcttcttcgatggtgactgctacatcatcctggctatccacaagacagccagcagcctgtcctatgacatccactactggattggccaggactcatccctggatgagcagggggcagctgccatctacaccacacagatggatgacttcctgaagggccgggctgtgcagcaccgcgaggtccagggcaacgagagcgaggccttccgaggctacttcaagcaaggccttgtgatccggaaagggggcgtggcttctggcatgaagcacgtggagaccaactcctatgacgtccagaagctgctgcatgtcaagggcaagaggaacgtggtagctggagaggtagagatgtcctggaagagttcaaccg

SEQ ID NO: 254350 - DNA, 1397 bp, Homo Sapiens
tagcgaggcctgggtggcgaattcggcacgaggccaagacaggctcactcaccatgaccaagctgagcgcccaagtcaaaggctctctcaacatcaccaccccggggctgcagatatggaggatcgaggccatgcagatggtgcctgttccttccagcacctttggaagcttcttcgatggtgactgctacatcatcctggctatccacaagacagccagcagcctgtcctatgacatccactactggattggccaggactcatccctggatgagcagggggcagctgccatctacaccacacagatggatgacttcctgaagggccgggctgtgcagcaccgcgaggtccagggcaacgagagcgaggccttccgaggctacttcaagcaaggccttgtgatccggaaagggggcgtggcttctggcatgaagcatgtggagaccaactcctatgacgtccagaggctgctgcatgtcaagggcaagaggaacgtggtagctggagaggtagagatgtcctggaagagtttcaaccgaggggatgttttcctcctggaccttgggaagcttatcatccagtggaatggaccggaaagcacccgtatggagagactcaggggcatgactctggccaaggagatccgagaccaggaagcggggagggcgcacctatgtaggcgtggtgggacggagagaatgaattggcatccccgaagctgatggaggtgatgaaccacgtgctgggcaagcgcagggagctgaaggcggccgtgcccgacacggtggtggagccggcactcaaggctgcactcaaactgtaccatgtgtctgacttcgaggggaatactggctggtgaggcgatagtcgccacacggccactgacacaggacctgcctcagtgcacgaggactgttacatcctggaccaggggggcctgaagatcgacgtgtggaaagggaagaaagccaatgagcaggagaagaagggagccatgagccatgcgctgaacttcatcaacagccaacgcagtacccaccaagcacacaggccggagcgtgcagaatgactcggggctgagtcggccgatcgtttacagcagctcttgccagaacgctggacaagcagtccaagcgcggactctcaggccctaggcaaaacccacactgtgggctccgtgggtgagggccaggacgggggcagtagagggagccaggatccaggagctgggcacaggagagcacacttaggtccaccacccaccctccttccctgacgtgcatcttcaagcgaagacttttacgctggctctgggcttgtcaatagcagatggggacgtggacaaactctagttgtcacaaaaagggatgctgagagggcttgggcactggtggcat

SEQ ID NO: 254351 - DNA, 2182 bp, Homo Sapiens
  misc_feature (1420)..(1431): n is a, c, g, or t
  misc_feature (1633)..(1643): n is a, c, g, or t
  misc_feature (1866)..(1874): n is a, c, g, or t
  misc_feature (1984)..(1984): n is a, c, g, or t
agtttccgcgcgcctctttggcagctggtcacatggtgagggtgggggtgagggggcctctctagcttgcggcctgtgtctatggtcgggccctctgcgtccagctgctccggaccgagctcgggtgtatggggccgtaggaaccggctccggggccccgataacgggccgcccccacagcaccccgggctggcgtgagggtctcccttgatctgagaatggctacctctcgatatgagccagtggctgaaattggtgtcggtgcctatgggacagtgtacaaggcccgtgatccccacagtggccactttgtggccctcaagagtgtgagagtccccaatggaggaggaggtggaggaggccttcccatcagcacagttcgtgaggtggctttactgaggcgactggaggcttttgagcatcccaatgttgtccggctgatggacgtctgtgccacatcccgaactgaccgggagatcaaggtaaccctggtgtttgagcatgtagaccaggacctaaggacatatctggacaaggcacccccaccaggcttgccagccgaaacgatcaaggatctgatgcgccagtttctaagaggcctagatttccttcatgccaattgcatcgttcaccgagatctgaagccagagaacattctggtgacaagtggtggaacagtcaagctggctgactttggcctggccagaatctacagctaccagatggcacttacacccgtggttgttacactctggtaccgagctcccgaagttcttctgcagtccacatatgcaacacctgtggacatgtggagtgttggctgtatctttgcagagatgtttcgtcgaaagcctctcttctgtggaaactctgaagccgaccagttgggcaaaatctttgacctgattgggctgcctccagaggatgactggcctcgagatgtatccctgccccgtggagcctttccccccagagggccccgcccagtgcagtcggtggtacctgagatggaggagtcgggagcacagctgctgctggaaatgctgacttttaacccacacaagcgaatctctgcctttcgagctctgcagcactcttatctacataaggatgaaggtaatccggagtgagcaatggagtggctgccatggaaggaagaaaagctgccatttcccttctggacactgagagggcaatctttgcctttatctctgaggctatggagggtcctcctccatctttctacagagattactttgctgccttaatgacattcccctcccacctctccttttgaggcttctccttctccttcccatttctctacactaaggggtatgttccctcttgtccctttccctacctttatatttggggtccttttttatacaggaaaaacaaaacaaagaaataatggtcnnnnnnnnnnnnaaccaaaccctgcccaatctccgacccaatacaaaaaaatcctgtgcgcccgaccccgcgccctcgagaaaaatttctatacaacttctcttttgtggcgcgcggcccccctaggcgaagtcgcaaaacggggcccactctcgtcttccctacagagaaccctgcgcccaccacaaagagggccgcgagcatctcccccccnnnnnnnnnnncgccccggccgccgacaaacccacccgtttttcgagccaccatccccctcagcggcgcattcttccttggcctcccctttccctggggcttatttatcacaccaagccgcgggacccccataagggccgggcgttctctacgcatatctaaacaccttccccgcccccgccgcccccatcacgtcgcccaccatcttttatcccgatctaccggttggccggnnnnnnnnngcttattaagcatgccctctgtcgttaaccgcccgcgtagatccgctttttcccaacccgcaggcgtgcgcgatcatcactcccgaatcccgcccagcgttgcgcgcctntgtccccatctgcgtgtagacaatccgccaaattaacactacagctctccctcaccgggaccccggaaacggcgcgctcacgggtaaatacccgttatacctatttcccgcccccggtatccccaccccacccgttgtgcgcgcctcctatccccccgcgccttttatccccgcactagcacgtaccgcccgttatca

SEQ ID NO: 254352 - DNA, 351 bp, Homo Sapiens
ccacacccagttatagtaataatccccttgcaccttaatttaagagagagaaagcagtagcacagaaacaagaatgtcccatcaggggctttggaactgaaaaaacattaacaacagcctggcctctagctcaggcagatgagggcaaaggggagggtaatctttcaatggcaaattcactggggctaaagctgtttcttgagtgctggcctcttaagtcaaggatgtagagagaattcagaagaaatagatgagcacctttgtttttttctgtttaaaggaaatttccttccttaatggtagtctcaccccaggtgcagcagtaaaattttggctcactgcaacctcgtc

SEQ ID NO: 254353 - DNA, 918 bp, Homo Sapiens
gggtacttagatactggagttcagaagatgtgatttttgttgcttttcagaaaaaggaacgtggtagggagtgttttttcccacgcttttccagtaactttgcaaaagcattaattgttcactggcaattactaaatgtattttgttgctctgagaaactcagcagtgtactgagatgtggctggctgtgccatcgtcatagtgcacagtgacttttctgtttcttatcactaaagactcaggtgaggttatgaaactttcattggtcccatcgttgtgcgcagggtgcaactggctacctagaagctgatggcaggagactgtttcacacacaggagattgtgagctgtgtaagtagtcatcgccactcaagtaggacaagggtcctacccaaggctaggaccgccctgcggaaacagaaacatagactgagaacaaacctcaagactatcagtgtgacctccccataacaagagaaccccatatatagtttgagactttcccttgagaaacttatactaaaactattactcatcagtcattcactgatcagcagctaaagtccatgagaccaaatggttttatatggaaccaacgaagtgggagctaaaactgcacagtggtcattctttggcctctccttggctttatgacttaaaccaactacaacttccctatagcttctaagcagtttcatcagcattacttggggaaaacgtgttgcaagtcaaccagtcactaggatatttctacccatgcaacggaagaaaaacccattactccagaagagtatatctaagtaactaaaaatggaggcagaaaatgttttaaggattttcttcaaagaataagccacagcaatggttttgtagaaaactcctgtgctttttgagcaaggacttttgccctctagaaagc

SEQ ID NO: 254354 - DNA, 658 bp, Homo Sapiens
  misc_feature (581)..(610): n is a, c, g, or t
acaggtgtgagtcaccacgcccagcctagagtagtcaaattcttaatgacagaaagtagaatagctgtcagaggccagaagaggggataatgggaagttactgtttaatgggtagaggtgtccaattgtgaatgatgagaaaagttctggagatcatggtgatgatggttgcacaacatgaatgtatttaatgccacagactgtacacgttaaaatggtaaatattgttaatgtatttaatgccacacacacaaaaagttttaaattgccaaagttcccaaccagcagatctcatgctgttggccaatctgcagggtggcaggagctccattgactccttggggaaagtatcagaaggctgctggggatggcactgggaccccccctcctcctagtgacaaggaggcttcttcagaaataagaaaagctactcattaatgatcccacaaaaagtttgggaaccactggacaggatgaacatctgcaaggattaatgctcttattctcatgatctctggccaggccccacctaggagctaattcagtaggaaatttcattcgactcattggttttagccacnnnnnnnnnnnnnnnnnnnnnnnnnnnnnncaaacagtaggtacatacacacagattaacagttcaaagatactggtc

SEQ ID NO: 254355 - DNA, 1113 bp, Homo Sapiens
  misc_feature (679)..(713): n is a, c, g, or t
  misc_feature (959)..(1044): n is a, c, g, or t
ggggccccacgctgcgcacccgcgggtttgctatggcgatgagcagcggcggcagtggtggcggcgtcccggagcaggaggattccgtgctgttccggcgcggcacaggccagagcgatgattctgacatttgggatgatacagcactgataaaagcatatgataaagctgtggcttcatttaagcatgctctaaagaatggtgacatttgtgaaacttcgggtaaaccaaaaaccacacctaaaagaaaacctgctaagaagaataaaagccaaaagaagaatactgcagcttccttacaacagtggaaagttggggacaaatgttctgccatttgggcagaagacggttgcatttacccagctaccattgcttcaattgattttaagagagaaacctgtgttgtggtttacactggatatggaaatagagaggagcaaaatctgtccgatctactttccccaatctgtgaagtagctaataatatagaacaaaatgctcaagagaatgaaaatgaaagccaagtttcaacagatgaaagtgagaactccaggtctcctggaaataaatcagataacatcaagcccaaatctgctccatggaactcttttctccctccaccaccccccatgccagggccaagactgggaccaggaaagccaggtctaaaattcaatgnnnnnnnnnnnnnnnnnnnnnnnnnnnnnnnnnnnttactatcatgctggctgcctccatttccttctggaccaccaataattcccccaccacctcccatatgtccagattctcttgatgatgctgatgctttgggaagtatgttaatttcatggtacatgagtggctatcatactggctattatatgggtttcagacaaaatcaaaaagaaggaaggtgctcacattccttaaattaaggagaaatgctggcatagagcagcactaaatgacaccactannnnnnnnnnnnnnnnnnnnnnnnnnnnnnnnnnnnnnnnnnnnnnnnnnnnnnnnnnnnnnnnnnnnnnnnnnnnnnnnnnnnnnaaaaaggaagtggaatgggtaactcttcttgattaaaagttatgtaataaccaaatgcaatgtgaaata

SEQ ID NO: 254356 - DNA, 772 bp, Homo Sapiens
aattagtttatgggggggcctcatttccttttgcccaccaatattcccccaccactcccatatgtcccaattcctttgatgagctgaggcttgggaagtatgttaatttcatggacatgagtggctatcatctgggctattattgggtttcagcaaaaatcaaaagaaagaaaggtgctcacattccttaaattaaggagaaatgctggcatagagcagcactaaatgacacccctaaagaaacgatcagccagatctggaatgtgaagcgttatagaagataactggcctcatttcttcaaaatatcaagtgttgggaaagaaaaaaggaagtggaatgggtaactcttcttgattaaaagttatgtaataaccaaatgcaatgtgaaatattttactggactctattttgaaaaaccatctgtaaaagactggggtgggggtgggaggccagcacggtggtgaggcagttgagaaaatttgaatgtggattagattttgaatgatattggataattattggtaattttatgagctgtgagaagggtgttgtagtttataaaagactgtcttaatttgcatacttaagcatttaggaatgaagtgttagagtgtcttaaaatgtttcaaatggtttaacaaaatgtatgtgaggcgtatgtggcaaaatgttacagaatctaactggtggacatggctgttcattgtactgtttttttctatcttctatatgtttaaaagtatataataaaaatatttaattttttcttac

SEQ ID NO: 254357 - DNA, 374 bp, Homo Sapiens
agagcagtctgtccaaaattaggtgttactgaaacccaacctaacataatgtcttcagcaacaagaggaggaaatcctgccattcgttcccacccattggaatctggagtaacgtatgacctgcatgcttctgatacagagcgtctgccctgtccaaggaggtgatatgcacagggaggatgttggaagccacgactgtaaaccaagctgactgaccctgcaggaaatctatgcggcctatagcacccaaaaacagaaccattcctggtttaagcacaaaagttcttggaacaatggactgtgttggcaaaacaatatttacttctttttctgttagaagatttaaaatacaattttcttttgtaattccaggg

SEQ ID NO: 254358 - DNA, 1664 bp, Homo Sapiens
gctggctgctgtcgcaccaccggcgcgctctacgcctgcaggtgagccgcgagcagtacctggagctggtgagcgccgcgttgcggcggcccggcccctccctggtgctctacatggtggacctgctggacctgcccgacgccctgctgcccgacttgcccgcgctggtgggccccaagcagctgatcgtgctgggaaacaaagtggacctcctgccccaggatgctcctggctaccggcagaggctgcgggagcgactgtgggaggactgtgcccgcgccgggctcctgctggcccctggccaccaagggccacagcgccccgtcaaggacgagccacaggacggggagaatccgaatccgccgaactggtcccgcacagtggtcagggacgtgcggctgatcagcgccaagaccggctatggagtggaagagttgatctctgcccttcagcgctcctggcgctaccgtggggacgtctacttagtgggcgccaccaacgccggcaaatccactctctttaacacgctcctggagtccgattactgcactgccaagggctccgaggccatcgacagagccaccatctccccttggccaggtactacattaaaccttctgaagtttcctatttgcaacccaactccttacagaatgtttaaaaggcatcaaagacttaaaaaagattcaactcaagctgaagaagatcttagtgagcaagaacaaaatcagcttaatgtcctcaaaaagcatggttatgtcgtaggaagagttggaaggacattcttgtattcagaagaacagaaggataacattccctttgagtttgatgctgattcacttgcctttgacatggaaaatgaccctgttatgggtacacacaaatccaccaaacaagtagaattgactgcacaagatgtgaaagatgcccactggttttatgacacccctggaattacaaaagaaaattgtattttaaatcttctaacagaaaaagaagtaaatattgttttgccaacacagtccattgttccaagaacttttgtgcttaaaccaggaatggttctgtttttgggtgctataggccgcatagatttcctgcagggaaatcagtcagcttggtttacagtcgtggcttccaacatcctccctgtgcatatcacctccttggacagggcagacgctctgtatcagaagcatgcaggtcatacgttactccagattccaatgggtggaaaagaacgaatggcaggatttcctcctcttgttgctgaagacattatgttaaaagaaggactgggggcatctgaagcagtggccgacatcaagttttcctctgcaggttgggtttcagtaacacctaattttaaggacagactgcatctccgaggctatacacctgaaggaacagttttgaccgtccggccccctctcttgccatatattgttaacatcaaaggacagcgcatcaagaaaagtgtggcctataaaaccaagaagcctccttcccttatgtacaacgtgaggaagaagaaaggaaagataaatgtatgagaccgaccttgttcactccagatattaactgtattgaacacaacaaaatacattgaatttgtattaaacatataacgcataaataaagctcccattcttacccttaaaaaa

SEQ ID NO: 254359 - DNA, 373 bp, Homo Sapiens
cggggcacagctctgggggagccccgaggggcgagaaggcagcttggctggaagggagcggggagtgggagtccgccagctccccctgaaatgctggctcactgaggagacgggcttctcacctcccactcttctgtcgaggacagggggaaagacagtcaataaataaacccgaggcgaaaaggggcctcgggagactctgcgagtcgggaaggctggaggtgcggggcgagggggcggtgaaacgtcctgaagagcgtccagctcgtggccgagaggactcgggcgctccccacgatggaggccgtggaccgctcccaaaagttgaaacggccgccgttcgggacggcctggcgggaggagggcagggcgc

SEQ ID NO: 254360 - DNA, 1167 bp, Homo Sapiens
caatgcacagggggagaaaaatggaaaacctaaagagtaaaaccttagcacttagcacaattaaatagaaataggttgtcttgatgggaattcaatagcttgtaatgtcttatgaagacctattaaaaaaatacttcatagagcctgccttatccaacatgaaattcccttcttttgttattctttcttttgatgagtaggttaccaagattaaaaagtgagataaatggtcaatgagaaagaatggaagatggtgaacaatcactctttaaaacctgttaagtcaaaaccatcttggctaatatgtactggggaaataatccatatgagatatcaccagactagaattaatatatttataaagaaagagaccaaaactgtctagaatttgaaagggtttacatattattatactaaagcagtactggaccggccattggaccatttgttccaaaacccataaattgttgcctaaatttataatgatcatgaaaccctaggcagaggaggagaaattgaaggtccagggcattgaaagaaaaatggcgccctctcaatttagtcttctctcattggccatgtttcagattttgacctagaaatgcgagctgtggttaggcttggttagagtgcagcaagcaacatgacagatggtggcacgctgtttttacccagccctgcctgtacatacacatgcacaccctctctgatatttttgtcctttagatgttcaaatactcagtagtccttttgtttgcggtttagattcattttgtccacacatgtacccattttaaaaaacaatgtcctcgatgcttctgtagtgatttcattttagccaggtatttctttcttgtgtgtgatgaaccagtatggatttgcttttctaagcctcctgttggttactaatctcacttggcacattataactaaaggaatcccctcaattcaaaagcatagatggatacaaatgtcagaccgtgggtttaatttgtttagaacacatggcatttcttcacaaggtaacctgctgtatttatttattttcttttggttaaatataatttccaaactttgtggtcaggcagcgtctaaggttacgttaccacagactgacagttggtatatgtaccagccaatcccttcattaaatgtatacagatttag

SEQ ID NO: 254361 - DNA, 155 bp, Homo Sapiens
aaggatatatatttcaaaaggtgttttaaagaagaattttgagagctagtcttagacggtgaataccataggacgttttgcatttgacttctttcttacttctactatgtggttcaggcctcactgccttttgcctgacgcatacagtagcttcc

SEQ ID NO: 254362 - DNA, 809 bp, Homo Sapiens
  misc_feature (640)..(640): n is a, c, g, or t
gtgggggggagcttctcattcatgtcaagtatgtggttcattcttagaaccaagggaaatactgctccccccatttgctgacgtagtgctctcatgggctcacctgggcccaaggcacagccagggcacagttaggcctggatgtttgcctggtccgtgagatgccgcgggtcctgtttccttactggggatttcagggctgggggttcagggagcatttccttttcctgggagttatgaccgcgaagttgtcatgtgccgtgcccttttctgtttctgtgtatcctattgctggtgactctgtgtgaactggcctttgggaaagatcagagagggcagaggtggcacaggacagtaaaggagatgctgtgctggccttcagcctggacagggtctctgctgactgccaggggcgggggctctgcatagccaggatgacggctttcatgtcccagagacctgttgtgctgtgtattttgatttcctgtgtatgcaaatgtgtgtatttaccattgtgtagggggctgtgtctgatcttggtgttcaaaacagaactgtatttttgcctttaaaattaaataatataacgtgaataaatgaccctatctttgcgcccacccacccgtagcgttagtgcggnggccgtggtgggccggcctcgggcccttcaagaaagtttctaagaccttttcgttttggcccgggggggccccagtagggtaacgggaaacccggggccactaacctggtttccttaaggggaaatccccgggccaatgaccaaggggctttggaattccccccccaac

SEQ ID NO: 254363 - DNA, 622 bp, Homo Sapiens
gacccagacccattcttaatctacgttctgctgtgttccttagaaggctcacctgaattggatactgcagagatctcccttaccctcatgcttttattggggttcagctaatggagggggtggcagaagacaggtgagagaagagtgtgtttatcccccacctctgcccctgcagggtcagcacaggcagactgtgtccctttgctgaagatcacagcttctgtctggtgccttcttggcaagctggcactctctctagtcaggtgactgcttggccccttactacttacactcttctgtctggctttgtgtctttcctgctgtgctgtaagtagtccctttattagaatccatccacattacccagttatataaagacaaatagttggtcactgatctagttcactccctgagaatcagccttcatcaaagatccctaacagtcagatattctgttggccgctccattcctgctccccattattctagttgtgtcttccttgtctctagtgcaatcacaaagcataagcgcctccactgtcacttgttctttgcaactctaggatcacatcattccccttgaaatcagagaacccacaatctccccaagcccacaaaattc

SEQ ID NO: 254364 - DNA, 1148 bp, Homo Sapiens
  misc_feature (754)..(754): n is a, c, g, or t
  misc_feature (762)..(762): n is a, c, g, or t
  misc_feature (767)..(767): n is a, c, g, or t
  misc_feature (778)..(778): n is a, c, g, or t
agagatggcggcggccgacggggctttgccggaggcggcggctttagagcaacccgcggagctgcctgcctcggtgcgggcgagtatcgagcggaagcggcagcgggcactgatgctgcgccaggcccggctggctgcccggccctactcggcgacggcggctgcggctactggaggcatggctaatgtaaaagcagccccaaagataattgacacaggaggaggcttcattttagaagaggaagaagaagaagaacagaaaattggaaaagttgttcatcaaccaggacctgttatggaatttgattatgtaatatgcgaagaatgtgggaaagaatttatggattcttatcttatgaaccactttgatttgccaacttgtgataactgcagagatgctgatgataaacacaagcttataaccaaaacagaggcaaaacaagaatatcttctgaaagactgtgatttagaaaaaagagagccacctcttaaatttattgtgaagaagaatccacatcattcacaatggggtgatatgaaactctacttaaagttacagattgtgaagaggtctcttgaagtttggggtagtcaagaagcattagaagaagcaaaggaagtccgacaggaaaaccgagaaaaaatgaaacagaagaaattggataaaaaagtaaaagaggttgttcccgccttcctgaataggccaacaaagggctgagactggagtagacactgtagagattagacacaaggngcttactntgcanttttctcaganggctcagaacagagaggaataaaagcaagtctaaaagtattttagttgaaaagaaattggaacctggttcctcttggtcttctgattttgatccacaaagaagctgacacagtttacttctttatgggaagaattgcggcgagcagtaagaagcagcgtgtggaaaagggagcacgattgttcatcaacatgagtatggaccagaagcctagaagatgacatgtaccctttgaaatatcagtgatgtataatgaatctgacctgcatacactcgtgaaatcaagataatattttcatcacctcccaaatttccccatgcccctccatacgcacaggcatacattgtttcattgtgcttagcagttgcttc

SEQ ID NO: 254365 - DNA, 1214 bp, Homo Sapiens
  misc_feature (1132)..(1132): n is a, c, g, or t
acaaaatgctgggattcccgtacctgggccgggctgggaattttaaccatgactctccactccaaaataggtccagatccttggcagccagagatgatttccagccccgggctcagggcagccagtgcgtagtcctcacatccataccatagggccaggttccgagggcatcatggctgctaggctgaaaaacccgcccttctccaggcaccagaggtcatcctggctttacacgtatcctttgagagtctgtacctgattcaaacacggagaaaccaggaccccgagcagtttgagtgtactggtaatggatgcagctttggccaactagctgagtgaagaacacaaggagccgtgactccgaacgcccaagcctgtgtcctggatgggccgtgtgcagcgaatccgttggcgactcctaactaccaagaaaaggagctctcggaggagatttcgtcgagtgctacgtgtggctgtgataagggcaggcaaagcgtcttagcactctacagctctggcgtggttggagggagggtgggggtttctccatctctggaagctctacacttaaacattttaagttaaattacatttatatagtattttcataatttatattgcttaaaattatgatttgcatgctaagatgcaaacttacgtgatatcttctttagacataatgctattaagagcacatgctttataaaataaaactggtctcattcatatcaggtgcagaaagccagtcctgaaagcatagactatcccttattctggctgttattaaggaaaaaattcatttaaaaaatacagtaaagattgaaaccaagtttactgtttcttgaacagaataggaagaaaatattttaaatggctgagctggtcattagactattactcatttatcttaaaggcagaaacttgtcaacccaactacgtgaaacagagaagcatgatttgcttaagcaggcgacattagagttaggcctctccactgaagcttcccgaccgtcagcacgtggcagacaggatgcgcccatcattccgcaagggagaaccggagaggcccgggagagtccttggctgtcctctcatcgaatgatgggtgccgagcgatcattcgtcacagtcngggcggagtttcacagtggcaaaggggttttctccgctgagaaaaggcggctttgcagtcccgttggcatcgttaggagccg

SEQ ID NO: 254366 - DNA, 366 bp, Homo Sapiens
gcgagggaaaaccacatgagaggctgttgctgtgggaatgtttgtcccctctcagagagatggttaggccatgagggctctgcctttatgaatggattaatgctgttatcttaggagtgcattccttataaaatgacaagtttggcccctttggctctctcccttcttctctctttgcccttctgccatgtgatgccttcctccatgggatgacacagcaagaaggccctctctagatgccagcgcctcgttcttggacttcatagcatcctgaaatgtcagccaataaatgtctgttcattataaattaaccagcctcagatattctgttatagcagcaagcacaaaaaataagtaatacaaaag

SEQ ID NO: 254367 - DNA, 370 bp, Homo Sapiens
acagggcactcccgtcggctgcgaatgagaaagagccttcagtgggaagaaattcatttctccatcccagtgcagtcagacttcatggggcctgtcttgaactctgattgcatcattaacacgatcaagagagacagtgaaatggggtcccggatccactgggacaattcaaaagcctacaatactgctttgatggatcctacataattacttacaaatcattcatggcaggcatttgaaatcaatcctttgctgctgggattctgataggttggctcctctggtgtttaacagcatcccagtgaagcccatgcagcatgaccatgatgcaaatcacctccctcttgtgcacccagcaatgacctgttac

SEQ ID NO: 254368 - DNA, 1162 bp, Homo Sapiens
gtgtcgcccccctggggtttgtgcccctccctgtgtgtggccaaaagcgcgggttatgtgcaccgcttgcaggttttaaccatttgtctaccgcgttccgcggactgtcggaggccagattcgccctttgacgggtccctgcccacccccatcattttcttcagggcctgcttggcgtctgggcgcacttacagatgcggcccagcattgtgcggcaggacgcagctggcatgcgttttgcggtgaatcacctgcaaggtcagccgtgggactcacctacgacactgtgtatcgcatggggaaatgaaccagggatgcatgcactacaactttgctcttttgggcatcatgcacagtgtcagatagttacacgtgttgcccttcatatgtagaggttctttttgcgccctcctgtccacagcagcacatttaatctatgaagaggattttctctgctggggctatgaaaacaaatgcacatttcttttaagttctatcatacatacaggagataaggtaaaaacatttccttttctatgctgacatacatggcgagtaactgccaaatttaaacactaggagatagtcacacacttcagagaagagaagaggtactagagaggaagtgacacccgcttccagaagcagtatctcaggagtgaagagaggaacagtggcactcccgtcttggctgcgaatgagaaagagtttccttcagtgggaagaaattcatttctccatcccagtgcagtcagacttcatggggcctgtcttgaactctgattgcatcattaacacgatcaagagagacagtgaaatggggtcccggatccactgggacaattcaaaagcctacaatactgctttgatggatcctacataattacttacaaatcattcatggcaggcatttgaaatcaatcatgacctagagttacgctactttattgtaaaaagcctctaaaatctgagttttcctttgctgctgggattctgataggttggctcctctggtgtttaacagcatcccagtgaagcgccaccgcacgcatgaccatgatgcaaatcacctccctcttgtgcatcccgacgcgtggtcgacgatatcccgtaaattccggaccggacgcacctgtcataaccgaggttgcacatcaatctg

SEQ ID NO: 254369 - DNA, 1803 bp, Homo Sapiens
  misc_feature (1650)..(1650): n is a, c, g, or t
  misc_feature (1654)..(1654): n is a, c, g, or t
  misc_feature (1657)..(1660): n is a, c, g, or t
gcacccctgcctcaatggggcctcctgcgtcccgagggaggctgcctatgtgtgcctgtgtcccgggggattctcaggaccgcactgcgagaaggggctggtggagaagtcagcgggggacgtggataccttggcctttgacgggcggacctttgtcgagtacctcaacgctgtgaccgagagcgagaaggcactgcagagcaaccactttgaactgagcctgcgcactgaggccacgcaggggctggtgctctggagtggcaaggccacggagcgggcagactatgtggcactggccattgtggacgggcacctgcaactgagctacaacctgggctcccagcccgtggtgctgcgttccaccgtgcccgtcaacaccaaccgctggttgcgggtcgtggcacatagggagcagagggaaggttccctgcaggtgggcaatgaggcccctgtgaccggctcctccccgctgggcgccacgcagctggacactgatggagccctgtggcttgggggcctgccggagctgcccgtgggcccagcactgcccaaggcctacggcacaggctttgtgggctgcttgcgggacgtggtggtgggccggcacccgctgcacctgctggaggacgccgtcaccaagccagagctgcggccctgccccaccccatgagctggcaccagagccccgcgcccgctgtaattattttctatttttgtaaacttgttgctttttgatatgattttcttgcctgagtgttggccggagggactgctggcccggcctcccttccgtccaggcagccgtgctgcagacagacctagtgctgagggatggacaggcgaggtggcagcgtggagggctcggcgtggatggcagcctcaggacacacacccctgcctcaaggtgctgagcccccgccttgcactgcgcctgccccacggtgtccccgccgggaagcagccccggctcctgaatcaccctcgctccgtcaggcgggactcgtgtcccagagaggaaggggctgctgaggtctgatggggcccttcctccgggtgaccccacagggcctttccaagcccctatttgagctgctccttcctgtgtgtgctctggaccctgcctcggcctcctgcgccaatactgtgacttccaaacaatgttactgctgggcacagctctgcgttgctcccgtgctgcctgcgccagccccaggctgctgaggagcagaggccagaccagggccgatctgggtgtcctgaccctcagctggccctgcccagccaccctggacatgaccgtatccctctgccacaccccaggccctgcgaggggctatcgagaggagctcactgtgggatggggttgacctctgccgcctgcctgggtatctgggcctggccatggctgtgttcttcatgtgttgattttatttgacccctggagtggtgggtctcatctttcccatctcgcctgagagcggctgagggctgcctcactgcaaatcctccccacagcgtcagtgaaagtcgtccttgtctcagaatgaccaggggccagccagtgtctgaccaaggtcaaggggcaggtgcagaggtggcagggatggctccgaagccagaaatgccttaaactgcaacgtcccgtccctnaccnacnnnnatcccatccccacccccagccccagcccagtcctcctaggagcaggacccgatgaagcgggcggcggtggggctgggtgccgtgttactaactctagtatgtttctgtgtcaatcgctgtgaaataaagtctgaaaactttaa

SEQ ID NO: 254370 - DNA, 2470 bp, Homo Sapiens
  misc_feature (1722)..(1722): n is a, c, g, or t
  misc_feature (1735)..(1735): n is a, c, g, or t
  misc_feature (1759)..(1759): n is a, c, g, or t
  misc_feature (1785)..(1785): n is a, c, g, or t
  misc_feature (1797)..(1797): n is a, c, g, or t
ggggccgcaagcggcatggaggaggcggaggccgcggcgagccgggccgagcagtgagggccctagcggggcccgagcggggcccggggcccctaagccattcctgaagtcatgggctggccaggacattggtgacccgccaatccggtatggacgactggaagcccagccccctcatcaagccctttggggctcggaagaagcggagctggtaccttacctggaagtataaactgacaaaccagcgggccctgcggagattctgtcagacaggggccgtgcttttcctgctggtgactgtcattgtcaatatcaagttgatcctggacactcggcgagccatcagtgaagccaatgaagacccagagccagagcaagactatgatgaggccctaggccgcctggagcccccacggcgcagaggcagtggtccccggcgggtcctggacgtagaggtgtattcaagtcgcagcaaagtatatgtggcagtggatggcaccacggtgctggaggatgaggcccgggagcagggccggggcatccatgtcattgtcctcaaccaggccacgggccacgtgatggcaaaacgtgtgtttgacacgtactcacctcatgaggatgaggccatggtgctattcctcaacatggtagcgcccggccgagtgctcatctgcactgtcaaggatgagggctccttccacctcaaggacacagccaaggctctgctgaggagcctgggcagccaggctggccctgccctgggctggagggacacatgggccttcgtgggacgaaaaggaggtcctgtcttcggggagaaacattctaaatcacctgccctctcttcctggggggacccagtcctgctgaagacagatgtgccattgagctcagcagaagaggcagagtgccactgggcagacacagagctgaaccgtcgccgccggcgcttctgcagcaaagttgagggctatggaagtgtatgcagctgcaaggaccccacacccatcgagttcagccctgacccactcccagacaacaaggtcctcaatgtgcctgtggctgtcattgcagggaaccgacccaattacctgtacaggatgctgcgctctctgctttcagcccagggggtgtctcctcagatgataacagttttcattgacggctactatgaggaacccatggatgtggtggcactgtttggtctgaggggcatccagcatactcccatcagcatcaagaatgcccgcgtgtctcagcactacaaggccagccccactgccactttcaacctgtttccggaggccaagtttgctgtggttctggaagaggacctggacattgctgtggattttttcagtttcctgagccaatccatccacctactggagggaggatgacagcctgtactgcatctctgcctggaatgaccaggggtatgaacacacggctgaggacccagcactactgtaccgtgtggagaccatgcctgggctgggctgggtgctcaggaggtccttgtacaaggaggagcttgagcccaagtggcctacaccggaaaagctctgggattgggacatgtggatgcggatgcctgaacaacgccggggccgagagtgcatcatccctgacgtttcccgatcctaccactttggcatcgtcggcctcaacatgaatggctactttcacgaggcctacttcaagaagcacaagttcaacacnggttccaggtgtnccagctcaggaaatgtggacagtnctgaagaaagaaagcttaatgaagtnggaagttcacanggctgctcagtgaggctgaggttctggaccacagcaagaacccttgtgaagactctttcctgccagacacagagggccacacctacgtggcctttattcgaatggagaaagatgatgacttcaccacctggacccagcttgccaagtgcctccatatatgggacctggatgtgcgtggcaaccatcggggcctgtggagattgtttcggaagaagaaccacttcctggtggtgggggtcccggcttccccctactcagtgaagaagccaccctcagtcaccccaattttcctggagccacccccaaaggaggagggagccccaggagccccagaacagacatgagacctcctccaggaccctgcggggctgggcctggctcagaatctaacctatttattgactgtcctgagggccttgaaaacaggccgaacctggagggcctggatttctttttgggctggaatgctgccctgagggtggggctggctcttactcaggaaactgctgtgcccaaacccgatggacaaggcccaagctggggcccaacatgctgacacagactcactcagagacccttagacactggaccaggcctcctctcaagccttctctttgtccagatttccaaaagctggataagttggtcattgattaaaaaaggagaagccctc

SEQ ID NO: 254371 - DNA, 1122 bp, Homo Sapiens
  misc_feature (1024)..(1024): n is a, c, g, or t
ttgtagatgctggtaggggctggggctaccttgtttttaacatgagacttaattactaactccaaggggcgggttcccctgctccaacaccccgttcctgagttaaaagtctatttatttacttccttgttggagaagggcaggagagtacctgggaatcattacgatccctagcagctcatcctgccctttgaataccctcactttccaggcctggctcagaatctaacctatttattgactgtcctgagggccttgaaaacaggccgaacctggagggcctggatttctttttgggctggaatgctgccctgagggtggggctggctcttactcaggaaactgctgtgcccaacccatggacaggcccagctggggcccacatgctgacacagactcactcagagacccttagacactggaccaggcctcctctcagccttctctttgtccagatttccaaagctggataagttggtcattgattaaaaaaggagaagccctctggaaaaacaaaaacccccagaacccagagacacagagataaaaaacatgtccggccgccttcgggccctcgaagcaaactttcttagaccctttcggttttggccgccgccggggccccccgacaggttaaaggtggaaccctgggacccattaagctgcttttcccctaagggaaaattcccctggggtccaatggaacataaggcgctttttgggaactttcctcccaccccacaataatacaaaaacacccgcgcccgcgcggggcgggggcacacacccgcgaaggggggttctctttgcaaaacaaaaaattccccacaaattggggaagttctccctcgaagcgcccccctttacaccgggggaactctcaatccccacccggggaagggcccccacggccgggaggcttccaaattatccaaaattttacgcccgcccggacccttgggccagttctttcccccagatcacccggccggcagaaattccatttaagcgcctttctcgggcncgagaatgtggaacgcctcttcccaaacaccgggcttgggatggaaaccctgaaatccgccccgggggtaatccaacaccccttgggcggcccttggg

SEQ ID NO: 254372 - DNA, 649 bp, Homo Sapiens
acttcttctctgcccagctggcccctgaagactgcctccaagccctaaggggagcatgaactgcctcatttgccccaagtcagaagggaagcggggaagcagggagaaagcacatgggtttctctctggctggggccttaagtccatgagggagtttcccattttacatttttcctctgccctgcccatactcctcttcctcagaactgaacatgttttaaatagaatcccccaacctgagttcttctgcacttctctgtctgataagggccaaggtccagcatttttaccctggctcaaattctgatgccatccaatgatttgcttacagactaaatttttcccccatttttgactcccccacacccgtttgtgcttccattagagataaaggatttcaaaacatttctgtgaaataaactgaaactgaaacatggcttccctcttctcttcccctccctttgtatgtttcactggccggctctgagcgtccaggtaactggggaaggaggaagtcactgttgcctcaaatgttccagccgagaagtagcagctttgccatatgctgggtgactttgtctcaggacagtgtggggccaaagtgtttattctgcaccagcagctagcagactcggggttgtgtttgcgg

SEQ ID NO: 254373 - DNA, 505 bp, Homo Sapiens
gccaccgctgcccgagcccgacgctatgtccagcaaaggctccgtggttctggcctacagtggcggcctggacacctcgtgcatcctcgtgtggctgaaggaacaaggctatgacgtcattgcctatctggccaacattggccagaaggaagacttcgaggaagccaggaagaaggcactgaagcttggggccacggccatccagtccagcgcactgtatgaggaccgctacctcctgggcacctctcttgccaggccctgcatcgcccgcaaacaagtggaaatcgcccagcgggaggaggccaagtatgtgtcccacggcgccacaggggggcgatcaggtccggtttgagctcagctgctactcactggccccccagataaaggtcattgctccctggaggatgcctgaattctacaaccggttcaagggccgcaatgacctgatggagtacgcacagcaacacgggattcccatcccggtcacttccaagaacccgtggag

SEQ ID NO: 254374 - DNA, 729 bp, Homo Sapiens
  misc_feature (701)..(701): n is a, c, g, or t
cccccttctcaccccaacacaccaccattctgccatggagtgcaggctccgtccagccagccccggtgagggagtctgtgtccttcccctccttcatggggctccctctcaccctcacaacagcatcctctctggggacatgctggagacccccatgggcccctcccaggagaggccagctctgcagcttacaggccaggggaagcccacagctcggccctcccggctctgaccccttgtcctatgtccaggtcattgctccctggaggatgcctgaattctacaaccggttcaagggccgcaatgacctgatggagtacgcaaagcaacacgggattcccatcccggtcactcccaagaacccgtggagcatggatgagaacctcatgcacatcagctacgaggctggaatcctggagaaccccaagaaccaagcgcctccaggtctctacacgaagacccaggacccagccaaagcccccaacacccctgacattctcgagatcgagttcaactccttggagctcttcatgtacctgaacgaagtcgcgggcaagcatggcgtgggccgtattgacatcgtggagaaccgcttcattggaatgaagtcccgaggtatctacgagaccccagcaggcaccatcctttaccatgctcatttagacatcgaggccttcaccatggacccgggaagtgcgcanaatcaaacggcctgggcttgtttgctga

SEQ ID NO: 254375 - DNA, 599 bp, Homo Sapiens
ggaagacttcgaggaagccaggaagaaggcactgaagcttggggccaaaaaggtgttcattgaggatgtcagcagggagtttgtggaggagttcatctggccggccatccagtccagcgcactgtatgaggaccgctacctcctgggcacctctcttgccaggccctgcatcgcccgcaaacaagtggaaatcgcccagcgggagggggccaagtatgtgtcccacggcgccacaggaaaggggaacgatcaggtccggtttgagctcagctgctactcactggccccccagataaaggtcattgctccctggaggatgcctgaattctacaaccggttcaagggccgcaatgacctgatggagtacgcaaagcaacacgggattcccatcccggtcactcccaagaacccgtggagcatggatgagaacctcatgcacatcagctacgaggctggaatcctggagaaccccaagaaccaagcgcctccaggtctctacacgaagacccaggacccagccaaagcccccaacacccctgacattctcgagatcgagttcaactcctggagctcttcatgtacccgaaacgaagtcgcgg

SEQ ID NO: 254376 - DNA, 1519 bp, Homo Sapiens
ccaccgcttgcccgagcccgacgctattgtccagcaaaggctccgtggttctggcctacagtggcggcctggacacctcgtgcatcctcgtgtggctgaaggaacaaggctatgacgtcattgcctatctggccaacattggccagaaggaagacttcgaggaagccaggaagaaggcactgaagcttggggccaaaaaggtgttcattgaggatgtcagcagggagtttgtggaggagttcatctggccggccatccagtccagcgcactgtatgaggaccgctacctcctgggcacctctcttgccaggccctgcatcgcccgcaaacaagtggaaatcgcccagcgggagggggccaagtatgtgtcccacggcgccacaggaaaggggaacgatcaggtccggtttgagctcagctgctactcactggccccccagataaaggtcattgctccctggaggatgcctgaattctacaaccggttcaagggccgcaatgacctgatggagtacgcaaagcaacacgggattcccatcccggtcactcccaagaacccgtggagcatggatgagaacctcatgcacatcagctacgaggctggaatcctggagaaccccaagaaccaagcgcctccaggtctctacacgaagacccaggacccagccaaagcccccaacacccctgacattctcgagatcgagttcaaaaaaggggtccctgtgaaggtgaccaacgtcaaggatggcaccacccaccagacctccttggagctcttcatgtacctgaacgaagtcgcgggcaagcatggcgtgggccgtattgacatcgtggagaaccgcttcattggaatgaagtcccgaggtatctacgagaccccagcaggcaccatcctttaccatgctcatttagacatcgaggccttcaccatggaccgggaagtgcgcaaaatcaaacaaggcctgggcttgaaatttgctgagctggtgtataccggtttctggcacagccctgagtgtgaatttgtccgccactgcatcgccaagtcccaggagcgagtggaagggaaagtgcaggtgtccgtcctcaagggccaggtgtacatcctcggccgggagtccccactgtctctctacaatgaggagctggtgagcatgaacgtgcagggtgattatgagccaactgatgccaccgggttcatcaacatcaattccctcaggctgaaggaatatcatcgtctccagagcaaggtcactgccaaatagacccgtgtacaatgaggagctggggcctcctcaatttgcagatcccccaagtacaggcgctaattgttgtgataatttgtaattgtgacttgttctccccggctggcagcgtagtggggctgccaggccccagctttgttccctggtccccctgaagcctgcaaacgttgtcatcgaagggaagggtggggggcagctgcggtggggagctataaaaatgacaattaaaagagacactagtcttttatttctaa

SEQ ID NO: 254377 - DNA, 406 bp, Homo Sapiens
  misc_feature (389)..(389): n is a, c, g, or t
ccaagaacccgtggagcatggatgagaacctcatgcacatcagctacgaggctggaatcctggagaaccccaagaaccaagcgcctccaggtctctacacgaagacccaggacccagccaaagcccccaacacccctgacattctcgagatcgagttcaaaaaaggggtccctgtgaaggtgaccaacgtcaaggatggcaccacccaccagacctccttggagctcttcatgtacctgaacgaagtcgcgggcaagcatggcgttgggccgtatttgacatcgtgggagaaccgctttcattgggaattgaagtcccgaggtatcttacggaggaccccaggcagggcaccattccttttaccatggcttcattttaggacatcgagngcctttcaccatgggac

SEQ ID NO: 254378 - DNA, 642 bp, Homo Sapiens
  misc_feature (29)..(29): n is a, c, g, or t
  misc_feature (48)..(48): n is a, c, g, or t
  misc_feature (70)..(70): n is a, c, g, or t
  misc_feature (77)..(77): n is a, c, g, or t
  misc_feature (80)..(80): n is a, c, g, or t
  misc_feature (137)..(137): n is a, c, g, or t
  misc_feature (152)..(152): n is a, c, g, or t
  misc_feature (158)..(158): n is a, c, g, or t
  misc_feature (201)..(201): n is a, c, g, or t
  misc_feature (220)..(220): n is a, c, g, or t
cgcagctgccccccacccttcccttcgangacaacgtttgcaggcttnagggggaccagggaacaaagcnggggccnggnagcccactacgctgccagccggggagaacaagtcacaattacaaattatcacaacanttagcgcctgtactngggggntctgcaaattgagggggccccagctcctcattgtacacgggtntatttggcagtgaccttgntctggagacgatgatattccttcagcagaggatcaaaggtctgagtgacttcagatgacgtgcaccaccctcctggggccatggagatccacgtggctaggatgcttccagctagacctacagctcaggtatggtgacagaaaacaaaggcttctctccacctctatgctatttccttgtttaacctgccctgcaaaggagctcatagtggagtccctgtggcttagcgggaggggagggcaagtatcagaggcaccggtgggacacaggaacctaggaccccaatgcctaggaccctctgttactgtcggctatcaaagcatgcttctgaggatgctatgggcagatggacaggaaagtggggtttgtctagggcagggcagggcagggcagggcagcagtcaaggtcgcatcaaagccta

SEQ ID NO: 254379 - DNA, 389 bp, Homo Sapiens
tcttaacaaacagctgccccagccaccccagctctgcctgaattaattgaacccagtgtgtgttgttattgttaatttacatttttctttgttttgaatctggtttacaggctgaaggaatatcatcgtctccagagcaaggtcactgccaaatagacccgtgtacaatgaggagctggggcctcctcaatttgcagatcccccaagtacaggcgctaattgttgtgataatttgtaattgtgacttgttctccccggctggcagcgtagtggggctgccaggccccagctttgttccctggtccccctgaagcctgcaaacgttgtcatcgaagggaagggtggggggcagctgcggtggggagctataaaaatgacaattaaaagag

SEQ ID NO: 254380 - DNA, 1516 bp, Homo Sapiens
tgaatgaacaaacctgtgatctagtccttgtcttgtaattgtggattaatgtcaatgttaatcagcccctcaaagggagagccccaccatttatgtgtagaatttgaaatggttgtcacctctctctgaggacagagcttgaagcctccacaccagctgctgctggagattcaaagcccaactgtgggtccgagagggaagctggctgggctggctgaagaatgaagaccactggactctccgttaatctctaaggggtctgctccccaggaacgtttctgaacaatggggactttgatggtagccatttggtagatgttcttttctatttataagtgactttaaactttcccttggctgttaagaagttgttatagatttagctatttattgttcgatgcctgcatgctgaaacaatgcctacagctgtcttcacatgtatggacgtgtgtgaatggttgtacgtttgcacatttgtggctgttgagatgtgctttgctgcacaaacatgaaaattttgagttacaatttggagcataactggagggtgggtcggggaggggtggatttttaaaatgtcaagacagggaaggatgacaaaatggaaatttaaatgacatcctagaggtagagaaaccgtggagatcgcttttctcagactcaccaacttttaatgggatttcatggggtttggttgtgctgatagggtaaggggaggctgctttctgcccttctccccactcccatctgatttacttaattcagtctcagctgctgaaatttggaaaggaccaaattgctttacagtttttttctttgtgtagtatcttgaaatcctggaaaattctatggaatagttctgtatatagggcacaagtaaaggcattgtccaaagtttatttatttatttattaccctaagaatgctttgccataaccacatttaatgggaaaaacggcagtatcacagatgtaaattaactcaccagatttactgggcctgaactcattctcttcttgctatatgatttagcaagttctagaaggtctccaagacaataattacattggcacaatgtatacttcagtgctcacccgtaggcaaatctctttttaaaaaactctttggtgcacaagtaacacatttggccacaaaaacaccaaagaattgtaggcagtggcccctattgagaagttttcccggtagagtgggaaatcagtgtgaatacattcttggtagtggaggggcggttactaaggaggtgccggcgaagggtattagggcaaggcccaactgggcgttcccggcgggccgggaagaccaggctggcatcgacaaggtctcggcccagttcctcaatgcggtttggaacagggcaactgtagaccctcaccggcgggggcacgcaagagagaaccgttgtccagtacataaatgaggcgcacacaaaagggtggccaaggcggaaaaacgctagcggactaataaaaaaccaggagtgaaccaaaacacagaa

SEQ ID NO: 254381 - DNA, 822 bp, Homo Sapiens
  misc_feature (335)..(335): n is a, c, g, or t
  misc_feature (408)..(408): n is a, c, g, or t
caagtaacacatttggccacaaaacaccaaagaattgtaggcagtggcccctattgagaagttttccggtagagttggaaatcagttgtgaatacattctttgctagttggagtgcttgtttactaagcatgtgccgtcgtaggtattagtgctagtctcaaataggtgcttcccctgaggtgcaggggaagaccaaagtttgcaactcgaactgctttcgtccatgtttctcacattgctgtattttagaaaataggggttaagactggataacaaccttttacattgtgactgtgtttgcattgtctaatgacagataaatccttaacatttnctctccaccttaggtactttaggactaattgtgtttgtccgtccatggccaggaatgagtggggctgtagttnggggcctaaataaatgagctgttggaagaaaagaatcacagtactttccagcagtcagtccctggttcctagatgtgttctaagcaatgcaaatgtctaattgtcccccagtgggcatagtcagtgtcgtttatattgtagcagttacagctctgtagtttatgatgcaaatctgccaagagagatgtatgtgtcactgcatggcttctgaaagcaggatgaattttctgcagctgtttcaaagttggggtctgttcttgaatcctctattaattactgtgtgtgagccagagggagctgtggtaagggttggggccccagcctgtagggaactttctggactcccactctttgaatcgatataggcatttggtctcactacttgaccaattctcaccctgtgaaacgtccaca

SEQ ID NO: 254382 - DNA, 893 bp, Homo Sapiens
  misc_feature (771)..(771): n is a, c, g, or t
aatgaatgatatcagtcagagtatggaagggaaaagaggcttcaagaatgactcagctttcgtggactcagcaactgagtggctggtggatttgtgttctaaaattgggaaagactatggagtgtgtgtgttggtggggggcagaaatcagtttgggcatattaggttttgggtgcctattggcaccccataagcatgtcaggtaggcagctgatttggagcctaaacctcaaaggagaggtcagtcagagctgacgagaacagattggaagtcatcagcatatagatggcatttaaagcccctggactaggtgagattaccaaggaagtgaaggtagagagagaagagaagaggcccaaagtaggggattccaatatttagatatcaggttgaagaaaagagtagtcaaaaaagataagaggaatactgggagagtcaggtgtcacagaagccaagttccaaaaaaagacatttaaaggagaaggaagtagtgagcagtccagtgcttctgagaggtagggtcagatgagaacagagaattgaccatgagatttcgcaaattggagaatactagcaacctggataagaacaatttcaatggttgagggaaacagaagtgtaattgaagaggattgaggaaaaaagacaaatgggagcctagataattccttaataagttgttgtgaaaagaggagaagaaaaacggggtgctagcccagctactccctcactctttcaccacctcatatggagagactggagaacacagncagagtgagaacatttagtagaagtggtgtttctttttaagttctggacactgtatttcattatctataaccgcatctctgtacattgacacctgctaaggcactgggtttcacactttgct

SEQ ID NO: 254383 - DNA, 886 bp, Homo Sapiens
  misc_feature (831)..(831): n is a, c, g, or t
agcaaccggaggcggccgcgcgtctggaggaggctgcagcagcggaagaccccagtccagatccaggactgagatcccagaaccatgaacctggccatcagcatcgctctcctgctaacagtcttgcaggtctcccgagggcagaaggtgaccagcctaacggcctgcctagtggaccagagccttcgtctggactgccgccatgagaataccagcagttcacccatccagtacgagttcagcctgacccgtgagacaaagaagcacgtgctctttggcactgtgggggtgcctgagcacacataccgctcccgaaccaacttcaccagcaaatacaacatgaaggtcctctacttatccgccttcactagcaaggacgagggcacctacacgtgtgcactccaccactctggccattccccacccatctcctcccagaacgtcacagtgctcagagacaaactggtcaagtgtgagggcatcagcctgctggctcagaacacctcgtggctgctgctgctcctgctctccctctccctcctccaggccacggatttcatgtccctgtgactggtggggcccatggaggagacaggaagcctcaagttccagtgcagagatcctacttctctgagtcagctgaccccctccccgcaatccctcccttgaggaggtggggaccccacccctcatcaggagttccagtgctgcatgcgattatctacccacgttcacgcggccacctcaccctctccgcacacctctggctgtctttttgtactttttgttccagagctgcttctgtctggtttatttaggttttaatccttnccttttctttgagagttcgtgaagagggaagccagggttggggactgatgggaga

SEQ ID NO: 254384 - DNA, 680 bp, Homo Sapiens
  misc_feature (170)..(170): n is a, c, g, or t
agcaagagtcaatgaggagacctcagtagccaccaccatgaacaaagaaatgggtcccagcctcctgggtatcagcagctcaacaatatggatgatatttgttcgttcatgctgaggatgtaggaatacgcaggagttacagggcacagcaaacttctggggtaagcaanatgttcatcatcttgattgtggtgccggcttcatggatgtacacatatgtcaaaatttatcacacagagatgaagtgagaaactgccttctggggttgttcacgctcttagagctattcagagaacgaaatgaggtagacacttccaggaaaactgcttagcacagtgcctgaagccctgggatgcaggaacctcacctgtctctattcgttaaagtctcagctcaaacaccactgtcccagataggcctcgtgaccgcaggactagaccacggttctctgcgcagggcgtcagctccgtgagccacccttccagcacccactgccatggcgaatatttgcttgtttggccatccagggactgtttgagccccaagaccgcagggctcggggtctgtctttgctcaggacgataacctggggactggacagtaggccctcaggccttgggaccgctcaaagtcaaccggggccgggtgggggacccagggctctgcagccttaagaacgc

SEQ ID NO: 254385 - DNA, 732 bp, Homo Sapiens
ccgcgacgtggctccctgggcggcagaaccatgttggacttcgcgagcttcgccgtgaccttcttgctggcgtagatgggagccgtgctctacctctatccggcttccagacaagctgcaggaattccagggattactccaactgaagaaaaagatggtaatcttccagatattgtgaatagaggaagtttgcatgagttcctggctaatttgcatgacagatatgggcctgtggactccttctcggttggcaggcgcctcgtggatagattgggcactgttgatgtactgaagcagcatatcaatcccaatagagacatcggacccttatgaaaccatgctgaagtcattattaacggatcaatctggaggcggcagtgtgagtgaaaaccacatgaggaaaaaattgtatgaaaatggtgtgactgattctctgaagagtaactttgccctcctcctaaagctttcagaagaattattagataaatggctctcctacccagagacccagcacgtgcccctcagccagcatattgcttggttttgctatgaagtctgttacacagatggtaatgggtagtacatttgaagatgatcaggaagtcattcgcttccagaagaatcatggcacaatcctagaagacagtatgatattttctctggccagttgcataataactgcaaaattgtgtacctgggcaatctgttttttaaccacctctgaagaagttc

SEQ ID NO: 254386 - DNA, 821 bp, Homo Sapiens
  misc_feature (527)..(527): n is a, c, g, or t
  misc_feature (756)..(756): n is a, c, g, or t
taacaatgattttaaatgtataaaattttaatatctctttgagacagtgatccaagcttcttccccttgatgatgttaccagttcatactttgtttcaataacctgtccctccacagaaagtaggtgcagtctcttcaccaatacactaagaagtactgtggtcaccatatatgcaaacctcaactctggacactcctgtgtgcctgagaatccaagtgaggaaaaagttttcattactaattcatcatcaaaccgatctggatcaaacttgtgtggagatggccaagtattaggatcctgaagtaccacaccaagggcataaaggacgagggtctctctaggaataataaatcggtcaatttttccttcaatatcttgaaactgggcagaaactggagtcagtttggcagttcgaacagtttcacaaagcacatgctgacaatatctgagctgctcaattttctctggagtaacaggaccatttccaaaaacttggtttatctcttcatataatcttttttgaacnttcttcagaggtggttaaaaaacagattgcccaggtacacaacttttgctagttattatgcaactggccagagaaaatatcatactgtcttctaggatctgttggtcattaaggttcccttgtactaaggagtcaatgaaaatatgttgactgaagttccttccttttcgttcttttatgatgttccttaaaacagactccagttgcatgagggcatcttcatattgtnttttccgagtcatgtttttatcaagtgacccatctagaaagccttttccaatctcagaccaaact

SEQ ID NO: 254387 - DNA, 1311 bp, Homo Sapiens
aagaaacaccccgtactggcaggcatggagccaacaaggagaacctggagctcaacggcagcatcctgagtggtgggtaccctggctcggcccccctccagcgcaacttcagcattaattctgttgccagcacctattctgagtttgcgcgagaactttcaaaggcttccaaatctgatgctacttctggaatcctcaattcaaccaacatccagtcctgagaagccctgatcagtcaaccagctgtggcttcctgtgcctagactggacctaattatatgggggtgactttagtttttcttcagcttaggcgtgcttgaaaccttggccaggttccatgaccatgggcctaacttaaagatgtgaatgagtgttacagttgaaagcccatcataggtttagtggtcctaggagacttggttttgacttatatacatgaaaagtttatggcaagaagtgcaaattttagcatatggggcctgacttctctaccacataattctacttgctgaagcatgatcaaagcttgttttatttcaccactgtaggaaaatgattgactatgcccatccctgggggtaattttggcatgtatacctgtaactagtaattaacatcttttttgtttaggcatgttcaattaatgctgtagctatcatagctttgctcttacctgaagccttgtccccaccacacaggacagccttcctcctgaagagaatgtctttgtgtgtccgaagttgagatggcctgccctactgccaaagaggtgacaggaaggctgggagcagctttgttaaattgtgttcagttctgttacacagtgcattgccctttgttgggggtatgcatgtatgaacacacatgcttgtcggaacgctttctcggcgtttgtcccttggctctcatctcccccattcctgtgcctactttgcctgagttcttctacccccgcagttgccagccacattgggagtctgtttgttccagtgggttgagctgtctttgtcgtggagatctggaactttgcacatgtcactactggggaggtgttcctgctctagcttccacgatgaggcgccctctttacctatcctctcaatcactactcttcttgaagcactattatttattcttccgctgtctgcctgcagcagtactactgtcaacatagtgtaaatggttctcaaaagcttaccagtgtggacttggtgttagccacgctgtttactcatacagtacgtgtcctgtttttaaaatatacaattattcttaaaaataaattaaaatctgtatacttacatttcaaaa

SEQ ID NO: 254388 - DNA, 2113 bp, Homo Sapiens
  misc_feature (1692)..(1692): n is a, c, g, or t
  misc_feature (1893)..(1893): n is a, c, g, or t
  misc_feature (2042)..(2042): n is a, c, g, or t
  misc_feature (2048)..(2048): n is a, c, g, or t
  misc_feature (2069)..(2069): n is a, c, g, or t
ggggacatcgccggtgtttgcgggtggttgttgctctcggggccgtgtggagtaggtctggacctggactcacggctgcttggagcgtccgccatgaggagaagtgaggtgctggcggaggagtccatagtatgtctgcagaaagccctaaatcaccttcgggaaatatgggagctaattgggattccagaggaccagcggttacaaagaactgaggtggtaaagaagcatatcaaggaactcctggatatgatgattgctgaagaggaaagcctgaaggaaagactcatcaaaagcatatccgtctgtcagaaagagctgaacactctgtgcagcgagttacatgttgagccatttcaggaagaaggagagacgaccatcttgcaactagaaaaagatttgcgcacccaagtggaattgatgcgaaaacagaaaaaggagagaaaacaggaactgaagctacttcaagagcaagatcaagaactgtgcgaaattctttgtatgccccactatgatattgacagtgcctcagtgcccagcttagaagagctgaaccagttcaggcaacatgtgacaactttgagggaaacaaaggcttctaggcgtgaggagtttgtcagtataaagagacagatcatactgtgtatggaagaattagaccacaccccagacacaagctttgaaagagatgtggtgtgtgaagacgaagatgccttttgtttgtctttggagaatattgcaacactacaaaagttgctacggcagctggaaatgcagaaatcacaaaatgaagcagtgtgtgaggggctgcgtactcaaatccgagagctctgggacaggttgcaaatacctgaagaagaaagagaagctgtggccaccattatgtctgggtcaaaggccaaggtccggaaagcgctgcaattagaagtggatcggttggaagaactgaaaatgcaaaacatgaagaaagtgattgaggcaattcgagtggagctggttcagtactgggaccagtgcttttatagccaggagcagagacaagcttttgcccctttctgtgctgaggactacacagaaagtctgctccagctccacgatgctgagattgtgcggttaaaaaactactatgaagttcacaaggaactctttgaaggtgtccagaagtgggaagaaacctggaggcttttcttagagtttgagagaaaagcttcagatccaaatcgatttacaaaccgaggaggaaatcttctaaaagaagaaaaacaacgagccaagctccagaaaatgctgcccaagctggaagaagagttgaaggcaccgaattgaattgtgggaacaggaacattcaaaggcatttatggtgaatgggcagaaattcatggagtatgtggcagaacaatgggagatgcatcgattggagaaagagagagccaagcaggaaagacaactgaagaacaacagacagagacagagatgctgtatggcagcgctcctcgaacacctagcaagcggcgaggactggctcccaatacaccgggcgcacgtaagctgaacactaccaccatgtccaatgctacggccaatagtagcattcggcctatctttggagggacagtctaccactcccccgtgtctcgacttcctccttctggcagcaagccagtcgctgcttccacctgttcaggggaaaanaacaccccgtactggcaggcatggagccaacaaggagagacctggagctcaacggcagcatcctgagtggtgggtaccctggctcggcccccctccagcgcaacttcagcattaattctgttgccagcacctattctgagtttgcgaaggatccgtccctctctgacagttccactgttgggcttcagcgagaactttcanaggcttccaaatctgatgctacttctggaatcctcaattcaaccaacatccagtcctgagaagccctgatcagtcaaccagctgtggcttcctgtgcctagactggacctaattatatggggggtgactttagtttttcttcagcttangcgtgncttggaaacctttggcccagnttccatggaccatggggcctaaacttaaagaatgtgaaatggag

SEQ ID NO: 254389 - DNA, 637 bp, Homo Sapiens
  misc_feature (35)..(35): n is a, c, g, or t
  misc_feature (43)..(43): n is a, c, g, or t
  misc_feature (46)..(47): n is a, c, g, or t
cccctcgcctaccgctctcgcctttcctccctcanccccaccntcnnaaggcctgcgtggcgaattcggcacgaggaagcggagcaaggtcgaggccgggttggcgccggagccggggccgcttggagctcgtgtggggtctccggtccagggcgcggcatgggcgtcctggccgcagcggcgcgctgcctggtccggggtgcggaccgaatgagcaagtggacgagcaagcggggcccgcgcagcttcaggggccgcaagggccggggcgccaagggcatcggcttcctcacctcgggctggaggttcgtgcagatcaaggagatggtcccggagttcgtcgtcccggatctgaccggcttcaagctcaagccctacgtgagctacctcgcccctgagagcgaggagacgcccctgacggccgcgcagctcttcagcgaagccgtggcgcctgccatcgaaaaggacttcaaggacggtaccttcgaccctgacaacctggaaaagtacggcttcgagcccacacaggagggaaagctcttccagctctaccccaggaacttcctgcgctagctgggcgggggaggggcggcctgccctcatctcatttctattaaacgcctttgccagctaaaaa

SEQ ID NO: 254390 - DNA, 1416 bp, Homo Sapiens
  misc_feature (1344)..(1344): n is a, c, g, or t
tctgcctttgtctgcctcctaccaccacttctcaaagcaaatgtgttctttgggtacatggttgttttccagttgcttggagaaaaagtctgtcatgaggtgggccacaaatatagaacaaagtctcttttgaaatatgatctcttatctccttctccgttattcttccttccgtgatgtatggcttgagttccgcattgatttgtgtagtctgttttgtaacatgcaaactgcatgcaatcttctcaggaaattcatttactaaatcaaggatatttttcttaaacaggagttcgctggtattttttgcactgtagaatagttttattgttcctatctcatatccatttcttttgtttgcctgctctctgaggagatctgctgcgtgccgcaggatggaaagcagagggttaattccgactcctcctgcaatcaacacgaggtttctagaggcatccgcaggctgagggtcaaagaagaactctccacccactctcacagccacttcacagtcaagtgtacacgtattgtgaacccagagggcaggagggtggttcgtatatttcactgccaattctatcactctctcttgttctagcagtctgggactggagcatattgaaaacccaccaaccacagagactcctggaataaagaaatcaacccactggccagctttaaaggaaaagtcttgatcagcaacaagcaagcggaggctcttcactgacggtgactcactggcagctccacacaccttagctgctgacacaatctcccgtcgaaggacacttgcagttctctccatgtgatcagttttccttttggatttcattatgctggttagagtaaggtggcgcaaagtgctgagtgtcaatctcagtgacgcagcctcaatacggatggctccaacagagcaccgcaacaacccaggaatcataacagcagcacaggccatggcgctttcttagaagtccacgagattttaggagtcattaagtatatggtcagctgattgacagaatattttggtcctgctattacactgagacttttggatgtacagcagttggaacatggacagcttttccatgcattaaaattctcacaaagttcctgcagccaggaattaacaagctgaccgtcgccctgggctcaaggtcactcggtgaagcgaaattctacgggaactgttcgtccgtcaccaggaagggaggtcgaggaggctaagctgctctcgcctccccaccccgcctttcccgagggccgggaggctgctacctagcacctgctgcagccttcagcgggctatttaaggcgttaaagcagacgataagaagcagggantttccccgctggcacctagcttgcagacccggccacgtttagttgcagatcccgggaattccggaccggtac

SEQ ID NO: 254391 - DNA, 764 bp, Homo Sapiens
aatcagatgcctagagggacctgaatgctacaacctcggagagagaataggggagtgttggtgtttgtggtgaatcggaaagcacgtgtttaaagaggacaatcacattaattcagttccagctatgagattacattgtcaaatcatctgatttttcaagagaaatcacaaatttgaatttcttaaaatgagaaatctactttttaaataatgacgggattttcaagtatgttaaaaatactgtaggctaataccgaataagctaagcaaaacttttgtggatcaaaccgaaaccatgggctattttcttctcctcctcttcctcctccttctcataggaataaaacaactaaatataatcctgtctttataatttccatataccaagctttaattatatttaatacccatcaaagttagttaaaatgaactctgagtaatttataccttatggaaaaattacggtgttctaagtctgaccaaatgtgtagaaagtaccatattatctttggatatgccatctatgtctgctttgccccactatactacatattgctttagatcagccactattttacatttatttcaaaagaaattttgcatacccttcaacacctagcactgttatatatgtggtcagtgcttaatgacttggagtaaattagtggtaaagtaagggaatttaaaagtagcattttcttctttccacctccacaaacaaaatcagaatctaacttcatgaaacatttcatataatttgtagg

SEQ ID NO: 254392 - DNA, 392 bp, Homo Sapiens
aaaggagcccttatagctgtttgcagtcctcaggtctcacatgctcagaatgtccaagaggagcctaaggagacatgactactaaggacacatgcagcgtggtatcttcaatgggatcagtattctaaagagccagagactcttctttacgacatccttctccgagaaacaatattctcagttattacaaagaactgctgttgtgatgactagttatttgcttgagcagttccatattacataatcctgtgccacaaaacaccctgtacactagtggctgggatattattcatttccactaggcagctatctcactgttgaaatttatatccaaaagaatatttaattttggcttatttttcttataaaatagggaactcataatatcattt

SEQ ID NO: 254393 - DNA, 893 bp, Homo Sapiens
gagaccaaagagcaaagacaagaaagaaagagacaaagaaatacacattcattcagctatcctcaagtgctagagtgccaggcatgttgatcttcaggtggaaagcctgacttccttcagtgtgttcaaatttcttgcacctgctgaagactcagctctctgcactgctgtgtaggaagttgagactttatcttcctatctgggaccaggaaagtatcttgacagaacctcctgacctagggttgttgcccagtgatagtgagcttttcccctggaggatcctcatgccccatctccacctagggatcgtcaaagggaatggatcactaacactgtaaaacaacaagcctattcttctgaggaagatctctccagatagctggcaacccatccaagtagattagctggagcttggccagattctcaaagggaaagatatgattaaggagcctcttatagctgtttgcagtcctcaggtctcacatgctcagaatgtccaagaggagcctaaggagacatgactactaaggacacatgcagcgtggtatcttcaatgggatcagtattctaaagagccagagactcttctttacagctgtccgaggagctagtagggcaaactgctccctgagctgggccgatcttttgacatccttctccgagaatcaatattctttttcagttattacaaagaactgctgttgtgatgactagttatttgcttgagcagttccatattacataatcctgtgccacaaaacaccctgtacactagtggctgggatattattcatttccactaggcagctatctcactgttgaaatttatatccaaaagaatatttaattttggcttatttttcttataaaatagggaactagtcttatcattt

SEQ ID NO: 254394 - DNA, 423 bp, Homo Sapiens
ggaagggaagtggtgaaggtgtaaaggctcctcagctccctcccctgaactccgagttcagtcaccccttcccccgaaagaattccaaagaggaagggcagggtctatgtcatggacactgctacttgttcgatgaaagctggcccaggtttatgtcccgttctgaaaggccggcacactcatgggtgctcagcgtgatgtggaccttgttgtacacgttaaaccattcaggatggtggtccagtttctcagcctgcagggccactcttgtcatgaacccaaaggccctgttgaagtctttgaaatgaaactgcttgaagatggcatcacggccttccagctcattccaccccacagccctcaggtttggcagcagctggccctctcctcagcgctcagcctgtgtctttgccagccatggcg

SEQ ID NO: 254395 - DNA, 1045 bp, Homo Sapiens
ggtgtgcttctaaggagtattgacaagcccttagctagatgacaatctcattgagaagcagaaaattcatgctggagagaaactagtgaaggtagcaatacttcattgaatattagaaaatttttctagagagaaagcattgaatatactgagtatgataacatttcctctcaaaccttatcccttactctgcatttgggagatcatacacagagaagccttataaatgtaagagatgtggaaatatcttcagccaaaagtaaatcctcactcatcaagaaatttttactggagagaaaccttgtgaatgtgggaaagcttccattcagatgtcacacctcagccagcagaaaatttacagtggggaaaacccctttgcctgtaaggtatgtggaaaagtcttcagccacaaatcaaacctcactgagcatgagcattttcacacgagagagaaaccttttgaatgtaacgagtgtggaaaagcctttagccaaaagcagtatgtcattaaacatcagaacacccatactggcgagaagcttttcgaatgtaatgaatgtggaaaatcatttagccagaaggaaaacctccttacgcaccagaaaattcacactggagaaaaaccttttgagtgtaaagattgcgggaaagctttcattcagaagtcaaacctcatcagacaccagagaactcacacaggagagaagccctttgtatgtagagagtgtggaaaaaccttcagtggcatattccaacctttaatgagcatgagaaaaatcccattcttggggaagaagccttttacatgttgtgaatgtcgaaccagcgcttggcagaagaagtatctcatataacgttgaacttccctgggagaaacttttatggtccatgtggagacgctctcccgaccttctttgtcagtgggcaacccggtaaactttgacgctgtgtggaaagtctcagctctcaaggtgtgaacacaggaaccaggtagggaatctctcacccggtaaaagaaacgggggcaaatataatacccggatat

SEQ ID NO: 254396 - DNA, 552 bp, Homo Sapiens
  misc_feature (17)..(17): n is a, c, g, or t
  misc_feature (57)..(57): n is a, c, g, or t
  misc_feature (64)..(64): n is a, c, g, or t
  misc_feature (122)..(122): n is a, c, g, or t
gtcttggagaaggagcngctccaggatcatgccaccagtgtaggcagcttcctgatncagctcntcgggcagcaaaaaatcaaacatcccatcgtcggggatgtcaggggtgttgggctctncattggtgtggatctgatcaaagatgaggccacaaggacaccagcaactgaagaggctgcctacttggtatcaagacatggaagagaaggtgagaagttgtgaaacgctgaggcgccagccctaagccagccctgctctgcctaagtgtactccagaagaaactcatctcatccaaatacacgctattgagaaggcgagcctgacctccctcggacagataaagtcagctttcagaggctcagggtgggggggcctgcccgaggccataatgctacccacccccgccgccgaaccactggtctgttggaataacccagatgtctgcatcccctcaagtcagtcaatttcctttctgtccactgggggtggaatggggtagggttaaagaaaatcctgacatgcacacccattaaaaataggacaacagtg

SEQ ID NO: 254397 - DNA, 1048 bp, Homo Sapiens
  misc_feature (20)..(20): n is a, c, g, or t
  misc_feature (39)..(40): n is a, c, g, or t
  misc_feature (43)..(43): n is a, c, g, or t
ggcgtcaggccagtaggacnaactcagggcagtgactannaanacaccttcactgcgacaaacatcaaatggtgatcaggtccatttgctgagaaacaaaatatgctagtatgggaggccacctttgggctaaagctcatggaatcccaactaaaaccaaaggccttccagcagagaacccttccgacagaatgcacttgagatgggcatctcagccccagagcaactccgtatctaatggaggcaggcaactgggccaactgcagcccaggggagcagaggacaggctgggaccaggcaccacaccttggtcctgctgggctagagggtcagacaagacttctcagatgaggggccttagacaatgaggttttaacatctttttctctttacagaagaaactcatctcatccaaatacacgctattgagaaggcgagcctgacctccctcttacagataaagtcagctttcagaggctcagggtgggggggcctgcccgaggccataatgctacccaccccctcctcctaaccactggtctgttggaataacccagatgtctgcatcccctcaagtcagtcaatttcctttctgtccactgggggtggaatggggtagggtgggatactttaaagtgctcctgcttaaataaattagaccagaccagtgtatttctaaagaaaatcctgacatgcacacccattaaaaatagtacattttacagtgtcccagtcatacttttaattggcaaattaaaataatgcaatctgatatattctatcctactaaattaaaaatactgaatataaccaactaaatatacttactcccaagactcactaccagtagtttcacttaaactctgccttagaggctcttcccacccatttcccattatggcacatagagaaaaaggcctctatcactgtccactggagtaataaccactgggttccctaactgtctcaaagactgtcattttatagtttcacgagttccacctgtcccaccttatctggctgcaactcctgctcagaaacagaaacc

SEQ ID NO: 254398 - DNA, 1619 bp, Homo Sapiens
  misc_feature (1529)..(1529): n is a, c, g, or t
  misc_feature (1563)..(1563): n is a, c, g, or t
  misc_feature (1572)..(1572): n is a, c, g, or t
  misc_feature (1593)..(1593): n is a, c, g, or t
  misc_feature (1599)..(1599): n is a, c, g, or t
gacactcgaaaaaaatcaggaaattctggatgacacagctaaaaatcttcgtgttatgctagaatctgagagagaacagaatgtcaagaatcaggacttgatatcagaaaacaataaatctatagagaagttaaaggatgtgtatttcaatgaatgcctcagaattttcagagggtcagattgcacttaatgaagctaagcttagtgaagagaaggtgaagtctgaatgccatcgggttcaagaagaaaatgctaggcttaagaagaaaaaagagcagttgcagcaggaaatcgaagactggagtaaattacatgctgagctcagtgagcaaatcaaatcatttgagaagtctcagaaagatttggaagtagctcttactcacaaggatgataatattaatgctttgactaactgcattacacagttgaatctgttagagtgtgaatctgaatctgagggtcaaaataaaggtggaaatgattcagatgaattagcaaatggagaagtgggaggtgaccggaatgagaagatgaaaaatcaaattaagcagatgatggatgtctctcggacacagactgcaatatcggtagttgaagaggatctaaagcttttacagcttaagctaagagcctccgtgtccactaaatgtaacctggaagaccaggtaaagaaattggaagatgaccgcaactcactacaagctgccaaagctggactggaagatgaatgcaaaaccttgaggcagaaagtggagattctgaatgagctctatcagcagaaggagatggctttgcaaaagaaactgagtcaagaagagtatgaacggcaagaaagagagcacagggctgtcagctgcagatgaaaaaggcagtttcgggctgcagagggaagtaaaaacttacaagcggagaattgaagaaatggaggatgaattacagaagacagagcggtcattttaaaaaccagatcgctacccatgagaagaaagctcatgaaaactggctcaaagctcgtgctgcagaaagagctatagctgaagagaaaagggaagctgccaatttgagacacaaattattagaattaacacaaaagatggcaatgctgcaagaagaacctgtgattgtaaaaccaatgccaggaaaaccaaatacacaaaaccctccacggagaggtcctctgagccagaatgggtcttttggcccatcccctgtgagtggtggagaatgctcccctccattgacagtggagccacccgtgagacctctctctgctactctcaatcgaagagatatgcctagaagtgaatttggatcagtggacgggcctctacctcatcctcgatggtcagctgaggcatctgggaaaccctctccttctgatccaggatctggtacagctaccatgatgaacagcagctcaagaggctcttcccctaccaagggtactcgatgaaggcaaaggttatatggctccaaaggggccccctcctttcccaggagtccctctcatgagcacccccatgggaggncctgtaccaccacccattcgatatggacccacanctcagctcntgcggacttttggggctcggncacttncctccaccctttggccctgg

SEQ ID NO: 254399 - DNA, 1240 bp, Homo Sapiens
caaaacttcaattgtttctactctgcaggttaatatggctccaaaagggccccctcctttcccaggagtccctctcatgagcacccccatgggaggccctgtaccaccacccattcgatatggaccaccacctcagctctgcggaccttttgggcctcggccacttcctccaccctttggccctggtatgcgtccaccactaggcttaagagaatttgcaccaggcgttccaccaggaagacgggacctgcctctccaccctcggggatttttacctggacacgcaccatttagacctttaggttcacttggcccaagagagtactttattcctggtacccgattaccacccccaacccatggtccccaggaatacccaccaccacctgctgtaagagacttactgccgtcaggctctagagatgagcctccacctgcctctcagagcactagccaggactgttcacaggctttaaaacagagcccataaaactatgacctctgaggtttcattggaaagaaagtgtactgtgcattatccattacagtaaaggatttcattggcttcaaaatccaaaagtttattttaaaaggtttgttgttagaactaagctgccttggcagtgtgcatttttgagccaaacaattcaaaaatgtcatttcttccctaaataaaaatcaccttttaagctagagcgtccttacaactttgaaatgtgcaataaagaatacctgtgttttagctaatgtagcatatgtaattgcaaaatgatttagaatgtcatgaaaaatatgaacatttcctgtggaaatgctttaagaacatgtatttccattatcctatttttagtgtacaccagctgaatacggagcaatggtgtttataagcgtttttttaaactatctggtcacaaagactgttacgctaaaaatgtttactaaaagatcactaaactatctcccctcttgctgaagttctttgtagtaatagctcataaaaatttgtttattaatatttcccaagtgtctgttgactcattggactgttatgaggcttgtgccatttggggaacatgtaaactcaggctcccagaactgaagatggtggctggtggcacacttccggctgctcctccgtcacctgtgaactctacaagtgacgtctttttatttcaaagaagtttatttcccacttgtatagcattcacatgctttctttacgatcctcattgtctatttg

SEQ ID NO: 254400 - DNA, 426 bp, Homo Sapiens
  misc_feature (31)..(31): n is a, c, g, or t
  misc_feature (265)..(265): n is a, c, g, or t
  misc_feature (284)..(284): n is a, c, g, or t
  misc_feature (334)..(334): n is a, c, g, or t
tctccttaacaacaggtggtggtgggtaatnccctgggggacccatgggttgggggtggtaaatcggggttaccccaggaaataaaaatactctccttgggcccaaatgaaacctaaaggtcctaaaatggtgccgtgtccccaggttaaaaatccccgaagggtggaagaggcaggtcccgtccttccctggtggaacgccctggtgcaaattctcttaagcctagtggtggacgcataaccagggccaaagggtggaggaagntgccgaggcccaaaaggtncgcagagctgaggtggtggtccatatcgaatgggtggtggtacagggccntccatgggggtgctcatgagagggactcctgggaaaggagggggcccttttggagccatattaacctgcagagtagaaacaattgaagtttt

SEQ ID NO: 254401 - DNA, 945 bp, Homo Sapiens
  misc_feature (704)..(726): n is a, c, g, or t
  misc_feature (833)..(841): n is a, c, g, or t
tttgctaaatgctgggtgtgtatgtgtgcattttccacactttttaatttttaaaaaatacacatatacacaaacaacatgtacagaaatagaagaaagcaagccagacttaagcttggtagagtaacggagtcctctggtctaggcggtaattgctttcagagaattacgtttatagaaatcagcgagttttgtaagaaaggagaagatgttacttcaagaaagaggcagtagagttgctggttcttaatgcacagaacacacagatatatgcacacgtgtgctgctgaggtgaggcaggtctggtgagcacggagaggctgggaaggggctaagtgactaattggttcaggtacttttttctgggggaggtagactttgcttcttttttgtaaaaatgacaaacgtagaagtggcaatgctgtaacctggtgcctgctgctgtgcagccacatacacacaattgtagcctgatttttagaagtgtgggtaattttttaatgaatttcctccttgagtagcagctgaggtcattgacaactgaagtgatggtgtggacatagagagaggggaagggttggaaaggagtaagtgatacactgctggaatttgtttcctgcctatgaaataaaattatttttcagaattaaatttgaaaacttgcactacagaactatgggtggagcttttccttttacaacagnnnnnnnnnnnnnnnnnnnnnnnaaccagagtttaaaacttcattaggcaattttctgtcacttgaaatgtcaacatttgctaacctttggatatcctttttggtacaccaaagaaaaagttatggctannnnnnnnnccttgaactgcctacagtatcatgtcctaattcagaaagatttatctctattatataataacctactttgaagaaatgctgaatagctcttgtaggcttctgtt

SEQ ID NO: 254402 - DNA, 785 bp, Homo Sapiens
aaagagagacaaagggggtgtgggggggtagctccccgacctcctacctcccccactgccttgtgccctaagctgaggggacccgggaggagctctaactgaggtcagaaaaggggaagagtggttggctggaccaccaggagccctttaaaaaaacctgcagtccctacaaactgctggaaaccaacagtcaggcccagcgcagtgccgggtctcccaacacaacatctgtgtgatacggcccaccatccaaggagccggcaaacaccaggagagggaagccaagcaacagagtgaaggcaaagacagggtgggaaccaggaccaagcaaccaggaaggaggaacgtcagctgtgggggaagggggcctgggggaagaacaaaggaggagagcagagggagggtggaggaacggaggggaggtgtgcaaagcggtgggcggtcagccgggcccccggcacacgcagcggctggctcaaggctgcgaccgtgagaacagcatcatctccttcagcccatctctgccctgacccagcccctacctgacacttgtgaggccgctcagaagtgtgcacctgcttgatatgtccgttcaagtgatcaggcctggagaagcctttcccacagctctggcagatgtaaggcttgcccacggacccatcatgggaccgcacatggtaggacatgcggtcttttctcttgaaccgcaacccacacacagggcaggagtagggcttactccccagagtgggacagcctgtgccggttaagatgaaccacatcac

SEQ ID NO: 254403 - DNA, 2053 bp, Homo Sapiens
  misc_feature (46)..(46): n is a, c, g, or t
  misc_feature (208)..(208): n is a, c, g, or t
  misc_feature (210)..(210): n is a, c, g, or t
  misc_feature (224)..(224): n is a, c, g, or t
  misc_feature (1913)..(1913): n is a, c, g, or t
  misc_feature (1916)..(1916): n is a, c, g, or t
  misc_feature (1923)..(1923): n is a, c, g, or t
  misc_feature (1925)..(1925): n is a, c, g, or t
  misc_feature (1928)..(1928): n is a, c, g, or t
  misc_feature (1939)..(1939): n is a, c, g, or t
  misc_feature (1941)..(1941): n is a, c, g, or t
  misc_feature (2004)..(2004): n is a, c, g, or t
  misc_feature (2015)..(2015): n is a, c, g, or t
ctaaaaggcacaccaataaggatccgagggagggggtctacatctnctttttcagccctctcaaagccatatattggggtggcccaatataaagctactcattagtttggttcctgagcagacctgctaataaacctcaaaaacacaaaagtctacttcactagccagaaatgaaagcaggatctagatctgagtgggaagggcagangncagcatgggttgantctagttggaattgtgccagtcttctctggaggccgactcactcgtggagtggggaaaggggtggccaggccccagtctagaaaccccaggcctatgggaagtgatgccaggggaagggaagcagataagctggtggctagttcccaggaaggcaccaacctccaaaatcacctaggcaaggacagatgcccaggggtgccatctgtgaaaggggggaaaaggcaagagagcccagaaagaaacttggatgctatagggggttccagaaaggtgctccttgctacccccatttgggggctctgacatgggaaagactccgagtcacccagggaggagctgggcatgctgggcaggaaccaccctgctagcctctcccaaaagcaggggtctcaggccaaatgcccctcctgttcccttccactgtcaaccctctccagggaggcccaggctagccaacaggccactgggtaaaggccctgctgccctctggggtggtccagccctgcctcagatatcccggcggggctgggcagaagagagtgttgctggagtgtgctgggcccaggttttcaagggctgggaatgatttttttagagaaagggaaaaggcggtgtcaggaaccgaatgggacgacctccacaaagcaggctgggcaaagtcccatgatggcaggtcgctaggaagaggttccaggggcggcaggccgctgctgctcccaacccacacctgacacttgtgaggccgctcagaagtgtgcacctgcttgatatgtccgttcaagtgatcaggcctggagaagcctttcccacagctctggcagatgtaaggcttgcccacggacccatcatgggaccgcacatggtaggacatgcggtcttttctcttgaaccgcaacccacacacagggcaggagtagggcttctccccagagtgggacagcttgtgccggttaagatgatacacatcacggaagatcttgccgcagatctcacaagccacctgcttcctggtccggctcctctttcgggggccgtcggggtcttcagagatgggtagcccattctcacccagcctcggaggaggaaggtcgatgtagcccagctggaggctggtgacaccgtgctgggcctcgtgctgccggagccggttggcatcagtgaacaccttacaacatagaccgcatggaaggatgcctgcctccctcaggccccctggggacccaaacattgagtccagcaggttggccttccttgggcggccccggcctcgcttgccagtcaggggaggggcactggatgccacactggggaatggggaagtcagcagttggggggataggggaccagccaccatgggcaagcggtccaccccaggtaacacaggcaaagaggcttggcctgcaatggctgcaccagccgcccgagctgcctcctcctctggctgcatgctgccggcgatgccattgctgttggctgccaaggctgccccgttggtcatgtccaaagggaagcccaagtccgaggtcccaggggggcgaaagagcattatatcggcgcgggcagggggtaccaggatctgtacgttggactgtttgatgacttcctggcagatctcgataaccgacctcatcagcaggaacttggcggccgtcatgagttcgggaaagctctccaagcgcaccacgatntgngaagtananganaagtccagaananccccaaataccttggagactgaataatgatgaatcatcacagctcccggttgccccacggccncgccgttctgntgttgccgtcgcgccccctacatcagccggacatcccg

SEQ ID NO: 254404 - DNA, 798 bp, Homo Sapiens
agagagctggtttcagacttcagaaggacacgggcagcagacagtggtcagtcctttcttggctctgctgacactcgagcccacattccgtcacctgctcagaatcatgcaggtctccactgctgcccttgctgtcctcctctgcaccatggctctctgcaaccagttctctgcatcacttgctgctgacacgccgaccgcctgctgcttcagctacacctcccggcagattccacagaatttcatagctgactactttgagacgagcagccagtgctccaagcccagtgtcatcttcctaaccaagcgaagccggcaggtctgtgctgaccccagtgaggagtgggtccagaaatatgtcagcgacctggagctgagtgcctgaggggtccagaagcttcgaggcccagcgacctcggtgggcccagtggggaggagcaggagcctgagccttgggaacatgcgtgtgacctccacagctacctcttctatggactggttgttgccaaacagccacactgtgggactcttcttaacttaaattttaatttatttatactatttagtttttgtaatttattttcgatttcacagtgtgtttgtgattgtttgctctgagagttcccctgtcccctcccccttccctcacaccgcgtctggtgacaaccgagtggctgtcatcagcctgtgtaggcagtcatggcaccaaagccaccagactgacaaatgtgtatcggatgcttttgttcagggctgtgatcggcctggggaaataataaagatgctcttttaaaaggt

SEQ ID NO: 254405 - DNA, 416 bp, Homo Sapiens
gcctatgcggactgaagaccaaagacttccgacccctagttcctgctctatggaacagtccagagggggctagaaacctctgcacaaagcgtgacccagaggggatgtggtgcatgtggacagggtacacggagaggcgcacggcaccccttgcccaaggccgctgggaagaaccctccaagcagagaggctgcccgcacacaggctgcgtgtgtgacctggcgtgagggtctgtggcagagcagggtgtgtggcctgtgagctggggtgacaccagggaggtgagcctgctggaacacaacatggtccagggcaggtgactggagccgtgtggagctcaggctcccatgtcaggagggtccagggcccatctggccacccactgactcggccattccagacaggcgcctggcctg

SEQ ID NO: 254406 - DNA, 884 bp, Homo Sapiens
  misc_feature (561)..(561): n is a, c, g, or t
gccccgcgtagttccggtggcgactgcggcgcatggcggccctgggacatcttgctggggaggcagcggcggccccaggcccgggtactccctgcgcgtcccgcggagcccggcttcccggcccagtttccagcgcccggaatccttccactgtctgtctctgcccagagcaacctacgtgcagtaacgctgactccagagcgcacccgttgggcgatgaaggcggcacagcgtcgaaaaaacaaaagaataagaagaaaacgcggaacagggcctctgtggcaaatggaggcgagaaggcctcagagaaactcgccccagaagaagttcccctaagcgctgaggcccaggcacaacagttggcccaggaattggcttggtgtgtggagcaactggagctgggcctcaagaggcagaaacccaccccgaaacagaaagagcaggctattggagcaatccgaaccctgcgcagcgaacgcccttgccccggaagaggcagctgatgcactccttgtttggagactatagggctcagatggaagccgaatggcgtgaggcccntgcgggctctcagagctgctgcttattcagcccaggtgcaacctgtagatggagccaccagaaagaagagccaaagggtctgcaggcctcgctctatatggagagccaaagccactctggacatgcctgatgaagagtttaggttcaatttcttttagcgtctccccgaacctgaaacaatccccctcccttggggtggtgtaggggtttgttttgagtgcgcctttccaggactttctgtgtcagagaaccctggaagtggtctgtccctggctggtccaagggattgtagcttgtgtgaaggtgtgagaccatcagatagg

SEQ ID NO: 254407 - DNA, 2013 bp, Homo Sapiens
  misc_feature (811)..(848): n is a, c, g, or t
ggggtcgcaaaggccgcgtttgcggggccaatgagcgactcgctttccgtgcggtgcggcgagtgaggccccggtcttcctcctcgtcctgccgcagggccagaacccctgacggtattcagctgcgcgtaagtctggccggtgccatctgtctccgcaatgccccccaagaaacaggctcaggccgggggcagcaaaaaggcggagcaaaaaaagaaggagaagattatcgaagacaaaactttcggtttgaagaataagaaaggagcaaagcaacagaagtttatcaaggctgtcacacatcaagttaaatttggtcaacaaaatccacgtcaggtagcacagagtgaagctgaaaagaaattgaagaaggatgacaagaagaaagaattgcaggagctaaatgagctgttcaaacctgtagttgctgctcaaaaaataagtaaaggtgcagatcccaagtctgtagtatgtgcattcttcaagcaaggacagtgtactaaaggagataagtgtaagttctcccatgacttgactctggagagaaaatgtgaaaagcgaagtgtttacattgatgcaagagatgaagaacttgaaaaagatactatggataattgggatgagaaaaagctggaagaagtagtgaacaagaagcacggtgaggcggaaaagaaaaaaccaaaaactcaaatagtgtgcaagcatttcctggaagctattgaaaacaacaagtatggctggttttgggtatgccctggagggggtgatatttgcatgtatcgtcatgcactttcctcctggatttgtgttnnnnnnnnnnnnnnnnnnnnnnnnnnnnnnnnnnnnnntttcattagaagatctaattgagagagagcgttctgccctaggtccaaatgttaccaaaatcactctagaatcttttcttgcctggaagaaaagggacaagcagggaaagcactagtgatcagtggtcgtgaagtgtttgaatttcgtcctgaactggtcaatgatgatgatgaggaagcagatgatacccgctacacccagggaacaggtggtgatgaggttgatgattcagtgagtgtaaatgacatagatttaagcctgtacatcccaagagatgtagatgaaacaggtattactgtagccagtcttgaaagattcagcacatatacttcagataaagatgaaaacaaattaagtgaagcttctggaggtagggctgaaaatggtgaaagaagtgacttggaagaggacaacgagagggagggaacggaaaatggagccattgatgctgttcctgttgatgaaaatcttttcactggagaggatttggatgaactagaagaagaattaaatacacttgatttagaagaatgacaccaaacacatcgctgaaaaaattaagtcagctcagcacgagttgaaattgactacattaatttctttccacctagaatcaacaggatgtttatttcctatgctgattctggaggagttaacctcctgcaaaaaaggcatcttgtccctacatcttctcttctgactttggctacatctcatagtaagttcagagtagttcatgataaattgaaaatataatggtcattgcagaaaatgattgatgttgtaactgtccacccaagtaagaagtgtatctgcctttccatcttttggttttcatttgggcatgtgctattaccagaaacaacaaacttatatttaaaatacccttcatttgacacagtttttaatgagtgatttaatttcctctgtatttgtatgtttagaagactgcctaaaacatgagcactgtacttcataaaggaaactgcgtatgcagattcagtattgtgtatctttggacaattagatggacatttaaaatggaacttcttttatctgacaggatcagctacaatgccctgtgttaaattgtttaaaagtttcccttttcttttttgccaataaagttgtaaataaagaccatcatacattaaaatccaaaaa

SEQ ID NO: 254408 - DNA, 397 bp, Homo Sapiens
  misc_feature (322)..(322): n is a, c, g, or t
  misc_feature (371)..(371): n is a, c, g, or t
  misc_feature (378)..(378): n is a, c, g, or t
caacacaaatccaggaggaagtgcatgacgatacatgcaaatatcaccccctccagggcatacccaaaaccagccatacttgttgttttcaatagcttccaggaaatgcttgcacacctatagagacaatattattcacaagcggtggctcagtgtaggccatttccaaggtaaatgcctgagtatatggaacaagtatacacacaagtacgttatattacacaagtacattctattcatttctgcacataagggtgctctgtctaggcctctattctgtggcagaaattgcaacaggaagtttatcttaaaatatgtaggnacaatggggcaaattcccttaaggggggaattctattacagtttttccnttgttcntaaattcttaaatcctacg

SEQ ID NO: 254409 - DNA, 985 bp, Homo Sapiens
  misc_feature (64)..(64): n is a, c, g, or t
  misc_feature (91)..(92): n is a, c, g, or t
  misc_feature (109)..(110): n is a, c, g, or t
  misc_feature (112)..(112): n is a, c, g, or t
  misc_feature (122)..(122): n is a, c, g, or t
  misc_feature (126)..(126): n is a, c, g, or t
  misc_feature (148)..(148): n is a, c, g, or t
  misc_feature (151)..(151): n is a, c, g, or t
  misc_feature (154)..(154): n is a, c, g, or t
  misc_feature (225)..(225): n is a, c, g, or t
  misc_feature (251)..(251): n is a, c, g, or t
  misc_feature (291)..(291): n is a, c, g, or t
ctgctcggcatagaatatagcagcatagtaccaagcacagtacatctgaagcatgtgacagtcngctagctgctgactagaagactcagtnntaatgagcagcataaannantgtacatcanaatnccttcaaatctgtgtcttttanccnacnacagttttcttctatcacttaattctggtcttattacctcagtctgactttctcattatgcttctctgganagacacttctaaatcctggagattanatttactcttaaaaatggaaatacaggaattttaaagtanaaagaaaaggtctgttctaaaagttctttcacaaatatatatatttaaatattaaaataggctacctaggatttttataaaatggcttttgaaaagatagtagaggcacaaagaagccatatactatcctccaagttggacataaggtgccacaaggctgccctacaaagaggcaggcaatctctacctgatgcaacgggaggcaccagtaaacaacagaaacattaaatacattattgggaacttggaccaaaaccaaattttactctattagggaccgttgcttttttaaaaaataccttgagatataagcattagaagtcatcactttgtacaaggaagaaaatgaatacagtttatgatcttactccttcccaaatacctgatgtcactcatttcaggtacctgaaagatgaaaagcagtgcaactttcaacaatttaatggactactctcattatgagagactttacacagcatctgtcaacttgaaaattaaattggtaactgaaataaaaaatcgcctagagaaaacacacataagctaatcctagaaaaggctctccttagaaagcaggtgtttctaagaactgcaggaaaggcttcccatcttgaacacagcttccactaataccaagggaaacgtgcattaagaggagagatgacagggctcccttaaagcaggaagatttatc

SEQ ID NO: 254410 - DNA, 443 bp, Homo Sapiens
ccatctctctgacgtcaccaatcactcgcgtctcaccacgctccactagagacgcgagcgaggaagatgtagtgaagcggatgaagtgagggaatgaagtgaaggcagactacgctctattacagaaacaccaaaagaactccttacgctctttctataaagtgcatgcgtgtctatataatccatcattatgtccatttgcgataaaatgactagctttccttgatacacgacaaacttgctgtgacaaagctggcacaaactgcatcgaaggattctgcaaaggaacctacaagccattctggctcgtacccatgaaattcacattaactatgctcctttaaatggaggcaccttaaagagatccaggctgaggctcatattatttcaaacccaaactataacagaatctagtaaatgagccatatatctggtatttggcg

SEQ ID NO: 254411 - DNA, 367 bp, Homo Sapiens
aaagagtggaaacatatgcacagttaataaaaaataaccttaaaaagaatgaataacaaaggtctccagattccagcctcctgctcgattatgcactgctgaaatgcaggaacatattcaactaatgtaaaaatcctgtggcgttccatgatgcacagctacagagttcctccagggcatgggctccgtagttacctctctgtgccactgtgctgcattcccatctggtaactgtgtattgcagaggctgggacttaggggctcttgtttctgttctctggatctctgtgatggtcagatattcttttggccaaaagagatgtagggaaaaaactttgcctatcttgtcctctcaaagttacttagg

SEQ ID NO: 254412 - DNA, 564 bp, Homo Sapiens
  misc_feature (77)..(86): n is a, c, g, or t
attttctttatgatgctactgtacatagaactgtttccttaatttcctttggagattgttcaacaatggtgggttgnnnnnnnnnnaaacttttagaaatacatttaattcaattctataaatattagtcattcaaaatctggccacaatcttaggaatacaaaagtaaaatcccagttctttttttcctaaaatgtcacaatgtaatagatctaacattgcatatatttctgatgtgatgaaatgttgatatatattttctatcgtgcaaactacagctctaaaatttttcaaagatagtacatgtattatgttttctataatacttacaccatcattattgttttaccttttatatctcatattctattttaattatggaatggtattattacatatccctgataaaaatattaaaatgtgctatgggaaaattaagaaaagacatattaaataaaccttgttatgtagtagcagggacgtgggaaagctccttggaaaaagtaaggttcatcactcagaagtcaacctatttaatacaaagataatgattcaactttaaaa

SEQ ID NO: 254413 - DNA, 454 bp, Homo Sapiens
  misc_feature (13)..(13): n is a, c, g, or t
  misc_feature (31)..(31): n is a, c, g, or t
  misc_feature (41)..(41): n is a, c, g, or t
  misc_feature (48)..(48): n is a, c, g, or t
ttctggtcaattnaattcccaaaaagggttnagctggattnaaacagnggaaaacagcccttgaacaaatagtgccggcacaactccaatatcccacgtgcaaaagaatgaagctggacccttacctcacaccttatataaaaattaaatcaaaatggaccaaagacctaaatgtaagagctaaaaccataaaatctttagaagaaaatatagaggtaaatcttcatgaccttggatgaggcaacgatttcttagatatgacaccaaaagcacaaacaacaaaataaaacatagactaactggacatcatcaaaatttaaaacttttgtggttcaaaggataccatcaacaaagtgagaagacaatccacagaatgagagaaaatttttgcaaatcatgtagctgataagctaaaatgaataaagtacttctagctaaaatgaataaagtactc

SEQ ID NO: 254414 - DNA, 1270 bp, Homo Sapiens
aaaatctgggaagtagaggtgttgtgctgagcggcgctcggcgaactgtgtggaccgtctgctgggactccggccctgcgtccgctcagccccgtggccccgcgcacctactgccatggagacgcggcctcgtctcggggccacctgtttgctgggcttcagtttcctgctcctcgtcatctcttctgatggacataatgggcttggaaagggttttggagatcatattcattggaggacactggaagatgggaagaaagaagcagctgccagtggactgcccctgatggtgattattcataaatcctggtgtggagcttgcaaagctctaaagcccaaatttgcagaatctacggaaatttcagaactctcccataattttgttatggtaaatcttgaggatgaagaggaacccaaagatgaagatttcagccctgacgggggttatattccacgaatcctttttctggatcccagtggcaaggtgcatcctgaaatcatcaatgagaatggaaaccccagctacaagtatttttatgtcagtgccgagcaagttgttcaggggatgaaggaagctcaggaaaggctgacgggtgatgccttcagaaagaaacatcttgaagatgaattgtaacatgaatgtgcccctttctttcatcagagttagtgttctggaaggaaagcagcagggaagggaatattgaggaatcatctagaacaattaagccgaccaggaaacctcattcctacctacactggaaggagcgctctcactgtggaagagttctgctaacagaagctggtctgcatgtttgtggatccagcggagagtggcagactttcttctccttttccctctcacctaaatgtcaacttgtcattgaatgtaaagaatgaaaccttctgacacaaaacttgagccacttggatgtttactcctcgcacttaagtatttgagtcttttcccatttcctcccactttactcaccttagtgggtgaaaggagactagtagcatctttttctacaacgtttaaaattgcagaagtagcttatccattaaaaaaacaacaacaacaacaattaacaataaatcctaagtgttaaatcagttattctaccccctaccaaggatatcagccgattttttcccttttttctcctgggaataattgtgggctctccaattctacgctcttctctccagctgactccgtccctgtgcgatgtgtgactcggagtctgggacctcgctctgaatgttaaaaccc

SEQ ID NO: 254415 - DNA, 974 bp, Homo Sapiens
  misc_feature (18)..(18): n is a, c, g, or t
  misc_feature (32)..(32): n is a, c, g, or t
  misc_feature (491)..(601): n is a, c, g, or t
  misc_feature (650)..(659): n is a, c, g, or t
  misc_feature (735)..(743): n is a, c, g, or t
ttaagtattgagcctttncccaatcctcccantttactcaccttagtggtgaaaggagactagtagcatcttttcctacaacgttaaaattgcagaagtagcttatcattaaaaaacaacaacaacaacaataacaataaaccctaagtgtaaatcagttaatcctaccccctacccaaggatatcagcctgttttttcccttttttcccccgggaataattgtgggcttcttcccaaatttctacagcctctttcctcttctcatgcttgagcttccctgtttggccgcatgcgtgtgcaggactggctgtgtgcttggactcggctccaggtggaagcatgctttcccttgttactgttggagaaactcaaaccttcaagccctaggtgtagccattttgtcaagtcatcaactgtatttttgtactggcattaacaaaaaaagagataaaatattgtaccattaaactttaataaaactttaaaaggnnnnnnnnnnnnnnnnnnnnnnnnnnnnnnnnnnnnnnnnnnnnnnnnnnnnnnnnnnnnnnnnnnnnnnnnnnnnnnnnnnnnnnnnnnnnnnnnnnnnnnnnnnnnnnnccctggccgccccccccgcccccaaaaaatttttaaaaacctttttttnnnnnnnnnnccccaaaaggaaaggaaactgggccaaggtggttccaaaaaaaaccgggacaagaacaaggggtgggatccccacnnnnnnnnncccccggggggaaccggggggtttgaaaaaatccgaaagggattctgggggtctttttgggtattttcaaaagggatcccaaggggactcaaattaaattaaccccccgcccggcccctatccgaagaaggggggaaatacataacccttccggggaacggggaaaccctcccaaacggggttggtaaaaccgaaatcgccgggcggaagcgagacctggggcgccttggg

SEQ ID NO: 254416 - DNA, 1262 bp, Homo Sapiens
  misc_feature (339)..(339): n is a, c, g, or t
gtccgtgttccagaattgtgaaatggtgtgtggttttgctttccaagttcttctctgcctcctcttaattctctaattccatgtcttacagaagaatgagaaatttctttcttacttgagtatcatgctctaaaaaacttggcttcagtcacagaaacgctggctctcctgtgcttatattgaagccaactgcctttaattcttgggccctcttatatttttaaggtgcaaaatttgaagtctcagtcaccagacacaggttctatacaattaatgatgagctggagaagtaatatgtaggctaatttttcaaaaggcattgaatatactttccggaanaggaaaacaggaaattaaatattgccacatcttgccagaatcccatctggacaccttaactttgtcagggttcctacaacttgctaatcaagttttatacattctaaatctccccagtttctttggggctggaagatgcaacttccatttaatagaaactttgaaatcttggggtaagggagcagtggggggactagggagaaggataagaaatagaattattgaaaagcccccaccagggaccttcctggccagaatatgcagagtaattcctgctggcttcacctttgaaagtccctcgaaactatgcagatgaaactgagtctgtttttgatattgtcagatgtattctacctttggaagtcccaacacctaaactggaattcttgtatttacatctcctccactgtcccccacaccacccctcaattcctgctgcccctgctaatgttaagcatttttctcttgttatcatcaggttcacattaaaaacagatacttacaaactgacttgaagcacagatacttttacgaatgtgataaaatattttcttaagaaaaggaaagaggatgtgggtcaaataaaacaccgcatggatgttgattggtgaatactggtgtaagaaaagggagctcaggaatttttattactgtatttgtaaatgagtttgaaggaatttgtaaatgccactggtacatttttaaggtgacacatttgctccttataaagttattaaaaattacagggtaagcttaaatgacgtttgccagtagttttactttatataatcaatattgatattgttgctgaactatgtaactttatgatgcatttttcagtcccttttcagagcaaatgcttttgcaatggtagtaatgtttagtttaaattgacttaataaattattacctgagcaatggtt

SEQ ID NO: 254417 - DNA, 1100 bp, Homo Sapiens
gtctgttactagccatagtcaaggcgatcatgtcaaaaaagtttcttttaaaggaattgaaaattctcaggcaccaaaaattgtcagatgctctacccatggtaccccaggaccagaaggcaaccatatttcagatttaccacttctagacagtcccaatccctggctatcttcttcagtgactgctccatccatggtagccccagtcacttttgcatctattgtagaagaagaactccaccaagaagcagctcttattagaagtcgagaaaaaccgttggctctgattcagattgaggagcatgccatacaagatttattggttttctatgaggcatttggcaaccctgaagagtttgtcattgttgaaaggacaccgcagggaccactggcagtacctatgtggaataagcatggatgctagttcactgtggagttgagatgcattttacataattatgagtttgttcatataaagaaaagctgtggaaaagagtcttagagattttgtaatatcattctaaatagattaagaaaagatataatttctttactgcagttaaatcatataatgtttgtatgattaaaaataaatttctcagaattgtgattttagtaactttatataaaatgtgtgagacaaaaacttattaaggttaaatagaattgtttcttctgaataatctaacaaaggaaaatataagtgattgaatcataagatataaggggggtaaagtattaaaaataacttttttgtttgataacttgagaatttagaagattttgccaagtatgtgttgttgcttgacttcttaaatatggcattgatgaatttaaagtaggagcatcagttattacttctgattcattaatggccagaattttgtgtttggtgtaatagttgtgtcaccattcttgttgctttttaaaaatcaggctaatcatgtggtccatgtctcttcaaagcttgacctgcacaaatgccatatttctatttggaccacatattctccattttgcattgagcagtagagtacagtggaaagggaataagaatactgattattctgaacagtttagtcccaagagaatagcgtttt

SEQ ID NO: 254418 - DNA, 1002 bp, Homo Sapiens
gccgtaacgatgatcggagacatcctgctgttcgggacgttgctgatgaatgccggggcggtgctgaactttaagctgaaaaagaaggacacgcagggctttggggaggagtccagggagcccagcacaggtgacaacatccgggaattcttgctgagcctcagatactttcgaatcttcatcgccctgtggaacatcttcatgatgttctgcatgattgtgctgttcggctcttgaatcccagcgatgaaaccaggaactcactttcccgggatgccgagtctccattcctccattcctgatgacttcaagaatgtttttgaccagaaaaccgacaaccttcccagaaagtccaagctcgtggtgggtggaaaagtgttcgccgaggtgtgcatggtttcccagccacgtccctgttttcaaagatagtttcactttggtctctgaattgaaatgctgtctactgaaagggtttcaggagcgtttatgtaaggggctgtgatgaaattgcattccccatagataaaagaaaaatcatttctatccagagatctgagcagaaggattggcttgttagtttaacacagccgtatttttggacattcagtgttacttgctgagtctgacagcctctgggcccggccaggggccctgttaacaaactgctttcacatcccaacagggtctgcttggccactcagtgcagctgcgattaaccctaaaggctttaaggaacgggccacctgtaacagagacaccagccttcctgtatagacactaaattgttagcaagagtgttgagctagttcctggtgaagtgtttccacagaagacatgtggagcagttgtggggatattaagggaaactttcctctgccttgacccctttgttaaataaaatgactttgggagccattcattgtacagttgcaggaaatgaggagtgattttatggatgtgggtacattggggaccatgttcttaaaacctgggtttctgagt

SEQ ID NO: 254419 - DNA, 848 bp, Homo Sapiens
ggggcttccggttctgacggacgcttcggccgtaacgatgatcggagacatcctgctgttcgggacgttgctgatgaatgccggggcggtgctgaactttaagctgaaaaagaaggacacgcagggctttggggaggagtccagggagcccagcacaggtgacaacatccgggaattcttgctgagcctcagatactttcgaatcttcatcgccctgtggaacatcttcatgatgttctgcatgattgtgctgttcggctcttgaatcccagcgatgaaaccaggaactcactttcccgggatgccgagtctccattcctccattcctgatgacttcaagaatgtttttgaccagaaaaccgacaaccttcccagaaagtccaagctcgtggtgggtggaaaagtgttcgccgaggtgtgcatggtttcccagccacgtccctgttttcaaagatagtttcactttggtctctgaattgaaatgctgtctactgaaagggtttcaggagcgtttatgtaaggcgctgtgatgaaattgcattccccatagataaaagaaaaatcatttctatccagagatctgagcagaaggattggcttgttagttaaacacagccgtatttttggacattcagtgttactttgctgagtctgacagccctctggggcccggcccaggggccctggtaacaaactggctttcacatcccaacaagggcctgccttggccacctcatggcccgctgccaattaacccttaaaggcttttaagggaacggggccaccctggtaaacgagagacaccccgccctttcccggtaataacaccctaaaattggtctaatcca

SEQ ID NO: 254420 - DNA, 369 bp, Homo Sapiens
ccggggctgggtggcagcggccatggaccgcttcgtttggaccagcggcctcctggagatcaacgagaccctggtgatccagcagcgcggggtgcgaatctacgatggcgaggagaagataaaatttgatgctgggactctccttcttagtacacaccgactgatttggagagatcagaaaaatcatgagtgttgcatggccattctcctttcccaaattgtgttcattgaagaacaggcggctggaattgggaagagtgcccagagtagtaagaactcctacatcaaactctccttcaaagaacatggccagattgagttttacaggcgtttatcagaggtgacacacagaagatgggagtatgccgt

SEQ ID NO: 254421 - DNA, 1325 bp, Homo Sapiens
ggacgcagtgtctgctggggctgcgcacgttcgtggccttcgccgccaagctctggagcttcttcatttaccttttgcggaggcagatccgcacggtaattcagtaccaaactgttcgatatgatatcctccccttatctcctgtgtcccggaatcggctagcccaggtgaagaggaagatcctggtgctggatctggatgagacacttattcactcccaccatgatggggtcctgaggcccacagtccggcctggtacgcctcctgacttcatcctcaaggtggtaatagacaaacatcctgtccggttttttgtacataagaggccccatgtggatttcttcctggaagtggtgagccagtggtacgagctggtggtgtttacagcaagcatggagatctatggctctgctgtggcagataaactggacaatagcagaagcattcttaagaggagatattacagacagcactgcactttggagttgggcagctacatcaaggacctctctgtggtccacagtgacctctccagcattgtgatcctggataactccccaggggcttacaggagccatccagacaatgccatccccatcaaatcctggttcagtgaccccagcgacacagcccttctcaacctgctcccaatgctggatgccctcaggttcaccgctgatgttcgttccgtgctgagccgaaaccttcaccaacatcggctctggtgacagctgctccccctccacctgagttggggtgggggggaaagggagggcgagcccttgggatgccgtctgatgccctgtccaatgtgaggactgcctgggcagggtctgcccctcccacccctctctgccctgggagccctacactccacttggagtctggatggacacatgggccaggggctctgaagcagcctcactcttaacttcgtgttcacactccatggaaaccccagactgggacacaggcggaagcctaggagagccgaatcagtgtttgtgaagaggcaggactggccagagtgacagacatacggtgatccaggaggctcaaagagaagccaagtcagctttgttgtgatttgattttttttaaaaaactcttgtacaaaactgatctaaatcttcactcctgctccaagggctgggctgtgggtgggatactgggattttgggccactggattttccctaaatttgtcccccctttactctccctctatttttctctccttagactccctcagacctgtaaccagctttgtgtcttttttccttttctctcttttaaaccatgcattataactttgaaaccactctt

SEQ ID NO: 254422 - DNA, 424 bp, Homo Sapiens
  misc_feature (405)..(405): n is a, c, g, or t
tgcagtgctgtctgtaaaaatctccctccttaaagaatgcttctgctattgtcccagtttaatctgccacagcagagccatagatctcccatgcttgctgtaaacaccaccagctcgtaccactggctcaccacttcccaggaagaaatccacatggggcctcttatgtacaaaaaaccggacaggatgtttgtctattaccaccttgaggatgaagtcaggaggcgtaccaggccggactgtgggcctcaggaccccatcatggtgggagtgaataagtgtctcatccagatccagcaccaggatcttcctcttcacctgggctagccgattccgggacacaggagataaggggaggatatcatatcgaacagtttggtactgaattaccgctgggatctcctncgcaaaagctgtgccgaat

SEQ ID NO: 254423 - DNA, 1597 bp, Homo Sapiens
  misc_feature (1501)..(1537): n is a, c, g, or t
  misc_feature (1541)..(1541): n is a, c, g, or t
ggatgccggagcctgggacaccgccggcggggagagaagcggatcccgtccgagccccggccccaagtaacgccgccgccccggagccgccttggaggtccccctccccactaagtgcctctttgcatagcaccagtccccacccgcacgctctctggaccactacagctggacgggcaatggcgggtcggggaggcgcacacgacccaatggaccagctgctgggaacaagatctgtcaatttaagctggttctgctgggggagtctgcggtaggcaaatccagcctcgtcctccgctttgtcaagggacagtttcacgagtaccaggagagcacaattggagcggccttcctcacacagactgtctgcctggatgacacaacagtcaagtttgagatctgggacacagctggacaggagcggtatcacagcctggcccccatgtactatcggggggcccaggctgccatcgtggtctatgacatcaccaacacagatacatttgcacgggccaagaactgggtgaaggagctacagaggcaggccagccccaacatcgtcattgcactcgcgggtaacaaggcagacctggccagcaagagagccgtggaattccaggaagcacaagcctatgcagacgacaacagtttgctgttcatggagacatcagcaaagactgcaatgaacgtgaacgaaatcttcatggcaatagctaagaagcttcccaagaacgagccccagaatgcaactggtgctccaggccgaaaccgaggtgtggacctccaggagaacaacccagccagccggagccagtgctgcagcaactgagccccccttgcctgcccgctgcccccgcctcctccgcctgaatgacccgactggaatccactctaaccaatcgcacttaacgactcgggccaccactggcggcgcagggggaggggtccaccatgatttctccatataattttgatcataggccggagtgagtcattccacctgcacctttctgtacaaatactaattcaattttaagtcttaagtcacttttttaatatatatgatcttctgctcttcccacttcctcccctttctactgctctcccattttcccttgctgggagtagccacaagctcttgccccccaacccttgtatatggggacagtggggtcagtgcagctaccctttctttccctctgcggaacagcggacccagcaagagcatccacatcctcactttgttcggagtggtctttggtttgggcggtggggcagaccttgggaaggggcttaggaagggagaggcagctcttccttcagctggctctcatcaggctgcagccccctccccgctcccacctccctgctgggaaaccacagcattatcacagcattattgtgacagccacgaacccattgcccacaacccctccaccctcggtcaccccaacctctggctctgagccctgttctgaccaaatcatgatgatgagtattnnnnnnnnnnnnnnnnnnnnnnnnnnnnnnnnnnnnngganccaactttttctgtattttgtattgtatgttttcttcaacatgtaaccaatcagta

SEQ ID NO: 254424 - DNA, 373 bp, Homo Sapiens
acgataataggttctggactgagataagtacaaccttcttaaagcaagagctaagaaaatggttcacgtatatatcttctgagacatgaagtaatggggtgaatgattaaaagatgtcgggcataatagattacattatgataggattctcgcctgaaaagtggtatggaaatacagaagataaatgaatgaagggtgtcaaattgctgtgatatgtaaattgtactgcatatgtctaaaatagtcatgtaacagtattttaaaataccaatatttacacgacagcagcaaatacatactttgtcaactatttaacttcagcatgaaaaattttagataccaacatagataaaattttagatatccctggtgc

SEQ ID NO: 254425 - DNA, 696 bp, Homo Sapiens
  misc_feature (500)..(582): n is a, c, g, or t
aaccaataaaattacgataatattggttctggactgagattgttgacaagaagtaatggggtgaatgattaaaagatgtcgggcataatagattacattatgataggattcttggctgaaaagtggtatggaaatacagaaggagaaaagccaagaaatgtttaactactaaagaactagctcatttatataaatgaatgaagggtgtcaaattgttgtgatatttaaattgtactggatatgtttaaaatagtgatgtaacagtttttattttaaaataccaatatttacacgacaccagcaaatacatactttgtcaactatttaacttcccatgaaaaattttagataccaacttagataaaattttagatatcaacttagatgggtgagggtatacatgatttttcaaaatacttttaggggcacatgagcagaatactttgtggactactgctttaaaacacgatttctccaagtacagttgagggacaacttannnnnnnnnnnnnnnnnnnnnnnnnnnnnnnnnnnnnnnnnnnnnnnnnnnnnnnnnnnnnnnnnnnnnnnnnnnnnnnnnnnggtagaccccaaataagttttcaacatgtaccccaggtggctctcatgcaaaccatttaggaagcactacttaaaaaataaataaaaactagcattttccggtattgtagcccc

SEQ ID NO: 254426 - DNA, 1585 bp, Homo Sapiens
  misc_feature (170)..(232): n is a, c, g, or t
  misc_feature (253)..(253): n is a, c, g, or t
  misc_feature (267)..(328): n is a, c, g, or t
gtgtgacggccagaggctttccctttgtaaggcttaaatctgagtgcagtaaagaatgaagaaaccaaacaccagaaccctaaactcaaatgatatggagccaatttagagcggcacccccacccctcagagacagcggcattccacccctcggagagagcagcaccccnnnnnnnnnnnnnnnnnnnnnnnnnnnnnnnnnnnnnnnnnnnnnnnnnnnnnnnnnnnnnnnagagagcggcacccccacccntcagagacagcggnnnnnnnnnnnnnnnnnnnnnnnnnnnnnnnnnnnnnnnnnnnnnnnnnnnnnnnnnnnnnnaaatcctactttggtaaatattaatgtttaaccagttagcaaaatatttaacccagttagcaaaattaacaccgtcatttcgatagttactctgttgtgcatagtaaatgctgcaagatgaacttcacattggatgaagcagatttgagaaacgtttgccagaaagtgtgcctccccttcgacaggaccctaagcccagagaaaggaacagaggcccctgcagctgctgtgcctgcgtgcaccaggctagatagtctggtagcctgcgtgactcctcttcctgccgacgaggtaggcgatgaggacgatgaggaccagccccgccagggcaccacccacagcgatggggatcagcatgctgttctcgtccagcagacactcctccacagagccaaactggccaccttccaccttgaaagcctggacccacactttgaatatattgactgaaaacgccttcgtgacacggacgtgctcctccgcgttgcacttgtaggaattgccgactgtggcctgcagcgctcgcagggagccgttggcagctttaaaggcagggtctctggcgtcaggaagaattgtattcaactggattccttgtaggaaaaaccggctagaacttgcattcatcccgaactggaagagcaggacggtggtgccctcgctgtgcagctccagagtcaccaggtgggcgccgcagctcccgctggccgaggtcttgttggggttgatgttgagaagccttgtcaccgtcgtgttgtccttcctctcataggtgaggttcagctgcagccccatgctggccagcaggcaggtcccgttggtgccgctcacgttgtacttgtccacagaggggctcttgggcacgggtgagggcgaggggctgggtggcgcagggggcgctgtggttggggaaggcctgtcttgttcacagcgtgtctctcccctgctgaagctgctgttggaaaggtacgcctggatggtggcatcatggagcgttacggtcacgttgttcatgtggacctgggtgccactaacacatctgtattttttatctatatctgccctgatgtcagttatagattccacagtcttgatttctttggagctcgcacttggggaaaaggtgtgtgtctgacaagttataaacaaaactcatgagctggacgctgtaacgtgttgcatttctcgtgaaattgagagtgagtgtatgtcctcttccgacgcgtggtcgacgatatcccgaacttccggaccggt

SEQ ID NO: 254427 - DNA, 1394 bp, Homo Sapiens
  misc_feature (129)..(188): n is a, c, g, or t
  misc_feature (228)..(288): n is a, c, g, or t
  misc_feature (706)..(714): n is a, c, g, or t
  misc_feature (890)..(899): n is a, c, g, or t
  misc_feature (907)..(965): n is a, c, g, or t
  misc_feature (1250)..(1258): n is a, c, g, or t
gcgaggtcatcttgcagcatttactatgcacaacagagtaactatcgaaatgacggtgttaattttgctaactgggttaaatattttgctaactggttaaacattaatatttaccaaagtaggattttnnnnnnnnnnnnnnnnnnnnnnnnnnnnnnnnnnnnnnnnnnnnnnnnnnnnnnnnnnnngccgctgtctctgaggggtgggggtgccgctctctctgannnnnnnnnnnnnnnnnnnnnnnnnnnnnnnnnnnnnnnnnnnnnnnnnnnnnnnnnnnnnggtgctgctctctccgaggggtggaatgccgctgtctctgaggggtgggggtgccgctctaaattggctccatatcatttgagtttagggttctggtgtttggtttcttcattctttactgcactcagatttaagccttacaaagggaaagcctctggccgtcacacgtaggacgcatgaaggtcactcgtggtgaggctgacatgctcacacattacaacagtagagagggaaaatcctaagacagaggaactccagagatgagtgtctggagcgcttcagttcagctttaaaggccaggacgggccacacgtggctggcggcctcgttccagtggcggcacgtccttgggcgtctctaatgtctgcagctcaagggctggcacttttttaaatataaaaatgggtgttattattannnnnnnnngtaaagtgatttttggtcttctgttgacattcggggtgatcctgttctgcgctgtgtacaatgtgagatcggtgcgttctcctgatgttttgccgtggcttggggattgtacacgggaccagctcacgtaatgcattgcctgtaacaatgtaataaaaagcctctttcttttaaannnnnnnnnncaccaacnnnnnnnnnnnnnnnnnnnnnnnnnnnnnnnnnnnnnnnnnnnnnnnnnnnnnnnnnnnagcccggaacgcccgccgaaccccgacacccgacgccgccaccgaggtgccgccgcgggccccccgacagacgaacggacaaagcgggacacccctattggggggccccctcgcgcgccctcaaaaaccttttttctcaaacccttccgcgggggcggggcgcgcccccccaagggacaaaaagaacccaccggtcaccacgatgtttttccaccccaagaaaaacccgggcccaacaccaagaggcgcgtgttcgcctccccccccaaaaacaacaacgccccnnnnnnnnnaccacgcggggttctgatcaaaaatcacacgaggggggcgtcgcggcgatcttcttcggcgggcgcccatcaagcgcggggggtgtagcggcgcgccttcgtaattatataatgcgcgccccgccctcgtcgtggt

SEQ ID NO: 254428 - DNA, 572 bp, Homo Sapiens
  misc_feature (56)..(56): n is a, c, g, or t
  misc_feature (126)..(126): n is a, c, g, or t
  misc_feature (155)..(155): n is a, c, g, or t
ataggtctgagcgctcagttcagctttaaggccagacgggccccacgttgctgcgncctcgttccagtgccggcacgtcccctggcgtctctaatgtctgcagctcaagggctggcacttttttanatataaaaatgggtgttatttttattttnttttgtaaagtgatttttggtcttctgttgacattcggggtgatcctgttctgcgctgtgtacaatgtgagatcggtgcgttctcctgatgttttgccgtggcttggggattgtacacgggaccagctcacgtaatgcattgcctgtaacaatgtaataaaaagcctctttctttttggggtgggccttgtccttctgtcagctaaaatgggagctcatgagagaaggacgtcagggaaacggggttgagggtggtctcggtgcagagagaagggtgtcagggaaacggggggtgagggtggtcttggtgccagacgtagggaatggtgttgggagtggcccgagtgcctggcacagttgtctggttcattcatgtaacatgataatttttaaatcattaaaaaaattacctttcaa

SEQ ID NO: 254429 - DNA, 659 bp, Homo Sapiens
actctacgtagcttagaggctacagactctgcctttgataaccctgattactggcatatcaggcttttccccaaggctaatgcccagagaacgtaactcctgctccctgtggcactcatggagcatttaatggcagctagtgcctttagagggtaccgtcttctccctattccctctctctcccaggtcccagccccttttccccagtcccagacaattccattcaatctttggaggcttttaaacattttgacacggggttttccttattttgtgtgctttcccagtcccattcctcagcttcttcacaggcactcctggagatatgaaggattactctccatatcccttcctctcaggctcttgactacttggaactaggctcttatgtgtgcctttgtttcccatcagactgtcaagaagaggaaagtgaggaaacctagcagaggaaagtgtaattttggtttatgactcttaaccccctagaaagacagaagcttaaaatctgtgaagaaagaggttaggagtagatattgattactatcataattcagcacttaactatgagccaggcatcatactaaacttcacctacattatctcacttagtcctttatcatccttaaaacaattctgtgacatacatattatctcatttt

SEQ ID NO: 254430 - DNA, 1086 bp, Homo Sapiens
cagcgccacagtctgctgactcctgttaccccactctccccacccgggttagaggaagaggatgtcaacggttatgtcatgccagatacacacctcaaaggtactccctcctcccgggaaggcaccctttcttcagtgggtctcagttctgtcctgggtactgaagaagaagatgaagatgaggagtatgaatacatgaaccggaggagaaggcacagtccacctcatccccctaggccaagttcccttgaggagctgggttatgagtacatggatgtggggtcagacctcagtgcctctctgggcagcacacagagttgcccactccaccctgtacccatcatgcccactgcaggcacaactccagatgaagactatgaatatatgaatcggcaacgagatggaggtggtcctgggggtgattatgcagccatgggggcctgcccagcatctgagcaagggtatgaagagatgagagcttttcaggggcctggacatcaggccccccatgtccattatgcccgcctaaaaactctacgtagcttagaggctacagactctgcctttgataaccctgattactggcatagcaggcttttccccaaggctaatgcccagagaacgtaactcctgctccctgtggcactcagggagcatttaatggcagctagtgcctttagagggtaccgtcttctccctattccctctctctcccaggtcccagccccttttccccagtcccagacaattccattcaatctttggaggcttttaaacattttgacacaaaattcttatggtatgtagccagctgtgcactttcttctctttcccaaccccaggaaaaggtttcccttattttgtgtgcctttccccgttcccattccttccgctttcttcaaagggcactccctgggagaatatgaaaggaattacctcctcccatatcccctttcctcctcaaggcctccttggacctactttgtggaaactaaaggcctcctttaagggggtggcccctttgggtttttcccccattcccaaaactttgtgcccagggaaaggaaagggacaaaacgggggaga

SEQ ID NO: 254431 - DNA, 596 bp, Homo Sapiens
  misc_feature (11)..(11): n is a, c, g, or t
aagaaacgatnccaaatgtacagcaccaaatgaaggaatccatgtgtcccacccacacaatggaatagtattcagccatgaaaagcaatgaagcacaatacagggtacctgtggctggaccctgagaacaagaggagtgaaagaagcctgacacaaaaggccacacgtcatgtgattccatttatacgaaatatccagaattggcaaatccgtggaaacagaaagcaccaaccagtcggtggttgctggtggctggaagaaaggggcacggaagtcacgaccgatgggtacagggtgtctttctggggtgatgaaaatgttctactgtgatgacggcacaagtctgagtgtcctcccttaggaggctgatgggtataaaccacctcccaccctccactgggcacctgccctgacagccagtggatggagggtatgggcagcagtgggcagggagggggtgtccaccccagagagtcacctgctttacccagggactctccagcatgccctcaatgtgcccatgacccacaggtagccttaaaggagacttgcctgggtctggaagggcctgtgtgccagacagtgtctgagcccgg

SEQ ID NO: 254432 - DNA, 733 bp, Homo Sapiens
  misc_feature (576)..(576): n is a, c, g, or t
  misc_feature (641)..(641): n is a, c, g, or t
  misc_feature (650)..(650): n is a, c, g, or t
  misc_feature (706)..(706): n is a, c, g, or t
  misc_feature (722)..(722): n is a, c, g, or t
gagacatcgagaggaagtcgctgtggcactcagtcctacggcctccgaggctgggtagtgagtgtgtcgctggccttagccagactccacaggccacgctggctgcgaatggagccgaggactcgcgcggaggcgagatgctaccagccggcgagatcggcgcctctcctgcagccccgtgctgctctgaaagtggtgacgaaaggaagaacctcgaggagaaaagtgacataaatgttacagttcttattggaagtaaacaagtcagtgaaggtacagataatggtgatctcccttcttatgtgtctgcattcatagaaaaggaagttggaaatgaccttaaatctttaaagaaacttgataaactcatagaacagaggacagtaagttgcagttagaagaacaggtacttacaattgcagcagaaattcctgaattcgaagtgcctcaaatctcttcagcgccattaacagccatttgctgactgcgcaaccttggatggacgatcttggaaccatgattagccagattgaagagatcgaacgtcatcttgcttaccttaaatggatttcacanattgaagaactaagtgataacattcagcaatatctgatgaccaataatgtaccggaggcagcctncactctagntgctatggcagaacttgacattaaacttcaggaatctctggacctcatctctgggnttcatgagagccacangtttctgggct

SEQ ID NO: 254433 - DNA, 1171 bp, Homo Sapiens
  misc_feature (16)..(16): n is a, c, g, or t
  misc_feature (594)..(809): n is a, c, g, or t
  misc_feature (1058)..(1058): n is a, c, g, or t
  misc_feature (1086)..(1086): n is a, c, g, or t
  misc_feature (1097)..(1097): n is a, c, g, or t
  misc_feature (1119)..(1119): n is a, c, g, or t
gggaattggccctcgngcccaagaatcggcacgggagcaaaaggtaaataaaatataaaaatgaaaatgaagatacgtgaaattcaaatgtcacaacttgcctattatttattttagtgcatttttttgtgcttttcccagtttggtgttaggtggccttaagttctcagtaatgacacttatcaaataggaacttagtgttactcacctttatccattcccccaacactcaacaaattgcctttgctatatccctatgagatgagcagatcaaatattccccgtgagttaatgaaaactgattcaaccaaatggcgaagtcagagactatcgggggccatggagacactctgggccatttttatgaggtagtctaggctcatcttcatgagggaactgaggtcttggggggtgggggttacccaaataggttcacagaagaaccagaaataaaacctgcctttctagactgtaagtcttgtgattgtcatctaaatggttgtctctatacagcaactcatctctagaactgaaaataagtttaaatccctcctccatccccaataattcaagctgcatttcagagaaaaccannnnnnnnnnnnnnnnnnnnnnnnnnnnnnnnnnnnnnnnnnnnnnnnnnnnnnnnnnnnnnnnnnnnnnnnnnnnnnnnnnnnnnnnnnnnnnnnnnnnnnnnnnnnnnnnnnnnnnnnnnnnnnnnnnnnnnnnnnnnnnnnnnnnnnnnnnnnnnnnnnnnnnnnnnnnnnnnnnnnnnnnnnnnnnnnnnnnnnnnnnnnnnnnnnnnnnnntcacatggacaaaatggtgttaactacgaaaatttttacagagaaaagggcaactgacaaaagcaggtgtttggaatgaattaagaccatggcaggcttttgaggcctttatatttctcctgactgtgcaatatattttggctctctgtctaagacttggctgtcacagtagcaatggtaatattagctactgtgccagaagcagcctatcaatagagttgaatctcagatgggaatcgagagcatctncttctgccttgctatagcaagctgattnttagatatagnctaagtgcttctcttcattctnccagattctacctgctcacacccctagagggctggaggaatcgacacgtgcc

SEQ ID NO: 254434 - DNA, 709 bp, Homo Sapiens
  misc_feature (416)..(664): n is a, c, g, or t
tcagatacaacacttaaggaacctaggaaaggaaagactcagacacatgggaataagaggtatcctggtctcctcacctttcctatggaagttatacaaacttttagttttcaaagccaataattttcagcctattatttaaagttatacaagtaatcactggaataactctaaataaactacatagtttccaaaataccataaagaagaaaacaaaaagaacacctctcacatagcaattgtaagaaaattaagaagcatgtaaagcagaaaaaagaaaggactagggttaaacatatctattagaatgtaaatgagacactcacctattaaaagaaaaggtacttattagatttttaaacatcaaaaacaaaacctgccaggtgcagtttttggattacagtggctcagacacnnnnnnnnnnnnnnnnnnnnnnnnnnnnnnnnnnnnnnnnnnnnnnnnnnnnnnnnnnnnnnnnnnnnnnnnnnnnnnnnnnnnnnnnnnnnnnnnnnnnnnnnnnnnnnnnnnnnnnnnnnnnnnnnnnnnnnnnnnnnnnnnnnnnnnnnnnnnnnnnnnnnnnnnnnnnnnnnnnnnnnnnnnnnnnnnnnnnnnnnnnnnnnnnnnnnnnnnnnnnnnnnnnnnnnnnnnnnnnnnnnnnnnnnncagatcttgtatcaaaaacaaaccatcagatgagccttattttac

SEQ ID NO: 254435 - DNA, 1038 bp, Homo Sapiens
cgtctctatcgcgccagttcctcagcctcagtgctatgaaggtgacagcgtgaggtgacccatctggcccgccgcgatgctggcaacacggcggctgctcggctggtcgcttcccgcgcgggtatctgtgcgtttcagcggcgacacgacagcacccaagaaaacctcatttggctcgctgaaggatgaagaccggattttcaccaacctgtacggccgccatgactggaggctgaaaggttccctgagtcgaggtgactggtacaagacaaaggagatcctgctgaaggggcccgactggatcctgggcgagatcaagacatcgggtttgaggggccgtggaggcgctggcttccccactggcctcaagtggagcttcatgaataagccctcagatggcaggcccaagtatctggtggtgaacgcagacgagggggagccgggcacctgcaaggaccgggagatcttacgccatgatcctcacaagctgctggaaggctgcctggtggggggccgggccatgggcgcccgcgctgcctatatctacatccgaggggaattctacaatgaggcctccaatctgcaggtggccatccgagaggcctatgaggcaggtctgattggcaagaatgcttgtggctctggctatgattttgacgtgtttgtggtgcgcggggctggggcctacatctgtggagaggagacagcgctcatcgagtccattgagggcaagcagggcaagccccgcctgaagcccccccttccccgcaaacgtgggaagtggtttggctgccccaccaactgtggccaacgtggagacagtggcagggtcccccacaatcctgcccgccgtggaggtacctggtttgctggctttggcaaaagaacgcaactcaggcaccaaaactatttcaacatctctggccctgtccacccacccttgcacctgtggaaggaagaaaatgtcctgtgcccctttgaaagaactgattgaaaaacactgctgggggtgttcacggccgggttgggaacaacccc

SEQ ID NO: 254436 - DNA, 1657 bp, Homo Sapiens
  misc_feature (1447)..(1448): n is a, c, g, or t
aagcgaggcctgggtggcgaattcggcacgaggcacgacagcacccaagaaaacctcatttggctcgctgaaggatgaagaccggattttcaccaacctgtacggccgccatgactggaggctgaaaggttccctgagtcgaggtgactggtacaagacaaaggagatcctgctgaaggggcccgactggatcctgggcgagatcaagacatcgggtttgaggggccgtggaggcgctggcttccccactggcctcaagtggagcttcatgaataagccctcagatggcaggcccaagtatctggtggtgaacgcagacgagggggagccgggcacctgcaaggaccgggagatcttacgccatgatcctcacaagctgctggaaggctgcctggtggggggccgggccatgggcgcccgcgctgcctatatctacatccgaggggaattctacaatgaggcctccaatctgcaggtggccatccgagaggcctatgaggcaggtctgattggcaagaatgcttgtggctctggctatgattttgacgtgtttgtggtgcgcggggctggggcctacatctgtggagaggagacagcgctcatcgagtccattgagggcaagcagggcaagccccgcctgaagccccccttccccgcagacgtgggagtgtttggctgccccacaactgtggccaacgtggagacagtggcagtgtcccccacaatctgccgccgtggaggtacctggtttgctggctttggcagagaacgcaactcaggcaccaaactattcaacatctctggccatgtcaaccacccttgcactgtggaggaggagatgtctgtgcccttgaaagaactgattgagaagcatgctgggggtgtcacgggcggctgggacaacctccttgctgtgatccctggcggctcgtctaccccactgatccccaagtctgtgtgtgagacggtgctgatggacttcgatgcgctggtgcaggcacagacaggcctgggcacagctgcggtgatcgtcatggaccgctcgacggacatcgtgaaagccatcgcccgcctcattgagttctataagcacgagagctgtggccagtgtaccccatgccgtgagggtgtggactggatgaacaaggtgatggcacgtttcgtgaggggggatgcccggccggccgagatcgactccctgtgggagatcagcaagcagatagaaggccatacgatttgtgctctgggtgacggggccgcctggcctgtgcagggtctgatccgccactttcggccggagctcgaggagcggatgcagcggtttgcccagcagcatcaggccccggcaggctggcctcttagcccaccacccctggcctgctggccctgcgtctatccatgggggaatgctgggacaataaaagcgaggtgctgccccacccctccnntacggcacatgcgcgcgtttgaagcgacagtccctttgtcggcgcgccctcgggccctcgaaaagtctttctaaaaccctttcgttttggccgcgcggggccccccgtaaggtacaccggaacatggggcattagccgtttctccctaaggggaaatccttgggtacacggaaataaagggctttggatattcttcaccccatataaaa

SEQ ID NO: 254437 - DNA, 665 bp, Homo Sapiens
ggggcaccaaactattcaacatctctggccatgtcaaccacccttgcactgtggaggaggagatgtctgtgcccttgaaagaactgattgagaagcatgctgggggtgtcacgggcggctgggacaacctccttgctgtgatccctggcggctcgtctaccccactgatccccaagtctgtgtgtgagacggtgctgatggacttcgatgcgctggtgcaggcacagacaggcctgggcacagctgcggtgatcgtcatggaccgctcgacggacatcgtgaaagccatcgcccgcctcattgagttctataagcacgagagctgtggccagtgtaccccatgccgtgagggtgtggactggatgaacaaggtgatggcacgtttcgtgaggggggatgcccggccggccgagatcgactccctgtgggagatcagcaagcagatagaaggccatacgatttgtgctctgggtgacggggccgcctggcctgtgcagggtctgatccgccactttcggccggagctcgaggagcggatgcagcggtttgcccagcagcatcaggcccggcaggctgcctcttagcccaccaccctggcctgctgtcctgcgtctatccatgtggaatgctggacaataaagcgagtgctgcccaccctccaaaaa

SEQ ID NO: 254438 - DNA, 1155 bp, Homo Sapiens
  misc_feature (926)..(927): n is a, c, g, or t
aatcctctgggatatcgtcgacccacgcgtccgcatctggcccgccgcgatgctggcaacacggcggctgctcggctggtcgcttcccgcgcgggtatctgtgcgtttcagcggcgacacgacagcacccaagaaaacctcatttggctcgctgaaggatgaagaccggattttcaccaacctgtacggccgccatgactggaggctgaaaggttccctgagtcgaggtgactggtacaagacaaaggagatcctgctgaaggggcccgactggatcctgggcgagatcaagacatcgggtttgaggggccgtggaggcgctggcttccccactggcctcaagtggagcttcatgaataagccctcagatggcaggcccaagtatctggtggtgaacgcagacgagggggagccgggcacctgcaaggaccgggagatcttacgccatgatcctcacaagctgctggaaggctgcctggtggggggccgggccatgggcgccgcgctgcctatatctacatccgaggggaattctacaatgaggcctccaatctgcaggtggccatccgagaggcctatgaggcaggtctgattggcaagaatgcttgtggctctggctattgattttgaccgtgtttgtggtgcgcggggctggggcctacatctgtggagaggagacagcgctcatcgagtccattgacgggcaagcagggcaaagccccgcctgaagccccccttccccgcagacgtgggagtgttgggtgccccacaactgtggcaacgtggagacagtggcagtgtccccacaatctgccgcgtggaggtacctggtttgctggtttggagagaacgcaatcaggcacaaactaaatacaacatttctggcatgttaaacaaccttgactgtggaggaggagatgttgtgnnctgaagaatgattgagaagcatggtgggcgtgtcacgggggtggaaacctctgggggatccggggggtttgttaccatgatcccagtttggttgaaaaggttgctgggatcaagcggggggaaaggtgggcatgggatattgcggcggaaatgaaatccgttgtttaaaaacacgggcggccccgaggggggaaaagacccggagggcaacgcagaaaaaaacagcgg

SEQ ID NO: 254439 - DNA, 402 bp, Homo Sapiens
  misc_feature (32)..(32): n is a, c, g, or t
acacgcaagaaccaaaattatgcaaacattanaatgtaaaaccatcattccagtagtctgatgaaataagcatgctcctgctataatttagcaagggagaaagacatttggatttagcaaacactggttttatttgaaagcactacctataaaagtagtaaggaaattattaaaatctgtattttaatcaagctgctatgaaaaacaatcaaaattctgaacaatttcttaacaagtctagaatgatatcaacccacttactgtccctttctagcaggcagaacttaataactatctcaggaactgattcctccatcctgaaacaccttaacaaccggaaaatagccaagaccagacaagtctgctgtggggacaattagataaaaggaggctgcacagtgg

SEQ ID NO: 254440 - DNA, 629 bp, Homo Sapiens
  misc_feature (71)..(71): n is a, c, g, or t
  misc_feature (87)..(88): n is a, c, g, or t
cccagtagcaatcactcaaaggtctcttcatcccaaatgaacaaagactcattcctgacagctgtactttntgactttactttctgnnagtcattccctttttcacagtcttcatttttcttttgcaaattagcttaaaaaatagagtaacattttctaataagcattcacgtaaaaataaatcagaaaatttactggagtttcactttaagcatccactacacaccaatgtggatgcagtttttatctgtatcaaatacagggaataggccccagctaacattgcccaggcccatgctggctttctaagggccattcatatttgactggaaacatctgcaagtgcacttgacacttacatgagaagttagttaaattagaatagtcataccttctttcacctttcctggcgatttcttgatgttagtctgtgaagctgtggttaacttctccaaaatagtgtctgcaaggagttttcttttcttctgttcgatgaacagctcctcgcgtcgcttcctcttctccttcaggagcgttttatccctgcgcacggtctcccgcactcgccgctcctcttctctcgcttccgcctgggcgctgcagaaagtcagctcatccgggctcgtgcc

SEQ ID NO: 254441 - DNA, 1375 bp, Homo Sapiens; identical to SEQ ID NO: 14964
  misc_feature (734)..(746): n is a, c, g, or t
  misc_feature (1175)..(1175): n is a, c, g, or t
  misc_feature (1183)..(1183): n is a, c, g, or t
  misc_feature (1216)..(1216): n is a, c, g, or t
  misc_feature (1248)..(1261): n is a, c, g, or t

SEQ ID NO: 254442 - DNA, 604 bp, Homo Sapiens
  misc_feature (157)..(157): n is a, c, g, or t
aagtgagccataaaacactagaaggatacgcatcaaaggcaaagacagcacatcaaattatgatgtaaataatcaccaaagaaaaatgaagatggagaggaaaggatttcaaagacatttcagaaaggtgagctacagagcagcggggaaagaaatntgtgttctgctccgtttcattggatggccaggaagacacagaagatgagcttaggctcttattcagctatcagacagttccaatttaatacacacacaatttcttaccgaattgcactaggctgacactgcaagtttcttacctcaaaaggttcaatccaccatacgacagctagcgaattgttttgtctatagcaaactcagatgtggttaggatttaaatttagtgtatacagacactttttcataattagtatatgtatatgtgctacaatttccatacacaattatacataaatatgtgacacatgcacatactgtacactcgatatccataattcttatcagcaaagtaaatcaacctaagtggcaaaatattagaatgctgataccgtgtctatgcatttccttttatacccctaagaagcaattttattaaaaacaattt

SEQ ID NO: 254443 - DNA, 545 bp, Homo Sapiens
gctgcaggtgccagtggaagcaccagatcccagaggcaccctgtagggttgcctgtctcctgtgcgctcagggcctgccacttgaaatgaataaataagctaatgaagtgggagctttctgcagcatagtcacacggtcagcgcttggtgtggaggtcaggggcctattgtgggctgcccccaggaactgctcgaacctctcctctcaatcctcctctcaatccctgtctttgcagtgctcagtgacctgtgggaattatgaatacagctaccaaaccaccatcaactgcccaggcacgcagccccccagtgttcacccctgttacctgagggactgccctgtctcggccacctggagagttggcaactgggggagcgtaagtagaagactgagcactcaaatctgaaagcccttggatctcaaccccgtcttaaacatgtcctgcctaacccgctctccttagtaactctacttccaggagaaaccctggagttagcaacttgaaatgggctaacagggatcaaagggacttctttctgtttac

SEQ ID NO: 254444 - DNA, 629 bp, Homo Sapiens
aaaaaatggccagcgaaggagaacttgttcatattagcaggtgttctagaaagaccctctaatctccctacccagctgggattttgaagagatgttgtagtgaagttattattttcagagacatgggccaggttaagggaaccaagaggggaagttgaagcttgtgcaacagcaggactccattagcaccccagacagttcggagggtcggccacacccaagttacagccctagggctgcagtcactgccagaaccacagcaaagcagggagggagcaggacaaatacataccccctcccctcctgtcacctgtcccccttgctgttgcctcctgatggctgaaccttattcaaagtaccaggggaagttaagtgattcaatgcttagggctggctcagtctccgggggcacagagaaaggtaggggaggctgcaaagagtatctggggacacagagattaatcaggacatgcggtaagtccaccttgggacacttttctaagaaaatcatctgccatatgctgaaatactttttacaagtatatggactgcaatattacgttctgtttcaaacaagccaacttaaatgttcaacagcagaagattcattaaataaaaaatgttatgtc

SEQ ID NO: 254445 - DNA, 365 bp, Homo Sapiens
cctgacagtgggacacctctaaaaagccacttccaaccccctaggccccagtgctcactacctacactgccgcatgtgactagtctcaagcaggctcacagtggcttcatgctcgtgcatcagtgcagacagacactgcctcattgctaatgctcaatacacatcctgcattaggatatctcttgaaacttattctgcagttatgcatatggtacttaagcacacagttctgagagcattccattccataggttcctaaaaaggttctagtggaattgaacacctgctgcctaggcgctatcagatccttaaattatctatccctccttcacatttcactttccttgtcctgaactccagcttcc

SEQ ID NO: 254446 - DNA, 353 bp, Homo Sapiens
  misc_feature (44)..(44): n is a, c, g, or t
ggacacggtgctcatcatagctgaactccacagagtagacctcnccgtagtgggccctccagctcatcgcgcactcatgctgctgcatgtcaaacagccggatgacgccatcagctgcccctgtgaccagcaggttcccgttgtgattgaaggctgtacagttcgtgtcccacagcagcagcctgccaggaacctggttcatgcccttgctgccgatgtctggtgctgagaagtccacctgggaagtgaggctcggagctgctgccgaacagacgaaagaggccccgttggggctgcacgcaagagacaggattctgggcatgttgtcgttgatattgacacagagattcttc

SEQ ID NO: 254447 - DNA, 1384 bp, Homo Sapiens
  misc_feature (720)..(720): n is a, c, g, or t
  misc_feature (722)..(724): n is a, c, g, or t
  misc_feature (726)..(726): n is a, c, g, or t
  misc_feature (729)..(729): n is a, c, g, or t
  misc_feature (731)..(746): n is a, c, g, or t
  misc_feature (1127)..(1147): n is a, c, g, or t
cagtccctggcgctcctacttcccaactgctcctcctcccgcatccccacagtaccccgtcctcacagcgggctgtgggtccaatcagactttcccctcggattcctctctaggactgaaccaagacttacccgaagttgccgcggggccttccgatcccctaggccattgcccaagtctggccaggctgatgggaccagcgaggagtctctgcaccttgacattcagaaactgaaggagaagagggacatgctggacaaggagatctcccagttcgtatctgaaggctacagtgtggatgaactggaggaccacattacccagcttcacgagtacaatgacatcaaggatgtggggcagatgctgatgggcaaactagctgtgatccgaggtgtcaccaccaaagagttgtatccagagtttgggctggacatgaatgactgagcaggctcatcgccccttgtccacagctcccagggacagaagggtgtggacatgataaacactgagagcccaaccagcacacctacagagtttccagcgagacaatgccagaagcacttttctagagagcccaagcccaatcaggaggaggctagagaagaggcgggcagggaggaaggggcgttcccagctccaaggttcctgaaatgtcgcagtgatacttgtgtaggggtacatgtactttatttgtcaataaacgtatctgtacactggaanannnanaangnnnnnnnnnnnnnnnnccttgtcgggcccgcctccggccctccgagaaagcttttctaggacacattcgtttttggcgcggcggggccccagttagggtaaagttgaaccatgggtccataggctggtttttccttaaggaagaatcctggggcccttggacataggtggccttgggaattccctcaccccaattaaaaaaaacacgcccccggggcggggccaaacaccgaaaggcgtttttctgtgaaacaaaaaatctccaaagtagggggaagttttcctttgaaagggctccaatattaaccccggggaagatctttatttccccaaccaggggaatagtttccccaaaggcggggaaagctctccggagaatagatctcaaaatattttannnnnnnnnnnnnnnnnnnnngttggcgccacctttctatttcggcgaaagtaaaactgggggttggggcaaaaattttccaattttataagggcgattttcctcttgcccggaaacaattgtgggaaaagccccctttcttccgcaaaaaaccggggtctattggagatgtgaaaaaccctttgaaaaattccgcccaccaagggggggatatatacaacgccacacaccttggggttcgcagcccttgtggggccg

SEQ ID NO: 254448 - DNA, 405 bp, Homo Sapiens
cacaggaatcctactcagctccaggggggtcaccagcaggtcctaaagaaggggtggggaaggtctgggtggtggtgacggtggcggacaaggtcctggtgctccagccacagtgaggttaaggctcaaggttccattgagcacatacgtgtgattcacagtatgattggtgaaaacaaacagaccagtattatccccgaagctccacttgtagttaatggtagaataattgaggaagtggctaggatcatgaatcagaacatcaaacataatggggagatctctgagaaaggtttcgtcgcatgaatttcgatcgttcctctggaacatagtcacaaacacagaaatctgatctgttaccacgcacacatctttcacttgtgcgatgggaacatatgcccgtcc

SEQ ID NO: 254449 - DNA, 642 bp, Homo Sapiens
gcggatcaaagagaagaaacacacacacaagacgcaccaaccgattctgcatatatttatccttaatctgttcacaagtagagatgcaatttgatatataaaggtgaataaattcaggaggtagatcaccagctgtagttagtcgatttacaaccttccattgaatgtaaagacatgtccatattgaccaggacagagaaatactcagtgatctggcttgactgcattaatttcagcaacatttctatagcgactaaagggttgccacaaggtcaggaagtttggctggggtgaggccaatatggtagacaagtttggggtctttttccaactcaccaagtagctgtgtttgttggggagaggataaggggcttttgaaggctttggccattattcgtttgatctccacaccagtgctattcttaacacacatcgatttatcccactggatcgcgtggtcaggctccgtggggtttagccaagcaagttcatcctcacaaatgtggagtggaggcggtggacgaataaactctggtcgaaaatggctttcaataggtggctttggtccgctgactaaagcttctgtgatctgagaggcaactgagctgtcaaatccagaattagaagaatccgggtctggct

SEQ ID NO: 254450 - DNA, 1458 bp, Homo Sapiens
  misc_feature (83)..(83): n is a, c, g, or t
ataaacaatccctgtacaataagttacggatcaaggattggagaacacacacccagacggcaccaaccgattctgcatatatntatccttaatctgttcacaagtagagatgcaatgtgatatataaaggtgaataaatgcaggaggtagatcaacagctgtagttagtcgattaacaacttccattgaatgtaaagacatgtccatattgaccagcacagagaaatactcagtgatctccacaaggtcagaaagtttggctgggatgagcccaatatggtagacaagtttggggtctccaactcaccaagtagctgtgtttgttggggagaggataaggggcttttgaaggctttgcccattattcgtttgatctccacaccagtgctattcttaacacacatcgatttatcccactggatcgcgtggtcaggctccgtggggtatagccaagcaagttcatcctcacaaatgtggagtggaggcggtggacgaataaactctggtcgaaaatggctttcaataggtggctttggtccgctgactaaagcttctgtgatctgagaggcaactgagctgtcaaatccagaattagaagaatccgggtctgggtcactgagaatactgggaaagctcgctctgctgtgcgttggcaattcagattggcgttcggccaagggctaacggaagcccacataatgtccacagacgtggcccatgtttccaacgtcccatcagtgcaatctggcgaggcgtctttatgaagagttcccgtgggggtcccagcatcagctgggaaagaaaaaacttttctggtggagttataggaggtaaaaatcctgagagcggagggcggtcgggttcctgccccccgcgggcgggcggcgcggggttgaccaggtgcgcaaagctggccggcgaaggggttggcggccagcgggctcggtgcggtacatctcccagagcaggtagaggcgccgtgaggcgctgcgccgcgctaggcagcaggtcgggctgctggagcagcatgacgagcaccgagcccaggcggaagtggtcggccttgctgaagtagtggtggaaggcggtggacaggccctcgaaggtgctgccgccgcccgcctcctccgatatgatgctcagcaggctcgagagctccttcggggtcaagctcatcctgcccgcggggccccccgggcctccgctcccggacccggggccgcttgctccgcctctgccgccgccggagcccccgaagccgctcctggacgccgaccctgccgcttcccgggaccctctttgctccgcggcggtgagaagccggccagacgccgcgctcgcccctccgccgggcatcaacctcgctccccttcccctcttcccggcccgaggggccctggcgccggctcgctccgtccccgcggccgtaaagcgcgctgtacacgcgccacccaggcc

SEQ ID NO: 254451 - DNA, 604 bp, Homo Sapiens
  misc_feature (13)..(13): n is a, c, g, or t
  misc_feature (64)..(64): n is a, c, g, or t
  misc_feature (76)..(76): n is a, c, g, or t
  misc_feature (82)..(82): n is a, c, g, or t
ggcagcaaatatnttattaataaatgcatctagtaacctcaaatagttatactgaatatttaanttcattggctanaataanaattaaggtatataacaaataaattaccaaactgtaaacctgccaaacttcttgccttggggcctcctatctctattagttgtaaaagaatattgtataaaagaaatgattcattcacggcctaacccacaggaatacagttaacttatactggtgccctgctttcaagaatgtttgagatgaactcagcagcacagtgttttatttcagatacttgaaaagatcacagctctttataatggtaaatcatttttattgactgaatattcacaccaaacacaaaagcaatgctggttcttctccttaatggactaggataggagaagagagttcagtttagtttcttgctgggctgcatgtactcacatgcaaaacattatctttaagattcagggaaaggtggtttgaaacaaagacttaaataaaaatagcaccagaaggaccaggtaccaataatcacatactccacccattcgggagtttcattttgtgaaatattattgcacttgtaatgtaaaaagt

SEQ ID NO: 254452 - DNA, 608 bp, Homo Sapiens
aatggtataaaaatagaaaccccctcagaacacctgtattcaaataagctgtgtaaaaagacaccttgtgggtacctaaaataggtttatggtaccctatggaattgcttctatttaagtgaagatggaataaattgcacccatcccacattgtcaagtaatgaaaatatgcctctttttctactgttgaatgattcaaaatcaggtatttctggaaatactcagaaagggtaggaagggaaggagaaggtcaagaggtacatcagaaaaaggtataaaaatcatctacgttaatcataagggtggatggattgcacttttccacttatttcaacacataatttttctaactagtatgaatgattgcaaccattttggccattagcttttacccacaaacattttattccatttcagccaaataggtgtttttgtaaaactgatgatcaacacacagatacttttaagaatctcttcgcaacccccaacacagacataattagttagcatttaacctgagatacaatctgttgagaggctgtctttaaatatttcttcatttgttgcatcaattcatactgatggtggtagttcatgggagaaagttt

SEQ ID NO: 254453 - DNA, 676 bp, Homo Sapiens
agggtggtatcctgtggtacacattcaacttggtgctccctcattacacactctgatcagtagtggtcctagagtatagtatgaggcagttgttggcacattgtagaaggtgttctctcttctctggcctgcacaggtagatccacaccccttcctgtgctccttccctcccacaaactctgtacatacttctctttcctctgcctgctgcatttcacccagtcccaaaccaccagtatatgtaaaatgattaatacttctgtttgttctttcaggtgatatcaagactatcaaacaaatctatggtctcacaggtatggcttttgctacacagcaaaatatttatctaaaatctggaggattaccaataaatctgtcttgtctttctcttcagaatttcatgtatttatcttttactttccctacttgacttcccaataagagatgtggcaactgacttgcttgagtttgagtatagaggagaattgaaactcatagttctatgggagcattttatagttattgttataaagcagtttgttaccaaaacatgccaaatgtaaagtcctaaggtgttaatcttaaaagtactttcattgcatttaaaattggcagtcaaattttttcttgtaagtgtccataatgctaaaaataaagttgagagatattctggaac

SEQ ID NO: 254454 - DNA, 1126 bp, Homo Sapiens
cttttgggagctgtgggcgcaaccccagtggcagttatgtgtcctgcacccctagagatgccatttgtgggcagctccagtgccagacaggtaggacccagcctctgctgggctccatccgggatctactctgggagacaatagatgtgaatgggactgagctgaactgcagctgggtgcacctggacctgggcagtgatgtggcccagcccctcctgactctgcctggcacagcctgtggccctggcctggtgtgtatagaccatcgatgccagcgtgtggatctcctgggggcacaggaatgtcgaagcaaatgccatggacatggggtctgtgacagcaacaggcactgctactgtgaggagggctgggcaccccctgactgcaccactcagctcaaagcaaccagctccctgaccacagggctgctcctcagcctcctggtcttattggtcctggtgatgcttggtgccagctactggtaccgtgcccgcctgcaccagcgactctgccagctcaagggacccacctgccagtacagggcagcccaatctggtccctctgaacggccaggacctccgcagagggccctgctggcacgaggcactaaggctgagctggctgaccgacccaatccccctacccgccctctgcccgctgacccggtggtgagaagcccgaagtctcaggggccagccaagcccccacccccaaggaagccactgcctgccgacccccagggccggtgccccatcgggtgacctgcccgggcccaggggctggaatcccgcccctagtggtaccctccagaccagcgccaccgcctccgacagtgtcctcgctctacctctgacctctccggaggttccgctgcctccaagccggacttagggcttcaagaggcgggcgtgccctctggagtcccctaccatgactgaaggcgccagagactggcggtgtcttaagactccgggcaccgccacgcgctgtcaagcaacactctgcggacctgccggcgtagttgcagcgggggcttggggaggggctgggggttggacgggattgaggaaggtccgcacagcctgtctctgctcagttgcaataaacgtgacatcttgggagcgtt

SEQ ID NO: 254455 - DNA, 1428 bp, Homo Sapiens
  misc_feature (298)..(298): n is a, c, g, or t
gccccgcccttcttggaaagccccttaaagtcccggctttgggagggcaggcgggaaccttcccggaagaaggtttcagaaggtagaagccgagggacacctgtcggaagggcggtgggcgcttggttctggaggggtacccaatagggggcggggattcccagccccttgggcccggggcaggtcaacccgatgggccacccggcctgggggggtcggcaggcagtggcttcccttggggggtgggggcttggctggccccctgagactttcgggctttctcaccaccggggtccancgggcagagggcgggtagggggattgggtcggtcagccagctcagcctgggagtctcttggacacagggtcagggcggcagcggcctggaaggggaggccgggaagctgagagcactagcctgcttagtgcctcgtgccagcagggccctctgcggaggttcctggccgttcagagggaccagattgggctgccctgtactggcaggtgggtcccttgagctggcagagtcgctggtgcaggcgggcacggtaccagtagctggcaccaagcatcaccaggaccaataagaccaggaggctgaggagcagccctgtggtcagggagctggttgctttgagctgagtggtgcagtcagggggtgcccagccctcctcacagtagcagtgcctgttgctgtcacagaccccatgtccatggcatttgcttcgacattcctgtgcccccaggagatccacacgctggcatcgatggtctatacacaccaggccagggccacaggctgtgccaggcagagtcaggaggggctgggccacatcactgcccaggtccaggtgcacccagctgcagttcagctcagtcccattcacatctattgtctcccagagtagatcccggatggagcccagcagaggctgggtcctacctgtctggcactggagctgcccacaaatggcatctctaggggtgcaggacacataactgccactggggttgcgcccacagctcccaaaagcatttccccgagtattagcggtctggaggcaaagtggcgcagcgggctgggctccaggtccccaaagtgactggcactgctgggcataggaggcacaacgcccgtgcatgcacacagcttgcccgccagcgcagggctcgccatcccctaggctgacatcagggggacactgggagctgtctcctgggcagaattcaggcaagtcacaatcccctctggtaggacgacactgccagccagacgggcgcagctggcaattttgacaacagggtccgtcagatgcacactgtgcacctggcctcagctggcaggtcaaagaatcacagcagggatcgacgcagtcatccaggaagccacagtcacactgctcgcccggctccacaaacatatttccg

SEQ ID NO: 254456 - DNA, 405 bp, Homo Sapiens
  misc_feature (16)..(16): n is a, c, g, or t
  misc_feature (36)..(36): n is a, c, g, or t
  misc_feature (44)..(44): n is a, c, g, or t
  misc_feature (52)..(52): n is a, c, g, or t
  misc_feature (64)..(64): n is a, c, g, or t
  misc_feature (80)..(80): n is a, c, g, or t
  misc_feature (89)..(89): n is a, c, g, or t
  misc_feature (102)..(102): n is a, c, g, or t
  misc_feature (111)..(111): n is a, c, g, or t
ggtaccataacccccnccacggataagccgggtggnaaatgganaaatcccnaatggttttccncaaaactggtgttccncttaagttnccccgggatgttncctttgaanttgttttatagtttcctgtagccatttggcaattgcctgttagaaaacactagcctagaaatcccctccccaccaccccttttaaggcccagttaactatactacagtcaataccgtggtgagcaaaaatgtaaaaggtggaaggagaaaacttactaaaatagtatgttttcctattataagggacagacttggtattcagtatttgtcaaatattacatgtgttattcaggagatagattaatgcattaaagggatgtaagcacttttattttaataaagtgccttataaca

SEQ ID NO: 254457 - DNA, 162 bp, Homo Sapiens
cgccaaccataaatggcatccactaagaagaaagaagagttcattagggtaagagcctgatagaggaaaaacacacactgcaaactggagaatctggactacagcctacagtgattaaagtcagtggttaagatggagttttgctcttgttgtccaggctgg

SEQ ID NO: 254458 - DNA, 1019 bp, Homo Sapiens
  misc_feature (899)..(920): n is a, c, g, or t
ggcaagcaggagcaggcctagtggagaaccaagcaagcagcagctctcacacactgcagcactccagggtaggccaaccccctcaggggagtgagtgggggtgcggggtgcagggatgaaacagagcctggtatgaagataaaaatgtctccaacagcaccatacccatccatctctgtccctgagcagagtctgacaggcatgggtagtcctcacagttctctgagctctgcacaggccacattattcggatctgtaactcctcagggttcacgggaaggtgggcaaaggtgagcagagcagctgagaagtgcacatggtaggttacctggaaacaattcctaggagaaaaaaggaggaggccagagtaggaagcatctgaaggccaagtcataaaacaggaatggagaaaaacaaaattaagaaatgcaaaattaagaaggccgctctcctcttacagtcaacctttggagtgggtagtcacagatactcaaggctccaagagccacaccatggtgagaaaggacatgggtagcttctgaggagcatggtctcgtggatcttgtgtatgtgccaacaggctgtaagggttagaagttagtgtgtaatttggaagtagggtgaggaggggagtgagaagaaatcaaaagctcatcccttcctgcactattagaaattaacagtcatcagagaagcacagataaattattcttaagggcaggaaaaaactaatgtaaacccaggaaagcagcagcaaaggtttcacttactaaaaatctattatataggaaagaaaattatttgtccacaggggaaaaaagtaatcaaatcatgccagttagagactttttcaagttaagattttctaagaccttaggttttcattctctagtgccatnnnnnnnnnnnnnnnnnnnnnngagtagaataatgacttcaaggcctgagaaggttcaggctaaggtaagaaacatatatgtgtgagcagcaatgaggtacagatctgaattaattcttcc

SEQ ID NO: 254459 - DNA, 606 bp, Homo Sapiens
tctggcctcctccttttttctcctaggaattgtgtccaggtaacctaccatgtgcacttctcagctgctctgctcacctttgcccacctttccgtgaccctgagagtacagatccgaataatgtggcctgtgcagagctcagagaactgtgaggactacccatgcctgtcagactctgctcagggacagagatggatgggtaaatggtgctgttggagacatttttatcttcataccaggctctgtttcatccctgcaccccgcacccccactcacctccctgagggggtaaaatgcagaggtggttgacctgaagggtctgattccctccttcccaagccttagggcctaccctggagtgctgcagtgtgtgagagctgctgcttgcttgtttctccactaggcctgctccaaatgcttagccaatctctggagccgacacagttgcctacggggtgacttagcaccaggttccattagctctccaagtgactgtttccacccagtacttttggcgcttgaggatggggggagggggattatttaaaataaataaaatccgaggtggcagtagaggattccttttgctttaaaaatctttggact

SEQ ID NO: 254460 - DNA, 593 bp, Homo Sapiens
tggctctgtgacagacaagcctctgtctgccatagagagtggcggtgggaagggaggcagactgcactcccgcacactggtggggcaaggaaatccccactcttgcatacatgtgccagcaaagtgatgtggggagttgctgtgggcccagaggaagctgcagtgtaaggagggaatgtgtgggctggtgcatggctacaggggctaccttgctgaaactctctgccagtcaggcacggtctgtcagtgcagttggtgtagtgcaagcctccagggaacctgagaatgcccagcaagcaagcatgggtatgctggggccttgggagaggccagcagaccaaggggagctcaagtcggaccgccctcatctgatggggaagaccaccctgttatggctaaagtctcttatgggagcaagttgagcctagatggatggccgaccctatatttgttccactacggatgcgttcacacccactgtgggctctacataacctgggttgctgctcctaccatatctctcagcagagcccctggcctagagtgtgcacagtgattgagaggtcgtccttttgctggggttccagaggccc

SEQ ID NO: 254461 - DNA, 1718 bp, Homo Sapiens
  misc_feature (21)..(21): n is a, c, g, or t
  misc_feature (23)..(23): n is a, c, g, or t
  misc_feature (25)..(25): n is a, c, g, or t
  misc_feature (1085)..(1238): n is a, c, g, or t
  misc_feature (1248)..(1262): n is a, c, g, or t
  misc_feature (1305)..(1475): n is a, c, g, or t
  misc_feature (1524)..(1533): n is a, c, g, or t
  misc_feature (1573)..(1581): n is a, c, g, or t
cgggatggtatttagagcgcngncntgacgggccggatcgccttcgccgccgcccgcccgcaaaccttcgtgcccggcccgtcctcgcccccgcctccgccaccgcctcggcccgcagagcttgccccctccccacccgcagacatgtccgagtccaagagcggccccgagtatgcttcgtttttcgccgtcatgggcgcctcggccgccatggtcttcagcgccctgggcgctgcctatggcacagccaagagcggtaccggcattgcggccatgtctgtcatgcggccggagcagatcatgaagtccatcatcccagtggtcatggctggcatcatcgccatctacggcctggtggtggcagtcctcatcgccaactccctgaatgacgacatcagcctctacaagagcttcctccagctgggcgccggcctgagcgtgggcctgagcggcctggcagccggctttgccatcggcatcgtgggggacgctggcgtgcggggcaccgcccagcagccccgactattcgtgggcatgatcctgattctcatcttcgccgaggtgctcggcctctacggtctcatcgtcgccctcatcctctccacaaagtagaccctctccgagcccaccagccacagaatattatgtaaagaccacccctcctcattccagaacgaacagcctgacacatacgcacggggccgccgcccccagtagttggtcttgtacatgcgcagtgtcctagtgcccatcgtctgtttccccggccttgcccccgcccgccccgtgccgtggacatctgggcccactcatcgcccctccaggcccccggcgccccaccccctagagtgctctgtgtatgcggatgatttagaattgtcatttctctttactggatgtttatttataaagatctggcctgttcctgcgtctgcggagcggcccttgtctcccagctatctataaccttagctagagtgtcgccttgtgggttcctgttgctgagacttcctggatggagccgccctcacagccgggcccgtggccctgcgcggagctgtgtccaataaagttcttggatgtgnnnnnnnnnnnnnnnnnnnnnnnnnnnnnnnnnnnnnnnnnnnnnnnnnnnnnnnnnnnnnnnnnnnnnnnnnnnnnnnnnnnnnnnnnnnnnnnnnnnnnnnnnnnnnnnnnnnnnnnnnnnnnnnnnnnnnnnnnnnnnnnnnnnnnnnnnnttgggcgggnnnnnnnnnnnnnnnaaaaattttttaaaacctttttttgggggcggggcccccaagnnnnnnnnnnnnnnnnnnnnnnnnnnnnnnnnnnnnnnnnnnnnnnnnnnnnnnnnnnnnnnnnnnnnnnnnnnnnnnnnnnnnnnnnnnnnnnnnnnnnnnnnnnnnnnnnnnnnnnnnnnnnnnnnnnnnnnnnnnnnnnnnnnnnnnnnnnnnnnnnnnnnnnnnnnnctctttaatattaatattcccccccgcccctgggcgccttttgggagannnnnnnnnntggaatttcttaaaaacctctccggcggccagggggggannnnnnnnnacagggggtgtgtggaaaccctaaaatccgccccgggggtacaccccccgttgggccgcctggggagtataaatattcccccccggggggagaaaagggggggcgaaaaaaattttgttctttttggcgccctcttt

SEQ ID NO: 254462 - DNA, 679 bp, Homo Sapiens
ccgtgccaacaggtgttcccacaataccagaggcccaccattgagaagatcatcggcttcctgcagggccgctcctccggggactcatcggcaggctatgacaccagtttgaagggtgctgcacccatgggtccaacctaaccagtccccagttccccagccctgctgtgacttccatttccatcgtcctttctgaaggaacagctcctgaaaccagtctccctgggctgagacaacctgggctcttcttaggaaatggctctccctccccctgtcccccaccctcatggcccacctccaacccactttcctcagtatctggagagggaagggaagtcaggcttgggcacgggaggttagaactcccccaggccctgccattgggttgtctgtctccgtcatggggagggtccctgctcagttctggagacactggagttggggtgggtgtggttctgcattcccttctcctgctgatagcagtcagcttgaggaggatgacggaaggcagcctcagacaggaattaaggcaatgcccaggcgggcctgggcactgtattctgagcaagggcctgggcccaggagccagccagggatgagtgccatcatggctctccactcagactgtgcctggcccctgcacttacaacttcctgccgctctgtggccttgccctgta

SEQ ID NO: 254463 - DNA, 1782 bp, Homo Sapiens
  misc_feature (34)..(34): n is a, c, g, or t
agaaacatggccccaggggcagtctgcagtcctnggagagtccaaagagcttggggtgggccagatggactggggtaacaatctgggcctgagggatttggaggtgacctgtgacccagactctggaggttctcaggggctacggggatgtggagtggggcagatggactggacccaggacttggcgccccagaatgtggagctctttggggctccaagtgaagccagggagcatggggtgggcggggtgagccagtgcccagagcccggcctgaggcacaatggcagcttgtctcctggcctggaggccagagaccccttggaggccagggagctgggggttggtgagacaagtgggccagagacccagggtgaagattactcctcgtcttccttggagccacaccctgcagaccctggaatggagacaggagaagccctcagcttcggagcaagccctggcaggtgcccggcccgccccccaccctccggctcccagggcctgctggaggagatgctggcagccagcagctccaaggcggtggctcggagggagtcagcggcctcgggccttgggggcctgttggaggaggaaggagccggggcaggtgctgcccaagaggaggtgctggagcctggcagggactctccaccctcctggaggccgcagcctgatggtgaggccagccagacagaagacgtggatggcacctggggctcttcagcagccaggtggagcgatcaggggccagcacagacttctcggcgaccctcccaaggccctcctgccagatcccccagtcaggacttctccttcattgaggacaccgagatcctcgacagtgccatgtatcggagccgtgccaacttggggcgcaagcgtgggcaccgggccccggtcattcggcctgggggtaccttgggcctgtcggaggcagcagactcggatgcacacctgttccaggactctacagagccacgggcatctcgggtgccatcttcagatgaagaggtagtggaggaacctcagagccgccggacacggatgtcgttgggcaccaaggggctgaaagtcaacctctttcctggcctgagcccctcagccctgaaggccaagctgcgcccccggaatcgctcagctgaggagggagagctggctgagagcaagtcgagccagaaggagtccgcggtccagcgttcgaaatcctgcaaggtcccaggactgggaaagcccctcacgttacctcccaagccagagaaatcctcagggtcagaaggatcgtcgcccaactggcttcaagccctgaaactgaagaagaagaaggtctgagaagtcactgaggttcttcccacctggcagtctcaggcagtgcccattcctgtggggtccctgggtgaggagacggctggagccccaccatgccccaggctgcagcctctgtcccctccacctctgaggagcgtctggggaggcacatttatgcactttgtatcaccctccgaaatccccccacaccttcccttccctggatttcatcactagtggttgaaggttttgtcccttcctctcctccttccctctccctctctgcttcctcctccagcctcccttgggttttcttttgataccaatttatagcattttttataaaagcctttgatttttataatgggtgggactgtatccctgcctcaccccaggtctccgtctgccccgccaggtaccccacagagaccaatgacattttgccacttgaaacaataaataaagttttttggaac

SEQ ID NO: 254464 - DNA, 777 bp, Homo Sapiens
cttcagggaacctggttctggcagattgggtttgtgctgttcccaccttttggaacacccgaatgggaccagaaggatgatgccaacctcatgttcatcaccatgtgcttctgctggcactacctggctgccctcagcattgtggccgtcaactattctcttgtttactgccttttgactcggatgaagagacacggaaggggagaaatcattggaattcagaagctgaattcagatgacacttaccagaccgccctcttgagtggctcagatgaggaatgagccgagatgcggagggcgcagatgtcccactgcacagctggaatgaatggagttcatcccctccacctgaatgcctgctgtggtctgatcttaagggtctatatatttgcacctcctcattcaacacagggctggaggttctacaacaggaaatcaggcctacagcatcctgtgtatcttgcagttgggatttttaaacatactataaagtctgtgttggtatagtacccttcataaggaaaaatgaagtaatgcctataagtagcaggcctttgtgcctcagtgtcaagagaaatcaagagatgctaaaagctttacaatggaagtggcctcatggatgaatccggggtatgagcccaggagaacgtgctgcttttggtaacttatccctttttctcttaagaaagcaggtactttcttattagaaatatgttagaatgtgtaagcaaacgacagtgcctttagaattacaattctaacttacatatttttttg

SEQ ID NO: 254465 - DNA, 959 bp, Homo Sapiens
agccgccttccccaggcagtggaaccttcgggctcctgagcttcaggatggttcgtactaagacatggaccctgaagaagcactttgttggctatcctactaatagtgactttgagttgaagacatctgagctcccacccttaaaaaatggagaggtcctgcttgaagctttgttcctcaccgtggatccctacatgagagtggcagccaaaagattgaaggaaggtgatacaatgatggggcagcaagtggccaaagttgtggaaagtaaaaatgtagccctaccaaaaggaactattgtactggcttctccaggctggacaacgcactccatttctgatgggaaagatctggaaaagctgctgacagagtggccagacacaataccactgtctttggctctggggacagttggcatgccaggcctgactgcctactttggcctacttgaaatctgtggtgtgaagggtggagaaacagtgatggttaatgcagcagctggagctgtgggctcagtcgtggggcagattgcaaaagctcaagggctgcaaagttgttggagcagtaggggctgatgaaaaggttgcctacctccaaaagctgggatttgatgtcgtctttaactacaagacggtagagtctttggaagaaaccttgaagaagcgtctctgatggttatgattcgttcatcttgatcactgtacgcgtgggcgagttttccaaacactgttatcggcagatgacgaaattcggaagattgccctatgtggagccatctcttactatacagaaccggcccttccccaagccacccccaagatgttttcttcggagctccctggaacttgtgggcaacgctgaagaatgccgcaaaattaggatgctgagggcgtacggggaaacccagggatctcgggggcacaacccgttggacgcgcgaattgggcaacacacctagc

SEQ ID NO: 254466 - DNA, 723 bp, Homo Sapiens
  misc_feature (340)..(340): n is a, c, g, or t
  misc_feature (493)..(493): n is a, c, g, or t
  misc_feature (506)..(506): n is a, c, g, or t
  misc_feature (636)..(636): n is a, c, g, or t
atggattgctaggattcaggcggtcatgaccagcctgagcagcattgcatcagcctgcctattagaatatgcagacatcacattctatagttcattaaattatgagtctcaatgactagctcagttatgataataccatcggtagaaatcggcgatggatcttgactgaaatttcagtgaccttacagatacatctagaagaaactgacatcgtcacaattactctctccaaacacaagagatgcggaaagtaaaaaagtagccctaccaaaaggaactatcgtactgactgctccaggctggacaacgcacgccatatctgatgggaaagatctggaanagctgctgacagagtgtcctgacacaataccactgactgtcgctctgatgacagatggcatgccaggcctgactgcctactatggcctactcgaaatctgaggtgtgaaggatggagaaacagtgatggttaatggcagcagctgagctgtgngctcagtcgtggngcagattgcaaagctcaaggactgcaaaggtgttgaagcagtatggtctgatgaaaagcattgctactttaaaagctcgatttgatgtcgcctttactacaagacgtagaagctttgaaggaaacctgangaaagcgctcctgatggtaggatggtaatttgcccattgttggccatttttcaatttaccaacggccaaattccccggcccaccccc

SEQ ID NO: 254467 - DNA, 476 bp, Homo Sapiens
cagtggaacctttgggctcctgagcttcaggatgggtcgtactaagacatggaccctgaagaagcactttgttggctatcctactaatagtgactttgagttgaagacatctgagctcccacccttaaaaaatggagaggtcctgcttgaagctttggtcctcaccgtggatccctacatgagagtggcagccaaaagattgaaggaaggtgatacaatgatggggcagcaagtggccaagtaattatttccatttgtcccagtgcttggaaaatatgtctcctcagtacctactgctggggactcactctgtcaacttgcaactacaacttcggcagcctatgttgttgactcactgtgtgatcttggaatcaacttgggaaattctgtctccttcctaactagctggaaaggagggaaggatgtgaaattgtcattttttcagcttcactttgccatccttacttttaattact

SEQ ID NO: 254468 - DNA, 989 bp, Homo Sapiens
agaaacaaggacaaatttagaccttgaatccgaagagataaagcttacttgactttcaaatggagagatgatgaaaacccactcattcagtctttcagaacaaaaagacagtcatctgataagagtatgacatggatgaaatgccctacaggggccttggacatctttaatttctgcgattatgtgaaagaggtggactttacagataatggagcagaagccaacattagtaaaaggaatcccaacttcttcccatagaattagaaacatgtgaaagtacaataaacttcttgttcaaattaccagcatcagagagcttcccatttgcatctagaccttgaatttatatttattgatcaagttctaatttgtatgtatattttgtgcatattcaccaataacagttaaaattaattatgtgttatagttaatatatgcacctaccttcttccgttagtgcatcagtaaatgtgttattttgtcatttttccaaagagagtgttgtaggttttccctgtagttcttcctttatagcttttcttctgataaccatgacttcaggagctttaaaactatctatcttgcatttgtgtctggcggagaactagccatcagcctcctgaagcctgccatcattgttaatttgaggactgggctgtcttggggctcagaaggtaaagaactatttgagcagatgtgtgtgggtggcactggattccacccaactgccaagttagtattgttagagatttcattttacaacacaaaaataagcctgtgtcaaagattttaaaatcatgggaaagttaaaatctagaaagaccttagagaaccagccaaccaactctctcattttaaaagtgaagggttcataggcacagattacttgcctaaggtcatccggggacgaaggacaagaatccaaatttcagtggtcttcctagtattaaacattgcccctttcgacaaattttggatttcattcttgg

SEQ ID NO: 254469 - DNA, 581 bp, Homo Sapiens
  misc_feature (35)..(35): n is a, c, g, or t
  misc_feature (99)..(99): n is a, c, g, or t
  misc_feature (205)..(205): n is a, c, g, or t
gtcaagattttaaaatcctgggaaggttaaatctngaagaccttagggacccagccaacccaactctctcattttaaaagtgagggatccatagcaccngattacttgcctaagatcatccaggaacgaagacaggaatcccaaattccagtgttcttcctagtattaaacattgcccctttcgacaaattttggatttcattcntgttatatttcagtactcttgctgatttaatttaggtttaactggtaaagaatgaaccatttccagaagtgttaggattagtcagtgtccatccgccttatgtatatgaatcaccttgcccaaagacactggctctcctcagctgtaacccagcatgtcaaatgtgaagattattgtgtgggatcctttggtttcattgttatgatgtattttataaatgtactagttatatccttgtttatgtatttttgctgatctttcataaagcagaatggtatgtatcggattgttttaatgttatatattggattgtattcgatgttacaaaaccaatattctatggagaatgaaaaaaataaaggactaaattaactgg

SEQ ID NO: 254470 - DNA, 523 bp, Homo Sapiens
  misc_feature (38)..(38): n is a, c, g, or t
  misc_feature (53)..(53): n is a, c, g, or t
  misc_feature (72)..(72): n is a, c, g, or t
cagaatttaaaaaaccttggaacaacgggccttaattntggtggtggtaaaanggaaaacctcctaaacaanaactaaacttgggccagttggggtggaaatcccagtgcccaccccacacacatctgcctcaaaatagttcctttacccttctgagcccccaagacagccccagtccctcaaattaacaatgatggcaggcttcaggaggctgatggctagttctccgcccagacacaaatgcaagatagatagttttaaagctcctgaagtcatggttatcagaagaaaagctataaaggaagaactacagggaaaacctacaacactctctttggaaaaatgacaaaataacacatttactgatgcactaacggaagaaggtaggtgcatatattaactataacacataattaattttaactgttattggtgaatatgcacaaaatatacatacaaattagaacttgatcaataaatataaattcaaggtctagatgcaaatgggaagctctctgatgct

SEQ ID NO: 254471 - DNA, 1007 bp, Homo Sapiens
tatattttgtgcatattcaccaataacagttaaaattaattatgtgttatagttaatatatgcacctaccttcttccgttagtgcatcagtaaatgtgttattttgtcatttttccaaagagagtgttgtaggttttccctgtagttcttcctttatagcttttcttctgataaccatgacttcaggagctttaaaactatctatcttgcatttgtgtctggcggagaactagccattagcctcctgaagcctgccatcattgttaatttgaggactgggctgtcttggggctcagaaggtaaagaactatttgagcagatgtgtgtgggtggcactggattccacccaactgccaagttagtattgttagagatttcattttacaacacaaaaataagcctgtgtcaaagattttaaaatcatggaaagttaaaatctagaaagaccttagagaaccagccaaccaactctctcattttaaaagtgaaggattcatagcacagattacttgcctaagatcatccaggaacgaagacaagaatccaaatgtacttggggacaagaattagtccccaaattcagtgttcttcctagtattaaacattgcccctttcgacaaattttggatttcattcttgttatatttcagtactcttgctgatttattttaggtttaactggtaaagaatgaacatttcagaagtgttaggattagtcagtgtcatcgcttatgtatatgaatcacttgccaaagacactggctctcctcagctgtaaccagcatgtcaaatgtgaagattattgtgtgggatcctttggtttcattgttatgatgtattttataaatgtactagttatatccttgtttatgtatttttgctgatctttcataaagcagaatggtatgtatcggattgttttaatgttatatattggattgtattcgttgttacaaaaccaatattctatggagaatgaaaaaaataaaggactaaattaactggaa

SEQ ID NO: 254472 - DNA, 933 bp, Homo Sapiens
  misc_feature (782)..(782): n is a, c, g, or t
  misc_feature (799)..(799): n is a, c, g, or t
  misc_feature (840)..(840): n is a, c, g, or t
  misc_feature (856)..(856): n is a, c, g, or t
  misc_feature (861)..(861): n is a, c, g, or t
  misc_feature (875)..(875): n is a, c, g, or t
  misc_feature (891)..(891): n is a, c, g, or t
  misc_feature (903)..(903): n is a, c, g, or t
  misc_feature (912)..(912): n is a, c, g, or t
ccgcgtccgaagggtgacacaggcagccgcggggactgtggattgcaaggtccgaggggtcctcccggccccagagggcggcccgggcccccgggtcctctcagggggtcctatccaattgcaacaagatgatcttggggcagctttccagacgtggatggacaccagtggagcactcaggccagagagttacagctatccagaccggctggtgctggaccagggaggagagatctttaccaaagagaaccccgcccgggtctgcaaggacctcatggactgtgagcagaagatggtggatggtacctactgggtggatccccttggctgctcctctgacaccatcgaggtctcctgcaacttcactcatggtggacagacgtgtctcaagcccatcacggcctccaaggtcgagtttgccatcagccgggtccagatgaatttcctgcacctgctaagctccgaggtgacccagcacatcaccatccactgccttaacatgaccgtgtggcaggagggcactgggcagaccccagccaagcaggccgtacgcttacgggcctggaatggacagatttttgaagctgggggtcagttccggcccgaggtgtacatggatggctgcaaggtccaagatggccgctggcatcagacactcttcaccttccggacccaagacccccaacagctgcccatcatcagtgtggacaacctccctcctgcctcatcagggaagcagtaccgcctgggaagttggacctgcgtgcttcctctgacctctngacctcgtgggccactnttagggcttcacggaggagggaagaggaagaggcaaggggnagggtattgagggggnagatnggttccagggaganggcagtttccccttgnccaaagggttcnttggggaanaagcccagttgtttgtttttg

SEQ ID NO: 254473 - DNA, 1818 bp, Homo Sapiens
  misc_feature (12)..(12): n is a, c, g, or t
  misc_feature (52)..(52): n is a, c, g, or t
  misc_feature (60)..(60): n is a, c, g, or t
taagggtttccnccaatgttggcccaggctggtcttgaaatccctggccctncaggtgancccgcctgtctcagcccccccaaaatgcccgagattacagttgtgagccaccaacacccggcccccagcaaagagaatttttaacaactgctttggtctccagagccagttcttgtgccctcttcttactgatatacccatctcaaacgtccttgctactctgtgattgtagaatatctgatcaaccttctgggagcgagaaagtagttgtgaatggggaggtggccaagaaaagaaggtagactcaatcgtctggtgtttacgggggattcaagtgaggcagaagaaaaagggagcgggccaaggaaagaaggtagactcaatcatctggtgtttatgggggattcaggcgaggcagaagaaaaggatgatatctcagggacactcccttcatctgagacatcttctccatctgtgaaactggctcctgtgcacagaagggaggcttctggccagaggtcaaaggtgggctttgcccaggcttgggaaacggctgattcgaaaaggtgccaagtcataagatggtgttaatttcatgcttaattcatacaggatcttccccaccacaggggccagcttgaacccgtgcccagagaatccagcaccaatgacaatgttgtcatactttgggtggcgatcgagaatgaactgctcatcaggggtattcgtgtacatgcagctctcaatgacagcaggctcgggcttcagatcaggtaagtgatctctgacaaagctgctcaggatctggacgtctccgatgtctgtgcgtgctgtggggcagtcccgctcctcagggtctgcgtggttgccgtggtgatagctgaccttcatcagccctgggtactctcctgtgggcagtccgtagatgtggtggggacacaagcccagccacaggaagcacggaaaggcctgggacacaccatagctccccaggaaccatctctcgccagtaacacacgttgatccgcagggtctggagaggcatctcaatgcccaggggacggaggagctggttggtccaaggacctgctgtgatgaccaagctcttagcttggtagctcctggaggtggttttcaccgtgaccagtagccctgggtttatctccaccaccttctctccgtcacgcactatgcctcctagctgtcgaattgcatcctgcagggctctgagggccttatatgcatagataactcctccggaattgtccaagagccccacttctcccctgggcaaccgaatatttgggaaacgttgcttcagttcctcagatgaaagacactggtgttctaccctctgcctcgacagattggcctggattgtctttaattcttgattctctttcattcccagcagcagtaatccagtctgcctgtgcaattgggttccagcctcgtgctccagctgggcccatatctgatagcactcatgcatcatccgggtgtaaaagtcttccaggtacgcctttcggattatccggctttgtccatgggagcttcctcgggagtgtggtagaaagaactgctccagcaggaggatcctcttcctgtgtttggccaggtggtatgcagtgaagcagccctggatccccgccccaatcacaatggcgtcccagagatctttctgagccgccatgatgccactcagccccacagccacagagcctcaaaggcaaaggcaagcaaagcctcgtgccgaattcgccacccaggcctcgggcggtgtgcggtcccccctatttataaaatataaaaatatta

SEQ ID NO: 254474 - DNA, 725 bp, Homo Sapiens
  misc_feature (71)..(71): n is a, c, g, or t
  misc_feature (113)..(113): n is a, c, g, or t
  misc_feature (174)..(174): n is a, c, g, or t
  misc_feature (302)..(302): n is a, c, g, or t
ccagtatcagtctcttccatgcaacatctgaaacagcgggtcattgacccttccgtccaatttcctttccnatatgttcagcatgcaatctttggtgctgatcaagaggaacnccatcccatatcagcacagggatatattggcagtggtcttcatggcaagtatacccagttntcatgtgtttggctgctgtaaatcaatccatcagaggctgggcaacaacattaacatgaacaaagtatgaaaaatagcccaccatgatacagtaagtatttaataaggacaaacctaaaatagcagcncagttaatcaaataaaaatcagcccaatgcaaaacactcccccctctacctggcaattcttaccaacctgagtaatgtgaacagagaacatgagtccatgaatcaccacaggccatccccaggcagagtgaggcacacacagctgtgatcaaatgttgccttctctcgaaacaaggaattaactgtacatggtgattatctctggggagtgggagtcaaaatgactttcatttttgtattttatgtacttcaatacaggctgaatttttcaaagagcatggattttataataaaaaacatttccattttgagaaaaaatagacacgagtaacccttaatttggttcacataagaatatgagaaaaaataatttcaccattttagcatgagatactagcacagctcgtgcagaattcctacagc

SEQ ID NO: 254475 - DNA, 1826 bp, Homo Sapiens
  misc_feature (1776)..(1776): n is a, c, g, or t
ccccccaggccccacgcagcgaggcctgggtggcgaattcggcacgaggggaagaccttgctgatcgtctcccatgaccagggcttcttggatgatgtctgcactgatatcatccacctcgatgcccagcggctccactactataggggcaattacatgaccttcaaaaagatgtaccagcagaagcagaaagaactgctgaaacagtatgagaagcaagagaaaaagctgaaggagctgaaggcaggcgggaagtccaccaagcaggcggaaaaacaaacgaaggaagccctgactcggaagcagcagaaatgccgacggaaaaaccaagatgaggaatcccaggaggcccctgagctcctgaagcgccctaaggagtacactgtgcgcttcacttttccagaccccccaccactcagccctccagtgctgggtctgcatggtgtgacattcggctaccagggacagaaaccactctttaagaacttggattttggcatcgacatggattcaaggatttgcattgtgggccctaatggtgtggggaagagtacgctactcctgctgctgactggcaagctgacaccgacccatggggaaatgagaaagaaccaccggctgaaaattggcttcttcaaccagcagtatgcagagcagctgcgcatggaggagacgcccactgagtacctgcagcggggcttcaacctgccctaccaggatgcccgcaagtgcctgggccgcttcggcctggagagtcacgcccacaccatccagatctgcaaactctctggtggtcagaaggcgcgagttgtgtttgctgagctggcctgtcgggaacctgatgtcctcatcttggacgagccaaccaataacctggacatagagtctattgatgctctaggggaggccatcaatgaatacaagggtgctgtgatcgttgtcagccatgatgcccgactcatcacagaaaccaattgccagctgtgggtggtggaggagcagagtgttagccaaatcgatggtgactttgaagactacaagcgggaggtgttggaggccctgggtgaagtcatggtcagccggccccgagagtgaagctttccttcccagaagtctcccgagagacatatttgtgtggcctagaagtcctctgtggtctcccctcctctgaagactgcctctggcctgcagctgacctggcaaccattcaggcacatgaaggtggagtgtgaccttgatgtgaccgggatcccactctgattgcatccatttctctgaaagacttgtttgttctgcttctcttcatataactgagctggccttatccttggcatccccctaaacaaacaagaggtgaccaccttattgtgaggttccatccagccaagtttatgtggcctattgtctcaggactctcatcactcagaagcctgcctctgatttaccctacagcttcaggcccagctgccccccagtctttgggtggtgctgttcttttctggtggatttaatgctgactcactggtacaaacagctgttgaagctcagagctggaggtgagcttctgaggcctttgccattatccagcccaagatttggtgcctgcagcctcttgtctggttgaggacttggggcaggaaaggaatgctgctgaacttgaatttccctttacaaggggaagaaataaaggaaaggagttgctgccgacttgtcactgtttcgagattgatgcgagttagaactgttctcagtcttgatttgctttattcagttttntagcagcttttaatagtcccctcttccccactaaatggatcttgtttgca

SEQ ID NO: 254476 - DNA, 621 bp, Homo Sapiens
ctaaagcgttctccaggatctctatgtggattgtattctaaggcattactacagattagactgattacagatgaaaggtccattggttgcattacagtgacataatcaggaacctcatcagggtcaacaggcttagtaaacactcggaatcgcttgtcaatagcaagcctatgtgtaacatttcttaagaaaatcctcagttctctaaatgtatcttcttcttgttcttctagtcgtttcacttcttctgctgtcagtgatcttggctcaggtggtggtgctactgggagtacctccaaagcctgcaaaactgctttcttgatataggaggcttagcagcttgttttagaattaaatcttcaaaaaattttgtccgttcttctttatccggtaactggacattaaaaatctctccataatcacggataaacaattcttgcacctcttctggcaaagcggaatggggtttgtcagaagttgcaagtagtaaaactggagcaaatgaaggaatattctgtaataatgtggtaaatgtggctttaagtgtcggtccaactatttcccaccacacgtggatatgaggaacatacactatacttggtgctgttctcttagcttcac

SEQ ID NO: 254477 - DNA, 2195 bp, Homo Sapiens
  misc_feature (1341)..(1349): n is a, c, g, or t
  misc_feature (1471)..(1483): n is a, c, g, or t
  misc_feature (1874)..(1874): n is a, c, g, or t
  misc_feature (1880)..(1880): n is a, c, g, or t
  misc_feature (1923)..(1923): n is a, c, g, or t
  misc_feature (1941)..(1941): n is a, c, g, or t
  misc_feature (2097)..(2097): n is a, c, g, or t
  misc_feature (2099)..(2099): n is a, c, g, or t
  misc_feature (2178)..(2178): n is a, c, g, or t
ctgtcattcatgctttggaaaagtttactgtatatacattagacattcctgttctttttggagttagtactacatcccctgaagaaacatgtgcccaggtgattcgtgaagctaagagaacagcaccaagtatagtgtatgttcctcatatccacgtgtggtgggaaatagttggaccgacacttaaagccacatttaccacattattacagaatattccttcatttgctccagttttactacttgcaacttctgacaaaccccattccgctttgccagaagaggtgcaagaattgtttatccgtgattatggagagatttttaatgtccagttaccggataaagaagaacggacaaaattttttgaagatttaattctaaaacaagctgctaagcctcctatatcaaaaaagaaagcagttttgcaggctttggaggtactcccagtagcaccaccacctgagccaagatcactgacagcagaagaagtgaaacgactagaagaacaagaagaagatacatttagagaactgaggattttcttaagaaatgttacacataggcttgctattgacaagcgattccgagtgtttactaagcctgttgaccctgatgaggttcctgattatgtcactgtaataaagcaaccaatggacctttcatctgtaatcagtaaaattgatctacacaagtatctgactgtgaaagactatttgagagatattgatctaatctgtagtaatgccttagaatacaatccagatagagatcctggagatcgtcttattacgcatagagcctgtgctttaagagatactgcctatgccataattaaagaagaacttgatgaagactttgagcagctctgtgaagaaattcaggaatctataaagaaaagaggttgtagctcctccaaatatgccccgtcttactaccatgtgatgccaaagcaaaattccactcttgttggtgataaaagatcagacccagagcagaatgaaaagctaaagacaccgagtactcctgtggcttgcagcactcctgctcagttgaagaggaaaattcgcaaaaaagtcaaactgggtactttaggcaccataaaaaaaagcgaagggaaaaatttccccaggcaaagggaatggataagccaaaatgccatagattcccccaaattgtgggaagggttccgaagggaactttcccgacccaaggggggcgaatccctaaaggcgacccgggaaacaccccgggaaaaccttttcggggggggaacaaaaaattgaaaaaccacccccaaaagggcctctcccaaagagcaaaacttgggggaaatttggcacnnnnnnnnncccccaaacacccccctggcgcaacacaccgaacacaaaaaggggcgactttgggggaacacccccctgtgggggagagaaactaccccgccgttgcggcgcattcaaagaaatttcgaagnnnnnnnnnnnnncaacctcgtgtctccttataaaacgacggacgcaagacaggccttttcccccacgtcgcctcccccccggcaataaataacccacatatactccttttccttgtcgggcgagagacaaaaaagaggcggcggggaacaaggaacagaaaacgccggtgtgccgtttggccctccgtccgcccagaccgattgactctaccccttggctgttatccccaacatgacgcccccgccctaacggtgcggcgtaccgaaaaacacacacccgcgcccgggagtgctctgaccgcccatccccccgctctccgttgctcggacaaagaccacgagcagcgcgttctgtttgttccggcccaccccgctatagtgtccttcatctgtcccttagagnagcgangctcacgcatcacgctgtctgcgcgtccgacagcgtctctttntgctagtttatgtacgcngcgcgcgcctgcggcttgcgcctacatgcgctctcgatggcctgaggccaccacagaacaatgcacggcgacatcgcccgcccactctgtgctagtgaggggtcgcactccgcgctggggagctcgctggcgcggtcgcgttatacactatgcaangncgacggggtacgcaaccgcctccgggttgtgccccctgcatcatccgcccgctctgttacgaccccctgtggtcacacnacacatgtgcgcccggg

SEQ ID NO: 254478 - DNA, 591 bp, Homo Sapiens
agaagggtggagtccagaggggtaccagattggccgccagctttaattggttcgcaccaaacaacttgactggggtagtgcggtttatgttcaaacggcaccggttcagataccggtacaccccagaggtgcacctcccacgcccggaaaggaatgttctgaaggtctcacaggatctctataatgttaacactgcggttgaaagtcacccaaccacagcggaaaaacctccaaaggaacatgatctcggcccgggacatgttgggcgcgatgttgcgcatgaagagggaacaggtcttatcagcggccgcggcttgcactccagccccgcggcgtccttgggcttctcccattcttcttccttgggcttctccttctccattgagcgcttcttcggcctcctccttctcctccgtcagcctggccgctctcatgactccgactcagactctgacacgctgccctcgtcaaagctgtcgtcaccactgtgcttccggttccgcttcttgctactctttttggcttccttctgcggagtcttctttcttctcttccttgtccccatcaccctccgacttctttgttttgtca

SEQ ID NO: 254479 - DNA, 795 bp, Homo Sapiens
  misc_feature (532)..(622): n is a, c, g, or t
  misc_feature (685)..(685): n is a, c, g, or t
  misc_feature (701)..(701): n is a, c, g, or t
  misc_feature (734)..(734): n is a, c, g, or t
  misc_feature (749)..(749): n is a, c, g, or t
  misc_feature (780)..(780): n is a, c, g, or t
ctcgtgccgaattcggcacgaggaaccagccacagaaacggttctcctggttccatgtgctctcgccgtgccggaccatcacgaggcgccaggctaggaggcggccctcagcaggcagaggaggagagccagaggagctggtgcagaccacagctttgtggagaggagtctggccttgtggaaggttatccaaaataacccagtgtatgaaaaccaggtcttaacatgggagtcagatacagacttcaaagcagctatttataaccagccttcagaaagtattggtgaatattcttaaacagaatggaaatgacaaagcatggagtccataaattagatgatagtttggaaaaagatataaacttacaaaccaagaagctcagtgaaccacacaactggataaattaacaacaaaagtccaagcttagacacatcataaagaaacttctgaaaactaaagaccaagaaaaataagatcagccagagaaaaacgatacatttcattcaggtgaacaattctttgaaagactgnnnnnnnnnnnnnnnnnnnnnnnnnnnnnnnnnnnnnnnnnnnnnnnnnnnnnnnnnnnnnnnnnnnnnnnnnnnnnnnnnnnnnnnnnnnatttctattttactgggaataaaagaatggaaataaaataaagacattctccaatggaaggcnagctgaggggaattcntaaccaaggatccgctttaaaaaaatgtttaanccagttcttcagacngaagggattctggggggcattccaaactttnggggatgccggagga

SEQ ID NO: 254480 - DNA, 879 bp, Homo Sapiens
  misc_feature (434)..(434): n is a, c, g, or t
cagaggggagaggagaagggggaatctctgggcaggggtgaatgtgggagaaaactgagaagggccagggaggggagaagtgccagcaggggagacacaccaatccatcgctgcagtctcgcccaggtggggcggcgcagcggccggcagcccgtccagctggcccgccggaggcaatgtgaaggccatggaggtgcccgatatccgcaaatcgaaccccgttgagagagagccgcggcaggcacacctccatctcccactgcacgaagtcctcgtggcccggcgtgccgtgcatgcacagcagcatgtacttctcatgcagctcgctctggcagctgttcgcgtccagcaccttgcggatctcccgcatcatctcgttgggctccatggagctcgtggtcttcatactccacgtgaagcggagggagcgggcnttggcttcccgaaattcttccttttctttgtcgttgccgcccactgccccaccacgtgaggtctgagcgtctccactcggtctttgctttcaggttcattcaggttcctgcgtacaaacttggaggtgaacttgctgaagatgctcccagaggccccccgccggccctggctgtggccagagggagaggctggggtcacaccgtagggcaaattctgctggtcccgcacctgtcggagctgcccagcatggaaggtgcttcggctggacacaccccgggggaagttagttcggtctggggctccaccactgctgctgatgttgtgggcggatggggaggcaacagggacacgctggggggctgtgctgtctttgccattctggatggaggcctggccgaggctggcccgctccaaaagtggggaattcctgcttcgatttgtgcc

SEQ ID NO: 254481 - DNA, 673 bp, Homo Sapiens
cacagttctccccaccccgttccccagcacagcgcttggggcccctctggctccagaccaggccccttggagcaggaaaaagatccactgatggaattcagacccctttccccttgggtccccagacagctcccccaagggaggagctgaggacttccctccctctgccccaagccttgtttccccaaggacaggtaccaacctcctcccctactgacacttctcaaccaagaaaacttcctttccattccctcaccagctgggcacccctatagctgcttaaatactttccaaatccagctgcactcctagccagggaaggtgaagggatgcacagaggtgggggaggggtactgtgcagggtactcagcatccctgaccaccaggtgccaatgatcagcggacgtggtctggggcacacaggaggcaccttggataagctggagtctattcctggattcaatgtcatccagagcccagagcaggtacggtgcgccacggatcagtcattaatccaggttgatgatggagaccctggccagaatcactgatcactggtggatcattagggtcactaatgagaacactggtcaaggttactcatgagtcactgggcctgggccgaaatcatcagtggaactttgattaggatcatttgggagttggtcttcgc

SEQ ID NO: 254482 - DNA, 1562 bp, Homo Sapiens
  misc_feature (1282)..(1282): n is a, c, g, or t
cggcaagagagttatatagctcggcggcgaaccaaactttccaagggccaggggcggcaatgcggcccggtcgaaaatacaagcgctcctccaggccggccttgcgggcgcataagcaggggaccgtccggtgcacccgaagcaggggttcccacgcgcaggcttctgacccacgtcgaccagcagctatgcgccaacccccaggcggagcggctccccagcgcggctgcgcccggccccgagctcgtgcagcaacagcgccagcgacagcgcccggaccagctccacggtgcctgcggggagaggggatgagaggcgcgggctcgggaaggggcggggcctcgggaagggaaggggatggcgaaggcggaaggacggggactcccccgacgctcaccatctgcgggcgccagcagctcctcctgctcccgggcgcgaggcagcagctgccggcgttctgcgggacttcccgagcacagggctcgggccagaccgggatccacgccctgcgccgccagcatccgctcgaagcggccaagggccgagccgtcgtccagcgccgcggccaccccgggcagcgccctgagcctgagtccccgcgtgtccgctgagccagagcagggcgcccccgagcgtggtgaccaggtcccttaagtctggcgggcctgcgccgtccatgcagagcagcgcctcctccacctccagggcgtggcccacgcagcgacccaggggcttgtccatggcggtcagcgctgccgcgacccgaagccctaggctggctcccacgccaacctgtgatgagtggcaggctgtccacggtggctgtcacatctctggctgcatataggattccgtccgcaggaaccagctgctcactctgacccacgatacagcagcccgcctggtccagcagcacttgcatctgctctgggctctggatgacattgaatccaggaatagactccagcttatccaaggtgcctcctgtgtgccccagaccacgtccgctgatcattggcaccttgcagccacatgccgccagggcaggtgcgaggaccaggctgaccttgtcacccacaccccctgtggaatgcttgtccacaagttgctggcgccaggcctctggccactccagctgcatgtcccgactgagccagggcctgggtcagcaccgaggtctcctccagatccatgccccgaagtcggatggccatcagcatggccccgatctgtgcgccctgcgcgctcccattcaccacagcggccacgaagcccctgatgntccgcttcgctcaggcggcctccgtctcgcttcatgcggatcagctccaggagctgcttgagctctggcgaaaggtcgagaagtccctggctcccttccccggagaagtcaccaggcgcgggtgaggccccggttcccggggtcatcaaggctgccatcgctccgggcctgcttagggcgctgccctcgcccgcttgctccggatcccagcccaggtacccggcctcgcccgcgggtcgggaccgtagatcccgggaattccggaccggtaccagcctgc

SEQ ID NO: 254483 - DNA, 1586 bp, Homo Sapiens
agtggaccgctgtgcgcgaaccctgaaccctacggtcccgacccgcgggcgaggccgggtacctgggctgggatccggagcaagcgggcgagggcagcgccctaagcaggcccggagcgatggcagccttgatgaccccgggaaccggggccccacccgcgcctggtgacttctccggggaagggagccagggacttcccgacccttcgccagagcccaagcagctcccggagctgatccgcatgaagcgagacggaggccgcctgagcgaagcgaacatcaggggcttcgtggccgctgtggtgaatgggagcgcgcagggcgcacagatcggggccatgctgatggccatccgacttcggggcatggatctggaggagacctcggtgctgacccaggccctggctcagtcgggacagcagctggagtggccagaggcctggcgccagcagcttgtggacaagcattccacagggggtgtgggtgacaaggtcagcctggtcctcgcacctgccctggcggcatgtggctgcaaggtgccaatgatcagcggacgtggtctggggcacacaggaggcaccttggataagctggagtctattcctggattcaatgtcatccagagcccagagcagatgcaagtgctgctggaccaggcgggctgctgtatcgtgggtcagagtgagcagctggttcctgcggacggaatcctatatgcagccagagatgtgacagccaccgtggacagcctgccactcatcacagcctccattctcagtaagaaactcgtggaggggctgtccgctctggtggtggacgttaagttcggaggggccgccgtcttccccaaccaggagcaggcccgggagctggcaaagacgctggttggcgtgggagccagcctagggcttcgggtcgcggcagcgctgaccgccatggacaagcccctgggtcgctgcgtgggccacgccctggaggtggaggaggcgctgctctgcatggacggcgcaggcccgccagacttaagggacctggtcaccacgctcgggggcgccctgctctggctcagcggacacgcggggactcaggctcagggcgctgcccgggtggccgcggcgctggacgacggctcggcccttggccgcttcgagcggatgctggcggcgcagggcgtggatcccggtctggcccgagccctgtgctcgggaagtcccgcagaacgccggcagctgctgcctcgcgcccgggagcaggaggagctgctggcgcccgcagatggcaccgtggagctggtccgggcgctgccgctggcgctggtgctgcacgagctcggggccgggcgcagccgcgctggggagccgctccgcctgggggtgggcgcagagctgctggtcgacgtgggtcagaggctgcgccgtgggaccccctggctccgcgtgcaccgggacggccccgcgctcagcggcccgcagagccgcgccctgcaggaggcgctcgtactctccgaccgcgcgccattcgccgccacctcgcccttcgcagagctcgttctgccgccgcagcaataaagctcctttgccgcgaaa

SEQ ID NO: 254484 - DNA, 312 bp, Homo Sapiens
ccgcgctataccaaagtgtaataatccagatattgccccatctcaaacatgttaagtcagactgtgctgaaagactttccagggacggtcaacagggtatatgttcagtggctgccctgaaatcctggtggggatgaggaggaagatttctttgaatgttaattgcacagttttgctcatttcccaccccaatgttttgtctgcaacatcgcttacactggattctttctatttttattcctatcattaaatggtagtgctgtaaattctgcattctgcaattaatgttaaataaactgctttaattcattg

SEQ ID NO: 254485 - DNA, 565 bp, Homo Sapiens
  misc_feature (500)..(511): n is a, c, g, or t
tggtgtcccccctgccttaataatccccaacactttcggaggccccaaggtggaagaatccataagccccccttgggtgttgtggtaccatgtcccaagcagtcccaagcctacttgggtggcctaaggggggacgattaccttgagcccacggagattaaggcctacagtgagctgtgatatgcccactgaacttcagtctgagcaagaaagcataactttgtctcaacaaaaatgaacaatacccacaggaaagacagaaccagaaaaaaaagaagcaaacttaaaatggacagaaaactacaaatgtacaatagtaactgcttacctatcactaccttacaaataaaaagattaaattatctactaaacagatacttctgtagactgaatgtcatctccaaaatttaggataaaatagccaatgtgatagaattaagaggtggaccctttaaaaattaattaagctataagaacaagaatggatctgttatatattnnnnnnnnnnnngctgtctctccctcacatctttggccatgttattatccagcaactagaccttca

SEQ ID NO: 254486 - DNA, 356 bp, Homo Sapiens
caagcacaatccaaagggtaatgggagagaacatagggtctctcatacacaggtccacaaatacaattatgacattaatattaaaagaaaagggttcattcataattaacatgcccctgatgcaagggcaatatgtggagatcaactattagtctaaaacaagaggtggacaattgcattaatgcatattaagtccaaaacaaggggcacttagtgaatatcatcccactgctctaaagcaaaggtggtacaggaacatgcttaaagaattgaggagcacatgagcattccaagtgacagtcttcagtagtgggcactacctgctaaaaacactaagaaagtaggtaggatcctta

SEQ ID NO: 254487 - DNA, 748 bp, Homo Sapiens
gcctcatcggtggtgctttcggacgccttcctgagccggtcctggtgcagccacagcttccgggagggcctgtgcggctgctggagctcacccgcagacccatcttcatcaccttcgagggccagaggcgcgaccccgcgcaccccggcgctccgctgctgcgccagcaccgccacctggtgaccttgctgctctggaggcccggctccgtgactccttcctccgatttttggaaagaagtgcagctggcgctgccgcggaaggtgcggtacaggccggtggaaggagacccccagacgcagctgcaggacgacaaggaccccatgctgattcttcgaggccgagtccctgagggccgggccctggactcagaggtggacccggaccctgagggcgacctgggtgtccgggggcctgtttttggagagccatcagctccaccgcacaccagtggggtctcgctgggagagagccggagcagcgaagtggacgtctcggatctcggctcgcgaaactacagtgcccgcacagacttctactgcctggtgtccaaggatgatatgtagctcccaccccagagtgcaggatcatagggacagcgggggccagggcagcggcgtcgctcctctgctcaacaggaccacaacccctgccagcagccctgggaccctgccagcagccctgggaaaagctgtggcctcagggcgcctcccagtgccagaaaataaagtccttttggattctgaaa

SEQ ID NO: 254488 - DNA, 1052 bp, Homo Sapiens
ttcttaattagtcggatgatttgactctcagcagttcatagtacccatcttcataactaagccacctagggatccagcagaaaaaaaagggatgaggggagtcatcatacaggaggtggatcatttaccaggatccacacttcctacaaagcggttgtaatattaaataacaaaactgttttttattccaatcttcacataaaacaggaataattgtatactttcttactaatgtgttccatggagtttttcctccaagaagtggcttaggggaaaatgagccccagtaatgctttgtggcatccaatccttctaccccgaccctttgactttctgccccagcccctcttagttctcctagaattaggactaaggttaagtgccctcttgggatatgacttccttcccttcctcttgatacaaaaagagcctattaccaaccctcatacacacaagagttcccttcctagttgcagactcttctgctccagctggactcccctagctctggactcccactagatcacacaggggtccctgcatgtcagtaaactttggatgaccttgggagaccaaaaaatggaatatcattttttgatctaaacaaaatagtttcctgatttaacactggccaggaaggtgggctgcaccctcagtctctctctcccatcatggttttcacatgatatcaaaggactctcataacagtctgattcttatgagttgggcatcctgtgtttccctttaggggcctgcttccttcaaatagaggagatgggtgctatgaaacctattcactctggacttgggatggctcttctccatcttcccaagtctgagctggagcctccatgcccaactctgctctgctcttctatttcctgacagcagctaaggcatgttcctgttctgcccccaaattgaccttactaacagtgagaacttggaggagtcttcgggtcttgggaaatccaagttttcccggaaacgttttgttgtaaacagtgtccacactctttgctccaataaagctcggttccttaagccgacaa

SEQ ID NO: 254489 - DNA, 621 bp, Homo Sapiens
ctattagtaactaatctgatcattactgttagaaggtggggaatggtagaacattgcttttgggtcatgctaaccatgttcccgcatggctggtgattatgtcctgggttgggttctgcacggtagcctgctttgggttagggacagtcacacctggtctgtcctgacttctttctgggccctcctaaccaaaccaggggaggggagaaggacccaattcttttcctttggtgcacgtagcctggacccgttatggacagaggccaaaggaagataacagtgtggtgtccagagatgaaaccgtggttgatgggcagttctttgagcaaccttgtttatgagcctattgatatgcagatatagaggcatccaatactattgactaatttaaaatcttattcagtgagtcaacactctaaataagcaatggagatggttccattcatttttttgcaagtatcatttttataaacataaatttcctgagatttttgttttcatcttagcctctgtggagctgcttcgtggttatgataagtgctgtgtgatgctcaccttgggaggtctgcgacatatattgaagtcatctctaacctgaagtactgacagactttctggaag

SEQ ID NO: 254490 - DNA, 659 bp, Homo Sapiens
  misc_feature (211)..(500): n is a, c, g, or t
ggacaattccattaccccaaaatgtaatcaccacaaatccaccctcgctgtgcacctttgtcctcaatccaccctcatcccaacccctggcaaccactgatctattatctttccttacagctttgcctttcctagaatgtcatataaatgaatcaagcagtatgtagccttttcagtcttgcttcattcacccaacaaaatacatgttgannnnnnnnnnnnnnnnnnnnnnnnnnnnnnnnnnnnnnnnnnnnnnnnnnnnnnnnnnnnnnnnnnnnnnnnnnnnnnnnnnnnnnnnnnnnnnnnnnnnnnnnnnnnnnnnnnnnnnnnnnnnnnnnnnnnnnnnnnnnnnnnnnnnnnnnnnnnnnnnnnnnnnnnnnnnnnnnnnnnnnnnnnnnnnnnnnnnnnnnnnnnnnnnnnnnnnnnnnnnnnnnnnnnnnnnnnnnnnnnnnnnnnnnnnnnnnnnnnnnnnnnnnnnnnnnnnnnnnnnnnnnnnnnnngcagtcgccagttaagaaagctatctcgaggaacagccccgtcctccattagtcctatagtgagtcgcatcctgcactgcacgtcgatttactgactgactgacccctgcgggacccagcttcatcgacttgtagtacatccccctttctcagctaggt

SEQ ID NO: 254491 - DNA, 410 bp, Homo Sapiens
  misc_feature (238)..(265): n is a, c, g, or t
attgctcatatgtcttcctgtctctaagccagaccaatgagcaaatacctttaaaactagttgttacatcttgaaccatttaactgtaataaaagcagaatgtttagttaatgaattaaagaacaaaccctgagcccttttatcagtctcctggctttaaactaagccaatgaggaagtgatttgggggattcctgaaactaggaaaaatgtctctttattttgaaagaaacttgcannnnnnnnnnnnnnnnnnnnnnnnnnnnaatctcaaaggcaattgagtgggtcttctgggccagacctatttaatttacgaaacatagtaccttgcagagaataggcattgaaatattatttaaacaatcaaaccaaagatgttctctctctctcgtgccgaatcctgcagcc

SEQ ID NO: 254492 - DNA, 361 bp, Homo Sapiens
  misc_feature (98)..(124): n is a, c, g, or t
tttaaataatatttcaatgcctattctctgcaaggtactatgtttcgtaaattaaataggtctggcccagaagacccactcaattgcctttgagattnnnnnnnnnnnnnnnnnnnnnnnnnnntgcaagtttctttcaaaataaagagacatttttcctagtttcaggaatcccccaaatcacttcctcattggcttagtttaaagccaggagactgataaaagggctcagggtttgttctttaattcattaactaaacattctgcttttattacagttaaatggttcaagatgtaacaactagttttaaaggtatttgctcattggtctggcttagagacaggaagacatatgagcaat

SEQ ID NO: 254493 - DNA, 1004 bp, Homo Sapiens
  misc_feature (386)..(386): n is a, c, g, or t
  misc_feature (483)..(483): n is a, c, g, or t
atgtctttaactatgtgtgaacatgcacagataattaagaaactgattacatttacaggtttaggaaataatcacttaggataatatttcattacaaattcattagaattagacttttcaggttggctatgttgtctaatttaccctcacaacagagtagatacttctatgggcataaagtatgttatactttatgtcatacataaagttttgcagaaactagtgctcagagacattgagtgactgccatgaatgattactggaataaaatacgttgggcaaatgaataagcaacccacccgacgtggcccagtcagtgcaagctcggacagacaaagctggggtttttttggttcccacttagcaccctgatttaagagaactcnctaagttaagctaaaaagggatgtgttgctgatgactccatcataacctgcttctctgggttttggttacagaatcactaattgaaagatatcgcanaactttaacctctttatcctcattctatagaccattcctccacaagtgcatatcactattcctcatgccagtgtggagtttcggaaggtaaggctaagtcacgtctcccgcctctgcttctgtctcccttgtgcttacctcctgtagttccctggattaagagcctgcctttctgtctctgtctccttcaccctattataagcttctcagagttggagtctgggtcacactcaacttactatgcaaccttcctgcacagtgctttgtgtataataggtgctcaaaaatggcttactgtagaatcagtgtgaccatttcactggctttatcagtcacatataaaagagattctaattaaatatcttttgatgacagtaataacaacaaataattctaccagcaattctcaggttattgtcactccttcaaacaagagagtgtgtcacagaagcctttcctttggaaattgcaaagacttgcttcatctgtgtcaaaatatttcagacccaagtatggctcca

SEQ ID NO: 254494 - DNA, 910 bp, Homo Sapiens
  misc_feature (338)..(338): n is a, c, g, or t
  misc_feature (700)..(700): n is a, c, g, or t
gcacgatggtgctgcacggcgccaagtacccgcactgtgccgtcaacgggctcctgggggccgagaagcagaagccgcgtaaggagcaccttcccctgggcgggcccggcgcccaccacaccctcttcgtggactggatacccctcttccacggcaccctggccctcgcccccatgctggaggtggctctcaccctgagtgagtcatggtgcaaagatcatagctacgtgaatgctgggtattatcaagctaatgagcgagtaaaggatgccagtccaaaccaggttgcagagaaggtggcctccagaatcgccgagggcttcagcgacactgcgctncatcatggtagacaacaccaaggttacgatggactgcgtagcgcctacgatccacgtgtacgagcaccatgagaacagatggcggtgcacagacccacaccatgactactgtgaagacatggccacaggcacagaggatctcagcctcgctcctggacagccggtcctacgagacgctcgtggatttcgataaccacctggatgacattcggaatgactggacaaacccagagatcaataaagctgtcctacacttgtgctaggcaggcaccgctgtgactgggctccgggcctttccactacgttgaaggaaggaaaacctattttttaaatgtaaataaaatatctgggtagcctgtgtnggaaagctgacccttttaagaagtggcatgtgccttgaaagggggcagaatgttcagtcggtcgtgtttttaacacagagtctctagaagaggtgcagacatcccgtctgactgtccctgtggactctctcagttgtatgttgctataatcctccaaatcaaagctctttctgcttgtgcaagattgttcctattaaacagttttaacta

SEQ ID NO: 254495 - DNA, 615 bp, Homo Sapiens
agacacaaacacaatcatgactgcaacagtctgaatcaaatcctaaaaaccaaaaggatatctcaccagaaatctggtatataacacatatacactatcttcactgaaaaaacttatctcagaagaaatgcaacctatcaaatcattagcaacctctaatgatatcatattgtggttctcagagtgtggtccttacactaacaacattagcactaattaaaaccttgttagaaatccaaattcctgggggtggggtccaacattctaagttgctagtcctccaggtgattctgatgaatgcctaaagtttgagcatcactgaaataataatcacctgtaatcatcacccaatgaatgcctaaaacccataaggtgaatggttgataggcaaccctataatggcaggatcaggttgacaccccataaacctactgatccatcttagcaccactagaaatgtgacaacctgaggttctgtgctttctggtactttctgtttttgtggctcacgcttgtaatcccaacactttggggggcacaggctgcaggattgcttgagcctgagagttcaagattagcctgggcaacaaagcaagacccccctctcaaaaaaaa

SEQ ID NO: 254496 - DNA, 986 bp, Homo Sapiens
  misc_feature (45)..(45): n is a, c, g, or t
  misc_feature (632)..(633): n is a, c, g, or t
aaccttgaaacacttcaacgaataaggaaaaccctggtggggggnattgaaattgtaggggggaaaaaagagactagtttaaaatggtatctctgtgtttggaggggccatggcatatggaggggagggcagagaagaacacagtgggtcaggctttgggagacagagatgagcgaggagctgggctctgaagggaggtcttcttcccaggcaaggactgcagctagacatagaagcagagccagatcccaggctactctggacccctccaccatgacttccttcagcacttcctgtctagagctcacattgatgtctaaccatgcactgtcttctcactaagacatagtcacgtcatcagatatttccactcttcccatccatcttgctgggcatagtagcacaagtgttaataattcagtaggtatcagttggtacctgttgaattcatcacattcaatacatagttctgaatgcctactacatgctaggtacttcggcccaccaaaagaacacagggtgcagaccaaggactggtggaaaaattaaggtgatgaagagaaccagaaagtatttgagatgggaagctggtatcaaggggaattattcagtgtacagatcaatgaggttanncagcccatcaagggccctatttgctggatcatccactcgcagaactctttgtcaaataaaatggcaggagcatctccctgttcctgagcccagtcagcaaattcgggcaggcgaggcacccgagtgttctgggaaaagtcgaagaagaaaagctggtcctcgtcgtaggcctcagagagtcccacactgggactcccatcctggcagtacactgtgtgcaggaatgtgtggttttgcaggtcatctggccacattggagtaggagctgcaaaggacacagggtgaggttcagggaggtgggagccttctcctccaacttaaaaaacagcaaggtggggctaggcacagtggct

SEQ ID NO: 254497 - DNA, 589 bp, Homo Sapiens
caaactctggtctggaagaatcagtcaccctgagcaaggcttccgggaaagtagatgatgagaacaaatgccccacgattgatgcccagcacacccccacgcaaaggccacggccacacagcacattctcccagcagatctgagggcagtgcgttccggggtacccaataggcaattgctgtgtagcggtcaatttcgtgagtcacaatgcaggagaaaatgtcagaaggttctggtgtgaagtttaagtaagaaaaagccctggaagctaagtcccatcgacagctgagacaaaagtaggcccaaatccttccacagggacggaatgatgctgccagttcactgtcagcatgggtgggaagagattactgacaaaacagaccaaagtgttgggcttgccaaactccaggggcttcagcgtgaacacttcagcgataggaaaccctggtggggggattgaagtgtagggggaaaaagagactagtttagatggtatctctgtgtttggaggggccatggcatatgaaggggaattattcagtgtacagatcaatgaggttaatgcagccctcctcccctgtgccgaaat

SEQ ID NO: 254498 - DNA, 342 bp, Homo Sapiens
accacacaacgcagatatatgccgggtccatgtgcaatgtgggccagggccagagccagggccagggcaggctgcagcttctctggagatctctgagccagcctcagctttggtgctccttaccctgagcatctggggccagtagctttataaatgagcattaccctgctttcaggggcttagctcagacctgcaaaaggaatgtgctacaaccactcataaataatggtcctgtacgtggcaagtaagagaactcaaagaggaatcaatgccagagaaagaacacacagctctaaaacctttcttccttcctttgccggctggtgtgaggttccagtttgg

SEQ ID NO: 254499 - DNA, 1523 bp, Homo Sapiens
gcccggcgccggcttccccgttcgcaatcgagcacaccccctcccctcggtacgaggcctgggtggcgaattcggcacgagggccatttgtcgtccgagatgcagtggtctaccccatcctggtggagttcacgagggaggtggaggaggagcctgggattcacagcctgaagcacaataaacgggtactcttctctcggatggggccctaccctcaacgcaaagtcatcacctttaaccgctacagccatgatttcaacttccacatcaactacggcgacctgggcttcctggggcctgaagatcttcgggtatttggctcccagaatctgaccacagtgaagctaaaaggggtgggtgacagcttcaagaagtatcctgactacgagtccaagggcatcaaggctcacttcaacctggatgagagtggcgtgctcagtctagacagggtggagtctgtatttgagacactggtagaggacagcgcagaagaggaatctactctcaccaaacttggcaacaccatttccagcctgtttggaggcggtaccacaccagatgccaaggagaatggtactgatactgtccaggaggaagaggagagccctgcagaggggagcaaggacgagcctggggagcaggtggagctcaaggaggaagctgaggccccagtggaggatggctctcagcccccaccccctgaacctaagggagatgcaacccctgagggagaaaaggccacagaaaaagaaaatggggacaagtctgaggcccagaaaccaagtgagaaggcagaggcagggcctgagggcgtcgctccagccccagagggagagaagaagcagaagcccgccaggaagcggcgaatggtagaggagatcggggtgggagctggttgttctggacctgcctgacttgccagaggataagctggctcagtcggtgcagaaacttcaggacttgacactccgagacctggagaagcaggaacgggaaaaagctgcccacagcttggaagcgttcatatttgagacccaggacaagctgtaccagcccgaagtaccaggaagtgtccacagaggagcagcgtgaggagatctctgggaagctcagcgccgcatccacctggctggaggatgagggtgttggagccaccacagtgatgttgaaggagaagctggctgagctgaggaagctgtgccaagggctgttttttcggctaaaggagcgcaagaagtggcccgaacggctgtctgccctcgataatctcctcaaccattccagcatgttcctcaagggggcccggctcctcccagagatggaccaaatcttcactgaggtgggagatgacaacgttagagaaaagcttcaatggaaacctggggcctggaaagaatgcaacctctggccgaagcaagctaaggctggcccgcccacaaagaaagccttgtgttggctctccaaaagacatttggaagcttaagatggatgggcccctggaaccccaaaaggggccacttaat

SEQ ID NO: 254500 - DNA, 1623 bp, Homo Sapiens
aaggtagcgaggcctgggtggcgaattcggcacgaggctcagtcggtgcagaaacttcaggacttgacactccgagacctggagaagcaggaacgggaaaaagctgccaacagcttggaagcgttcatatttgagacccaggacaagctgtaccagcccgagtaccaggaagtgtccacagaggagcagcgtgaggagatctctgggaagctcagcgccgcatccacctggctggaggatgagggtgttggagccaccacagtgatgttgaaggagaagctggctgagctgaggaagctgtgccaagggctgttttttcgggtagaggagcgcaagaagtggcccgaacggctgtctgccctcgataatctcctcaaccattccagcatgttcctcaagggggcccggctcatcccagagatggaccagatcttcactgaggtggagatgacaacgttagagaaagtcatcaatgagacctgggcctggaagaatgcaactctggccgagcaggctaagctgcccgccacagagaagcctgtgttgctctcaaaagacattgaagctaagatgatggccctggaccgagaggtgcagtatctgctcaataaggccaagtttaccaagccccggccccggcctaaggacaagaatgggacccgggcagagccacccctcaatgccagtgccagtgaccaggggggagaaggtcatccctccagcaggccagactgaagatgcagagcccatttcagaacctgagaaagtagagactggatccgagccaggagacactgagcctttgggagttaggaggtcctggagcagaacctgaacagaaagaacaatcgacaggacagaagcggcctttgaagaacgacgaactataacccccacctctgttttccccattcatctccacccccttcccccaccacttctatttatttaacatcgagggttgggggaggggttggtcctgccctcggctggagttcctttctcacccctgtgatttggaggtgtggagaaggggaagggagggacagctcactggttccttctgcagtacctctgtggttaaaaatggaaactgttctcctccccagccccactccctgttccctacccatataggccctaaatttgggaaaaatcactattaatttctgaatcctttgcctgtgggtaggaagagaatggctgccagtggctgatgggtcccggtgatgggaagggtatcaggttgctggggagtttccactcttctctggtgattgttccttccctcccttcctctcccaccatgcgatgagcatcctttcaggccagtgtctgcagagcctcagttaccaggtttggtttctgagtgcctatctgtgctctttcctccctctgcgggcttctcttgctctgagcctcccttccccattcccatgcagctcctttccccctgggtttccttggcttcctgcagcaaattgggcagttctctgccccttgcctaaaagcctgtacctctgggattggcggaagtaaatctgggaaagaattctcaactcgttattttcccaaccccctagtggggccaaaaagaaggggaagggggccaacaggtggaac

SEQ ID NO: 254501 - DNA, 653 bp, Homo Sapiens
  misc_feature (416)..(416): n is a, c, g, or t
cacgagaaacaatgattgagctcagtgataatgaaaacccttggacaatattcctggaaacagttgatcccgagctggctgctagtggagcgaccttacccaagtttgataaagatcatgatgtaatgttatttttgaagatgtatgatcccaaaacgcggagcttgaattactgtgggcatatctacacaccaatatcctgtaaaatacgtgacttgctcccagttatgtgtgacagagcaggatttattcaagatactagccttatcctctatgaggaagttaaaccgaatttaacagagagaattcaggactatgacgtgtctcttgataaagcccttgatgaactaatggatggtgacatcatagtatttcagaaggatgaccctgtgataacagtgaattacccaccgcanaggagtatttccgagatctctaccaccgcgttgatgtcattatctgtgattattttcaggttgcaaagacagttgcacagaggctcaacacagatccaatggtgctgcagtttttcaagtctcaaggttatagggattgcccaggtatcctcttagacattattatgaaggtactttaagagatcttctacagttcttcaagcctagacaacctaagaaactttactatcagcagtt

SEQ ID NO: 254502 - DNA, 976 bp, Homo Sapiens
gcctgggtggcgattccggcacgagggtggtgtcaaggtgtactaaagaggaagcgattgagcacaattatgggggtcacgatgacgacctgtctgttcgacactgcactaatgcttacatgttagtctacatcagggaatcaaaactgagtgaagttttacaggcggtcaccgaccatgatattcctcagcagttggtggagcgattacaagaagagaaaaggatcgaggctcagaagcggaaggagcggcaggaagcccatctctatatgcaagtgcagatagtcgcagaggaccagttttgtggccaccaagggaatgacatgtacgatgaagaaaaagtgaaatacactgtgttcaaagtattgaagaactcctcgcttgctgagtttgttcagagcctctctcagaccatgggatttccacaagatcaaattcgattgtggcccatgcaagcaaggagtaatggaacaaaacgaccagcaatgttagataatgaagccgacggcaataaaacaatgattgagctcagtgataatgaaaacccttggacaatattcctggaaacagttgatcccgagctggctgctagtggagcgaccttacccaagtttgataaagatcatgatgtaatgttatttttgaagatgtatgatcccaaaacgcggagcttgaattactgtgggcatatctacacaccaatatcctggaaaatacgtgacttgctcccagttatgtgtgacagagcaggatttattcaagatactagccttatcctctatgaggaaggtaaaaccgaaatttaacaaaagagaattcagggactatgaaccggtcctccttgataaggccccgtgatgcaacctatagggaatgggggacctccgcagccaactgttccggcaaccactgaccccctgagcgatcgcgacgatcagggcgcacgcttgcgccgcgcgaccacacggcgagtctt

SEQ ID NO: 254503 - DNA, 2194 bp, Homo Sapiens
  misc_feature (1762)..(1762): n is a, c, g, or t
  misc_feature (2176)..(2176): n is a, c, g, or t
gctgggtggcgaattcggcacgagggtggtgtcaaggtgtactaaagaggaagcgattgagcacaattatgggggtcacgatgacgacctgtctgttcgacactgcactaatgcttacatgttagtctacatcagggaatcaaaactgagtgaagttttacaggcggtcaccgaccatgatattcctcagcagttggtggagcgattacaagaagagaaaaggatcgaggctcagaagcggaaggagcggcaggaagcccatctctatatgcaagtgcagatagtcgcagaggaccagttttgtggccaccaagggaatgacatgtacgatgaagaaaaagtgaaatacactgtgttcaaagtattgaagaactcctcgcttgctgagtttgttcagagcctctctcagaccatgggatttccacaagatcaaattcgattgtggcccatgcaagcaaggagtaatggaacaaaacgaccagcaatgttagataatgaagccgacggcaataaaacaatgattgagctcagtgataatgaaaacccttggacaatattcctggaaacagttgatcccgagctggctgctagtggagcgaccttacccaagtttgataaagatcatgatgtaatgttatttttgaagatgtatgatcccaaaacgcggagcttgaattactgtgggcatatctacacaccaatatcctgtaaaatacgtgacttgctcccagttatgtgtgacagagcaggatttattcaagatactagccttatcctctatgaggaagttaaaccgaatttaacagagagaattcaggactatgacgtgtctcttgataaagcccttgatgaactaatggatggtgacatcatagtatttcagaaggatgaccctgaaaatgataacagtgaattacccaccgcaaaggagtatttccgagatctctaccaccgcgttgatgtcattttctgtgataaaacaatccctaatgatcctggatttgtggttacgttatcaaatagaatgaattattttcaggttgcaaagacagttgcacagaggctcaacacagatccaatgttgctgcagtttttcaagtctcaaggttatagggatggcccaggtaatcctcttagacataattatgaaggtactttaagagatcttctacagttcttcaagcctagacaacctaagaaactttactatcagcagcttaagatgaaaatcacagactttgagaacaggcgaagttttaaatgtatatggttaaacagccaatttagggaagaggaaataacactatatccagacaagcatgggtgtgtccgggacctgttagaagaatgtaaaaaggccgtggagcttggggagaaagcatcagggaaacttaggctgctagaaattgtaagctacaaaatcattggtgttcatcaagaagatgaactattagaatgtttatctcctgcaacgagccggacgtttcgaatagaggaaatccctttggaccaggtggacatagacaaagagaatgagatgcttgtcacagtggcgcatttccacaaagaggtcttcggaacgttcggaatcccgtttttgctgaggatacaccagggcgagcattttcgagaagtgatgaagcgaatccagagcctgctggacatccagggagaaggagtttgagaagtttaaattttgcaattgtaatgatgggcccgacaccagtacattaaatgaagacgagtatggaagtaaatttgnaaagacttttgagccacagcccggtaatatgtctcatcctcggccttggctagggctcgaccacttcaacaaagccccaaagaggagtcgctacacttaccttgaaaaggccattaaaatccataactgatttccaagctggtgtgttcaaggcgaggacggtgtgtgggtggccccttaacagcctagaactttggtgcacgtgccctctagcccgaagtcttcagcaagaggagtcgctgctggtgttaattttattttattgaggctgttcagtttggcttccctggatctattgaccgccctttttgagcaaaaatgaagatgtttttataaagcttggatgccaatgagagttattttatgggtaaccacagtgtcaaggcaactgttcagcgcaatggggggagaagnaggttagtgggatcgggg

SEQ ID NO: 254504 - DNA, 458 bp, Homo Sapiens
gaacagtttgcccttggccactgggggtttacccataaaaataactcctccattggccatcccaaacctttaataaaaaacatccttccattttgcctcaaaaaagggcagtcaaataggatacagagaagcccaaactgaaacagccctcaaataaaataaaattaacacccagccagcgaaaccctcttgctgaaagacttcggctagagggcacgtgcaccaaagttcctaggctgttaaggggccacccacacaccgtcctcgccttgaacacaccagcttggaaatcagttatggattttaatggccttttcaaggtaagtgtagcgactcctctttggggctttgttgaagtggtcgagccctaccaaggccgaggatgagacatattaccgggctgtggctcaaagtctttcaaatttacttcatactcgtcttcatttatgtactggtcg

SEQ ID NO: 254505 - DNA, 1260 bp, Homo Sapiens
gatgaaggaaatgctaaagcgattccaagtggctgtaaacctagctgaagacacagctcatcccaaactcgtcttctcccaggaagggagatacgtgaaaaatacagcatcagccagttcttggccagtgttttcttcagcatggaactactttgctggatggaggaatcctcagaagactgcttttgtagagagatttcagcacttaccctgtgttctgggaaaaaacgttttcacctcagggaaacattactgggaagttgagagtagagatagtctggaggttgctgttggggtgtgtcgggaggacgtcatgggaattactgatcgttcaaaaatgtccccagatgtgggcatctgggcgatttattggagtgctgctggctattggcccttgataggcttccctggaactcccacccagcaagagccagctctccaccgagtgggggtttacctggatcgtgggactgggaatgtctccttctacagcgctgtggacggagtgcacctgcacaccttttcttgttcttctgtctcacgcctccggccatttttttggttgagtccattagcatctttagtcattccaccagtgactgataggaaatgaggcttttcttcccctgaccaaaactccttccctgtagtccagctgagggacacacatccctgggccctcttctgcccttcatgtctctatcctggatggtccatcttctgggtctccctaacggtaccgtttggtatctgccctttgtgtgcttcacaagaggcagtcccatgggaggtgggtctggccaatggagatgggacaggaaattttccaagacgcttttgggaaatctttttgtagcttttaaagagatgtgcggggaagacatatggatgttagcagccatattggaactgagaacacaggaatggtggaaaggtagaagaaacagagtttttgttgccgctgtgaaattgttgaaatttccttcatgccaagcttcttgttatatgagataattacgcccttattgtataagacaattttaggtgtatttggttacttgcagcctgaagtaccgtaactgcactaaagggacgtagtgtgaacatcccgcagtataggcttaagtcacttttgtgaaatttgacaagcatagaatctttttctatccagtcaggcattgcctattctttccagtactactgattccccccactttctggcttaaaaaaatgtgggaatcccccctcactctgcctatg

SEQ ID NO: 254506 - DNA, 872 bp, Homo Sapiens
ggggaggggagaatcgaggacggacggcctagccaggccaagaatgcaattgccccggtggtgggagctgggagacccctgtgctcggacgggacagggtcgcgggacacgcacgatgagccccgcgaccactggcacattcttgctgacagtgtacaggattttctccaaggtacactccgatcggaatgtatacccatcagcaggtgtcctctttggtcatggtctggaaagagaatattttaagggggaatttccaccttaccccctggcgagattagtaatgatcccataacatttaatacaaatttaatgggttacccagaccgacctggatggcttcgatatatccggacaccatatagtgatggagtcctatatgggtccccaacagctgaaaatgtggggaagccaacaatcattgagataactgcctacaacaggcgcacctttgagactgcaaggcataatttgataattaatataatgtctgcagaagacttcccgttgccatatcaagcagaattcttcattaagaatatgaatgtagaagaaatgttggccagtgaggttcttggagactttcttggcgcagtgaaaaatgtgtggcagccagagcgcctgaacgccataaacatcacatcggccctagacaggggtggcagggtgccacttcccattaatgacctgaaggagggcgtttatgtcatggttggtgcagatgtcccgttttcttcttgtttacgagaagttgaaaatccacagaatcaattgagatgtagtcaagaaatggagcctgtaataacatgtgataaaaaatttcgtactcaattttacattgactggtgcaaaatttcattggttgataaaac

SEQ ID NO: 254507 - DNA, 772 bp, Homo Sapiens
  misc_feature (653)..(653): n is a, c, g, or t
  misc_feature (663)..(663): n is a, c, g, or t
  misc_feature (744)..(744): n is a, c, g, or t
cagcgccacctgcctcattgtgcccaggagttctccaaacccgcgctgcggagtccttcctcgggaggcggcgaaggcggtccaccctgcgcgtgatccttcatgcccggcccctgcccctccctccgggtggaacttccccctcaccgccagacttaagctgaggatcgttggatctctggcggggtgcagaactgagcccaggccacagtaccctattcacgctctgtgcttgtgccaagggggcaatggcggcttcctgtgttctactgcacactgggcagaagatgcctctgattggtctgggtacctggaagagtgagcctggtcaggttgctatctacggcaatgagcctgagattggggaggccctgaaggaggacgtgggaccaggcaaggcggtgcctcgggaggagctgtttgtgacattcaagctgtggaacaccaagcaccaccccgaggatgtggagcctgcccttcgggactctggctgacctccagctggagtatctggacctgtacctgatgcactggccttatgcctttgagcggtgagacaaccccttccccaagaatgctgatgggactatatgctacgactccacccactacaaggagacttggaaggctctggaggcactggtggctaaggngctggtgcangcgctgggcctgtccaacttcaacagtcggcagattgatgacatactcagtgtggccttcgtgcgttcagctgtcttgcangtggaattgccacccatacttggcttaa

SEQ ID NO: 254508 - DNA, 1386 bp, Homo Sapiens
  misc_feature (1186)..(1188): n is a, c, g, or t
  misc_feature (1192)..(1204): n is a, c, g, or t
  misc_feature (1206)..(1207): n is a, c, g, or t
  misc_feature (1209)..(1209): n is a, c, g, or t
  misc_feature (1213)..(1214): n is a, c, g, or t
  misc_feature (1216)..(1218): n is a, c, g, or t
  misc_feature (1221)..(1221): n is a, c, g, or t
  misc_feature (1226)..(1227): n is a, c, g, or t
  misc_feature (1231)..(1231): n is a, c, g, or t
  misc_feature (1235)..(1235): n is a, c, g, or t
  misc_feature (1237)..(1237): n is a, c, g, or t
  misc_feature (1239)..(1239): n is a, c, g, or t
aggtagcgaggcctgggtggcgaattcggcacgaggggatctctggcggggtgcagaactgagcccaggccacagtaccctattcacgctctgtgcttgtgccaagggggcaatggcggcttcctgtgttctactgcacactgggcagaagatgcctctgattggtctgggtacctggaagagtgagcctggtcaggtaaaagcagctgttaagtatgcccttagcgtaggctaccgccacattgattgtgctgctatctacggcaatgagcctgagattggggaggccctgaaggaggacgtgggaccaggcaaggcggtgcctcgggaggagctgtttgtgacatccaagctgtggaacaccaagcaccaccccgaggatgtggagcctgccctccggaagactctggctgacctccagctggagtatctggacctgtacctgatgcactggccttatgcctttgagcggggagacaaccccttccccaagaatgctgatgggactatatgctacgactccacccactacaaggagacttggaaggctctggaggcactggtggctaaggggctggtgcaggcgctgggcctgtccaacttcaacagtcggcagattgatgacatactcagtgtggcctccgtgcgtccagctgtcttgcaggtggaatgccacccatacttggctcaaaatgagctaattgcccactgccaagcacgtggcctggaggtaactgcttatagccctttgggctcctctgatcgtgcatggcgtgatcctgatgagcctgtcctgctggaggaaccagtagtcctggcattggctgaaaagtatggccgatctccagctcagatcttgctcaggtggcaggtccagcggaaagtgatctgcatccccaaaagtatcactccttctcgaatccttcagaacatcaaggtgtttgacttcacctttagcccagaagagatgaagcagctaaatgccctgaacaaaaattggagatatattgtgcctatgcttacggtggatgggaagagagtcccaagggatgcagggcatcctctgtacccctttaatgacccgtactgagaccacagcttcttggcctcccttccagctctgcagctaatgaggtcctgccacaacggaaagagggagttaataaagccattggagcatcaaaannnaaannnnnnnnnnnnnanngntttnnannnaanaaaannaagnaaanananacatggtcggccgcctcgggccctccgagaaagttttctaaaaccattcgttttggcccgcgggccccccttaaggtaaagggaaacctggggccataaccgggttttcccaaagggaaatccctgggccactgaacctaaagggct

SEQ ID NO: 254509 - DNA, 809 bp, Homo Sapiens
  misc_feature (662)..(663): n is a, c, g, or t
  misc_feature (687)..(687): n is a, c, g, or t
  misc_feature (729)..(730): n is a, c, g, or t
  misc_feature (768)..(768): n is a, c, g, or t
gggtctccaaacccgcgctgcggagtgagtgaccaagttccggccagttcgacctcgaggatccagaggtggagacggtactacctcccagctctgttttccatccccttcaggtccttcctcgggaggcggcgaaggcggtccaccctgcgcgtgatccttcatgcccggcccctgcccctccctccgggtggaacttccccctcaccgccagacttaagctgaggatcgttggatctctggcggggtgcagaactgagcccaggccacagtaccctattcacgctctgtgcttgtgccaagggggcaatggcggcttcctgtgttctactgcacactgggcagaagatgcctctgattggtctgggtacctggaagagtgagcctggtcaggtaaaagcagctgttaagtatgcccttagcgtaggctaccgccacattgattgtgctgctatctacggcaatgagcctgagattggggaggccctgaaggaggacgtgggaccaggcaaggcggtgcctcgggaggagctgtttgtgacatccaagctgtggaacaccaagcaccaccccgaggatgtggagcctgccctccggaagactctggctgacctccagctggagtatctggacctgtacctgatgcactggccttatgcctnntgagcgggagacaaccccttcccncagaatgctgatgggactatatgctacgactccacccactanncagagacttggaaggctctggaggcactggtggctaanggggctggtgcaggcgctgggcctgtcccactttcacagtc

SEQ ID NO: 254510 - DNA, 657 bp, Homo Sapiens; identical to SEQ ID NO: 73539

SEQ ID NO: 254511 - DNA, 1027 bp, Homo Sapiens
ataaaaaccgggtgccggcaggcgccagtcgcaggtgtgctgctgaggcgtgagaatggcgtcccgcggccggcgtccggagcatggcggacccccagagctgttttatgacgagacagaagcccggaaatacgttcgcaactcacggatgattgatatccagaccaggatggctgggcgagcattggagcttctttatctgccagagaataagccctgttacctgctggatattggctgtggcactgggctgagtggaagttatctgtcagatgaagggcactattgggtgggcctggatatcagccctgccatgctggatgaggctgtggaccgagagatagagggagacctgctgctgggggatatgggccagggcatcccattcaagccaggcacatttgatggttgcatcagcatttctgctgtgcagtggctctgtaatgctaacaagaagtctgaaaaccctgccaagcgcctgtactgcttttttgcttctcttttttctgttctcgtccggggatcccgagctgtcctgcagctgtaccctgagaactcagagcagttggagctgatcacaacccaggccacaaaggcaagcttctccggtggcatggtggtagactaccctaacagtgccaaagcaaagaaattctacctctgcttgttttctgggccttcgacctttataccagaggggctgagtgaaaatcaggatgaagttgaacccagggagtctgtgttcaccaatgagaggttcccattaaggatgtcgaggcggggaatggtgaggaagagtcgggcatgggtgctggagaagaaggagcggcacaggcgccagggcagggaagtcagacctgacacccagtacaccggccgcaagcgcaagccccgcttctaagtcaccacgcggttctggaaaggcacttgcctctgcacttttctatattgttcagctgacaaagtagtattttagaaaagttctaaagttataaaaatgttttctgcagtaaaaaaaagttctctg

SEQ ID NO: 254512 - DNA, 797 bp, Homo Sapiens; identical to SEQ ID NO: 171861
  misc_feature (710)..(710): n is a, c, g, or t
  misc_feature (725)..(725): n is a, c, g, or t
  misc_feature (748)..(748): n is a, c, g, or t

SEQ ID NO: 254513 - DNA, 1523 bp, Homo Sapiens
cttgcgtcacgtccggcctgcgagttaccgcccactcgctgcggcgcttctggctccagaccgccctccggatcggaccctgcgaatggttttggctatatcttcatgctgggcttcatcaccaggcctcctcacagattcctgtcccttctgtgtcctggactccggatacctcaactctcagtactttgtgctcagcccaggcccagagccatggctatctcctcttcctcctgcgaactgcccctggtggctgtgtgccaggtaacatcgacgccagacaagcaacagaactttaaaacatgtgctgagctggttcgagaggctgccagactgggtgcctgcctggctttcctgcctgaggcatttgacttcattgcacgggaccctgcagagacgctacacctgtctgaaccactgggtgggaaacttttggaagaatacacccagcttgccagggaatgtggactctggctgtccttgggtggtttccatgagcgtggccaagactgggagcagactcagaaaatctacaattgtcacgtgctgctgaacagcaaaggggcagtagtgggccacttacaggaagacacatctgtgtgacgtagagattccagggcaggggcctatgtgtgaaagcaactctaccatgcctgggcccagtcttgagtcacctgtcagcacaccagcaggcaagattggtctagctgtctgctatgacatgcggttccctgaactctctctggcattggctcaagctggagcagagatacttacctatccttcagcttttggatccattacaggcccagcccactgggaggtgttgctgcgggcccgtgctatcgaaacccagtgctatgtagtggcagcagcacagtgtggacgccaccatgagaagagagcaagttatggccacagcatggtggtagacccctggggaacagtggtggcccgctgctctgaggggccaggcctctgccttgcccgaatagacctcaactatctgcgacagttgcgccgacacctgcctgtgttcccagcaccgcaggcctgacctctatggcaatctgggtcacccactgtcttaagacttgacttctgtgagtttagacctgcccctcccacccccaccctgccactatgagctagtgctcatgtgacttggaggcaggatccaggcacagctcccctcacttggagaaccttgactctcttgatggaacacagatgggctgcttgggaaagaaactttcacctgagcttcacctgaggtcagactgcagtttcagaaaggtggaattttatatagtcattgtttatttcatggaaactgaagttctgctgagggctgagcagcactggcattgaaaaatataataatcataaagtctgtgtctggacatcgcctttgggaactagaaggggagttggtattgtaccagctggactaagctccagttctagacctcctggctcattcaacatgcctccctacctaaataaaagtgcaacactcaaaa

SEQ ID NO: 254514 - DNA, 483 bp, Homo Sapiens
  misc_feature (53)..(53): n is a, c, g, or t
  misc_feature (311)..(311): n is a, c, g, or t
  misc_feature (395)..(395): n is a, c, g, or t
gaggcttcagtttaatgtgagatcattggaagttgaactattcaggcggcganagagcccctttctccatcttcccactgtatggtcttgtcccttagcctataatttcttataaagagcgttttgaaaactaggtttttactggcagggccctgattcaggctcacagtataaagagagaagtcagagaatcctagaaatttattgcttgaagaaggggttgggtgtcctcatattctcacctttcctcaggctggggctttcatcaccaggggcctcctcacagattcctgtcccttctgtgtctgggnctcccggatacctcaactctcagtactttgtgctcagcccagggcccagagccatggctatctcctctttctcctgcgaacttnccctgggtggctgtgtgcaggggaacatcgacggcagacaagcaacaggacttttaaaacatgtgcttgagcttggttcgagaggctt

SEQ ID NO: 254515 - DNA, 420 bp, Homo Sapiens
cagagggggcttctggcatgcctgacagacccatgcccatcccaggggagaggaacatggatgggtaaatgagtccaggagatactcttgggatgagaaatgggttaaaagccacaggacttctagtagttattgcaggttcagacacatcatggctactcggcttgtcttccgcagtccagtcactgccgtaccactcgttgtgcttgatagagacgccggagcagtgaaagtccaggtggttcacatgggtggactgaggagtcccccaacaccaaacatctggggcacagcagccatgcctggcagcatcatgggcagcatgctcagggtacttttgacctcttcacctgttggcatagtgacaaagccagctggaaaccccctcgtgccgaactcgtgcagcccgggtgcaccact

SEQ ID NO: 254516 - DNA, 826 bp, Homo Sapiens
  misc_feature (354)..(354): n is a, c, g, or t
caatggagcttaccatctttatcctgagactggccatttacatcctgacatttcccttgtacctgctgaactttctgggcttgtggagctggatatgcaaaaaatggttcccctacttcttggtgaggttcactgtgatatacaacgaacagatggcaagcaagaagcgggagctcttcagtaacctgcaggagtttgcgggcccctccgggaaactctccctgctggaagtgggctgtggcacgggggccaacttcaagttctacccacctgggtgcagggtgacctgtattgaccccaaccccaactttgagaagtttttgatcaagagcattgcagagaaccgacacctgncagtttgaggcgctttgtggtagctgccggggagaacatgcaccaggtggctgatggctctgtggatgtggtggtctgcaccctggtgctgtgctctgtgaagaaccaggagcggattctccgcgaggtgtgcagagtgctgagaccgggaggggctttctatttcatggagcatgtggcagctgagtgttcgacttggaattacttctggcaacaagtcctggatcctgcctggcaccttctgtgtgatgggtgcaacctgaccagagagagctggaaggccctggagcgggccagcttctctaagctgaagctgcagcacatccaggccccactgtcctgggagttggtgcgccctcatatctatggatatgctgtgaaatagtgtgagctggcagttaagagctgaatggctcaaagaatttaaagcttcagttttacatttaaaatgctaagtgggagaagagaaacc

SEQ ID NO: 254517 - DNA, 797 bp, Homo Sapiens
acgagccacgcataagccaaggtgaacaggcagccgcaggaagggcgtccagatgggtgagtcgctgggaccctgtgcagactcccgaggggcggtggagcccacaggctcaagacccaccaggcgcttcctccccgctggtctacagtgcctgaaacgtgggcctccccgacgcgggcagtgggtctgttggagtggccagaagggtcctgttagggaacctgtggatggctcaggattttagaatactccgagcctggggtgcccagagagcggaccttcggaacccacatgagtgtctctgcttgtgactcccggcagctccttaatcctaaagaagccagatccgaatcttgccaaatgtagccaggagttctcgagcagccagagagcgatggatttccaccggcagaggaaagatccagctttaggagcagaatcacacctgccagctggccctagcaagctgtggtctctgggaggccagggacgagagcccactccctcctccgttcatggctcagggtcgtggccagagcctgcctgtgtagaggcgactccagcagcccccagccccgcccagctctgcccacacagctgcaaggccagcatcctgccctttgtcaagttcaccacagtcatgtcccaccccccattcgctgaaatcagccccaaattgcctggaaacccagaccccgcaccccctccccagctttccttcttcatggagtttctatttcagaacaaggaaacagatacccccaaaacaattaaagaaataaatctataattacaaa

SEQ ID NO: 254518 - DNA, 412 bp, Homo Sapiens
  misc_feature (63)..(63): n is a, c, g, or t
aaaaaaacccaatacattaacatatgaataacacatgtgaaaataactggccaaaacaaaaanaattatgagaaaagtggcattgtttgatatttttgcaaacctgtttcatgtctggcttaacagaagacaactaggttctcatatctagcttctgcattcaattggttgggttatcacatatcacatcgtagcctctgaagaaccccactgtacactcttgagagaatgagagtgaaaagcaaataatgtcattattatgaacacagttttgaccctctgaacccatggaaaggaccttaggggcccgctggggccccaagaccacactggataaccaatgtcctagttgaaaagaagtttttacaggcctgctttaaaattctcttctgagagctgagtgaagaaattt

SEQ ID NO: 254519 - DNA, 560 bp, Homo Sapiens
  misc_feature (330)..(330): n is a, c, g, or t
  misc_feature (489)..(489): n is a, c, g, or t
aaattaataaaaaaacaaagatgctcccataatactctcagatagtgaagaagaagaaatgatcattttggaaccagacaagaatccaaagaaaataaggtaacaaatttctggtttatttcaaatgtatacatatactcaacacttatagaggtttgctctctggttttactctcatcttgccacatgactataaacaaaaagacatccctttttcattagagatccatctgttctgtgatttttttaccttgtgatttataaaaattaggacctaaatctataatataaacttcttggatgccagtcttactcatagctgacacattntagatcctactggaaaactaagaaatgcctcttatttcaataatccaaaacttaacatactcttagtaaattcttactttgctttattcacagaacacagaccaccagtgcaaaacaggaaaaagcaccaagtaaaaagccagtgaaaagaagaaaaangaagagagctgccaatttaaagctaacagttgaatatctggatatataactattaaaaggatatttatttc

SEQ ID NO: 254520 - DNA, 981 bp, Homo Sapiens
  misc_feature (107)..(189): n is a, c, g, or t
  misc_feature (257)..(352): n is a, c, g, or t
cctgaagtatggggactttctccaaagaatcctgaaccagattctgatgaacatacaccagtggaggatgaagagccaaagaaaagcactacttcagcttctacttnnnnnnnnnnnnnnnnnnnnnnnnnnnnnnnnnnnnnnnnnnnnnnnnnnnnnnnnnnnnnnnnnnnnnnnnnnnnnnnnnnncataagaagtattctgaagatagcgacagtgactctgattctgaaacagactccagtgatgaagatannnnnnnnnnnnnnnnnnnnnnnnnnnnnnnnnnnnnnnnnnnnnnnnnnnnnnnnnnnnnnnnnnnnnnnnnnnnnnnnnnnnnnnnnnnnnnnnagtccagtgattcaagctctaaagaatcccaagaagagtttctggaaaatccctggaaggatcgaacaaaggctgaagaaccatcagatttaattggcccagaggctccaaaaacacttacctctcaagatgataaacctttgaactatggccatgctctgttacctggtgaaggtgcagctatggctgaatatgtaaaagctggaaaacgtatcccacgaagaggtgaaattggcttgacaagtgaagaaattgcatcatttgaatgctcaagttatgtaatgagtggtagcaggcatcgccgaatggaggctgtgcgactgcgaaaagagaaccagatctacagtgctgatgagaagagagcccttgcatcctttaaccaagaagagagacgaaagagagagaacaagattctggccagttttcgagaaatggtttacagaaagaccaaagggaaggatgacaaataaagattttctgattgtccagaagacatttttaacaacaaaaaagaaagtctgggttccacacatacatagaaaaagattattatgttctgagaaagctttacagtgctactgtgccttctatttaattctttcagtccttcaataaaaagctgcttattg

SEQ ID NO: 254521 - DNA, 355 bp, Homo Sapiens
  misc_feature (198)..(198): n is a, c, g, or t
ccggtctcagctctgggagggaacgggagatgttgcaggcgccgagagggcgggccagggccgcactccggagactcgcggttgctacggcaccatggctggagcgcccacggtctcgcttcctgaactccgttcactcctagcctccggacgggcccggctcttcgacgtgcgctctcgcgaggaggcggcagtggngaccatcccaggggcgctcaacatcccggtgtccgagttggagagtgctctgcagatggagccagctgccttccaggctttatattcttgcttgagaagccaaagctgggaagatgagcatctcgttttctttcttgttcagatggggcaagcgggg

SEQ ID NO: 254522 - DNA, 360 bp, Homo Sapiens
cagaggtctcgtgccttggcctgtcttcagtcatcttcagaggtgggggtggggatgcaggggagcactcaggccctgttggtctcctttactgtggtaactggccctctgagggcatactactgttgaggttttgagctgtggggaccatcatgctgaatggcttctaagactgctctgggaagatgagggcccccccaggggagctttctagcttaagtggaggcaccgacacctgttggtgcatgtctacacagccatcatcctggtggggaataagaaggacctgaggcaagacgagcacaccaggagagagctggccaagatgaagcaggagcccgttcggtctgaggggccggg

SEQ ID NO: 254523 - DNA, 1052 bp, Homo Sapiens
agtctgagcctccggcaccggccgcgcagctggaggcggcggagcggaagccccaccatggctgcaatccgaaagaagctggtgatcgttggggatggtgcctgtgggaagacctgcctcctcatcgtcttcagcaaggatcagtttccggaggtctacgtccctactgtctttgagaactatattgcggacattgaggtggacggcaagcaggtggagctggctctgtgggacacagcagggcaggaagactatgatcgactgcggcctctctcctacccggacactgatgtcatcctcatgtgcttctccatcgacagccctgacagcctggaaaacattcctgagaagtggaccccagaggtgaagcacttctgccccaacgtgcccatcatcctggtggggaataagaaggacctgaggcaagacgagcacaccaggagagagctggccaagatgaagcaggagcccgttcggtctgaggaaggccgggacatggcgaaccggatcagtgcctttggctaccttgagtgctcagccaagaccaaggagggagtgcgggaggtgtttgagatggccactcgggctggcctccaggtccgcaagaacaagcgtcggaggggctgtcccattctctgagatccccaaggcctttcctacatgccccctcccttcacaggggtacagaaattatccccctacaaccccagcctcctgagggctccatgctgaaggctcccattttcagttccctcctgcccaggactgcattgttttctagccccgaggtggtggcacgggccctccctcccagcgctctgggagccacgcctatgccctgcccttcctcagggcccctggggatcttgccccctttgaccttccccaaaggatggtcacacaccagcactttatacacttctggctcacaggaaagtgtctgcagtaggggacccagagtcccaggcccctggagttgttttcggcaggggccttgtctctcactgcatttggtcaggggggcatgaataaaggctacaggctccccaaaa

SEQ ID NO: 254524 - DNA, 912 bp, Homo Sapiens
ctgggaggggaggggcccgtgcccccaacttcgggggctaaaaaaccaatgcaagtcctgggccaggaggggaactgaaaaatgggagccttcagccatggagcccttcaggaaggctgggggttgtaggggggataatttctgtacccctgtgaagggagggggcatgtaggaaaggccctggggatctcagagaatgggacagccccctccgacgcttgttcttgcggacctggaggccagcccgagtggccatctcaaacacctcccgcactccctccttggtcttggctgagcactcaaggtagccaaaggcactgatccggttcgccatgtcccggccttcctcagaccgaacgggctcctgcttcatcttggccagctctctcctggtgtgctcgtcttgcctcaggtccttcttattccccaccaggatgatgggcacgttggggcagaagtgcttcacctctggggtccacttctcaggaatgttttccaggctgtcagggctgtcgatggagaagcacatgaggatgacatcagtgtccgggtaggagagaggccgcagtcgatcatagtcttcctgccctgctgtgtcccacagagccagctccacctgcttgccgtccacctcaatgtccgcaatatagttctcaaagacagtagggacgtagacctccggaaactgatccttgctgaagacgatgaggaggcaggtcttcccacaggcaccatccccaacgatcaccagcttctttcggattgcagccatggtggggctccagccggctgaagttcccaggctgcaggaagagagggcgggctctggagctgagatgaagtcaaggcttccgctccgccgcctccagctgcgcggccggtgcccctcgtgccgaattcgccacccaggcc

SEQ ID NO: 254525 - DNA, 1001 bp, Homo Sapiens
  misc_feature (871)..(871): n is a, c, g, or t
aaggtagcgaggcctgggtggcgaattcggcacgaggggcaccggccgcgcagctggaggcggcggagcggaagccttgacttcatctcagctccagagcccgccctctcttcctgcagcctgggaacttcagccggctggagccccaccatggctgcaatccgaaagaagctggtgatcgttggggatggtgcctgtgggaagacctgcctcctcatcgtcttcagcaaggatcagtttccggaggtctacgtccctactgtctttgagaactatattgcggacattgaggtggacggcaagcaggtggagctggctctgtgggacacagcagggcaggaagactatgatcgactgcggcctctctcctacccggacactgatgtcatcctcatgtgcttctccatcgacagccctgacagcctggaaaacattcctgagaagtggaccccagaggtgaagcacttctgccccaacgtgcccatcatcctggtggggaataagaaggacctgaggcaagacgagcacaccaggagagagctggccaagatgaagcaggagcccgttcggtctgaggaaggccgggacatggcgaaccggatcagtgcctttggctaccttgagtgctcagccaagaccaaggagggagtgcgggaggtgtttgagatggccactccggcctggcctccaggtccgcaagaacaagcgtcggaggggctgtcccattctctgaaatccccaaggcctttcctacatgcccccctcccttcacagggggtacagaaaataatccccctacaaccccagcctccttgagggctccatgctgaaggctcccattttcagttccctcctgccaggactgcattgnttctagccccgagtggtggcacggggcctccctcccagcgctctgggagccacgcctatgccctgcccttcctcggggcccctggggatcttgcccccttttgacttccccaaaggatgggtccccacca

SEQ ID NO: 254526 - DNA, 855 bp, Homo Sapiens
gggcggcaccggccgcgcagctggaggcggcggagcggaagccccaccatggctgcaatccgaaagaagctggtgatcgttggggatggtgcctgtgggaagacctgcctcctcatcgtcttcagcaaggatcagtttccggaggtctacgtccctactgtctttgagaactatattgcggacattgaggtggacggcaagcaggtggagctggctctgtgggacacagcagggcaggaagactatgatcgactgcggcctctctcctacccggacactgatgtcatcctcatgtgcttctccatcgacagccctgacagcctggaaaacattcctgagaagtggaccccagaggtgaagcacttctgccccaacgtgcccatcatcctggtggggaataagaaggacctgaggcaagacgagcacaccaggagagagctggccaagatgaagcaggagcccgttcggtctgaggaaggccgggacatggcgaaccggatcagtgcctttggctaccttgagtgctcagccaagaccaaggagggagtgcgggaggtgttttgagatggccaactcggggctgggcctccagggtccgcaagaacaagcgtccggaaggcgctttccccacttctcttgagattccccaagggcctgttcctaacatggcccccctcccctttcacagggggggtacagaaacatttttcccccccctaacaaacccccaggccctccctggaggggcttcccaatgacttgaaaggggctccccaatttttcaagagttccccctcctctgcccccgcaggaactggcaattggtgtttttctcaaaccccccccaaaggtggt

SEQ ID NO: 254527 - DNA, 630 bp, Homo Sapiens
agggagggggcatgtaggaaaggccttggggatctcagagaatgggacagcccctccgacgcttgttcttgcggacctggaggccagcccgagtggccatctcaaacacctcccgcactccctccttggtcttggctgagcactcaaggtagccaaaggcactgatccggttcgccatgtcccggccttcctcagaccgaacgggctcctgagaagacataagatgaggggtcaaaggaagctgttgactacatgaacctctcctgcctcacccataagtgtagcagctggaacaaatgcctcctcctccagccctgacccagaaagcgcccaggccccagctaccctgggcagcttcgtggccagggatccaaaaatccctccagtctactccctccattcccatgcagccccacctcctcccacacacagcccctggttctcttgccctgaatgagcgtctcccacctcctgacctgctctgcctccatcctcactctgatggcacagcctgggtatcccaagtgaaacataagctgtctccccgagggcagattttcttaatcatcttaatagtcccaattctgaacggaatggacaattaactggaataaataaaaatgccaagtg

SEQ ID NO: 254528 - DNA, 728 bp, Homo Sapiens
ggtattccgagatctgtcacacactcataccaatcacgaagataaattacaggtgaagaatgttatctaccatgcagtgaaagatgcagctgctatgctgaaagccagtgaatccagttttggcaaaccttaatctccctgcacattggaaatgaattacaggctgttgtgaaactcttcaggcaggattcctgtggactctgagattcatgtgacctcatcttcttttttaaactgtacccaacttgtgagggtactctgtctaatgtatatttctagagtgtacagacagtaaatgtgtatatgtagtaactatttacagaacatgcatccttaaactgtgacttctcacctagtgcagaactcttaccaggctgtaaaagcaaaacctcgtatcagctctggaacaatacctgcagttattcttcagctgtgtggacaacttagatagggtttataactattaggaatcactgcacagcttatttgggttgtgttttgtgtctgagtcccctccctcataccttagggtccagaagagcaatggaggaagtgacagctaatgttgcagttcttattgtatggcataggactggcattatatagcagaaatcaactactgtacaatttcttggggttaaccatctttagttaaatggaattttaatttaaatgacgctttgctaattttaagtgttaagcattttgcattaaaatattcatataat

SEQ ID NO: 254529 - DNA, 357 bp, Homo Sapiens
ccaatagccttcatcgggcctttgcaggtctggatcatctgcattcgactgtccttgtcgagcaattgcatcatatttaatccttcagaatccacctgaatggccagcgcattcgacatttttttctttcgtcccatatccagtggatactgggccacatggatctctggaaaagcacctccatctccaaaatcctctaataaccgaggtatccagcctttccggtatccgtacggggaaggttctcttcgggaggagaccagtgaggtctgccgtgatctctgggatcttgccttttcttcagcctcaagctggtcctgagatagctgagtaggtgcaggtaaaaagctggtgagc

SEQ ID NO: 254530 - DNA, 2117 bp, Homo Sapiens
  misc_feature (264)..(264): n is a, c, g, or t
  misc_feature (632)..(632): n is a, c, g, or t
  misc_feature (644)..(644): n is a, c, g, or t
  misc_feature (677)..(677): n is a, c, g, or t
  misc_feature (679)..(679): n is a, c, g, or t
  misc_feature (686)..(686): n is a, c, g, or t
  misc_feature (689)..(689): n is a, c, g, or t
  misc_feature (692)..(692): n is a, c, g, or t
  misc_feature (695)..(695): n is a, c, g, or t
  misc_feature (697)..(697): n is a, c, g, or t
  misc_feature (701)..(701): n is a, c, g, or t
  misc_feature (703)..(704): n is a, c, g, or t
  misc_feature (708)..(708): n is a, c, g, or t
  misc_feature (718)..(718): n is a, c, g, or t
  misc_feature (723)..(723): n is a, c, g, or t
  misc_feature (763)..(763): n is a, c, g, or t
  misc_feature (766)..(766): n is a, c, g, or t
  misc_feature (788)..(788): n is a, c, g, or t
  misc_feature (791)..(791): n is a, c, g, or t
  misc_feature (794)..(794): n is a, c, g, or t
  misc_feature (803)..(803): n is a, c, g, or t
  misc_feature (808)..(808): n is a, c, g, or t
  misc_feature (816)..(816): n is a, c, g, or t
  misc_feature (820)..(820): n is a, c, g, or t
  misc_feature (823)..(823): n is a, c, g, or t
  misc_feature (827)..(827): n is a, c, g, or t
  misc_feature (830)..(830): n is a, c, g, or t
  misc_feature (851)..(851): n is a, c, g, or t
  misc_feature (867)..(867): n is a, c, g, or t
cgctggaagaagcggaagaagatggcgctcaccagctttttacctgcacctactcagctatctcaggaccagcttgaggctgaagaaaaggcaagatcccagagatcacggcagacctcactggtctcctcccgaagagaacctcccccgtacggataccggaaaggctggatacctcggttattagaggattttggagatggaggtgcttttccagagatccatgtggcccagtatccactggatatgggacgaaagaaaaanatgtcgaatgcgctggccattcaggtggattctgaaggaaaaattaaatatgatgcaattgctcgacaaggacagtcaaaagacaaggtcatttatagcaaatacactgacctggttccaaaggaggttatgaatgcagatgatccagacctgcaaaggcccgatgaagaagctattaaagagataacagaaaagacaagagtagccttagaaaaatctgtatcacagaaggtcgccgcagccatgccagttcgagcagctgacaaattggctcctgctcagtatatccgatacacaccatctcagcaaggagtggcattcaactctggagctaaacagagggttattcggatggtagaaatgcaganaggtccaatggngcctccaaggttcaagattaataagaaaattananggggaanaanttntantnctgngnntgtnatgcattctnctagncgaaagatgactgtaaaggaacaacaagagtggaagattnctncttgtatttctaactggaaaantgnacngggttatanaattncattaganaaangtntggntgntgatggaagaggactaaaganagtacacataaatganattttcgacaaattggcagaagccctctacattgctgatcggaaggcacgtgaagctgtggaaatgcgtgcacaagtagagagaaaaatggctcagaaagaaaaggaaaaacatgaagagaaacttagagaaatggcccagaaagccagggaaagaagagctgggatcaaaactcatgtggaaaaagaggatggggaggcacgtgagagggatgaaatccggcatgacaggcgaaaagagagacagcatgaccggaatctttccagggcagctcctgataagaggtcgaaacttcagagaaatgaaaatcgggatatcagtgaagttattgctctcggtgttcctaatcctcggacttccaatgaagttcagtatgaccaaaggctcttcaaccaatccaagggtatggacagtggatttgcaggtggagaagatgaaatttataatgtttatgatcaagcctggagaggtggtaaagatatggcccagagtatttataggcccagtaaaaatctggacaaggacatgtatggtgatgacctagaagccagaataaagaccaacagatttgttcccgacaaggagttttctggttcagaccgtagacagagaggccgagaaggaccagttcagtttgaggaagatccttttggtttggacaagtttttggaagaagccaaacagcatggtggctctaaaagaccctcagatagcagccgccccaaggaacacgagcatgaaggcaagaagaggaggaaggaataggcacaggtctctccaaagtgaatgaactcttacccataaccctaatgatgcaagtcatatgggggaacactttgtaaatggtcaggataaaaaccaaatctgggtgccagatcccagcactactttttattactggagaaatgggggggatagaaaattctactttgaattatttagttttttttaaagagtgggttgtgtttgtgcttctcccacctttcagcatttatagaacatgctgccccacatacaaagtcaagaccacttacttttatgtgacactagtagtttggggttaatgttttgtgtaagaacagctgcatatgagtaaagttaccccaaccacagtgaggaggaagatgttcacatactggaactgtcctgccaaataaattttgcccctattgtgctctgttttaatttggagtgggcaaagtaacctcttgcttggtgcaactatttgtttcaaataaaaacatttagac

SEQ ID NO: 254531 - DNA, 1700 bp, Homo Sapiens
  misc_feature (1655)..(1655): n is a, c, g, or t
gggggaagaagcggaagaagatggcgctcaccagctttttacctgcacctactcagctatctcaggaccagcttgaggctgaagaaaaggcaagatcccagagatcacggcagacctcactggtctcctcccgaagagaacctcccccgtacggataccggaaaggctggatacctcggttattagaggattttggagatggaggtgcttttccagagatccatgtggcccagtatccactggatatgggacgaaagaaaaaaatgtcgaatgcgctggccattcaggtggattctgaaggaaaaattaaatatgatgcaattgctcgacaaggacagtcaaaagacaaggtcatttatagcaaatacactgacctggttccaaaggaggttatgaatgcagatgatccagacctgcaaaggcccgatgaagaagctattaaagagataacagaaaagacaagagtagccttagaaaaatctgtatcacagaaggtcgccgcagccatgccagttcgagcagctgacaaattggctcctgctcagtatatccgatacacaccatctcagcaaggagtggcattcaactctggagctaaacagagggttattcggatggtagaaatgcagaaagatccaatggagcctccaaggttcaagattaataagaaaattccccggggaccaccttctcctcctgcgcctgtcatgcattctcctagccgaaagatgactgtaaaggaacaacaagagtggaagattcctccttgtatttctaactggaaaaatgcaaagggttatacaattccattagacaaacgtctggctgctgatggaagaggactacagacagtacacataaatgaaaatttcgccaaattggcagaagccctctacattgctgatcggaaggctcgtgaagctgtggaaatgcgtgcccaagtagagagaaaaatggctcagaaagaaaaggaaaaacatgaagagaaacttagagaaatggcccagaaagccagggaaagaagagctgggatcaaaactcatgtggaaaaagaggatggggaggcacgtgagagggatgaaatccggcatgacaggcgaaaagagagacagcatgaccggaatctttccagggcagctcctgataagaggtcgaaacttcagagaaatgaaaatcgggatatcagtgaagttattgctctcggtgttcctaatcctcggacttccaatgaagttcagtatgaccaaaggctcttcaaccaatccaagggtatggaccagtggatttgcaggtggagaaggatgacaatttataatgtttatgatcaagcctggcagaggtggttaaagatatggcccacaagtatttattaggcccagtaaaaatctggacaaggacatgtatggtgatgacctagaagccagaataaagaccaacaggtgccaagccatacaactcaatttcagtgtttacactggtgaaagcaaagtagttcatagttttttctccttttccttagatttgttcccgaacaggagttttctggttcagaccgtagacagagagggcgagaaggaccagttcagtttgaagaaagatccttttggtttggacaagttttttggaagaaagccaacagcatgggtggctctaanagaccctcagatagcagccgcccccaagaaacacgagcatgaagg

SEQ ID NO: 254532 - DNA, 839 bp, Homo Sapiens; identical to SEQ ID NO: 15057

SEQ ID NO: 254533 - DNA, 443 bp, Homo Sapiens; identical to SEQ ID NO: 15245

SEQ ID NO: 254534 - DNA, 482 bp, Homo Sapiens
  misc_feature (19)..(19): n is a, c, g, or t
  misc_feature (52)..(52): n is a, c, g, or t
aaacctcagaacctggggncccttaataggctcctaaccccaggtgccacanttgtgtccttgggaaccattacggaaacccagagccctcctagaagtccccagtgacttgttcccatggcacacggcggtggctgaactcagcagggagtgaagctccttttcagaagggctctctagtcatccttcatatgaaaaggttacccgtttggaatgtgtacccactgggtttgactcaggtatttagctaatgaattggacattcaggggactttggactttctgaatggttagagaaatttagaaaacaaatgaatttagctttcacttcatcagttccactttaaggaaattacaggcatcatcacagtacaatgcaaagagcaagtaagttacagtaaaggtccaggttcacactagaaggccaaaacttccgcaaacatctgatgatgaaaagaaagatttttgagactgcagcctat

SEQ ID NO: 254535 - DNA, 1279 bp, Homo Sapiens
  misc_feature (907)..(915): n is a, c, g, or t
  misc_feature (1217)..(1217): n is a, c, g, or t
accagcaacagcctcttgggatgccctgagttgcttcccatttcctctttctagccgtccttttctagtgtgtgctcactcttcctaggaacttttaagacttcttggtacctatgaacataggtcctcccctcaccccaactctaggtttccaggcctcacagccaagctgaagcttggagaaaactctgcattcccatgagggcaaaggcagctgccctccctgaccctatagccccaggcctcatggggggtatgtggggaagggatggggtatccccatggatgctgggatgaggacagaggaagacctgatggggtctcctattccagggaataagccaaattaacactaaaaacggatcaaagctcccacgccagtccactagggccccagtagttgacagccttgctcctctcccaagttctccttcagaacctagttgctttattcttccagctaccacttgggcacttcacagccagcctagggtcttcggcacctccaagagctgaatctccctccaacccttcttgcctactcctcactgccagctgggacctaggctcagtcctgtgtggtgcccatgatccttctggtgggggaagagtttaagttatagggcatttggctcaaattttaaaaggccttttgtttacctatatttctggaggctcctgtattctagaacccaatctctcacctgcttggttgcaaggctcatatttttttgtacctttcctatagattctgtaggcatttgagtgtgggcaatattttaaatgtgtatagatttctaagaaccaacactactcagtctcctgctagtctgactcctgaagcatcagcccttgtcatactgtattgactgtgtacgtgcctttcaccttgagcatgcttcaggannnnnnnnnaaaccacagaacttgaatacatgagggaaccagagttcaaagtcctatgcaaccttaggagggggttagagagtctgttttgattgatgttttctgaggccctagaggagtttgtatcaatttgtgagtattaatgtcagtactaccagcactttgccaaaactgtcagagggacccgtttctagagtgagtcccagttacatcaaacagtgacttccagttattccccagtaagtctgagtggttccttcaaagctggggtgtctttccagcctttgccagtctaggccccagcagggaanccgtgttatggaatggcagttttggtgcttgttttagggtatggcccggttcccccagcccc

SEQ ID NO: 254536 - DNA, 632 bp, Homo Sapiens
  misc_feature (66)..(66): n is a, c, g, or t
ggagtttgtatcaatttgtgagtattaatgtcagtactaccagcactttgccaaaactgtcagagngacccgtttctagagtgagtcccagttacatcaaacagtgacttccagttattccccagtaagtctgagtggttccttcaagctgggtgtctttccagcctttcccagtctagccccagcagggccaccgtgtatgaatgccagtttggtgctgttttagagtatgcctgctccccagcccccctgcctggaaccctctgagcaacttgctctgacctataatgtcttaggtgcaacacggacccccaccagagctcttggatacccccctagatcccatgtggctttatgtgaggggactgaatgcagacacaccatagcccccttctactactttccctctcgccctgccacctagttccacatggaaccaacaagttgagtgcatccctgttgggtgttttgtgttgagactggctgaaatgaggagactttgaccatgtgacgtgtcaacagactcaaggagacaaccacctcaactgggtcatgtggcatgcctgtgtatgtgtgtaacagaattctgattgttagactgtaatgctattcctctatgggagaaaaaaatt

SEQ ID NO: 254537 - DNA, 376 bp, Homo Sapiens
cgagaaaggtacctaataagaggccacaggagtggaagatgaggaaaagagctagacaggcctcactcctcacatgttcaatattctctcataaaaatagttattctcttaagttattcacttctacaacttgaaaataatgaataaataagtatcagtaaacagacacattggagtccacctagacataagtatacctcttataggtgaaactgtcataagacagatcattagtcataaaaacatgttgactataaaacaactacttccacatcaactggtactcagcagaataaatacatgtccaccaaatcagtcttcctcagcgtgggaggacagaaagccagaagtgaaataaaagaagtaaagaagtgat

SEQ ID NO: 254538 - DNA, 1001 bp, Homo Sapiens
  misc_feature (817)..(817): n is a, c, g, or t
  misc_feature (970)..(970): n is a, c, g, or t
caccccctgcagtacatcggtcatgacagaaccatgcaagatattgtttacaaattggtaccaggcctccaagaagcggaaatgagaaagcagagggagttctatcacaaattgggcatggaggtgccgggagacatcaagggggagacctgctctgcaaaacagcacttagattcccatcggaatggtgaaaccaaagcagacgacagttcaaacaaagaggccgcggaggagaagccggaggaggacaacgactaccaccgcagcgacgagcaggtgagcatctgcctggagtgtaacagcagcaaactgcgcgggctgaagcggaagtggatccgctgctcagcccaggcgaccgtcttgcatctgaagaagttcatcgccaaaaaactcaacctttcatactttaacgagctggacattttatgcaacgaggagatcctgggcaaggaccacacactcaagttcgtggttgtcactaggtggagattcaagaaagcgccgctcctgctgcactacagacccaagatggacttgctgtgaatggtgccacacagagcccacagactgggccctcgcacccttgggtgctcccggccgccgcgcttaagaacattgcctctgggtgtcatgtggaccagacttctgaatagagaatatttataactcttgtatgagagagaattcacactcaacaagacactaccagcaccacgtttacagaggatgaaaacacttcacagtctcccagagccgatcgtcctctcccccgccccaccccgtgcttcagccttgcagggagagtgatgctccaggnaacacggttctgagtcaccttctgacacgagctccctctgcttgctttccagggcttgaaaatctgaattcacttcagtttagtttatgaattttaggtttcatgataagcctcaattgtagttggacttttattggaatccttcctaagttnttggaaaaaatgtcttttcatgggggaatgg

SEQ ID NO: 254539 - DNA, 414 bp, Homo Sapiens
ggcgtgtacctcatcgacgccaccacggtgaccgagtgtctgcacaccttctgcaggagctgcctggtgaagtacctggaggagaacaacacctgccccacctgcaggattgtgatccaccagagccaccccctgcagtacatcggtcatgacagaaccatgcaagatattgtttacaaattggtaccaggcctctgcttgcttgccaggtcttgaaaatcctgaattcacttcagtttagtttatgaattttaggtttcatgataagcctcaattgtagttggacttttattgaatccttcctaagttattgaaaaaatgtcttttcatggtgaatgacaatatttatgttgcctttagcttcttgaagatttagaagttatataaaaaattaatttaaaagcaaactaaaaa

SEQ ID NO: 254540 - DNA, 1631 bp, Homo Sapiens
cccgggatctctgcccctctacctcagcacagaatcgccccgggtcctactacagaatcaatccttgaacactgcctccacgtcgccggctcaatctgggcgagaacccagacttccaccgcagccccgcaatctgcagacctcagcggcagcgcaggtggcagacctgcctcctttgcctgtgagtcatggcagctcccatgaatggccaagtgtgtgtggtgactggtgcctccaggggtattggccgtggcattgccttgcagctctgcaaagcaggcgccacagtttacatcactggccgccatctggacacccttcgcgttgttgctcaggaggcacaatccctcgggggccaatgtgtgcctgtggtgtgcgattcaagccaggagagtgaagtgcgaacctgtttgagcaagtggatcgggaacagcaagggcgtctagatgtgctggtcaacaatgcttatgcaggggtccagacgatcctgaacaccaggaataaggcattctgggaaacccctgcctccatgtgggatgatatcaacaacgtcggactcaggaagcctgcagtatatgttcaatgtcccctatggtgtgggcaaagctgcggtgaggacccagtggcataggagctgaggaggtaaaagacagtgatgttacctatagctcaggaggtacaatccccagtggtcagaatggtaaggctggctcctctcagctcctcctctgcctcatccatggacagttcctttgcttgtgctcctcttggttggctaaagtaggcatcacactggggagcgtgggcagctgagaccttggggctcctgggaaggacagggtgggtggagcattcacagtagaagcagagagggcagggcaggaaagtgacatggctaggtggctcttaccctgccttccgcctctccacagtgtgacaagctggctgctgactgtgcccacgagctgcggcgccatggggtcagctgtgtgtctctgtggccggggattgtgcagacagaactgctgaaggagcatatggcaaaggaggaggtcctgcaggatcctgtgttgaagcagttcaaatcagccttctcatctgcggaaaccacagaattgagtggcaaatgtgtggtggctttggcaacagatcccaatatcctgagcctgagtggtaaggtgctgccatcctgtgaccttgctcgacgctatggccttcgggatgtggacggccgccccgtccaagactatttgtctttgagctctgttctctcacacgtgtccggcctgggctggctggcctcctacctgccctccttcctccgtgtgcccaagtggattattgccctctacactagcaagttctaaccctcctggtctgacactacgtctctgcttgtcttctcatttggacttggtggttcgtcctgtctcagtgaaacagcagcctttcttgtttacccatacccttgatatgaagagaagccctctgctgtgtgtccgtggtgagttctggggtgcgcctaggtcccttctttgtgccttggttttccttgtccttctttttactttttgccttagtattgaaaaatgctcttggagctaataaaagtctcatttctctttcaaaat

SEQ ID NO: 254541 - DNA, 857 bp, Homo Sapiens
gggctcagcacagaatcgccccgggtcctactacagaatcaatccttgaacactgcctccacgtcgccggctcaatctgggcgagaacccagacttccaccgcagccccgcaatctgcagacctcagcggcagcgcaggtggcagacctgcctcctttgcctgtgagtcatggcagctcccatgaatggccaagtgtgtgtggtgactggtgcctccaggggtattggccgtggcattgccttgcagctctgcaaagcaggcgccacagtttacatcactggccgccatctggacacccttcgcgttgttgctcaggaggcacaatccctcgggggccaatgtgtgcctgtggtgtgcgattcaagccaggagagtgaagtgcgaagcctgtttgagcaagtggatcgggaacagcaagggcgtctagatgtgctggtcaacaatgcttatgcaggggtccagacgatcctgaacaccaggaataaggcattctgggaaacccctgcctccatgtgggatgatatcaacaacgtcggactcagaggccactacttttgctcagtgtatggggcacggctgatggtaccagctggccaggggctcatcgtggtcatctcctccccaggaagcctgcagtatatgttcaatgtcccctatggtgtgggcaaaagctgcgtgtgacaagctggctgctgactggtgcccacgagctgcggcgccatgggggtcagctgtgtgtctctgtggccggggattgtgcagacagaactgctgaaggagcatatggcaaaggagggaggtcctgcaggatcctggggttgaagcagttcaaattcagcttctcatctgcggaaac

SEQ ID NO: 254542 - DNA, 1866 bp, Homo Sapiens
  misc_feature (60)..(60): n is a, c, g, or t
  misc_feature (309)..(309): n is a, c, g, or t
  misc_feature (1707)..(1812): n is a, c, g, or t
tccggggaaattctcgcgggtgaaagagaatgccccggtgagagtgcacctccaagaaanccgcccatctcgggaattgtttttacaagaacggctcgggatgaaccgcccggggcgctttttttatttgggggggaattccaaaccccttaatcctgtgcccaggatttctctttgggaaacaaggttataaaccatgttccatttaccttactgggcccaccgcggccaaaacaaagggtctaggaagcttctcgaaggccgcaggcggccccacatttatacaatctcggtgtgattggtttcccngggtgaaagtgcatacactttattatgtacattgttggaaagggaggccacctggagaaacttctgcactggcactgtgttcctagagctccttctatgcgtccctcccaagtgatttaatttcagctgattggactacgaattcacaaggcagaaaagtcaaggtcatttggtatctggagacaggagaactcaaggaaccaaaagtactgttactctaagtctcagaaaaggttttcagtcaggatatggaggctcctggtcctcaagggtgaaccacttcacacaacagataaaaccatcattttaaaattcaaaatgtaagtgcaacttgagtttaagttgcactgctccatacctctaataaactcagctaggagccaggatacatggtagttcaaggcttcctaaaataagcttgaaattggggtacaggggaagggacatccattggctggatggacagagtggttgagctaaagagagctataaaggctcgtgctgggaaagaaagctgttatgcttagacttctctaggtgaactcagagtctcaaagaggaaatgttacaaatgtcacccgccagctttctggccagtaagcagaatgccaggttgctcagattcacagacatttgcaaaacagaagatgtctcctaatattatagactaagaatttgttgtccagaggagctgaccagttcctctttcagcatcaatatacatgatagaagaatgactaggtaaatttaaaaagacctacatctatatagatattgtaagtttgacagtatctgcccaagatcattagacactatatagtcaatatactgtgaattccttatactatgtaatgaatgggtttgtaatcaacatatttcacagtgtaccacagttaacagcatgcagatagtaaaatataatggtttcctgaagttatctcttaaaaaagtattttagtccttcagctattcaaatagatatataacaattgcatatagaacgtagagaaaattttattaaaaaattaaaactatttaaaacctgatatatgaaaataggcaacagtgagaaaaaagcacttttgtgacaaatatttagctggtttgaaagacagaacaaggaggaatcatttactcataaagaaggctcaaataagttaaaacatggatgtatttttaaaatgaccactctagtagtgaatttaaaagtcttttaagggttagagtaatctttttcattagtcttggctatttcctctagttctgacaagtacaggcaagaaaatggctactctcaagtaaggattattctgaaacacggtctggatttagaaaataaatgaacattagggaaatttccttaattaagactctccaaaccaggtgtggtagctcatnnnnnnnnnnnnnnnnnnnnnnnnnnnnnnnnnnnnnnnnnnnnnnnnnnnnnnnnnnnnnnnnnnnnnnnnnnnnnnnnnnnnnnnnnnnnnnnnnnnnnnnnnncaataataataatacaaaaattagctgggcatggtggcatgagcctgtaatccc

SEQ ID NO: 254543 - DNA, 477 bp, Homo Sapiens
ccagcccaagggatgtcccccttccccctgtaccccccaatttccaagccttattttagggaagcccttgaacctacccatgtacccccggctccctagctgagtttattagaggtatggagcagtgcaaccttaaactcaagttgcacttacattttgaattttaaaatgatggttttatctgttgtgtgaagtggttcacccttgaggacccaggagcctccatatcctgactgaaaaccttttctgagacttagagtaacagtacttttggttccttgagttctcctgtctccagataccaaatgaccttgacttttctgccttgtgaattcgtagtccaatcagctgaaattaaatcacttgggagggacgcatagaaggagctctaggaacacagtgccagtgcagaagtttctccaggtggcctccctttccaacaatgtacataataaagtgtatgcactttcactaata

SEQ ID NO: 254544 - DNA, 467 bp, Homo Sapiens
tttccccctgtaccccccaatttccaagccttaattttaggaaggcccttgaactaacccatgtatccctggctccctaagctggagtttaatttagaggttatggagccagtgccaacttaaaactccaagttgccacttacattttgaaattttaaaatgatggttttatctgttgtgtgaagtggttcacccttgaggaccaggagcctccatatcctgactgaaaaccttttctgagacttagagtaacagtacttttggttccttgagttctcctgtctccagataccaaatgaccttgacttttctgccttgtgaattcgtagtccaatcagctgaaattaaatcacttgggagggacgcatagaaggagctctaggaacacagtgccagtgcagaagtttctccaggtggcctccctttccaacaatgtacataataaagtgtatgcactttcactaata

SEQ ID NO: 254545 - DNA, 1364 bp, Homo Sapiens
agtgttttcagtattttattaaaaaatgagctggcaagaggacaagtgatccagtattatggattttatacaagttatgtcttctttcaggcttatccagaatcagatcacagctaaggggactgcccagctggcagatgcgttacagagcaacactggcataacagagatttgcctaaatggaaacctgataaaaccagaggaggccaaagtctatgaagatgagaagcggattatctgtttctgagaggatgctttcctgttcatggggtttttgccctggagcctcagcagcaaatgccactctgggcagtcttttgtgtcagtgtcttaaaggggcctgcgcaggcgggactatcaggagtccactgcctccatgatgcaagccagcttcctgtgcagaaggtctggtcggcaaactccctaagtacccgctacaattctgcagaaaaagaatgtgtcttgcgagctgttgtagttacagtaaatacactgtgaagagactttattgcctattataattatttttatctgaagctagaggaataaagctgtgagcaaacagaggaggccagcctcacctcattccaacacctgccatagggaccaacgggagcgagttggtcaccgctcttttcattgaagagttgaggatgtggcacaaagttggtgccaagcttcttgaataaaacgtgtttgatggattagtattatacctgaaatattttcttccttctcaggcactttcccatgtattggatactggtcccacttcacagctggagacaccggagtatgtgcagtgtgggatttgactcctccaaggttttgtggaaagttaatgtcaaggaaaggatgcaccacgggcttttaattttaatcttggagtctcactgtctgctggcaaagatagagaatgccctcagctcttagctggtctaagaatgacgatgccttcaaaatgctgcttccactcagggcttctcctctgctaggctaccctcctctagaaggctgagtaccatgggctacagtgtctggccttgggaagaagtgattctgtccctccaaagaaatagggcatggcttgcccctgtggccctggcatccaaatggctgcttttgtctcccttacctcgtgaagaggggaagtctcttcctgcctcccaagcagctgaagggtgactaaacgggcgccaagactcaggggatcggctgggaactgggccagcagagcatgttggacaccccccaccatggtgggcttgtggtggctgctccatgagggtgggggtgatactactagatcacttgtcctcttgccagctcatttgttaataaaatactgaaaacactcttaaaaa

SEQ ID NO: 254546 - DNA, 568 bp, Homo Sapiens
cagagatattccaggatcttttagctttggtgcggtctcctggagacagtgttattcgccaacagtgtgttgaatatgtcacatccattttgcagtctctctgtgatcaggacattgcacttatcttaccaagctcttctgaaggttctatttctgaactggagcagctctccaattctctaccaaataaagaattgatgacctcaatctgtgactgtctgttggctacgctagctaactctgagagcagttacaactgtttactgacatgtgtcagaacaatgatgtttcttgcagagcatgattatggattatttcatttaaaaagttctttaaggaaaaacagtagtgctctgcatagtttactgaaacgagtggtcagcacatttagtaaggacacaggagagcttgcatcttcatttttagaatttatgagacaaattcttaactctgacacaattggatgctgtggagatgataatggtctcatggaagtagagggagctcatacatcacggacgatgagtattaatgctgcagagttaaaacagcttctacaaagcaaaga

SEQ ID NO: 254547 - DNA, 381 bp, Homo Sapiens
  misc_feature (361)..(361): n is a, c, g, or t
ggccgccctgcgtgtcctgctgtcctgcgcccgcggcccgctgaggcccccggttcgctgtcccgcctggcgtcccttcgcctcgggtgctaactttgagtacatcatcgcagaactcaatgcactttgcgatggcctgattgacgagctcaaccaggccctgaagatcttcgaggaggacccggccgtgggggccattgtcctcaccggcggggataaggcctttgcagctggagctgatatcaaggtgcagaacctgagtttccaggactgttactccagcaagttcttgaagcactgggaccacctcacccaggtcaagaagccagtcatcgctgctgtctggcttgcctttggcggnggctgtgagcttgccatgtg

SEQ ID NO: 254548 - DNA, 1321 bp, Homo Sapiens
gccctgaaaggctataggcgagggggcggctccgcggggccgggcgaggagtccagagagccatggccgccctgcgtgtcctgctgtcctgcgcccgcggcccgctgaggcccccggttcgctgtcccgcctggcgtcccttcgcctcgggtgctaactttgagtacatcatcgcagaaaaaagagggaagaataacaccgtggggttgatccaactgaaccgccccaaggccctcaatgcactttgcgatggcctgattgacgagctcaaccaggccctgaagaccttcgaggaggacccggccgtgggggccattgtcctcaccggcggggataaggcctttgcagctggagctgatatcaaggaaatgcagaacctgagtttccaggactgttactccagcaagttcttgaagcactgggaccacctcacccaggtcaagaagccagtcatcgctgctgtcaatggctatgcctttggcgggggctgtgagcttgccatgatgtgtgatatcatctatgccggtgagaaggcccagtttgcacagccggagatcttaataggaaccatcccaggtgcgggcggcacccagagactcacccgtgctgttgggaagtcgctggcgatggagatggtcctcaccggtgaccggatctcagcccaggacgccaagcaagcaggtcttgtcagcaagatttgtcctgttgagacactggtggaagaagccatccagtgtgcagaaaaaattgccagcaattctaaaattgtagtagcgatggccaaagaatcagtgaatgcagcttttgaaatgacattaacagaaggaagtaagttggagaagaaactcttttattcaacctttgccactgatgaccggaaagaagggatgaccgcgtttgtggaaaagagaaaggccaacttcaaagaccagtgagaaccagctgcccctgcttcacacctctgcttggagaggacaagtgcagcctgtcagttttagaagcaagtaaatcatcctcttttcaagagcagtgtccgtggtgtgcagttcctctccaattgctgcgtggtcgtggcccgacctctcacggcatgacagccttcgtcacccagcctgtgagggtcctgactggagcaccttctaaatctaagattctgctgaggagcccccgctggtccctctgggcatgctgtgctcggacggaaagcggggcctgtgggtccttgtgtccctgccgctgaagaatggggctgctctgagggaaacgctgtctgctgccttcatacagatgctgattaaagtgatagcgattcagattacaa

SEQ ID NO: 254549 - DNA, 409 bp, Homo Sapiens
  misc_feature (350)..(350): n is a, c, g, or t
  misc_feature (368)..(368): n is a, c, g, or t
  misc_feature (384)..(384): n is a, c, g, or t
  misc_feature (395)..(395): n is a, c, g, or t
gtccagagagccatggccgccctggtgtcctgctgtcctgcgtccgcggcccgctgaggccccggttcgctgtcccgcctggcgtcccttcgcctcgggtgctaactttgagtacatcatcgcagaaaaaagagggaagaataacaccgtggggttgatccaactgaaccgccccaaggccctcaatgcactttgcgatggcctgattgacgagctcaaccaggccctgaagatcttcgaggaggacccggccgtgggggcatttgtcctcaccggcggggataaggcctttgcagctgggagctgatatcaaggaaatgcagaacctgagtttccagggattttaattncagcaagttttttgaagnattggggaccaacttnaacccagggtnaaagaaggccagtt

SEQ ID NO: 254550 - DNA, 839 bp, Homo Sapiens
  misc_feature (23)..(23): n is a, c, g, or t
  misc_feature (37)..(37): n is a, c, g, or t
  misc_feature (134)..(134): n is a, c, g, or t
  misc_feature (136)..(136): n is a, c, g, or t
  misc_feature (165)..(165): n is a, c, g, or t
  misc_feature (167)..(167): n is a, c, g, or t
  misc_feature (214)..(214): n is a, c, g, or t
  misc_feature (223)..(223): n is a, c, g, or t
  misc_feature (234)..(234): n is a, c, g, or t
  misc_feature (392)..(392): n is a, c, g, or t
accgaatccaaggtggccaggcnatggaaaaccaacnaccccagggctctggggtggcaacaggggtggaagcagagccacacatggatgtacccaggagtctgcccctcaatagaaacatctgcaaggccctngnggcccaggggtccctggccactgtcaggnancttcggctgcttctaccaacctggagccaaggcagggggctcagctngtcctctgnggagtgaacgncctgccccagcccccatcacctcgaagctgtgactcagaaagaccagcagagcccttgggcaaggcacacagggatgtcagggtccacctatccctcaagaaagttcctacgtggcttaaaagaattaagccagaggtagcctgccttcggcacctancctgactacagagctttatctttggatcttctcgtaagcagagtctcatctgaaaaggcctatgtcctcctcggtttactgtgctccgagacctttagaatttgcctaattatttccaaggactggagccgcggtgccgcacgctgggtcgccctgccgcctgtcgcgtctcgccgtgcggggtcacttgaggatgtgtgcagagagggccgcggaaggtcgcagagggttctcgcgggtgccccgccctggtaatttcatctgccgtcagctctctccagaggctgcgggatctgggagcaccgttcgctttggctttctgtgtgtgcagggcgtctcactgaatgccaaagccagggagtcggagtccagggatcggggaagaggcggtggggtcagcctggtgctgagccctggggtcagcacagcgcaggggtggaaggtggc

SEQ ID NO: 254551 - DNA, 411 bp, Homo Sapiens
acgactgttctatgagttcacaattgagacacctccatctcgtctcagtccttcgtttgtacgggtcactgttgccaggcaagtacctccctcctcattagtgacattaactgcatgcatccttacagctaatccgatatgggtgcatctaagtactacgcctaatcacaatgtaaaaacatattaatcctttaatgctacagagactttatctataaattcttagtccattacgagtgcgataatgatatataccttatccacagccagtgagatgtcttctaatcgagggctatcgaccaaaagaatggcatataaataacagaagcagtactgcccactatgtatatacatgaactgaacttagactgaattcacagcctaaattaagcagatgtaactcacactttc

SEQ ID NO: 254552 - DNA, 404 bp, Homo Sapiens
cacagcagcaccgtgggacagcgtgatatgagggcagacaagaatctcatatgaaggaagaggacaggggcttgtggacccacaggggctctgggacaggcaatgtgcaagcagatgaagcctaagccgcaggggctgggccagcactgctctccagtgcaggagaggcatggtgtggacagggctggccacacagatctgacccagcaagttcctggcccctcaggcctgggtcggcttcctgtgggtgctcatcttggagccaagacctggctgtgggaatcatggtgctcaggcttcagagaggtagacacacaggcactcgattcgtcaggcggtggccatcagtcaatgtgaccggccggggccagcaaccagggctcagtgtacacctgccactgctg

SEQ ID NO: 254553 - DNA, 420 bp, Homo Sapiens
aaactttgctcctacctactgcgaatattagtgatgtggacccagcccatgcccagcactaccaggatgttttataccatgctaaatcacagaaactcggagactctgagagtgtttccaaagtgctttggctggatgagatacagcaagccgtcgatgaggccaacgtggacgaggacagagcaaaacaatgggttactctggtggttgatgttaatcagtgtttggaaggaaaaaaatcaagtgatattttgtctgtattgaagtcttccacttctaatgcaaatgacataatcccggagtgtgctgacaaatactatgatgcccttgtgaaggcaaaagagctcaaatctgaaagagtgtctagtgacggttcatggctcctcaacctgcacaatatgactactattaccactgttc

SEQ ID NO: 254554 - DNA, 2264 bp, Homo Sapiens
  misc_feature (1627)..(1717): n is a, c, g, or t
  misc_feature (1721)..(1721): n is a, c, g, or t
  misc_feature (1727)..(1730): n is a, c, g, or t
  misc_feature (1738)..(1738): n is a, c, g, or t
  misc_feature (1875)..(1885): n is a, c, g, or t
  misc_feature (1920)..(1932): n is a, c, g, or t
  misc_feature (2202)..(2202): n is a, c, g, or t
ggcgatggcggcagcggcaggtggaggggctggcgcggcccgctccctctcgcgcttccgaggctgcctggctggcgcgctgctcggggactgcgtgggctccttctacgaggcccacgacaccgtcgacctgacgtcagtcctgcgtcatgtccagagtctggagccggaccccggcacgcccgggagtgagcggacagaagccttgtactacacagatgacacagccatggccagggccctggtgcagtccctgctagccaaggaggcctttgacgaggtggacatggctcacagatttgctcaggagtacaagaaagaccctgacaggggctatggtgctggagtagtcactgtcttcaagaagctcctgaaccccaaatgtcgcgatgtctttgagcctgcccgggcccagtttaacgggaaaggctcctatggcaatggaggtgccatgcgggtggctggcatctccctggcctatagcagtgtccaggatgtgcagaagtttgcccggctctcggcccagctgacacacgcctcctccctgggttacaatggcgccatcctgcaggccctggctgtgcacctggccttgcagggcgagtcttccagcgagcactttctcaagcaactcctgggccacatggaggatctggagggtgatgcccagtccgtcttggatgccagggagttgggcatggaggagcgtccatactccagccgcctgaagaagattggagagcttctagaccaggcatcggtgaccagggaggaagtggtgtctgagctagggaatggcattgctgcctttgagtcggtacccaccgccatctactgcttcctacgctgcatggagccagaccctgagatcccttctgccttcaatagcctccaaaggactctcatttattccatctcacttggtggggacacagacaccattgccaccatggctggggccattgctggtgcctactatgggatggatcaggtgccagagagctggcagcaaagctgtgaaggctacgaggagacagacatcctggcccaaagcctgcaccgtgtcttccagaagagttgatgagggctacagctgttggggctctgccaggtcccctgggaccaactacagctccaatcagaaaccctgcgcttccttgagtgtggcttcccacttttcctgcattgtggagctgactgagtacaccggtgaggctggggtctctgcaggggaggtcactggaacagcgagcaagggactggtgcctcgctggtgctgggtctctggtttgctgcagagccgtaggacactcctggctcctcagtaggacagacagacgcaggcgggtttattttggaggggtacttgtggcattttcctgtattgtcttggacatgggatgtggggaggtggaaatgatgagcagtagcatcatttctccctgttgggttttagccagtttgccagcaagcgcatcctagcagggtccccgagcagcaggttgtgtggatgaagggacaggcacttgcatccagctgatctaggtcacacctggctcttggctgccatgtggcttattaacagcttccagtggaagtcgcaataaacagtttttggtaaatctcnnnnnnnnnnnnnnnnnnnnnnnnnnnnnnnnnnnnnnnnnnnnnnnnnnnnnnnnnnnnnnnnnnnnnnnnnnnnnnnnnnnnnnnnnnnaaanttgggnnnnaaccaccnccccaacgaaaaacttttcaaaaccatttcttttggggcccccggccccaaatagggtaaaacgaaatttggttcgtagccgggtgccccaagagagaaaccgggaaagaaactaaaggcctgggtatcctcccccnnnnnnnnnnncccccccggggagggcagcgggatatcgttttctnnnnnnnnnnnnncaaactggagggttttctcgaggggccgtttttccgggactctttatcccaagaggggaggcccgcgggggggagccctcatataagagaaaatttaacgcgccgcgagccctgtgggaaaatattttcggaagaaaaattgttttaagagctcgcttctcgggcgctctttcctctggaaaatgagaaaaccccaaataataaaactgggaccaggtgctccgccccctacatgtggaacacgcccgtgctataaccgcgactttgttntgcccctgtgaggaatatacagaatattcgcgccccggagacggatacacggcggtgggggg

SEQ ID NO: 254555 - DNA, 1931 bp, Homo Sapiens
  misc_feature (1881)..(1881): n is a, c, g, or t
tgccatcctgcgaatgctgctgcagagctcggaggggcgctgtgtgtacatcacccccatggaggccctggcagagcaggtatacatggactggtacgagaagttccaggacaggctcaacaagaaggtggtactcctgacaggcgagaccagcacagacctgaagctgctgggcaaagggaacattatcatcagcacccctgagaagtgggacatactttcccggcgatggaagcagcgcaagaacgtgcagaacatcaacctcttcgtggtggatgaggtccaccttatcgggggcgagaatgggcctgtcttagaagtgatctgctcccgaatgcgctacatctcctcccagattgagcggcccattcgcattgtggcactcagctcttcgctctccaatgccaaggatgtggcccactggctgggctgcagtgccacctccaccttcaacttccatcccaatgtgcgtcccgtccccttggagctgcacatccagggcttcaacatcagccatacacaaacccgcctgctctccatggccaagcctgtgtaccatgctatcaccaagcactcgcccaagaagcctgtcattgtctttgtgccgtctcgcaagcagacccgcctcactgccattgacatcctcaccacctgtgcagcagacatccaacggcagaggttcttgcactgcaccgagaaggatctgattccgtacctggagaagctaagtgacagcacgctcaaggaaacgctgctaaatggggtgggctacctgcatgagggctcagccccatggagcgacgcctggtggagcagctcttcagctcaggggctatccaggtggtggtggcttctcggagtctctgctggggcatgaacgtggctgcccacctggtaatcatcatggatacccagtactacaatggcaagatccacgcctatgtggattaccccatctatgacgtgcttcagatggtgggccacgccaaccgccctttgcaggacgatgaggggcgctgtgtcatcatgtgtcagggctccaagaaggatttcttcaagaagttcttatatgagccattgccagtagaatctcacctggaccactgtatgcatgaccacttcaatgctgagatcgtcaccaagaccattgagaacaagcaggatgctgtggactacctcacctggacctttctgtaccgccgcatgacacagaaccccaattactacaacttgcagggcatctcccatcgtcacttgtcggaccacttgtcagagctggtggagcagaccctgagtgacctggagcagtccaagtgcatcagcatcgaggacgagatggacgtggcgcctctgaacctaggcatgatcgccgcctactattacatcaactacaccaccattgagctcttcagcatgtccctcaatgccaagaccaaggtgcgagggcttatcgagatcatctccaatgcagcagagtatgagaacattcccatccggcaccatgaagacaatctcctgaggcagttggctcagaaggtcccccacaagctgaataaccctaagttcaatgatccgcacgtcaagaccaacctgctcctgcaggctcacttgtctcgcatgcagctgagtgctgagttgcagtcagatacggaggaaatccttagtaaggcaatccggctcatccaggcctgcgtggatgtcctttccagcaatgggtggctcagccctgctctggcagctatggaactggcccagatggtcacccaagccatgtggtccaaggactcatacctgaagcagctgccacacttcacctctgagcatatcaaacgttgcacagacaagggagtgggagagtgtttttcgacatcatgggagatnggaggattgaagaaccggaacgcgtttgctttcagttgacttgacagcca

SEQ ID NO: 254556 - DNA, 1064 bp, Homo Sapiens
gctgaataaccctaagttcaatgatccgcacgtcaagaccaacctgctcctgcaggctcacttgtctcgcatgcagctgagtgctgagttgcagtcagatacggaggaaatccttagtaaggcaatccggctcatccaggcctgcgtggatgtcctttccagcaatgggtggctcagccctgctctggcagctatggaactggcccagatggtcacccaagccatgtggtccaaggactcatacctgaagcagctgccacacttcacctctgagcatatcaaacgttgcacagacaagggagtggagagtgttttcgacatcatggagatggaggatgaagaacggaacgcgttgcttcagctgactgacagccagattgcagatgtggctcgcttttgtaaccgctaccctaatatcgaactatcttatgaggtggtagataaggacagcatccgcagtggcgggccagttgtggtgctggtgcagctggagcgagaggaggaagtcacaggccctgtcattgcgcctctcttcccgcagaaacgtgaagagggctggtgggtggtgattggagatgccaagtccaatagcctcatctccatcaagaggctgaccttgcagcagaaggccaaggtgaagttggactttgtggccccagccactggtgcccacaactacactctgtacttcatgagtgacgcttacatgggatgtgaccaggagtacaaattcagcgtggatgtgaaagaagctgagacagacagtgattcagattgagtcctgaggcatttacttttgggtaaaggagagttgagcctgaattaggaatgtgtacattgtaggaatcctggttgtggggaccaggtctgtgggcctcaggtctggccagccagggctggtgctgtccccgcctacctccacttcctttcccttgctcactctggatccagtgacagcaggtgtcatgggtcaagcataaatcatatatagcattttcaggcatgttcctggtagttcttttgagtctgacattctaataaaataatttgtagaaaaaaaccag

SEQ ID NO: 254557 - DNA, 1794 bp, Homo Sapiens
  misc_feature (445)..(445): n is a, c, g, or t
  misc_feature (473)..(473): n is a, c, g, or t
  misc_feature (533)..(542): n is a, c, g, or t
  misc_feature (1369)..(1377): n is a, c, g, or t
tagactacaattaacattcactttattcagttttgtcctctcaacttagaaggcaacaaatgaccacattaaaaagggagcatttcagaatatatatacataaaattggtctgggtaccctaaggtgtttgcgttgatagaaaattgacaccccaaactaagtgttctacttagcttctacaatagttattcctagaccttagattagtcattacatttttatttaaggtactatgttactttcatgactacaaaatgaggcactcgtacaaaacaggaatgaaaacatacatatactgtcttgtctttatgtcgtattaatgccaaagatattgtcagggattattttaaagaagcccctactcatggatggctatttttaaaaatggcacaggacagtaacaggctgaaaagaaaacacctggttgaggggacaaattaagtnaatacaagacagcttaaccaaggaagtnagcgaatctccacaaatgaggcttttaataatactttactggtaagacattttagttggnnnnnnnnnngatggctgaataacatcctaaagaagtattttaaatataatcttttaattttacaatgtagaaaacttctcacagtaagtagagagcttagagtactcaaccctgaaaatgaaaataagtagctagcttggaaagttttaaaaagcgccagtgttcttatggcactacattctcctgcacgtgtgcgtgtgttcacgcacattcgcaaacgcaatacaatgtagaactgtccagtgtttgttttgttttaaaaagtcatcaattcaacctaaattcaagaattacactttaatagtggcattttgccaatacagaaatgacgtatcttggatcaaatcattttaaggaaagttattctatattacttgaataagggaaagaaaatacacaagacaagaatccacaataatagcagttacattaaatgttgaaataaaaactactttttgtttacatctggaattgagatggcccatcttcattgtttctccagagtactaagagggggaaaaaagtcacctaaaaacatgggaagttttttaaggctagctatacacaaacgtcacattggcatttttcttcagttttcatctcaactattagtactaaatagtttaaaaatcaaacataatttactaataatgaacaactgcacacttcatactatgaccgtttgataactggtcatgtaaaactatcaccaaatgctgatttgtcttctatatataaatagtaaaaataaaacaaaaaggtcttctttcctagttaaccttcttgaaggttgttttaacccaatataaaattaagcaaaataatagtataatttnnnnnnnnntttatgtgaagaagggcagcaatactaacattttctgaactatgggttttcaatatttaaaaggctcttggttaaatactaaaacccggatgctacccaagcaaatattatgctggaaaatgctttccctatgaaaatacttatctcattgaaaacaacacgataaagtacaattgaaaaactaggggagaattcttaagtaagacaatataaattacctgccagtaaaatggagggcaattttttggccattcatattgtttgtttacaaaacattgataagattcatttaaaattctgtaggattaagaatttttaaccttttgaagtatctgcctaggatctcttgctgttaaaacagatatgttccaatgactttataccaagatccacaaattctttggaaaaattaaaaaa

SEQ ID NO: 254558 - DNA, 532 bp, Homo Sapiens
  misc_feature (14)..(14): n is a, c, g, or t
  misc_feature (24)..(24): n is a, c, g, or t
  misc_feature (36)..(36): n is a, c, g, or t
  misc_feature (61)..(61): n is a, c, g, or t
  misc_feature (67)..(67): n is a, c, g, or t
  misc_feature (77)..(77): n is a, c, g, or t
  misc_feature (118)..(118): n is a, c, g, or t
  misc_feature (148)..(148): n is a, c, g, or t
cccccacctaaaangcccaccccngtaaaggtattnttaaaaaccccccattgggggaganccgccngacctccccngggttaaacctgccctggtatttaccttaaattggcccccntcaacccgggggttttccttttcaaccccngttactgtccctggggccccatttttaaaaatagcccatccatgagtaagggccttcctttaaaataatcccctgacaatatcctttggcattaatacgacataaagacaagacagtatatgtatgttttcattcctgttttgtacgagtgcctcattttgtagtcatgaaagtaacatagtaccttaaataaaaatgtaatgactaatctaaggtctaggaataactattgtagaagctaagtagaacacttagtttggggtgtcaattttctatcaacgcaaacaccttagggtacccagaccaattttatgtatatatattctgaaatgctccctttttaatgtggtcatttgttgccttctaagttgagaggacaaaact

SEQ ID NO: 254559 - DNA, 771 bp, Homo Sapiens
  misc_feature (642)..(642): n is a, c, g, or t
  misc_feature (647)..(648): n is a, c, g, or t
  misc_feature (658)..(658): n is a, c, g, or t
  misc_feature (670)..(670): n is a, c, g, or t
  misc_feature (706)..(706): n is a, c, g, or t
  misc_feature (718)..(718): n is a, c, g, or t
  misc_feature (723)..(723): n is a, c, g, or t
  misc_feature (730)..(730): n is a, c, g, or t
  misc_feature (735)..(735): n is a, c, g, or t
  misc_feature (740)..(740): n is a, c, g, or t
  misc_feature (751)..(751): n is a, c, g, or t
  misc_feature (765)..(766): n is a, c, g, or t
ttctgaaccaggcggcgctgatcaccaatgactcaaagatcacagtgctcaaacaggtccaggagctgatcatcaacaaagaccccacactactggacaacttcctggatgagatcatcgcattccaagcagacaagtcaatcgaagtgcggctgaaactcattgcaaacctcaacatgctcttgagggacgagaatgtgaacgtggtgaagaaggctatcctcaccatgacccagctctacaaggtggccctgcagtggatggtgtcacgggtcattagcgagctacaggaggcctgctgggacatggtatctgccatggcgggggacatcatcctgctattggactctgactgacggcatccgcacccacgccatcaagtttgtggagggcctcattgtcaccctgtcaccccgcatggctgactcagagataccccgacgccaggagcatgatatcagcctggaccgcatccctcgtgaccacccctacatccagtacaacgtgctatgggaagagggcaaggcagccttggagcagctgcttaagttcatggtgcaccctgccatctcctccatcaacctgaccacagcgctgggctccttgccatatcgccgccagagaccatgttcatgtctgagngatcnnggctatgaantctgcatgccanctgccccgacgctggcaaatcgcaggtgagcgtgtngtagtatctgangtgcnctgttgntgtgngaagncccgcttcctngggttcaggccaannacacc

SEQ ID NO: 254560 - DNA, 379 bp, Homo Sapiens
gacagccagcacagaaaaagggccccagccccccacaaacaagaataggaactccattatctgtagtgaacctgagcctcacatgactctgatcagagaacccggccacttcattccagacttctgtggtttcaaaccactggtttgtggtaatgtgataataggcagcaagagaaaactagtacaggtgcctgtctctcctcttgaatttcaatttcagataaatgtatgctaaccctctaagagaaaaaaatcaatcaaccaatcaatgaaagaactacagtaaaaatattgccctcacctttatgtggctgttccagagcccttgccacctgaagaagacaatgaggggtatttcaggcacttgagtagtgtggct

SEQ ID NO: 254561 - DNA, 903 bp, Homo Sapiens
  misc_feature (101)..(101): n is a, c, g, or t
  misc_feature (794)..(794): n is a, c, g, or t
  misc_feature (808)..(808): n is a, c, g, or t
  misc_feature (885)..(885): n is a, c, g, or t
ccccaccatggaggcagaaactccaatatacattccccactcctcctccacatcaagtacctgtggtccaaactcaacatagcagccacctcctgtgttanatctgttagtctttcccttgtgcaggtagagtccactccttgataagtatgcacatgcaaccccacatagactatgagagctgcacctttgatcagctgtctcctcactggtgccctgccctgcagattgcagttgcttcagctgtcttgaactctgatctctgctttctcagctcagtgagctgccctgccctgagtggactctagctcaatatgcagctgcctcttggactgcctgttgtacactgctgaaaacaaacgtttgtatatgcaggcagggttagtctgatatgatttattctaacagacagaagcagaaatctgttatactcttttaataactgtgtctttataatattatggtacacagaatcctaagatgacccccagtgatctgtgctcatatataatcacttcctccagagtgtagacaaagctactgaggagatgtcactcctgtgattgtgttacaatttatggcaaaaacaagttaacagatgtaatcgagatcccaaatcggtccaatttaagatagacagattatctgatgagcttgacctagtgaacgtgagttccttggagggactgaggacttcctggagagatgtgaagtgcaggagggtttccatgcagggcgatcctcctctgctggctggaggaagcatgcagtgggaacatgggaggcctctaggngcagcgagaggccnccgctgacagccagcaagaaaacagagatctcagtcctacagtcacaaggaactgaactcagctgacaacctgaggnaacttgagaggatgttct

SEQ ID NO: 254562 - DNA, 1706 bp, Homo Sapiens
  misc_feature (1690)..(1690): n is a, c, g, or t
gctgggtggcgaattcggcacgagggctgagggaggtggggctaagttcaagaagtacgaggagattgacaatgccccggaggagcgagctcggggtatcaccatcaatgcggctcatgtggagtatagcactgccgcccgccactacgcccacacagactgcccgggtcatgcagattatgttaagaatatgatcacaggcactgcacccctcgacggctgcatcctggtggtagcagccaatgacggccccatgccccagacccgagagcacttattactggccagacagattggggtggagcatgtggtggtgtatgtgaacaaggctgacgctgtccaggactctgagatggtggaactggtggaactggagatccgggagctgctcaccgagtttggctataaaggggaggagaccccagtcatcgtaggctctgctctctgtgcccttgagggtcgggaccctgagttaggcctgaagtctgtgcagaagctactggatgctgtggacacttacatcccagtgcccgcccgggacctggagaagcctttcctgctgcctgtggaggcggtgtactccgtccctggccgtggcaccgtggtgacaggtacactagagcgtggcattttaaagaagggagacgagtgtgagctcctaggacatagcaagaacatccgcactgtggtgacaggcattgagatgttccacaagagcctggagagggccgaggccggagataacctcggggccctggtccgaggcttgaagcgggaggacttgcggcggggcctggtcatggtcaagccaggttccatcaagccccaccagaaggtggaggcccaggtttacatcctcagcaaggaggaaggtggccgccacaagccctttgtgtcccacttcatgcctgtcatgttctccctgacttgggacatggcctgtcggattatcctgcccccagagaaggagcttgccatgcccggggaggacctgaagttcaacctaatcttgcggcagccaatgatcttagagaaaggccagcgtttcaccctgcgagatggcaaccggactattggcaccggtctagtcaccaacacgctggccatgactgaggaggagaagaatatcaaatggggttgagtgtgcagatctctgctcagcttcccttgcgtttaaggcctgccctagccagggctccctcctgcttccagtaccctctcatggcataggctgcaacccagcagagggcagctagatggacatttcccctgctcggaagggttggcctgcctggctggggaggtcagtaaactttgaatagtaagccagcctgtgtcctgtgtcctttgtgcaaattggagaggataggggaggacaaaaagggtgttgaaccccagacagatggggagcttgtgagatcccagagcagttttaacggagaaatcaagtccagtgagcttagtgattgcctagacacagtaggatgccgttattcagcctcctgggagatagtgggaaagaatgttctatcgctctggagccagcatggcttcagctcaggtgccaaacccatcttgtttcctcggaatactaagtgaatgtctagcatccattcacattctgtgggaacagggactggacaggcatacctcagatgctgtagggtttgcttccagactaccacaatanagcaggtcacaaattt

SEQ ID NO: 254563 - DNA, 1017 bp, Homo Sapiens
gacggcagtactctacggtttacggtagcgaggcctgggtggcgaattcggcacgaggccctgctgcgcgcgacgccccacttcagcggtctcgccgccggccggaccttcctgctgcagggtctgttgcggctgctgaaagccccggcattgcctctcttgtgccgcggcctggccgtggaggccaagaagacttacgtgcgcgacaagccacatgtgaatgtgggtaccatcggccatgtggaccacgggaagaccacgctgactgcagccatcacgaagattctagctgagggaggtggggctaagttcaagaagtacgaggagattgacaatgccccggaggagcgagctcggggtatcaccatcaatgcggctcatgtggagtatagcactgccgcccgccactacgcccacacagactgcccgggtcatgcagattatgttaagaatatgatcacaggcactgcacccctcgacggctgcatcctggtggtagcagccaatgacggccccatgccccagacccgagagcacttattactggccagacagattggggtggagcatgtggtggtgtatgtgaacaaggctgacgctgtccaggactctgagatggtggaactggtggaactggagatccgggagctgctcaccgagtttggctataaaggggaggagaccccagtcatcgtaggctctgctctctgtgccctttgagggtcgggaccctgagttaggcctgaagtctgtgcagaagctactggatgctgtggacacttacatcccagtgcccgcccgggacctggagaagcctttcctgctggcctgggtggaggcgggtgtactcccgtccctggccggtggcacccgtggtgacaagtaacaactaaaagcgtggccatttttaaaaaaagggagaacaagtggtgagcctcctaaggacataagcaagaacaatccgcaactgtgggtgaccgggccatttgagatgttccacaaaaaaggccgggaaaa

SEQ ID NO: 254564 - DNA, 956 bp, Homo Sapiens
tccaaggtagcgaggcctgggtggcgaattcggcacgaggccctgctgcgcgcgacgccccacttcagcggtctcgccgccggccggaccttcctgctgcagggtctgttgcggctgctgaaagccccggcattgcctctcttgtgccgcggcctggccgtggaggccaagaagacttacgtgcgcgacaagccacatgtgaatgtgggtaccatcggccatgtggaccacgggaagaccacgctgactgcagccatcacgaagattctagctgagggaggtggggctaagttcaagaagtacgaggagattgacaatgccccggaggagcgagctcggggtatcaccatcaatgcggctcatgtggagtatagcactgccgcccgccactacgcccacacagactgcccgggtcatgcagattatgttaagaatatgatcacaggcactgcacccctcgacggctgcatcctggtggtagcagccaatgacggccccatgccccagacccgagagcacttattactggccagacagattggggtggagcatgtggtggtgtatgtgaacaaggctgacgctgtccaggactctgagatggtggaactggtggaactggagatccgggagctgctcaccgagtttggctataaaggggaggagaccccagtcatcgtaggctctgctctctgtgcccttgagggtcgggaccctgagttaggcctgaagtctgtgcagaagctactggatgctgtggacacttacatcccagtgcccgcccgggacctggaagaagcctttcctgctgcctgtgggaggcggtgtactcccgtccctggccgtggcaccgctggtgacagggacactagagcgtggcatttttaaagaaaggaagaccaatggggagctccctagggacatagcaggaacctcccccctgggggggaaaaggcatt

SEQ ID NO: 254565 - DNA, 1362 bp, Homo Sapiens
gcctgggtggcgaattcggcacgagggtgccttccagccgcaggcgcccttcttcttctgtgcgctcgggctcctggtcccggctccccggttaccggggcgcgagtatgaccacaatggcggccgccaccctgctgcgcgcgacgccccacttcagcggtctcgccgccggccggaccttcctgctgcagggtctgttgcggctgctgaaagccccggcattgcctctcttgtgccgcggcctggccgtggaggccaagaagacttacgtgcgcgacaagccacatgtgaatgtgggtaccatcggccatgtggaccacgggaagaccacgctgactgcagccatcacgaagattctagctgagggaggtggggctaagttcaagaagtacgaggagattgacaatgccccggaggagcgagctcggggtatcaccatcaatgcggctcatgtggagtatagcactgccgcccgccactacgcccacacagactgcccgggtcatgcagattatgttaagaatatgatcacaggcactgcacccctcgacggctgcatcctggtggtagcagccaatgacggccccatgccccagacccgagagcacttattactggccagacagattggggtggagcatgtggtggtgtatgtgaacaaggctgacgctgtccaggactctgagatggtggaactggtggaactggagatccgggagctgctcaccgagtttggctataaaggggaggagaccccagtcatcgtaggctctgctctctgtgcccttgagggtcgggaccctgagttaggcctgaagtctgtgcagaagctactggatgctgtggacacttacatcccagtgcccgcccgggacctggagaagcctttcctgctgcctgtggaggcggtgtactccgtccctggccgtggcaccgtggtgacaggtacactagagcgtggcattttaaagaagggagacgagtgtgagctcctaggacatagcaagaacatcccgcactgtggtgacaggggcattgaaatgttccacaaaaaccctggaaaagggccccaagccggaaaataacctcgggggcccgggtcccgaagcttggaaacggggaaggatttgccggccggggccctgggtcatggggcaaagcccagggttcccatccaagcccccaccccaaaaaggaggggaaggccccaaggtttaccatcccctcacaccaaagggaaggaaaggttggcgcccccccacaaacgcccctttggggggccccacactttacagtgcgccggggacaaggggttcccccctcgtggactttgggggagacacatgtggcgcctcgccgcca

SEQ ID NO: 254566 - DNA, 402 bp, Homo Sapiens
  misc_feature (14)..(14): n is a, c, g, or t
aaccagacacatanaattgactcctctcatatcaactccataaatgtctcgatggcaagcacttatttgaggcagggttcctgtaacactatctttcaagaagcaaccaaaccttttctccatgtcattgattgaacttgctggaagaaaactgaatagcaaacaccttgggtggaatgtgcacctcatctggcagtattgggcatttggggtgtacatggaagctacatccccacctctgaagaaggcgttttcatagagttgagtcagacatccacaggaaactgtagcaaacaaggaaatgaaataagttgcttgcttgaataaaatcattctgaaaacacaattgcttcttgaaggtgagtctcttgtcacttaaaaatgaacggtcttcaagctgtt

SEQ ID NO: 254567 - DNA, 351 bp, Homo Sapiens
ggagcttggagctgcagggcaacctcatcgtggtggggcggagcagcggccggctggaggtgtgggacgccattgaaggggtgctgtgctgcagcagcgaggaggtctcctcaggcattaccgctctggtgttcttggacggattgtggctgcacggctcaacggttcccttgatttcttctccttggagacccacactgccctcagccccctgcagtttagagggaccccagggcggggcagttcccctgcctctccagtgtacagcagcagcgacacagtggcctgtcacctgacccacacagtgccctgtgcacaccgaccacacactgagagtgttccgtctggagg

SEQ ID NO: 254568 - DNA, 630 bp, Homo Sapiens
  misc_feature (62)..(146): n is a, c, g, or t
  misc_feature (180)..(180): n is a, c, g, or t
acagggctcggactgattgaatgaggccacacattaagaaggggtatctggcttcatgtaannnnnnnnnnnnnnnnnnnnnnnnnnnnnnnnnnnnnnnnnnnnnnnnnnnnnnnnnnnnnnnnnnnnnnnnnnnnnnnnnnnnntgtgatccacccaagctgacatataaactaaccnatcagagactccaatagatgaagatagagacagaaatacatatacatacatttatttaagctctgtaatgaaagggcccagaagcaatgataccccagtagcagagagcacatattatgtctacatcttgatttctaaataccattctccactaaaaagaaccactgcctcttagagaaacagctgattctggctctggggcaaagaaaatataaggtaagtcgagaatctcttgttgtcagaaaacaaagaggtactcaaagattgatggcgaaatatcaaaagaacataggaattggtttgaaggaattcccactggtcaaatcaattgggaaatcaaaaagaatagtgataataattcacagtccacttaagaataagaaagaaagaagaatccataagatcatgataataaatataaaatttaaagtaggaaagaaggaagttgtt

SEQ ID NO: 254569 - DNA, 367 bp, Homo Sapiens
aaaggcctgaaaatcagcgaggttctaattgaagcactcttcttgccaagtgaacactttgctttagtcgtcttttggctgttgtgggaacattagcaccatagccgtaggaaaaaagaaccctttcagcctcatcttcattttcaatttctgcagtttgcattattatttcatcaagctctttttccagtttctcataaatgtctagccttgcttgatgctctgagttctgtgcttgaagttcagtaatgcgtttttcagaagaggcttggagactataaaattctttggttaaaacctccaattttttctgatatttttcacattccaattgacactgtgtgagatttcttgctgttctcgtgcc

SEQ ID NO: 254570 - DNA, 386 bp, Homo Sapiens
aaaagcaagagaaaagaacgaattgtttaaattatagtttaaattttcttttgaaaatgaaccctaggtagataaaggaatctccttggcttctaactgcttttggtggtggagacaccacctgatgtcacccacggacacgttttcatccacctgtgaccagggagcttcagggagtgccatccgtttccatgggagagccccgccaaagtcacttagtggtataaacaacgtgcttctatgtaaaccccggtaacaaaaaaatagttttctatcaaatacagtatcaaattgtcatttcatgtaaacacagtgattcctggtgaagaattgaggccaaagtaccacaaaaaatggccacgggattcacgtgccgaattcctgca

SEQ ID NO: 254571 - DNA, 664 bp, Homo Sapiens
cctttcttccttttggtgcgagcttgctgtggtttttgctctgggtcctctgggatggcgcctggctgtggccgcgtggtctctcacgcaggggcgccgggcgggggaacgcggccaccctgagtctggtgagtcgactgcggcggcctgtgtccgaagtgtccggggccgtgaacaagggcagcggcctggcctcaggcctgcgttcccacgtttggaaacggggagcttcgtcgatttgtgtttacatcatcgactatgccagggagttctccagataagcctggttttattttcgtcagtgaaaaggccttaccgtataactgactttatgcttgccctccccccgtataaaataacttaaaagcagcgtgcctggttacagctgtttccacgtgcggtgctcgtcgggagtgatcacctaccctacaggtggaagatggatgcctgaagtgtagactgctgctagctgaataccatctgggagcataaaggtgacctgaaggatgtccttggtgaggattttgaaaatttgatcttcacaagagttgcctggatcatttgaaatttctgggagtctgaggagtactgacataattacctgctggagtctgtaaatacacatttaagacagtgaggatgtgaataaatatatttaattgca

SEQ ID NO: 254572 - DNA, 420 bp, Homo Sapiens
aagaccataggctggcaggcagctgagatgaactgtctttaccactgatgaggggcctctgccggctgagggtagcaagcaggggttgtgagtcaggctgggggacttgtttgaaagaaagaggagtggaaaatggttccaggagggaagaggttctttaagacacagtaccctgggaggcataggagaagggtcgggccagcccagcccagggcctgagttagactatttcccacatgttctctgccttcagtggggagggggtgccaccagggctgtcggccaggattgccactcctgtttcagaggaagcaggccgagagacttgcaccttggccaagccacacaatcagtggggcagccagagctcagacctgagccattttgttcagtatccaggaccccccggatttttccacg

SEQ ID NO: 254573 - DNA, 1412 bp, Homo Sapiens
  misc_feature (1350)..(1350): n is a, c, g, or t
  misc_feature (1365)..(1365): n is a, c, g, or t
  misc_feature (1367)..(1371): n is a, c, g, or t
ggaaatatgaagattttggaccactatttacagcaaaattttttaatgccaaccagtgggcagatatttttcaggcctctggtgccaaatacattgtcttaacttccaaacatcatgaaggctttaccttgtgggggtcagaatattcgtggaactggaatgccatagatgaggggcccaagagggacattgtcaaggaacttgaggtagccattaggaacagaactgacctgcgttttggactgtactattccctttttgaatggtttcatccgctcttccttgaggatgaatccagttcattccataagcggcaatttccagtttctaagacattgccagagctctatgagttagtgaacaactatcagcctgaggttctgtggtcggatggtgacggaggagcaccggatcaatactggaacagcacaggcttcttggcctggttatataatgaaagcccagttcggggcacagtagtcaccaatgatcgttggggagctggtagcatctgtaagcatggtggcttctatacctgcagtgatcgttataacccaggacatcttttgccacataaatgggaaaactgcatgacaatagacaaactgtcctggggctataggagggaagctggaatctctgactatcttacaattgaagaattggtgaagcaacttgtagagacagtttcatgtggaggaaatcttttgatgaatattgggcccacactagatggcaccatttctgtagtttttgaggagcgactgaggcaaatggggtcctggctaaaagtcaatggagaagctatttatgaaacccatacctggcgatcccagaatgacactgtcaccccagatgtgtggtacacatccaagcctaaagaaaaattagtctatgccatttttcttaaatggcccacatcaggacagctgttccttggccatcccaaagctattctgggggcaacagaggtgaaactactgggccatggacagccacttaactggatttctttggagcaaaatggcattatggtagaactgccacagctaaccattcatcagatgccgtgtaaatggggctgggctctagccctaactaatgtgatctaaagtgcagcagagtggctgatgctgcaagttatgtctaaggctaggaactatcaggtgtctataattgtagcacatggagaaagcaaatgtaaaactggataagaaaattattttggcagttcagccctttccctttttcccactaaattttttcttaaattacccatgtaaccattttaactctccagtgcactttgccattaaagtctctttcccattgatttgttttccaaacggnagaaggagggagagnannnnncccctgtccggccgcctccgcccttcgagaaacttttctaa

SEQ ID NO: 254574 - DNA, 926 bp, Homo Sapiens
atactcagcggcagagacggaagaacagcgctcccgaggccgcgggagcctgcagagaggacagccggcctgcgccgggacatgcggccccaggagctccccaggctcgcgttcccgttgctgctgttgctgttgctgctgctgccgccgccgccgtgccctgcccacagcgccacgcgcttcgaccccacctgggagtccctggacgcccgccagctgcccgcgtggtttgaccaggccaagttcggcatcttcatccactggggagtgttttccgtgcccagcttcggtagcgagtggttctggtggtattggcaaaaggaaaagataccgaagtatgtggaatttatgaaagataattaccctcctagtttcaaatatgaagattttggaccactatttacagcaaaattttttaatgccaaccagtgggcagatatttttcaggcctctggtgccaaatacattgtcttaacttccaaacatcatgaaggctttaccttgtgggggtcagaatattcgtggaactggaatgccatagatgaggggcccaagagggacattgtcaaggaacttgaggtagccattaggaacagaactgacctgcgttttggactgtactattccctttttgaatggtttcatccgctcttccttgaggatgaatccagttcattccataagcggcaatttccagtttctaagacattgccagagctctatgagttagtgaacaactatcagcctggagttctgtggtcggatggtgacggaggagcaccggatcaatactggaacagcacaggcttcttggcctggttatataatgaaaagcccagtttccggggcacaggtaatcaccaattgaatccgttggggaaagctggtaaccatcttggtaagcatgggtgggctttctattaccc

SEQ ID NO: 254575 - DNA, 1233 bp, Homo Sapiens
  misc_feature (74)..(74): n is a, c, g, or t
  misc_feature (78)..(78): n is a, c, g, or t
  misc_feature (212)..(212): n is a, c, g, or t
  misc_feature (593)..(604): n is a, c, g, or t
  misc_feature (745)..(745): n is a, c, g, or t
agcatggcagcctcagaagaaaaagaagaccacagtggccctgagagactgcatcgagctcttcaccaccatgnaganccctggggaggcatgacccctggtactgtcccaactgtaagaagcatcaaaaggccacaaaaaagttgaccttatggtcctgcccaaagatcctggtggtccacctcaaacgtttctcctacacaagatactgnagggataagctcgacacagtcgtagaattcccaatcagagggctgaacatgtccgagtttgtctgtaacctgtcagcaaggccttatgtgtacgacctcattgccgtgtccaaaccaacgtcgagatgatgaaataagacaccttcacttagcagttctggttcctctgatggagggacacgaccaagcagctctcagcagggctttggggatgatgaggcttgcagcatggacaccaactaatgctgactccacgatcctgccaccctgtagcgccagtgtaatcccccaggagaacatctttgacactctgcagactgctagtgttctgtctaaaaaccagacaaggaaatacccttcttttatgagcagaaggaaacnnnnnnnnnnnngaagaccgtttacctagaagaagctatgtcaagaggctgaattatttttatttttaaacaggtggtgagaaatttctgtgaaacctgtgaagctgaaaagggggtgggatgggggtactcaatggagtatgtctgatggantcccgaagaatggagaggaacacaggcgctgagtatggagcagcctggagacccaccccacctgcaggggctgccctgagcgcctggatttctggttctgatgccaatactagtcaccccaagtagtctgctcacagtaacccaaacctcaagtaaactcccctttccctcggctatgtgcactgatatgggtttataattttctgaaagttacccactgaagcccatttctccgttgagtcatcttgtaatttccagctttctccccgctaaggaagatatctagtgttggggatcctggcccctcaacctcctgtggaacccagcagttctgttatatcccctgctaccctaaatgaattaaaacggttaaatactgtgtgggaactttttattaaataaaccacttttttaattaaataaccgctttaaaggaagtcccgcaccattaaaactggcaaagatagaaaaacaaaatagagaaattc

SEQ ID NO: 254576 - DNA, 947 bp, Homo Sapiens
gtccagtgggaaaaaatattccaggtgaaagcgggcccataaacctgggtgaagggagaggctgctgggtcccaaccacaaataaacaggacatttctgagttcttcctttggtctgacttcagcccccctcactccaggagagaggctgcagaagctcaaaccctgggaaccgaggcccaggccccggccctgtccccccaaatgtgggcaggcacaatccggagcagctggtgccatctggctttctctggctttgggctcggggggaatgtgaagaggagggagccccttcttcttccctgctcccctggctggagtgggctggaagcgcctgtgaacagggttggcagtggcactggcagcggtggggaatgaagtgggtagtaacaagagcctctgggtaacagtgaacacggggacctttgagcggtctgatcttgctcctccaagtcatagggccaccctgagttcttggcagaagcccagaggcctggatcctaggagacaagtggctttggggccctcagcctttggggccatccgtggaccctggggcctaagtggatctgcagctgctgcccctctggcagagctccctacagagctggttgctgagggccctagatctcagtagcagtgatctcctccaggcagatgcagggggcctgctcggccaggcccaggtcagcgagctcccgggcctccagctccaggctgagctgctgcagctcctgctctagctgccggttgcgccggtacatctggatgtagttgtgctgcagctgcttctggtagcggatcacctgctccttctctgcctgccaggccagccgctccccctcaaagctgtcccgctgctcctcaccccgccgccgctcccgctgcagctccacccgcaatcgctccctcgtgccgaattcgccacccaggcctcgctacctagac

SEQ ID NO: 254577 - DNA, 397 bp, Homo Sapiens
aactagaaaaataaacttgtgcttgaacatcataagcacttagtgaattgagaatctgaactgccacttgaaatattcccgggaaagaaacattatgaaccaaatgaaggaacatagctattcaaagggacatattgtacttgttttgctccaatttctgctacatagactgctccagtctttctgtcgacttctaggagatgtggcaaaacttgatctgctagttggattgtgctgatcacagaacactccccaatgcttcccactgggggtgctgctacgactgagagcctgctaagattcagctgggccacaatcaagtacttcccatcaggagtaaacctgactgaagaaggtccctcttctgtgaaacaattattccatgctccctcgtgcc

SEQ ID NO: 254578 - DNA, 1619 bp, Homo Sapiens
  misc_feature (135)..(177): n is a, c, g, or t
  misc_feature (1417)..(1433): n is a, c, g, or t
accacggaaacagccgtttttattccacaaacagtaaactccatccactacacagtgacatacactgtgtagcacaccccatcaccttggccagtgctgccagccgacctttctgtggtgatggaaatctttttnnnnnnnnnnnnnnnnnnnnnnnnnnnnnnnnnnnnnnnnnnngagcacctcaatatagaggtggccactacaggtgaggaaatgaatttctaagttaattcaaattcaaatgccacatttggctcgtggctcctgtactggacaacacagctgtaggccctgacctggtccagggcactttggttcaaaagccaactctgaggagagcaagtggcagaaacagcccttgggctcccctccccagagagaaacggcagctgcagctgctggaaagggcaagaatcagagtggggggacacctcgggcgcgccggataaggttggccagccgcttggccaggccacctgtgcggggctcctcgatgtggaaggttcgggtgaggagattgtagaaggagccatagcacacggccaccacagtgcacgtgaggcagatcacgttgtagggcatgctgaagtccggtgtcggcaggttcaccagcagcggctccgtgtagagccgcacaaagtagttagagccatcagagactgggaacaggctgttgaagaggggactctcttcccagtccactggcttggctgctaccatgctgggcacaagggcgctgaggacagatgggctgacatagaagccatggttaggatctggcgtgtactcggtccacttcagcaacgcccgctcaaactggatggaaaccttggtgactgagttggccggcagctgaatcagcatctccaggaggtggggttgcagccggtcctgggcaggctggtagtggatgtaacctggagacatgcaaggtcacccacatctctttcctggggtcaggctacctgctgcccctgtccctgctgcttgccatggagcctcaatctgggtgcctagaagatgggcttgggagcatagaagccaggcaggcaagggaagaaagcaggggctaagaaaagggagaggatgtttccagggcagtgatcccaggatgcgatcaagagaggttgttaggagtgctgcagatggctaatcaatcttcacatcactacaactggggcaccagacaccaagtgcctgatgtgacgcaagaagaagttcacagaaccacctgggaatttttcttgccaaaaatgtgggacatgaatctaatcaggtttctaaatctaaccaccaacacacaagaaatataggagaggaggggtgtgttaaacactagcacaaggacaaacccagaatgtggaacattctacacaacaaatgacccagtttcttcaacaaataaatgacattnnnnnnnnnnnnnnnnnggcatgggcactgctacagatgaagagagactgaagagtaccacaccaaagacaagacatttataataagggacattctgggtgtggagacagggagtatatgggaactctgtgctttgtgctcagtttttctgtaaacctaaaactgctctaagaatagtctagtaattttaaagaaaaagaaac

SEQ ID NO: 254579 - DNA, 803 bp, Homo Sapiens
ctcgggcgccccggataaggttggccagccgcttgcccagcccacctgtggggggctcctcgatgtggaaggttcgggtgaggagattgtagaaggagccatagcacacggccaccacagtgcacgtgaggcagatcacgttgtagggcatgctgaagtccggtgtcggcaggttcaccagcagcggctccgtgtagagccgcacaaagtagttagagccatcagagactgggaacaggctgttgaagaggggactctcttcccagtccactggcttggctgctaccatgctgggcacaagggcgctgaggacagatgggctgacatagaagccatggttaggatctggcgtgtactcggtccacttcagcagcgcccgctcaaactggatggaaaccttggtgactgagttggccggcagctgaatcagcatctccaggaggtggggttgcagccggtcctgggcaggctggtagtggatgtaacttggtttgttctccttgcccttggaggtgatggtgagggtgtgcacatacagccgcagataccagggtacggtgtccagcagcagcaccgggaaggcccggtatgggtgggtgttgtacagcagtgtgctcagctcccccttctgcagcccatagccactcacgtaccgctgggcatgcaggaagggcactgggggggcctcattctctgggggtctcttccacttgagctggatgttgaggtttcgagagttgttgatcatggcggtgtcaagcaagtcatagatggcataggtcttccgagtgcctaggatgacg

SEQ ID NO: 254580 - DNA, 773 bp, Homo Sapiens
tcaacatccagctcaagtggaagagacccccagagaatgaggcccccccagtgcccttcctgcatgcccagcggtacgtgagtggctatgggctgcagaagggggagctgagcacactgctgtacaacacccacccataccgggccttcccggtgctgctgctggacaccgtaccctggtatctgcggcatgtatgtgcacaccctcaccatcacctccaagggcaaggagaacaaaccaagttacatccactaccagcctgcccaggaccggctgcaaacccaactcctggagatgctgattcagctgcacggacaactcagtcaacaaggtttccatccagtttgagcgggcgctgctgaagtggaccgagtaacaaaccagatcctaaccatggcttctatgtcagcccatctgtcctcagcgcccttgtgcccagcatggtagcagccaagccagtggactgggaagagagtcccctcttcaacagcctgttcccagtctctgatggctctaactactttgtgcggctctacacggagccgtgctggtgaacctgccgacaccggactttcagcatgccctacaacgtgatctgactcacgtgcacttgtggtggcagtgtgctacggctccattctacaatcgtcctcaaccgagaattccacatcgaggagcccccgcaccaggttggcctggccaagcagggtggccaagccttatccggcgcggcccgaggtgtccacaccatctgattctttgcccatttccaa

SEQ ID NO: 254581 - DNA, 1419 bp, Homo Sapiens
ttggttggaaaaagcatagcatcatttaccaagaagaaacgagatggaattgtttggggttgggaaggtggacgatgaaatgttgagtatcacgcatcttacatttgaggtatcaatcattattggatagaaagtcttatttagtgagatggtaatggttgtagatgtcagtgatttgttccaggggacaatgagtaaactgagaagagcaaaaatctacaaatggagcaatgaaggtcagcattccatgaagaagcagaaattgatgagagaggaagacaagagtagtcagagaagttaagacctggaagctaagtaaggagagggagtgggcaactatgatggaaaggccataaagcaaagattgagaagtatgcactggaggccattgtttctggatgtcagggtaggaaagagtaaacggtgacagtagaggtctccttgcagtgaattggggaatgaatatcaagtgaaatagtgcacagagtctgtatacaaccctttggaaaagcctgattgaaaagagaaagatgagatgcggagggagaggcattcaaaaaatgctagttacagcatcttattgaggaatctaaggcaggagtagggagacctgagtatgatggagcatggtagggttgggagtcaagtcaagctcacagcatttcagggttagggagataagctgtctgcagcagtcaatagttgagggttcagcagggcttccaacagggcagaataagggactgaactgccagcttcagggcaggggacaagccatctctcctgataggaaagggtcaggggttgagtagagtcttcagcaaagctgggaagttgggtgttccccagcctgttacaggatcccagccaggaccagagcagaaaccctggccctctacctcttcatccagacaggactcatggcagccacgggttacatcaaagagacctgccccatgctgctggtagagccttgggttgagaaagccaagaggggggcggccactaaggatcctgtgctcattgatcaaggataggatccccccaaacactggagtagaggccgaggttccgcacacccatggaatgggcactctgttgctgaccacccagtagccatcagaaagtgcagccacatctgggtaggcacggccactggcattgaagtaactggatggtggcaggtgggggctagagctcaggaacttcgttacagcttcctcctggtatgaaggccgtgggaacacattgctgaagccaccaccactgatatagtcaacaatttcatttgtgatgaggaaaggttcctggaaggatgtgcctcccactgtggtgacataggggctggagacagggaaggtagggcggaactggtgtcttccagagacagaccaacacccggccccactgtcacctgag

SEQ ID NO: 254582 - DNA, 521 bp, Homo Sapiens
  misc_feature (394)..(435): n is a, c, g, or t
ggaacacactgtggggtttcaggggacatatgtgctcaccacacattgcgccccaaccaggcccagacatgagacacggtcccgggagctccctctagccttctcgtatatcccagacctgcgctcatgtcacaatttgtaatgaggtgtttggctgggtgacattttatggccatctgtctccctatcccctataatgggggttgcgcgaaagcaaagcccaagactgtctcggccatctgtgtctccaggatcacccctcactgggcatggagtatgtgtccaggtaacgcttgctgagtgaatgaatgaatactccatactctgcctggagaattacgcactttagcatatccaaggctctgacaagtcctgcataaaagagcattattgnnnnnnnnnnnnnnnnnnnnnnnnnnnnnnnnnnnnnnnnnngactataggatattgattatcaatctggcaatagtcaagattggcagtctggtgtattagtcaaaggttttcagcctacaaaagac

SEQ ID NO: 254583 - DNA, 567 bp, Homo Sapiens
  misc_feature (440)..(480): n is a, c, g, or t
gtgacctgacttaggtgttaacaggttcctctgaggtgtgtggggaacagactgaggggtttcaggggacatctgttctcaccacaaattgccccccaaccagcccccagacatgaacagtctcccgggagctccctctagccttctcgtatatcccagccctgcctcatgtcacaatttgtaatgatgtgtttggctgggtgacattttatggcccatctgtctccctatcccctataatgtggtttgccgaaagcaaagcccagggactgtctcggccatctgtgtctccagggatcacccctcactgggcatggagtatgtgtccagttaacgcttgctggagtgaatgaatgaatactccatcctctgcctggagaattacgcactttagcatatccaaggctctgacaagtcctgcataaaagagcattattgtnnnnnnnnnnnnnnnnnnnnnnnnnnnnnnnnnnnnnnnnngactataggatattgattatcaatctggcaatagtcaagattggcagtctggtgtattagtcaaaggttttcagcctacaaaagaca

SEQ ID NO: 254584 - DNA, 555 bp, Homo Sapiens
  misc_feature (294)..(294): n is a, c, g, or t
  misc_feature (308)..(355): n is a, c, g, or t
  misc_feature (435)..(476): n is a, c, g, or t
gtgacctgacttaggtgttaacaggttcctctgaggtgtgtggggaacagactgaggggtttcaggggacatctgttctcaccacaaattgccccccaaccagccccagacatgaacagtctcccgggagctccctctagccttctcgtatatcccagccctgcctcatgtcacaatttgtaatgatgtgtttggctgggtgacattttatggccatctgtctccctatcccctataatgtggtttgccgaaagcaaagcccaggactgtctcggccatctgtgtctccaggantcacccctcactgnnnnnnnnnnnnnnnnnnnnnnnnnnnnnnnnnnnnnnnnnnnnnnnnactccatcctctgcctggagaattacgcactttagcatatccaaggctctgacaagtcctgcataaaagagcattattgnnnnnnnnnnnnnnnnnnnnnnnnnnnnnnnnnnnnnnnnnngactataggatattgattatcaatctggcaatagtcaagattggcagtctggtgtattagtcaaaggttttcagcctcc

SEQ ID NO: 254585 - DNA, 633 bp, Homo Sapiens
gctgtccagtcccagaaggaagctgctcctccagtgaggagcaggcggcacgcatgggtcactgctcctcctccgaggactcctgcgagatgccctcctcttcctccttctccagttttttgggtctgccccttggtttccttcctggagttgtggtggttttccgggtcttggcagcacccttgtttttgcttccctttggtcggccccgaggtctcttaggtgttggcacttcgctgggctccttctgactccctaccagcgctgtcccgggactcaccggaggctgcttgcgcggcctgccccggccccgcttctcagtgccgtccttttcctgcttggaggccaagggctggctggacttcgagctcgactcactcatcttcccttctctaaggagcaggtggaagagtgatggctgggatgcgcgagctcggccgccggcctgcggtgcgcgctccgggttgccgggagcggcggtgctgggcgctgaggaccggcctggctccgccgcggccgccgctggtagcaaatgcggatgccttcttggagccgcgccagcgccagaaatagccccggctcggagtcccaattagaggagcgcagcaccggctcaggggagcttaaaaaaaa

SEQ ID NO: 254586 - DNA, 999 bp, Homo Sapiens
  misc_feature (731)..(792): n is a, c, g, or t
atttattgaggccgcgcacgggccgtgcccagcttcctgcccctcgccatccttcgggggagggggaatatttttgtccccccgcctggctgtgacacataaataccccgcgggggcctgggcggcgagcacgcggcggcggcggtctctgagcgcctctgctctctctcccggtttcagatccgcatttgctaccagcggcggccgcggcggagccaggccggtcctcagcgcccagcaccgccgctcccggcaacccggagcgcgcaccgcaggccggcggccgagctcgcgcatcccagccatcactcttccacctgctccttagagaagggaagatgagtgagtcgagctcgaagtccagccagcccttggcctccaagcaggaaaaggacggcactgagaagcggggccggggcaggccgcgcaagcagcctccggtgagtcccgggacagcgctggtagggagtcagaaggagcccagcgaagtgccaacacctaagagacctcggggccgaccaaagggaagcaaaaacaagggtgctgccaagacccggaaaaccaccacaactccaggaaggaaaccaaggggcagacccaaaaaactggagaaggaggaagaggagggcatctcgcaggagtcctcggaggaggagcagtgacccatgcgtgccgcctgctcctcactggaggagcagcttccttctgggactggacagctttgctccgcnnnnnnnnnnnnnnnnnnnnnnnnnnnnnnnnnnnnnnnnnnnnnnnnnnnnnnnnnnnnnntcttccacctgtgccctcaccaccacactacacagcacaccagccgctgcagggctcccatgggctgagtggggagcagttttcccctggcctcagttcccagctccccccgcccacccacgcatacacacatgccctcctggacaaggctaacatcccacttagccgcaccctgcacctgctgcgtccccactcccttggtggtgg

SEQ ID NO: 254587 - DNA, 1138 bp, Homo Sapiens
  misc_feature (1060)..(1073): n is a, c, g, or t
ctttttaagctcccctgagccggtgctgcgctcctctaattgggactccgagccggggctatttctggcgctggcgcggctccaagaaggcatccgcatttgctaccagcggcggccgcggcggagccaggccggtcctcagcgcccagcaccgccgctcccggcaacccggagcgcgcaccgcaggccggcggccgagctcgcgcatcccagccatcactcttccacctgctccttagagaagggaagatgagtgagtcgagctcgaagtccagccagcccttggcctccaagcaggaaaaggacggcactgagaagcggggccggggcaggccgcgcaagcagcctccgaaggagcccagcgaagtgccaacacctaagagacctcggggccgaccaaagggaagcaaaaacaagggtgctgccaagacccggaaaaccaccacaactccaggaaggaaaccaaggggcagacccaaaaaactggagaaggaggaagaggagggcatctcgcaggagtcctcggaggaggagcagtgacccatgcgtgccgcctgctcctcactggaggagcagcttccttctgggactggacagctttgctccgctcccaccgcccccgccccttccccaggcccaccatcaccaccgcctctggccgccacccccatcttccacctgtgccctcaccaccacactacacagcacaccagccgctgcagggctcccatgggctgagtggggagcagttttcccctgccctcaggatcccagctccccccgcccacccacgcatacacacatgcccctcctggacaaggctaacatcccacttagccgcaccctgcacctgctgcgtccccactccccttggtggtggggacattgctctctgggctttttgggttggggggcgccctctctgctccttcactggtccctctgggcttccatagggggggcctggggaggggttcccctggccttaaaaggggcccaagccccatctcattctggaacgccctactcactgccctggaaagagcaggggggcccaatnnnnnnnnnnnnnntcttgccccccaacaaatcccccaacaaaggggtctttgtgccccaccggggggctcccactttc

SEQ ID NO: 254588 - DNA, 1075 bp, Homo Sapiens
  misc_feature (74)..(82): n is a, c, g, or t
tggggagacccgcccagggcgcctgcccaagcacatcccttaggcctgggtgtggtccctgtgggggcaaaggnnnnnnnnnttccctatggggccacaccctgtttgttgcccagggcagtggaagtagggccgtcccagaatgaaatgggggcttgggccccctttaaggcccaggggaaacccttcccagggcccccactatggaaaaccagagggaacaggaaaggagcagagaggggcgccccccaacccaaaaagcccagagagcaatgtccccaccacccaagggaggggggacgcagcaggtgcagggtgcggctaagtgggatgttagccttgtccaggagggcatgtgtgtatgcgtgggtgggcggggggagctgggaactgaggccaggggaaaactgctccccactcagcccatgggagccctgcagcggctggtgtgctgtgtagtgtggtggtgagggcacaggtggaagatgggggtggcggccagaggcggtggtgatggtgggcctggggaaggggcgggggcggtgggagcggagcaaagctgtccagtcccagaaggaagctgctcctccagtgaggagcaggcggcacgcatgggtcactgctcctcctccgaggactcctgcgagatgccctcctcttcctccttctccagttttttgggtctgccccttggtttccttcctggagttgtggtggttttccgggtcttggcagcacccttgtttttgcttccctttggtcggccccgaggtctcttaggtgttggcacttcgctgggctccttctgactccctaccagcgctgtcccgggactcaccggaggctgcttgcgcggcctgccccggccccgcttctcagtgccgtccttttcctgcttggaggccaagggctggctggacttcgagctcgactcactcatcttcccttctctaaggagcaggtggaagagtgatggctgggatggccttcttggagccgcgccagcgccagaaatagccccggctcggagtcccaattagaggagcgcagcaccggctcaggggagcttaaaaag

SEQ ID NO: 254589 - DNA, 2706 bp, Homo Sapiens
tggcagtactacctcagcgggttaaggtagcgaggcctgggtggcgaattcggcacgaggccgagccggggctatttctggcgctggcgcggctccaagaaggcatccgcatttgctaccagcggcggccgcggcggagccaggccggtcctcagcgcccagcaccgccgctcccggcaacccggagcgcgcaccgcaggccggcggccgagctcgcgcatcccagccatcactcttccacctgctccttagagaagggaagatgagtgagtcgagctcgaagtccagccagcccttggcctccaagcaggaaaaggacggcactgagaagcggggccggggcaggccgcgcaagcagcctccggtgagtcccgggacagcgctggtagggagtcagaaggagcccagcgaagtgccaacacctaagagacctcggggccgaccaaagggaagcaaaaacaagggtgctgccaagacccggaaaaccaccacaactccaggaaggaaaccaaggggcagacccaaaaaactggagaaggaggaagaggagggcatctcgcaggagtcctcggaggaggagcagtgacccatgcgtgccgcctgctcctcactggaggagcagcttccttctgggactggacagctttgctccgctcccaccgcccccgccccttccccaggcccaccatcaccaccgcctctggccgccacccccatcttccacctgtgccctcaccaccacactacacagcacaccagccgctgcagggctcccatgggctgagtggggagcagttttcccctggcctcagttcccagctccccccgcccacccacgcatacacacatgccctcctggacaaggctaacatcccacttagccgcaccctgcacctgctgcgtccccactcccttggtggtggggacattgctctctgggcttttggtttgggggcgccctctctgctccttcactgttccctctggcttcccatagtggggcctgggagggttcccctggccttaaaaggggcccaagccccatctcatcctggcacgccctactccactgccctggcagcagcaggtgtggccaatggaggggggtgctggcccccaggattcccccagccaaactgtctttgtcaccacgtggggctcacttttcatccttccccaacttccctagtccccgtactaggttggacagcccccttcggctacaggaaggcaggaggggtgagtcccctactccctcttcactgtggccacagcccccttgccctccgcctgggatctgagtacatattgtggtgatggagatgcagtcacttattgtccaggtgaggcccaagagccctgtggccgccacctgaggtgggctggggctgctcccctaaccctactttgcttccgccactcagccatttccccctcctcagatggggcaccaataacaaggagctcaccctgcccgctcccaacccccctcctgctcctccctgccccccaaggttctggttccatttttcctctgttcacaaactacctctggacagttgtgttgttttttgttcaatgttccattcttcgacatccgtcattgctgctgctaccagcgccaaatgttcatcctcattgcctcctgttctgcccacgatcccctcccccaagatactctttgtggggaagaggggctggggcatggcaggctgggtgaccgactaccccagtcccagggaaggtggggccctgcccctaggatgctgcagcagagtgagcaagggggcccgaatcgaccataaagggtgtaggggccacctcctccccctgttctgttggggaggggtagccatgatttgtcccagcctggggctccctctctggtttcctatttgcagttacttgaataaaaaaaatatccttttctggaaaaacaataagcaacacaacaagacacaacacaactcccctgtcggctcgccctccgccctccaaaagctttctaacccattccgtttggccgcgcgggcccagccacggaagtgacaatggtccatacctgctttcctaggaagaatcctggtgcatgcactaggcgcctgcgattcctcaccaaataaaaaaacgccccgggcggccaccttatagcgggttttcgacacaatatcccccaaattggcagcttcctgcgacgtcaattacttcgccctttcactccaccagggaacccccaaagtcccaagtttcccaataatccaaacttcaacgccccccggtccacctggcacaccccccattcgcctatatatcttggttcccgaaaatcttgcccctttaacgctagctttctcgccccaacaaattgggaaactccccctccccccacacaccgcgttattggagcgcacacccttgcacctcctcccgccgccggtggtaatccatgaaccaccttttccctccaccccttggaaccctaataaaaatattcttgcccccccctgttccccacacacaccctggcggggtccgaacgagcaaactctcgttgcccacatcatttggggaccccacggcctctttcacaagtcccacagtacatctgattttgacaaaccctctcccccttcgcgcaggcacaatctcgggcgctcttgacacaccctccaacacacacacttaactttctccccccccaatcac

SEQ ID NO: 254590 - DNA, 942 bp, Homo Sapiens
  misc_feature (775)..(775): n is a, c, g, or t
gtagcgaggcctgggtggcgaattcggcacgaggggtagggagtcagaaggagcccagcgaagtgccaacacctaagagacctcggggccgaccaaagggaagcaaaaacaagggtgctgccaagacccggaaaaccaccacaactccaggaaggaaaccaaggggcagacccaaaaaactggagaaggaggaagaggagggcatctcgcaggagtcctcggaggaggagcagtgacccatgcgtgccgcctgctcctcactggaggagcagcttccttctgggactggacagctttgctccgctcccaccgcccccgccccttccccaggcccaccatcaccaccgcctctggccgccacccccatcttccacctgtgccctcaccaccacactacacagcacaccagccgctgcagggctcccatgggctgagtggggagcagttttcccctggcctcagttcccagctccccccgcccacccacgcatacacacatgccctcctggacaaggctaacatcccacttagccgcaccctgcacctgctgcgtccccactcccttggtggtggggacattgctctctgggcttttggtttgggggcgccctctctgctccttcactgttccctctggcttcccatagtggggcctgggagggttcccctggccttaaaaggggcccaagccccatctcatcctggcacgccctactccactgccctggcagcagcaggtggggcaaaggggaggggggggtgcctggcccccagngattcccccccagccaaaactgttcttttgtcacccacgtgggggctcactttttccatccttccccccaaccttcccctagtcccccggtaactagggttgggacagccccccctttcggcctacagggaaaggcaaggaagggggtgcaagtgccccctacctcc

SEQ ID NO: 254591 - DNA, 500 bp, Homo Sapiens
gcccattttttaggccaaaagtcttctgggatgcatccagccaccctgcaccccactgccatgccccggcccgtgccactacctccctctccaccccacaactgctgcctccgcctcttacacggcatcccatccttgccttctgccacctccctgtgcggtcaggtgccctttgaaaggagtttgagcaatgttcatcctcattgcctcctgttctgcccacgatcccctcccccaagatactctttgtggggaagaggggctggggcaatgcaggctgggtgaccgactaccccagtcccagggaaggtggggccctgcctctaggatgctgcagcagagtgagcaagggggcccgaatcgaccataatgggtgtaggggccacctcctccccctgttctgttggggaggggtagccatgatttatacccagcctggggctccccctctggtttcctatttgcagttacttgaattaaaaaaaatccttttctggctc

SEQ ID NO: 254592 - DNA, 664 bp, Homo Sapiens
acagcaagccataatcatatctgacacagccctgtgctgagcatccagagcctggtcaatttcatcaagcaagtaaaatggagccgggtcacatttctgaatggcaaaaatcagagcaagggctacccctgtaaatgacaccctaattccaactccagtaaactggtcaactgatgggacactgctttgtgagccagaacccctctcactctcaccactcccttctccttcatcttgagactgactgccctccacatctcctttcttcatcaccaaagtagctttgccaccaggtactaacttctggaatacttcactgaagttcttagatacctgtttgaaagttaactgaatagcttcatatttccgaagttcaagtacattcatcagttccatgatcgatttgtaacccctatctaactcttcttgacgctttattaacttttctttctgctcggagaaatttacaaactgatccaaagcctttttgttaacatggctgtacttctttaattctgtgttgcactgctcaagttttcgaaacaactgtttgaggctcagtgtctggtacttttcaaatgcttcctggggaagtgatccaagttctcgaattttcttcatacactcttctttcttcttcaatagcatgccttgccgatttgtc

SEQ ID NO: 254593 - DNA, 1644 bp, Homo Sapiens
  misc_feature (605)..(614): n is a, c, g, or t
  misc_feature (650)..(661): n is a, c, g, or t
  misc_feature (1006)..(1098): n is a, c, g, or t
ggtgctgcagtggcatccagggatcagtggaacattgctttgagaaccctcctgctgttacggaggcagcacaaagctggtgacccctgagccaacacggcactgggatggctttctaggacagaaccctgtcggcgactgtcacatctcaaactaatagctgattttaaaagccagcagcagcgacgccatgtacctgagtacaggtggcagttgcagagccgtgggctgtagaaggtcagatggggcttcccacaggggaaatctgggcgtgctgtagctcagggtgactcccagctccgtcactagcagggcgacccccttccttctggagccttagctctgaaagcccccagtgggggtgccctttcagatgccccctttccatttcaaaggctctgactcttgatcttgaagccggacgcggcactggcactcggcttcagtttccactgtgacagatggaggtctcctttcgccccagcccaggtggccaagcccatcctggcctcagaacatgctgagcacattttgtagggtggcacctttttatccaagttactagctacacatcagtgtttaaagagaaaaaagtgacctttcannnnnnnnnncttgaaacttgaggaaacaagatacatactactgannnnnnnnnnnncttaaaactaaatgcatgactgcagagcggtagaggtgtatatttttcatactgtggggcaaagtattggtgctgcttttgggagatggactggaacgtctgggttctgtccccgggccccgcagctacgtctattttctgtagaaggtgccacagtgagacccggagccaccccttcctgccctggcgccgtttagagctgggagcccgtggactcccggcctgtttctaccttctattcaaccactctgacggtggggagacaagaagaaatagaacttttggatagtggtggtaaaacacattggattggaactattttagtaaaaggagtaacaaacaagnnnnnnnnnnnnnnnnnnnnnnnnnnnnnnnnnnnnnnnnnnnnnnnnnnnnnnnnnnnnnnnnnnnnnnnnnnnnnnnnnnnnnnnnnnnnnaggaagaccatcacaccgcacatacccgacaacaccacaacaacgagcggccgcgagcgtcactcaatatcacccacagggccgagtccagttactgcacacaaccgacatcagtatctatataaacacgaggcggcggacccctcaaatacgagtagcgctcatgacaatcaaaacagaaaggagcaggccaggcgtagcatctaattaaatacacaaatagctggcttcgtagagtacacactcgacttagttcgctgtatacactattttgttgacgagaagaacactccccaatctaccatcatggggggcggtcagtatactagataagtatgtgggtgcaaaaaccactacgcagaggcagaggattattcgctgggcgtagtgagttgagtatattataaacatacgatgagccagtgtagtatatattcagtagttgaacaactcacaccacaagtgtcctttttgcgtggtcgtgtgtgtgaaaagaatactaatatttattacatgtgtgagtatacgtaacagtcagaaataata

SEQ ID NO: 254594 - DNA, 917 bp, Homo Sapiens
gctcataatccctggggaccattcaccagcccctggagggggaggttttaaaagaaggatgaaagaggggccaaaaagggttaccagtatcctacaagcacagagtttaagtttcaagacgttaaaaaaaatctgtcccggcccaggggactgaacatcagaagccagcctgaccaggcacgtgtggccttggggcaggtccactgctgctttcttgcccagctagcaaggcacaccaccccaccctcccgcatcaaatgcccaccccaacccaactcccctgccgccgccgcgctgctcggggagtgactccaggacgccttcgtggagacatgggtagtctgagggggaaggccacgagatccagccagatggtttaaaaattcttaaggaactcttcagccacaatgcgggcacgggcattgactgacagcttcatctcactgatctccttgtcaatctcctccatgaagtggatcacaaagtccaccaacttgtgtttgtacatctgctctgtgtggaagttggtgatcagaaagctgatatcatacccctccacaggcttccttcgaaggataaagaagttctctgctcgcatcatcatgaagcgcatgaacttgtggcacaaaatcttctcgatctcatcagcctgtttcacagcaatgctgacccggacagagttgatggagccctcaatcagaaccttttccttctcattcctgctgatggtcacaggttgtaacaggagctctttgctactcctgacttccacttccggcttgttgtgtcgttccacaacctgggaggagaagttctccaggcagagggcagcctgcaatgtggcccgcacggcactcaggtaggggcggagagtggcagtcatcgcgggcgctggctgggccggaaagcggaagtac

SEQ ID NO: 254595 - DNA, 1123 bp, Homo Sapiens
  misc_feature (703)..(721): n is a, c, g, or t
tttattaattataaaaaaatccccacgccgggggtaccacccaccgccccgaggcctgggtggcgaattcggcacgagggattgagggctccatcaactctgtccgggtcagcattgctgtgaaacaggctgatgagatcgagaagattttgtgccacaagttcatgcgcttcatgatgatgcgagcagagaacttctttatccttcgaaggaagcctgtggaggggtatgatatcagctttctgatcaccaacttccacacagagcagatgtacaaacacaagttggtggactttgtgatccacttcatggaggagattgacaaggagatcagtgagatgaagctgtcagtcaatgcccgtgcccgcattgtggctgaagagttccttaagaatttttaaaccatctggctggatctcgtggccttccccctcagactacccatgtctccacgaaggcgtcctggagtcactccccgagcagcgcggcggcggcagggagttgggttggggtgggcatttgatgcgggaggtgggtggtgtgcttgctagctgggcaagaaagcagcagtggacctgccccaaggccacacgtgcctggtcaggctggcttctgatgttcagtcccctgggccgggacagattttttttaacgtcttgaaacttaaactctgtgcttgtaggatactgtaacctttttgtcnnnnnnnnnnnnnnnnnnnaaacctccacctccagtggctgtgactggtcccagtgattatacgttattggttgctgtgggtctgggcgggcctggagccagaaggcgacttattttttctctcctatgccaccccaggtggggagggagggaggtttcaaactccagtttctcccttggccctttaattcccaaccctcctgggccccagtataagtgttgggagctctctgccagcttcctgagttctgcctaaagatggccccccagcactggttggggacaagggccaaattggttaccaccagtcatgcctagggcctggggcccaaaagccgggcaacctctggctacaggggccattgggtgctctcccacttgagaggggccgctgtttcgccttgtccgtcagtgccagtgc

SEQ ID NO: 254596 - DNA, 1479 bp, Homo Sapiens
gaccctgcagtggcgcctaaagtctgagagagggaagtcgcctctgtgctcgtacatgtcccagagcaagcacacggagtgcccgggagctcatgtactcgggagccctgctcttcttcagccatggccagcaaaacagtgcagcagacttgtccatgctggtcctggagtccctggagaaggcggaagtggaggtggctgacgagctgctggaaaatctggctaaagtgttcagcctgatggaccccaactctcctgagcgcgtgacctttgtgtccagagccctgaagtggtccagtgggggctccgggaagctgggccacccccggctgcaccagctgctggccctcaccctgtggaaagaacaaaactattgtgagtcgaggtatcattttctgcactcagcggacggggagggctgtgccaacatgctggtggagtattccacgtcccgcggcttccgcagcgaggtggacatgttcgtggcccaggccgtgctacagtttctctgtttaaaaaacaaaagtagcgcatcggtggtcttcacgacgtacacccagaagcacccgtccatcgaggacgggcctccgtttgtggagccgctgcttaacttcatctggttcctgctgctggctgtggacggtgggaagctgacggtgttcactgtgctgtgtgagcagtaccagccatccctccggcgggaccccatgtacaacgagtacctcgaccgcataggacagctgttcttcggcgtcccgcccaagcagacgtcttcctacgggggcctgctcgggaaccttctgaccagcctcatgggctcctcagagcaggaggatggggaggagagccccagcgacggcagccccatcgagctggactgaactggccaggccacgtggagacaccacggtcgacgacggctggagggacgtttcagaggcgagtcctgggtggctcctcgccttgggggctcctggccctgaggctggcggtggccgcatgccggcgcgtgtctgtttctgtgcggcggctcagggtggcgcggctgctgctcactgtgctgctgggacccaagagtggggcgtcgcccctgctggccgccgcgtcccccgagattgacccacaataaagcacaggccttaccgcggcgtcaccctctcccactctctttgttctgggtcctttcgggagggctgatgggcagcacaggaggcccgtcctcgggggggttgcgcacataaccctgattggcgggcggccgcgcacagctgcggtcacccaatgaagccgctgcgcccccagacccggaagaccccacccagcgtccaccctcagctctgccactggggcaacgcccttgctccccaacacacacagagcatagttcggttggctatggccgcaccgcggttctccccgccgtcaagaagaaatgacgcatgttttcattatagcgcacaaagtcgcttctaggaacat

SEQ ID NO: 254597 - DNA, 794 bp, Homo Sapiens
atttccggaccctgcagtggcgcctaaagtctgagagagggaagtcgcctctgtgctgagccccacagtcttcgttataacctcacggtgctgtcctgggatggatctgtgcagtcagggtttcttgctgaggtacatctggatggtcagcccttcctgcgctatgacaggcagaaatgcagggcaaagccccagggacagtgggcagaagatgtcctgggaaataagacatgggacagagagaccagggacttgacagggaacggaaaggacctcaggatgaccctggctcatatcaaggaccagaaagaaggcttgcattccctccaggagattagggtctgtgagatccatgaagacaacagcaccaggagctcccagcatttctactacgatggggagctcttcctctcccaaaacgtggagactgaggaatggacagtgccccagtcctccagagctcagaccttggccatgaacgtcaggaatttcttgaaggaagatgccatgaagaccaagacacactatcacgctatgcatgcagactgcctgcaggaactacggcgatatctagaatccagcgtagtcctgaggagaagagtgccccccatggtgaatgtcacccgcagcgaggcctcagagggcaacatcaccgttgacatgcagggcttccagcttctatccccggaaatatcacactgacctggcgtcaggatggggtatctttgagcacgacacccagcagtgggggggatttgtccctggcctgaatggaatggaacctaccagaactt

SEQ ID NO: 254598 - DNA, 1270 bp, Homo Sapiens
  misc_feature (978)..(1012): n is a, c, g, or t
cactgcttgagccgctgagagggtggcgacgtcggggccatggggctgggcccggtcttcctgcttctggctggcatcttcccttttgcacctccgggagctgctgctgagccccacagtcttcgttataacctcacggtgctgtcctgggatggatctgtgcagtcagggtttcttgctgaggtacatctggatggtcagcccttcctgcgctatgacaggcagaaatgcagggcaaagccccagggacagtgggcagaagatgtcctgggaaataagacatgggacagagagaccagggacttgacagggaacggaaaggacctcaggatgaccctggctcatatcaaggaccagaaagaaggcttgcattccctccaggagattagggtctgtgagatccatgaagacaacagcaccaggagctcccagcatttctactacgatggggagctcttcctctcccaaaacctggagactgaggaatggacagtgccccagtcctccagagctcagaccttggccatgaacgtcaggaatttcttgaaggaagatgccatgaagaccaagacacactatcacgctatgcatgcagactgcctgcaggaactacggcgatatctaaaatccggcgtagtcctgaggagaacagtgccccccatggtgaatgtcacccgcagcgaggcctcagagggcaacatcaccgtgacatgcagggcttccagcttctatccccggaatatcacactgacctggcgtcaggatggggtatctttgagccacgacacccagcagtggggggatgtcctgcctgatgggaatggaacctaccagacctgggtggccaccaggatttgccaaggagaggagcagaggttcacctgctacatggaacacagcgggaatcacagcactcaccctgtgccctctgggaaagtgctggtgcttcaaagtcattgggcagacattccatgtttnnnnnnnnnnnnnnnnnnnnnnnnnnnnnnnnnnnatttttggtattattattttctacgtctgttgttgtaagaagaaaacttcagctgcagaggggccagaactcgtgaggccggcaggtccctggatcaccacccagttggggacgattgacccccggggaggccacaccggctcgggatttcagccctcggaagggcagaatcctggggtcccccgggcctcccctggagggcgcgcctagaactcttacggcccaggcaagctggggaatccaatttcccccggcccg

SEQ ID NO: 254599 - DNA, 423 bp, Homo Sapiens
  misc_feature (30)..(30): n is a, c, g, or t
  misc_feature (43)..(43): n is a, c, g, or t
  misc_feature (54)..(54): n is a, c, g, or t
  misc_feature (57)..(57): n is a, c, g, or t
  misc_feature (64)..(64): n is a, c, g, or t
  misc_feature (131)..(131): n is a, c, g, or t
  misc_feature (134)..(134): n is a, c, g, or t
  misc_feature (345)..(345): n is a, c, g, or t
  misc_feature (350)..(350): n is a, c, g, or t
  misc_feature (369)..(369): n is a, c, g, or t
  misc_feature (378)..(378): n is a, c, g, or t
  misc_feature (396)..(396): n is a, c, g, or t
  misc_feature (404)..(404): n is a, c, g, or t
gactgtttacattcattacaacggtaaggnttctgttgcacgngacttataganagncttgccncaatctggcaggggacatcaccttctttgaagaactgagagctgttccttatggagttttgagaccnggntagggcacttgcaatttgttcccagatttgctgacaggaccactcttcatgtgcgcctgcttctggaacagactccaactcaatttggatcttgcctcctgaattcccttctctctgggcttgctgtccccatcatccaaaacttttccttccctaagaagtgggaaagtatcttgggtgggaatgggttgattccctactgagagcaggnttccngaagttctctaggcatcanatctcgggnaaagtttccctctggggnaaggggtncagaagccccagttcctcc

SEQ ID NO: 254600 - DNA, 559 bp, Homo Sapiens
  misc_feature (55)..(55): n is a, c, g, or t
cgcgaactagagaaacacagacacgcctcatagagcaacagcgtctctcggagcntggagccgccaagctcgagctgagctttcgcttgccgtccaccactgcccaccactgtcgtttgccgccatcgcagacccgctgctgacttccatccctccagatcccggcaaggtgtctgctgtgctcctgatccagcaaggcacccattgccactccccgattgggctaaaggcttgccattgttcctgcaaggctaagtgcccgggttcatcctaatcgagctgaacactagtcactgggttccacggttctcttccatgacccacggcttctaatagagctataacactcaccgcatggcccaagattccattccttggaatccgtgaggccaagaaccccaggtcagagaacatgaggcttgccaccatcttggaagcagcccgccaccatcttgggagctctgggagcaaggaccccaagtaacatttggtgaccacgaagggatctctaaagcaatgggaaacgttccccccaaggcagaaacgcccctgagatgta

SEQ ID NO: 254601 - DNA, 643 bp, Homo Sapiens
atgtgtgctatgacccactatgacacagcatctgcattttctaaaaaatgccatgcaggtgtcttggggagaggtattttttaagcaatgaaaattcaactgagtacaaagccccctcttggggggtaggggaaatctctctgatgaaacacttcacaactgctgctataaagaaattctctaataggtcgaatcgctgtctaagaaaatagtacttcaggccaaaatttatatgaatattcgatcatattgagattctcatactatcatttaaccaccaggaagctgaagggtgtgaagtacaaagctgacagcactttatttaattgctctgacataacatggtgttcagtatatacctataatcggaaagttattactctctatggcactgcatgttatcccgattatgcatataggatcttgacctatgactctatgtatagccatctcacactaagcaatgctgttagcgcgctattaacctgaaagactatcccgatgcctctagggggcgacctgaacccaaattgccttatgaagcagtcgcttacaacttacttgccagcacttacagcaccaatgtctgggaataccgtggtatcgacattcgtcatgtggcatgccaccatttgcacagtcg

SEQ ID NO: 254602 - DNA, 600 bp, Homo Sapiens
  misc_feature (587)..(587): n is a, c, g, or t
aaaggatggggttcaaattgtgaagctgacaacttttcatgttttacaattagtctaagagaccacttcttggctaaattattatatcaaatatattcaaatcatattcttaaactcatcgagccattttgaacaaaaattatttttgtttagcttcatgagtatctttggaaaataatttgttgaatatatatgattatgagatattttctgataaacactgaattttgaaacctgaactcactatataattgcagtgttttgaaggcctgcatccattagcattgcattatattcacactgccttttttagtgaaccaagacccatcttctggacgacagatttatcttaagatgaaaggttgtataacatgcccacaaggcataaaaatgttaatgatgcaagtaagttctaagagtttaatgaccaagcctctaccaccagatgctgactgcttgttttgcagtgttcaggaaacaccattttcctggctcttaacgcttttgtattggtatggctggaatctcactgactcgtgtgttatcaaagctatatcaggcctgggtgactgaattcttgcaggcantgttggccacctc

SEQ ID NO: 254603 - DNA, 697 bp, Homo Sapiens
  misc_feature (92)..(92): n is a, c, g, or t
cgggaatccacaattgtggttaaggaacacagggaagaaccagatctaagcattaaagagaaaatatcccacgctcctcttcctccctaacnccgaactgctcttacatacaagataatttttaaattataagattggtattaacacaattattgataaagagaaacaatgaccaactcattagctaacgatgctagcaatacttatgcaagccctagagttaagggtcttagtgtggacaacctttccagaattggaaggaaaacaaaccagaaagcttattaccctgcagcagctgaaaagctaagccacagccattttccctaaagttctgtttctgggagaatgagatcttcaagaataactcttgccccgtgatgaggcagtcaaattcaaaccagtgatggcaacaacttgcaaacacgtaattcctgccctaattttccagcacttaaaacaaaatcaccacgcaatacaaagtttctatgtgcctctatgcctgaaatcaacaagaaacagctaacctacccaaagactcctctttctctgccagggcaaaagcaatctgcagcccagagattcaaacctagacatacacatccacaattgtcttaatctcaacagcactgggaaagctttgcacgcaacttaacctgtcatttaaccctttccactagttctcccttaaccagactgc

SEQ ID NO: 254604 - DNA, 1001 bp, Homo Sapiens
cagatcatagatgagcaactacccattaaaatatttacagttaacttgttgctctaaaaataaaacttaactgtttgcctcaatttatttttaaaattcacttacgtatatggaatgtgcttttactcttcttaaaaaagcagctttcatatcacacccttgtttacagaaaagctacatgtgctgcatgctgactttgacacttaagtagcttcttggatcaaaatggcttctagatactaaatgccacttaattcagcactattcttggttggtctgtataagtaacactttaaaacttgcagctctggaaagacagaactttactaacaaagtagaaagtgatttcaaagtatcttccacaaaagattgtactggtaggcggttgacaacattctgttcgatctactttcaaatttctagagaaaatcattttggaatactactgtactgattcttggccttcgttgtctctaaaagtgctgaaacattatcttaaaactgtccagtttgaattgagcttgttttcatcaatatacatattgaaaattcctggtgtagaaaactcaacatgtgctgaatacggggtgtacttcccttcaactacctaaaaggctgaacttttgttaaatcttaaagaaatggtcccaacagcttaacttcatttttttaatgatagttgaatgtgttttccataaaaatttcttttaaaaagaggcaactgattaaaacaacaacatggccagcaccattatacaagtaatgttattgagtttacaactgaagttctgtaaaattgtttctagatcgacaccccgaggagcaaccctgcattattatatcaaccttttcccctcccctaaaccgtccccaaacctgtgacttttccttgctgagaagctatctcccaggttctggttactaatgtttgttttgacagcctaaaaggcaaaccccttaattactagcaagcaatcaagttcctgggaagcctgattttt

SEQ ID NO: 254605 - DNA, 772 bp, Homo Sapiens
caaaagcagcaaaagcagaaccccttgaagcctgggaattcacacattccttgaaggcttggaattcacgcactgtcacttctggttaaaataagtcacgtggctagcccagattcaaggggtgggaaaatggattctacttgatcggagaagcagcaaagtctcattgccaaagggtgtgtgtacagggaggggaatcgtagctgtcttctcatactgtcagaagcagattgtgaagacttgcacacaaagtaaacagtttggaatttatctcaagggcacaggaaactatcaaagtttggctttttggtttttgttgaaagcactaacataataagattttctactcagcaccccttattcaggaaccgttcctctcttgtaatccacatggttattgcagccatcacattaggagaatggatagaatggactaccttttggcaagttgtttgaattagggccaatcagatccttctttttggtgtttttctcctgaaaatgagagttggtctcttgctaagcctgaagctttaagatgtaaatttgggggagtgctaggtggctgtgcttgcagctatgtgaaaaaagcactccgcacaaagaagcagaggcgaaagatgagaatcctgatggccttggagtccgctcgttctgatatccctctctgcctcagcttcaagtttggtttgtctcttggaaccaaaggagtctcgactactataaagagagcttaccacctgcaagtagggagttgcaagtgacaacataa

SEQ ID NO: 254606 - DNA, 1245 bp, Homo Sapiens
  misc_feature (624)..(624): n is a, c, g, or t
  misc_feature (650)..(650): n is a, c, g, or t
  misc_feature (1065)..(1094): n is a, c, g, or t
  misc_feature (1202)..(1202): n is a, c, g, or t
catacactgaaaacttaaagcatattcctttttggttgccttgtatgtagaaatcagttctccaagtgctgtgaatggtgccacttaggagtagaaactgatgattgttgaaatggcctttgggtggtctgaaatagaccagtggaaacagtagctttgtaggcaagaaggcaatagtaagaaaatgaaaaattgactccccaaactgccatcactccttttaccatcttttttgtgtttttagtagtttggtttctgacggagacaatagaaacttacttaaaagtaaaatttaattctagctgttgcaaacaggccaatattgggtcctcagttggggccaacttgggtagacgagacagtagaaacttctgttttctgggagctgcatgtgtcggattcatctgtcatggccttcccacacaccatcttcatgatgcaagcttggaactggagagaaaggtacaattggagataaccttggcagatgaggaagtatgggaaaaaagaccttattctctgtatcaccaaagccttgcacaatgctttgtacccagaatgcccttaggtggttttgaatctatcttccccatcctgaaaactatctagattccagtctagaanctacttcctgggtctacggtaatccntaaactggtccaagtctgagacctcactgttggtaaattcacaaaccatcctgcttcataaaagcactgtcagcagaggcccctccattactagcaggtgctcccagctggaaaggactgccaattctcttctatccagggaggtttcaaattagttttgagtctacctctgggattgaggaaacaataccatctgaaagtagggtttttgccacttagggtttggtgtgtattagctcggatttcagatgggataggaaatcccccagtaccttcagatgataagatattttagagatttttgcatgtggtatgatttctgggcttcacacgtgctcgtgcaggctaaaagttggaagggaaatgattaagaaattatttaatgcaaggactgaaaattgagaggaatctgagnnnnnnnnnnnnnnnnnnnnnnnnnnnnnnagttcccggatacatgtgcaggatgggcaggtttggtacataagtaaacgtgggccatggggggttggctgcacaaaatttttcaataaaaaggcctttcatttcaanaagaaaaagaaaacacaaagaaaatctccgacagacgcgagat

SEQ ID NO: 254607 - DNA, 780 bp, Homo Sapiens
cttgttagttcctgattcccgataaaaaagacattttattgaacaaatgaacagttcaaggtctaaggcaatgattaacgagcagtataaatgctctagactataaggtaatatccataaccactatcagttctctggtattcctttacttcagtcattattaggtgatcattaataacagattatcccaatctaaattttttgaattatgatatcttacctgaggaatccagatccaacaagcacccccgcaatggacagcagagccactacactgttgactatatttggattttggacgataccaagtagcacaagagttagaaattcaccaattaagtggggggccaagagagcagcagaaaaatatccaaatcgggcaacctcaggatgtaagcccagcgtcctagaaaagcataagctctttagtttcctctccaagggctatcatttaagaaaaatactgcacttgcctctgtgaataaatcctttgtggtgagtgggtggggagaagtttgccagggcaagcccacactccccctttgaaaggccgttttggaaaggagtcaacatgagactatttattatatcaaattgttcccattggctgcaactcattgggagccaccttttccctttcacggctccttcagctctcataggaaaacattaaattacttagacaatggtcacaactaaccgcagtaagcaggcttgttgaactctacaggcatcttcataaataaccatgttctgcctagccaacaccacacctacctc

SEQ ID NO: 254608 - DNA, 1166 bp, Homo Sapiens
aaaaccaaagattctcctggagttttctctaaactgggtgttctcctgaggagagttgacaagaaacttggtgagaaataagctggcagtgattacgcgtctccttcagaatctgatcatgggtttgttcctccttttcttcgttctgcgggtccgaagcaatgtgctaaagggtgctatccaggaccgcgtaggtctcctttaccagtttgtgggcgccaccccgtacacaggcatgctgaacgctgtgaatctgtttcccgtgctgcgagctgtcagcgaccaggagagtcaggacggcctctaccagaagtggcagatgatgctggcctatgcactgcacgtcctccccttcagcgttgttgccaccatgattttcagcagtgtgtgctactggacgctgggcttacatcctgaggttgcccgatttggatatttttctgctgctctcttggccccccacttaattggtgaatttctaactcttgtgctacttggtatcgtccaaaatccaaatatagtcaacagtgtagtggctctgctgtccattgcgggggtgcttgttggatctggattcctcagaaacatacaagaaatgcccattccttttaaaatcatcagttattttacattccaaaaatattgcagtgagattcttgtagtcaatgagttctacggactgaatttcacttgtggcagctcaaatgtttctgtgacaactaatccaatgtgtgccttcactcaaggaattcaattcattgagaaaacctgcccaggtgcaacatctagattcacaatgaactttctgattttgtattcatttattccagctcttgtcatcctaggaatagttgttttcaaaataagggatcatctcattagcaggtagtgaaagccatggctgggaaaatggaagtgaagctgccgactgtgcatgactgctctgaacgtctgaaatgagagtgccatgtatttctttcttgacaggacatctcaagtcttttaaccattaagactccatttgtgcctcttggatccaagcaggccttgaatgcaatggaagtggtttatagtcccttgctcttacaacttgcagggacatgtggttatttggaaattgtgactgagcggacccaagaatgtaaataatattcataaacctaaaa

SEQ ID NO: 254609 - DNA, 324 bp, Homo Sapiens
  misc_feature (38)..(38): n is a, c, g, or t
tagtcttaattcctaagaataactgggaattgagaacntgcagttcacactcaacagtaccagggcagaaatgaactaatgcatgcaatttatttagcctatcatgtgggctgtgagtttttcctggaacatccgggctggttttcttctcttggtataatggtttattacatgtgaatcatatcataacataaacttgttagttcctgattcccgataaaaaagacattttattgaacaaatgaacagttcaagggctaagggcaatgattaaccgagccagtattaaatgctctaggactataaggggaatatcccataacc

SEQ ID NO: 254610 - DNA, 507 bp, Homo Sapiens
ccccaaatgcagggccaaattctgccatattcagcaatgcccaaggtattccagagggagtatgaaatgcaggtagcaaaccccaagttccactgctttctttcgaaaaatctcttctccagacagatagtaggctgagagtagtccaccaacaaagcgtatatttacttcaaagacagaaatttcagcattcacattaaaatctaaattttcttcaacccatgattttgcttcttcaaattcatgtttcatttccataataaaaagtgtatccagggcatctactatagttgctcctttgatgttaccaaacaaactgcttgaatggcctccttttgatataggtttgagttcatttaatccccaggcataacctttataattattccaagcatgtttcatcatctggtggaaggggcaaacctccatctccccatacattgcattgttgcagtcttcagagtttcaaaggcttgccgtttctccctgaaaaacacggccggtcgg

SEQ ID NO: 254611 - DNA, 375 bp, Homo Sapiens
ccgaccggccgtgtttttcagggagaaacggcaagcctttgaaactctgaagactgcaacaatgcaatgtatggggagatggaggtttgccccttccaccagatgatgaaacatgcttggaataattataaaggttatgcctggggattaaatgaactcaaacctatatcaaaaggaggccattcaagcagtttgtttggtaacatcaaaggagcaactatagtagatgccctggatacactttttattatggaaatgaaacatgaatttgaagaagcaaaatcatgggttgaaggctttgttggtggactactctcagcctactatctgtctggagaagagatttttcgaaagaaagcagtggaacttggggta

SEQ ID NO: 254612 - DNA, 1491 bp, Homo Sapiens
  misc_feature (4)..(4): n is a, c, g, or t
  misc_feature (10)..(10): n is a, c, g, or t
  misc_feature (51)..(51): n is a, c, g, or t
  misc_feature (73)..(75): n is a, c, g, or t
  misc_feature (83)..(83): n is a, c, g, or t
  misc_feature (86)..(86): n is a, c, g, or t
  misc_feature (90)..(90): n is a, c, g, or t
  misc_feature (93)..(93): n is a, c, g, or t
  misc_feature (100)..(100): n is a, c, g, or t
  misc_feature (109)..(112): n is a, c, g, or t
  misc_feature (123)..(123): n is a, c, g, or t
  misc_feature (141)..(141): n is a, c, g, or t
  misc_feature (167)..(167): n is a, c, g, or t
  misc_feature (176)..(176): n is a, c, g, or t
  misc_feature (187)..(187): n is a, c, g, or t
  misc_feature (190)..(190): n is a, c, g, or t
  misc_feature (193)..(193): n is a, c, g, or t
  misc_feature (197)..(197): n is a, c, g, or t
  misc_feature (200)..(200): n is a, c, g, or t
  misc_feature (240)..(240): n is a, c, g, or t
  misc_feature (249)..(249): n is a, c, g, or t
  misc_feature (1326)..(1326): n is a, c, g, or t
ggtnctgggnaggatgttctttttcatcaacgtaatctttctttaggagangagtactcatttgcttgcaaannncataatcngtncttngantggaganactgcattnnnngcctgcaagcnccacgtcctgagcaacanaggcggggggggactggtagaatagngcctttttngtaagtctgtngcngcnagangancagtgttgtgacgctgtctttctgtttcataacctgtgangtggctcanggaacctaagtccttcccattgaaggctgccgtactgaggtgatgggccaagctggagatatccccaaagcccatgttgacaccctgtcctgcaagcggatggactctgtgggctgcatccccaatgagcgccacccgaggcctgacgtactcagcagcatgtcccaacccaagaggaaacagaactcggcttttggcatccaccctggctacgcttgggggcagctggcgagccgagaccttagtgggcttcagaaggctgacagcatactgcagcatgggcaccagctgtgtcgatgaagtccgtgtggtcagcatcactccaaaaggcagagttaacggcatccacaaatttttcctcatccatgctaactagctctgctgcatgttcatgggacgtggaccaaaccaaggaactcaaggtgtctgagagcgggagcagagcaataggcccagagggaagaaatctctgccaggctacgttgttttctgtggcctctgataaatgcagagtagccacaacagcagactggtcatagttccagctcacattctggattccaacagcctgccgtactccggagttgtgaccatctgcacctatcaacaatttggtctggaaggtgctgccatcacctagggtaatatgaacccaagggctggagtcggccataggaaatggacaaggccaggtatagcgaatggctttgctcctgtagagaaccgtcactcggtcagacacagcctccaactgcttagtgagagcatgcatgatgacatcattctccacgatatagcccatgtcatctaaattatccttatcaaacattatcagggcctctgagcaggcgtcccacactactgagaagcgttgcagagccaggggaaatggagctgaccctgttgctgtaagtttctgacaatttctccagtactttctttggacctgcttcgagcaacaggattttcttgtcatgaaagtgaatatcatatccttgcctcctcgggcgggatggatcggaggctgccctggaagccaaccagacgccaaagctagaaaggggtggaccctggccncgcatagctctcgctgccaccgctgctgccactatcgctgtcactgtcgctgctgcctctgtccagctgaaatgaccgtggggaggcctgagggagcccccggaggcgcggaggggagccgtcaggtgaggagagaaaagagactgcccccgggaaagatcccgg

SEQ ID NO: 254613 - DNA, 727 bp, Homo Sapiens
cattagcctaagctttggttacaaacaaggtttctttattgaatttttaattccctgctactcacatttcaccttgtttgtcttgtggctgatgctgctcagtggagtgatgctgaccacacggacttcatcgacacagctggtgccatgctgcagtatgctgtcagccttctgaagcccactaaggtctcggctcgccagctgcccccaagcgtagccagggtggatgccaaaagccgagttctgtttcctcttgggttgggacatgctgctgagtacgtcaggcctcgggtggcgctcattggggatgcagcccacagagtccatccgcttgcaggacagggtgtcaacatgggctttggggatatctccagcttggcccatcacctcagtacggcagccttcaatgggaaggacttaggttccgtgagccacctcacaggttatgaaacagaaagacagcgtcacaacactgctcttctggctgctacagacttactaaaaaggctctattctaccagtgcctccccgcttgtgttgctcaggacgtggggcttgcaggccacaaatgcagtgtctccactcaaagaacagattatggcctttgcaagcaaatgagtactcctctcctaaagaaagattacgttgatgaaaaagaacatcctgcccaggacccatcatacatattttcaagatcttatttaatttaataaacttactttacatt

SEQ ID NO: 254614 - DNA, 630 bp, Homo Sapiens
aaggggggtattttaaaagttgaagattttgaaagaaaagccagggaagtgtgtgataacttggaaaacttcacctcaggcagtcctttcctgtgcatggatctcagctacatcacagccctgttaaaggatggctttggctttgcagacagcacagtcttacaggctgccgtactgaggtgatgggccaagctggagatatccccaaagcccatgttgacaccctgtcctgcaagcggatggactctgtgggctgcatccctaagaataaagcagagttcaggtgtgacctctggcagcaaagtgagaagggagtggccctgctctgttatcgtcttacccaatgagcgccacccgaggcctgacgtactcagcagcatgtcccaacccaagaggaaacagaactcggcttttggcatccacccctggtacgcttgggggcagctggcgagccgagaccttagtgggcttcagaaggctgacagcatactgcagcatggcaccagctgtgtcgatgaagtccgtgtggtcagcatcactccactgagcagcatcagccacaagacaaacaaggtgaaatgtgagtagcagggaattaaaaattcaataaagaaaccttgtttgtaacca

SEQ ID NO: 254615 - DNA, 455 bp, Homo Sapiens
gctaagaatgaccactgcccctgatcccccaccccttgcctctggccaccctgtcctccccccaccaccctcaggcctatgaaacacacagggttctagatttgaactctgctgtgaagtgactggaagggagcagaggccagctgggggccagtgggggaggttgtttccactaggagatttttataaaccctctccagcctctcccaaaggaagcgttggcagcaaagggagatgatgcccttacccaccttcctgtgagtgaagagaggaagcagccccagggaccaattttcccaattgacctctttcttcctctttcaccatgtgaggcagggagccctgagcccttcagctgcctgcacaacccctgacattggctgctggtgactcaatctgccaaatgtgctgcagctcgttttctcccaattacagcaagactgtcagcctcaaaa

SEQ ID NO: 254616 - DNA, 1045 bp, Homo Sapiens
  misc_feature (72)..(72): n is a, c, g, or t
  misc_feature (192)..(192): n is a, c, g, or t
ggggtaccacctaagggatccaagtaaagtaggaaaagggtatatgtgtggcgggcctgtccttaagagagnaaggtggaatggaatctgctgggtacctgtctcagaccaaacttggggctgaaccagtgccccttcttctcagccctcctccacagcctgactgtactgcaagcggcacccatgagaagnaggtgtgaaggaagcctgaggacatccacctcgagaaaaggaaacaggaaaactatttccttccgccttctctggaccaaatttcactcccctcagctccagagagtgctgcaaaaatcttccttagggacgctgtgaagacacggggaagaggccagccctgaggaaacaagcaaacaaacaaaaaatggaaaccaacaccatataaccacaggttgggtagctcctaaatcctggacagcatttggattgggggtaagggcaaactccagctccttgttttataacccgcacaaggtgccaagaggtttaaggaccacaactgacctctctttccctacaagcaccattccttggattcccagttttgttgagctcatttgaggtcatccttgccatcctcttaaaaaatgacacagcctcttggttattccattttctatccctttctacaattatgaacacactctctaaacaggagatctatatatgctctcatcctgcaacccaagagattaggtgacctaatgatgagaaggctaacttatttgctttcctgggtggtcctgatggaaatgaacagcagcagagttctggtgggatagagcagtctagtctgagccactgtgtgattccccaggggactggtccctgggtacatgggtccctggctctctgtctcagttccacagatattactcaacttggccatttacgcctcagctaaaacatatgagcatgagggaaaagggacaagaaatacttttgtcctctagaaaaacttaactcaatacatcttggctactttgcctcaacccacggggtttcctggaaacatttgttgaacttggcc

SEQ ID NO: 254617 - DNA, 943 bp, Homo Sapiens
  misc_feature (255)..(267): n is a, c, g, or t
aaatggaataaccaagaggctgtgtcattttttaagaggatggcaaggatgacctcaaatgagctcaacaaaactgggaatccaaggaatggtgcttgtagggaaagagaggtcagttgtggtccttaaacctcttggcaccttgtcggggttataaaacaaggagctggagtaaaattgcccttacccccaatccaaatgctgtccaggatttaggagctacccaacctgtggttatatggtgttggtttccannnnnnnnnnnnngcttgtttccaaaatagccttgcttggtactgcatggaaagttcaagcttttcttcttgcccgctcagggtgggcctcttccccgtgtcttcacagcgtccctaaggaagatttttgcagcactctctgggagctgaggggagtgaaatttggtccagagaaggcggaaggaaatagttttcctgttcccttttcctcgaggtggatgtccctcaggcttccttcaaaacctccttctcatgggtgcggctggcagtacagtcaggctgtggaggagggctgagaagaaaggggcactggtccagcccccaggtttggtctgagacaggtacacagcagataccatcccaccttcctctctaaagaacaggccagccacacatataaccctttccctactttactaatgtatcccttatgtggtaccagcaatggaggacaggcagacttaccccctgccatctagagagaatgttgttattacccgtaaaacttgaccacccccatatcccactcctttttgtaaaaacaaatgcttaaacctgtgagcctgccgttcctttctatgtgttaatcagtttccttccatttgagctgtgtgggagggaagggcattgaaattgtaggttgtaatcttgtgccaaccaataaaaaccagtatttcacacacaaaaaa

SEQ ID NO: 254618 - DNA, 565 bp, Homo Sapiens
  misc_feature (47)..(211): n is a, c, g, or t
actaacgggctaatgaccaatgataatgtgaaatctcataccaaagnnnnnnnnnnnnnnnnnnnnnnnnnnnnnnnnnnnnnnnnnnnnnnnnnnnnnnnnnnnnnnnnnnnnnnnnnnnnnnnnnnnnnnnnnnnnnnnnnnnnnnnnnnnnnnnnnnnnnnnnnnnnnnnnnnnnnnnnnnnnnnnnnnnnnnnnnnnnnnnnnnnnntgtctcttgctccctctctcaccatgtgacacgctggctccgtttccccttctgccatgattctaagcttcctgaggccctcaccaagagcagatgccggcaccacaccctcttgtacagactgcagaactgtgagccaaagaaacctcttttctttatacatgacccagtctcaggtattcttttatagcaacgcaaacagactaacacacagcaccctgggagattttattcttccttaggtggtgactctactgttaggtttttttccaaatacttccatccctaagaatttagtgaggcagttctaaattagacaaagcgggagagagcaaaagagttgacagaaaagcc

SEQ ID NO: 254619 - DNA, 544 bp, Homo Sapiens
gccttatcgatgcattgaatgtgggaaagctttctcacagaagtcacagctcatcaatcatcagagaactcatacagtaaaaaaatcctaggaatacagttaatagtagtctttgacagatcatcttggacttcaggaaatgcaattatgataacgtttgtagacagtcacgtcatgttaggtgtctgtactccatgaggatgagaactctaaatgaggtggtgtatggaaagccgatcataattcatagagtagagtgaacctatgactgcagtggatctcaaaaacttttaaaaccatagacaagccttatagagtagaacattcacagcaaagaaaaatcctgtgaatgtccaaaagccttccaaaagtcaagtctcttaagctattaaaaatattcccactggggatgaaggccccatgaatgcgggaaatgaggcaatatttttaagaaatgacagttcattgtaccataagcaaggaaccagaccattttggattttggagaaatcatattatggagaacctaacaatttgacctggg

SEQ ID NO: 254620 - DNA, 615 bp, Homo Sapiens
  misc_feature (547)..(547): n is a, c, g, or t
  misc_feature (572)..(572): n is a, c, g, or t
ctttccccaaactttggtcagatgtccctttccccagacctcagccaggtgactctctctccagacatcagtgacaccacccttctcccggatctcagccagatatcacctcctccagaccttgatcagatattctacccttctgaatctagtcagtcattgcttcttcaagaatttaatgagtcttttccttatccagaccttggtcagatgccatctccttcatctcctactctcaatgatacttttctatcaaaggaatttaatccactggttatagtgggcctcagtaaagatggtacagattacattgagatcattccaaaggaagaggtccagagcagtgaagatgactatgctgaaattgattatgtgccctatgatgacccctacgcatggtacctccgcagcaacaatggaaacagaagaaattattacattgctgctgaagaaatatcctgggattattcagaatttgtacaaagggaaacagatattgaagactctgatgatattccagaagataccacatataagaaagtagttnttcgaaagtacctcgacagcacttntaccaaacgtgatcctcgaggggagtatgaagagcatctcgga

SEQ ID NO: 254621 - DNA, 1464 bp, Homo Sapiens
ctggtgtgcagcctcagtgacgtttatcagatggagaaggacattgccatggagcaagagaggaatgctcgctaccgaacccccaaaatcttggagcccacagccttccaggaacccccacccaagccgagccgacctaagtacagaccccctccgcaaaccaacctcctggctccaaagctgcagttccaggaggaggacttcatccaacccagcagccgagaagaggcccagcagctgtgggaggctgggtctggctcaggcaggaggagaagtccctggaccccatggtttatatgaatgataagtccccattgacgccagagaaggaggtcggctacctggagttcacagggcccccacagaagcccccgaggctgggcgcacagtccatccagcccacagctaacctggaccggaccgatgacctggtgtacctcaatgtcatggaactggtgcgggccgtgctggagctcaagaatgagctctgtcagctgccccccgagggctacgtggtggtggtgaagaatgtggggctgaccctgcggaagctcatcgggagcgtggatgatctcctgccttccttgccgtcatcttcacggacagagatcgagggcacccagaaactgctcaacaaagacctggcagagctcatcaacaagatgcggctggcgcagcagaacgccgtgacctccctgagtgaggagtgcaagaggcagatgctgacggcttcacacaccctggctgtggacgccaagaacctgctcgacgctgtggaccaggccaaggttctggccaatctggcccacccacctgcagagtgacggagggtgggggccacctgcctgcgtcttccgcccctgcctgccatgtacctcccctgccttgctgttgggcatgtgggtcttccagggaaaaggccaaagggagtcaccttcccttgccactttgcacgacgccctctccccacccctacccctggctgtactgctcaggctgcagctggacagaggggactctgggctatggacacagggtgacggtgacaaagatggctcagagggggactgctgctgcctggccactgctccctaagccagcctggtccatgcagggggctcctgggggtggggaggtgtcacatggtgcccctagctttatatatggacatggcaggccgatttgggaaccaagctattcctttcccttcctcttcggccctcagatgtcccttgatgcacagagaagctggggaggagctttgttttgggggtcaggcagccagtgagatgagggatgggcctggcattcttgtacagtgtatattgaaatttatttaatgtgagtttggtctggactgacagcatgtgcccctcctgaaggagggacctggggcacagttccagggaacaagcctaattggggaagtcccgggcacaggaatgcctggggtttgtcccacca

SEQ ID NO: 254622 - DNA, 328 bp, Homo Sapiens
caccaaaacaagtagatgggcatcctgctgtgaaaagaggaaattgcaggagatgcattacttggtcctagtgtctattggccttatacgaacaccttaaacacagtaaatctgggtattagaaagcctgtccagtccccccaataggatcataacattagatagagataaggaagaacccattagtcctatgttaaacatgagacagaatacattacgcagatatatttttatgagatgacatatgtgttttagaatgaaaatctaatgcttacaagtgtgaccttgaaaagagtagcttaaacttatccatgttgctccttattgg

SEQ ID NO: 254623 - DNA, 1260 bp, Homo Sapiens
  misc_feature (547)..(594): n is a, c, g, or t
  misc_feature (1104)..(1164): n is a, c, g, or t
ggcacgagcagcagtagccactctttgtcagaatactcccatggtcagtcccctaggagccccattagcccggaactgcactcagcacccctcacccctgtggctcgggacactccgcgacacttagccagtgaggatacccgctgttccacaccagagctggggctggatgaacagtctgtccagccctgggagcggcggaccttccccctggcgcacagtccccaggcggagtgtgaggaccagctggatgcacaggagcgagcagcccgctgcactcgacgcacctcaggcagcaagactggccgggagacagaggcagcgcccacctcgcctgccattgaccccctcaagagtcggcatctggtggcagcagccacagctcagcgcccgactcacagatgagcgggagacagccatctaaacagactcactaactattggcattaaagcttcagaaatctctgcgtttgatattcaaacatcatatgccggaaattctcacagtttttagtgaacttaaggaatatagatcctactttggtannnnnnnnnnnnnnnnnnnnnnnnnnnnnnnnnnnnnnnnnnnnnnnncttgtcacacacctgagcacttcctcccgttggcaaacagaagttcaggatgagaccctgctggcctggtcctggcacatcctctgcactgttgaatcactggacttactgatcttagatgaccaccccctccctcacacctgtgggcagggcagaacagcctggcgggctacagtttagcatggccttcttgagctagggtggaatggggcagggtgctctggactcttaccccctcccctcccatctgtggcttgggctctgctgtggcccctcctgggctgggtccccttgggtttttcgtgctgggaacatccccaacaggagccttctctgccataaactgccagcttggctctccccgagtggctcagctgggcagaacaccttttccttttcccaccccgaaactttaagagacgtgatttttgggctcatccggcatttgggccttccccgggtttgacatccttccccggcaggaaaccctggcctggtggcggctccagnnnnnnnnnnnnnnnnnnnnnnnnnnnnnnnnnnnnnnnnnnnnnnnnnnnnnnnnnnnnnggcagggtcacaaaccccacaaacccgggtcccttccccttttgggaatatttttttacccccccatacccgggaacttttgaaaggcgaggggtt

SEQ ID NO: 254624 - DNA, 1098 bp, Homo Sapiens
cacaagaacattaaaggatgtcgtttggggattaaactctttgtttactgatcttttgaattttgatgatccactgaatattgaagctgcagaacatcatttgcgggacaaggaggacttccggaataaagtggatgactacatcaaacgttatgccagatgataaaaggggacgattgcaggcccatggactgtgttacagtttgtctctaacatgaaacagcaagaggtagccccctctcccgtcctcatgctccctctcagtcccctggattgccccagtcctgtgaccatgttgccctgaagaagaccatcttcatgactgctcattgtagatggagaattcaacataaatacagcaagaaaatgtgtttgggcttctgaagagttgtctgcttaccttaacatgtttacttttttgaacttgtactgtataggctgttggtgaaattcttaagaagttgtaatgaactcaaaattgaggccagagcttgctttcccttttcccaaacaaaattggttttctgcacaagcgatgctaatgatgtgttcagtgtaactcgcagattggcaataagatacccgctacaaactgtgattggatgcaaaatctcttagcttctttcacgaatgttggccctgcctagatgttgtgaagcctcccagaatgcatagagtcattcactgtagatctcttattgaaatgcgtattttatttaatgtaagtatattttggaacagatttgtaatttgtacaattcaatgctttaattattttttctattctcatttagtttgtattttcattgtatagagcagacagaaagatgttgggtcaagcaactattgaagagaaatacaaagaaaatatgaaaggcacattattcattttgtccaaatgcaatgagaatctcactcttaaaaatcagctcttgctttcgggtcccggatgtggtgagcacattttggagccctttgaagctagatttggatgatcaaaacaaaaaggcagggagcccattctaacatgctgcccagaggaaactggctggagcctggaccagctggggttgatgcttttgcagtggtcatgtgatt

SEQ ID NO: 254625 - DNA, 372 bp, Homo Sapiens
tctaaactatatcaccttaacatgtttacttttttgaactcgtactgtttaggctgttggtgatactcttgagaagttgtaatgaactcaaaattgaggctggagctttcttattcttttccccaacaaaattggttttctcccgaagtgatgctcatgatgtgttcagtgtaacttgcagattggaataagaaacctgctacaaattgtgattggatacaaatgcccttatcctctgtgaatgttggccctatctacatgttatgaagtttcccagaatgcataaagtctttcactgtagacatttttattgaaatgcatattttatttaagtatattttggaccgaattaaattaaatttttacaatgta

SEQ ID NO: 254626 - DNA, 274 bp, Homo Sapiens
cgaggcaggagaatggcatgaacccaggaggcggagcgcggtgagctgagatcacaccactgctatcacctaaaataacgtcactatcagtaaaggagtctcaaaattgagtttatggcagctttattcgtaattgccacagaatggacgcagccaagacgacctttaccgagtgagttaactgtgatgatgcatttagacaatggaattttctaaatgctttggggtataaatattttttaaattgcacatattggccaagcgtggtggctca

SEQ ID NO: 254627 - DNA, 753 bp, Homo Sapiens
  misc_feature (28)..(28): n is a, c, g, or t
  misc_feature (32)..(32): n is a, c, g, or t
  misc_feature (49)..(49): n is a, c, g, or t
ctgagaatgtgaagacacaggtctacanccancattacctcgggcacancccatcatgagctgctgtaacacaggcatggggtggcgtgcatcggtacttcaccacaccaaggattgacctgacatcccgccccaaaaagtgaggctggattctccatggaagagaaggagaatggcctaaggacattctgaaatttaattatcaaaccaaaccaaaccaaaccaaatccctgtgccaaagtgccaaagagtctacctcctctgcaaagctggtacctgtgtgaaatgtcagtatagagagagatgttttagaggcaggaggcaactgaccaagtaaggatattttgtaacatttttcccctctggaaaagcagaaaagaatgaatatcagctaaccgtaatatttagaatttagcatctttccttgggcatttataaatagaaaatctatctgtggcaaccaaaagtacggtattctaatcaatgcatttgaaaagtcagcaaaagcccacattaattcctattacgcttgtttcttggttcaatctcagcactttcagcggctcttgtgcggcgattctgtcttggacttatttctgtgtcttgaagatcgtttttatgtgatgcttcccaggcttcctcttcttctaaaagatctcttatgatgtctgaactggaactattgcatgaatctgattctgatgaagaaagaacttcttgaatatcaatacagctagaagcatcctcttctct

SEQ ID NO: 254628 - DNA, 703 bp, Homo Sapiens
cacacttgtatcaggaagaaatgcacagtcatgtttctcaagcagtttttctgagtagtttctgagaaggaacaaattacaagtgtacccaataactgaaaatgttttaactcactctcatttgtaagcagtccacatagtagacaatgggttttccaagctgggcaaggtacatttaatcagtaaatcagtttcacatcatgtattgtgatgtttcaatgtgagacacaaaaacaatggcttgaaacttgtgtatcatatgtgattttgaaatgaacaccttgaatagcactaatttttatgtgtggtatttttctataacaaaacaagtagctctaggaaaagaggttttattttgtaaacgatcatttgtgacctcagacactctctggctaatattttaataagctcacagcagataattctgagatcatgggtgaggggtggtgcatgttgagatttaaattggcataaagctgcatactttttgtctagctgtttgatttcattttttaatatagtatgccaattttgtgactgttaccatgtgaaagtcctgttgaaatgaacaattgtctgccccacaatcaagaatgtatgtgtaaagtgtgaataaatctcatatcaaatgtcaaacttttacatgtgaatgattttctcaaagaacatagcaaagtcaataaaatcctcttaatttccacat

SEQ ID NO: 254629 - DNA, 1119 bp, Homo Sapiens
  misc_feature (250)..(376): n is a, c, g, or t
  misc_feature (654)..(654): n is a, c, g, or t
  misc_feature (731)..(731): n is a, c, g, or t
  misc_feature (880)..(880): n is a, c, g, or t
  misc_feature (983)..(983): n is a, c, g, or t
  misc_feature (1066)..(1066): n is a, c, g, or t
  misc_feature (1074)..(1074): n is a, c, g, or t
tggtgatggtcagtcttggcaccaaatgagacagtttatgtcatcagctattcaataaaacactaatctagttgtcaccgtgaaagtattttgtgacattgttatgtacgtgttgttacaaatgtgcatgatgcatttactacagcatagaattttgcctgggtgccagcctgaagtctgtccgacagatcatagccatgttagtcccacagtcacagaggccaatggattaaattattttatctccctnnnnnnnnnnnnnnnnnnnnnnnnnnnnnnnnnnnnnnnnnnnnnnnnnnnnnnnnnnnnnnnnnnnnnnnnnnnnnnnnnnnnnnnnnnnnnnnnnnnnnnnnnnnnnnnnnnnnnnnnnnnnnnnccctgtacctccctccctcttatggtttagacccaacaactgagcagcattaatgttaaaatagagatcatgagactgacagaacagactctttgtggcaataagacctcaaattataaacagggcctagggccatgccaggcgagggttaagtcttgtaccctactcttaaagaattaactagattctaactaccacatgggttttatttttctctagcagccaagcaagcactggctgtgaggagaagcaagattcactaaccttaacgacagctntctctggataagggactgatttcagtaactttctcctgataagagaccatcctccatggactggttctggccagttntagaggctgtgcctttacagaggctgagcctttacagaggctgagtaccctttatgtcccctgcttcactttttgatgtgtagggcctaattataatacatttaaatgtcaagtctccaccccagaatgaacatgcatgtttattgaanatgcatgtgttaggacctcttttatgagtattctcataaaatgatgtagctcctctgatatcctattgagtatgtatatgtagccaactcatttggctcaaantcctgtcctctccttccctccctggaaatgtcctcctctggccttggctgtaggccacacttcccagcctgtcataatggccncttgcggnctgcaaacctttataagaaataaagctctcttttctaaatttaaa

SEQ ID NO: 254630 - DNA, 963 bp, Homo Sapiens
  misc_feature (633)..(759): n is a, c, g, or t
tgttgagtcagattcctcagctacaaaatgcagatgacagtacttactcctccaggttgtggggaaaatggagattctgagcacgatgtccatttcacagaaaggtaccaatttggtggcttattttcctttctaccttcagaagtggctatccctgccacccaaacagacccttgactctcaagtgtacggggtcccatttacacagggggagagcttacagcctacgttgagtctatacttaccacttagtgagcatggtatccgctcaggggcctctgtgggcatccatctcctctgcagcatctttcctccccaccgctgggcctgcacatgaccccctccttgggttagacctctgatcagtgatgaccttggtatgctggtgatggtcagtcttggcaccaaatgagacagtttatgtcatcagctattcaataaaacactaatctaggtgtcaccgtgaaagtattttgtgacattgttatgtacgtgttgttacaaatgtgcatgatgcatttactacagcatagaattttgcctgggtgccagcctgaagtctgtccgacagatcatagccatgttagtcccacagtcacagaggccaatggattaaattattttatctccctnnnnnnnnnnnnnnnnnnnnnnnnnnnnnnnnnnnnnnnnnnnnnnnnnnnnnnnnnnnnnnnnnnnnnnnnnnnnnnnnnnnnnnnnnnnnnnnnnnnnnnnnnnnnnnnnnnnnnnnnnnnnnnnccctgtacctccctccctcttatggtttagacccaacaactgagcagcattaatgttaaaatagagatcatgagactgacagaacagactctttgtggcaataagacctcaaattataaacagggcctagggccatgccaggcgagggttaagtcttgtaccctactcttaaagaattaactagattctaactaccacatgggt

SEQ ID NO: 254631 - DNA, 1641 bp, Homo Sapiens
  misc_feature (19)..(19): n is a, c, g, or t
  misc_feature (24)..(24): n is a, c, g, or t
  misc_feature (55)..(55): n is a, c, g, or t
  misc_feature (68)..(68): n is a, c, g, or t
  misc_feature (74)..(74): n is a, c, g, or t
  misc_feature (101)..(101): n is a, c, g, or t
  misc_feature (104)..(104): n is a, c, g, or t
  misc_feature (118)..(118): n is a, c, g, or t
  misc_feature (236)..(236): n is a, c, g, or t
  misc_feature (400)..(400): n is a, c, g, or t
  misc_feature (407)..(407): n is a, c, g, or t
  misc_feature (416)..(416): n is a, c, g, or t
  misc_feature (499)..(499): n is a, c, g, or t
  misc_feature (513)..(513): n is a, c, g, or t
  misc_feature (522)..(522): n is a, c, g, or t
  misc_feature (554)..(554): n is a, c, g, or t
gttaaaacgcgccaaaagncggcncgcgcacacccgcaccgccccgaccccaggnagtgaggccagtnattccnagtgtgtgaggagcggcagtggcggcngangagggggcggcgtnggtgggggcaggggcgggatgcgctccccggcccctctagccccgtggtggtacaacgcgaaggtgtgggaaggccgcgataaaccggaactgcagcccgccggacacctccggctanacttccgtaaaaagagaggagtgtacggcaaggggcggaaactggaacttggcccgcctcgttgtaagctaaactcagcggcaccttttagtagcgtcactgcactgttaccccgacctacgtgtctctagacgctgacaacttctcactgtaaaacagtcgcnacctgtnacgtctggngggcgcctcaaatcttccactccagcatcggatcccggaaaggcagcgtcggagactggacccaaaactcttcctgttctgcntgcagagttgagcnccgtccggntcctgaacccgcgtagtactgaccctggatcnctgttcactgcattctcgctccccgcgctccctgctggaccccgggatgccgggcatctccgcccgaggcctctctcatgaggggaggaagcagctagctgttaacctcacccgtgtcctggcactctaccgttccatcttggatgcctacatcatcgaatttttcacagacaacctatgggacacactcccttgctcatggcaggaagcattggatggactgaaaccaccacagctggccacaatgctgctggggatgcctggggaaggggaggtcgtcaggtacaggtcagtgtggccactcaccctgctggccctgaagtccacggcgtgtgccctggcctttacccggatgcctggctttcagaccccctcagaattcctggagaaccccagccagagctcccgactaacagctccattccggaaacatgtcaggcccaagaagcagcatgagatccggaggctgggagagttggtgaagaagctgagtgatttcacaggctgcacccaggttgtagacgtgggctcaggccagggccatctctcccgcttcatggctcttggcctggggttgatggtgaagagcatcgaaggggatcagagactggtggagagagcccagcgcctggaccaggagcttctgcaggctctggagaaagaggagaagaggaacccgcaggtggtccaaaccagccctcgtcactccccacaccacgtggttaggtgggtagaccccacagccctgtgtgaggagcttctgcttccactggagaacccgtgtcagggcagggcccgcttgctgctcacaggcctccacccctgtggggatctgagtgttgccttgctgagacacttctcctgctgccctgaggtggcggccctgcccttaaggggctgttgttaatgaaattgagggaccttgggggtacccactgattaaagggtgcttgggctgctgctttaaactccctaccgctcggcagggggctgccttcccttggagaatttctttgcggcctaaaaattgtccttgctctttactacttgttccggcgatattggaaaattattcgagggcccgccc

SEQ ID NO: 254632 - DNA, 616 bp, Homo Sapiens
aaaataaagcaaagttggaactgaattaggaacaagcaaagtttaagtgagaggtgacagttcttaaaaccaaactgagtgctgaatgtgactgatcccacagatatgtgcagcgggggctacagcgagtggggctagatccccagctgccactgaatctggctgcccttcaggcccacgtggcccaggagaaccgtgtggtggccttcttcagcctggctctactgcttgccccactggtggagacgcttattctactggaccggctgctgtaccttcaggaacagggtttccatgctgagctcctgcccatcttcagtcctgaactctctcccagaaacctggttctggtggccaccaagatgcccctgggtcaggctctttctgttctggagactgaagacagctgatgcagcctgaggagacatctcagaccccatcatctgaaagtgcccagagagcacagtggcagagtacatctcatccagagaaacagcatcctgcatcctccagagtcctggttccttcagtttcatcccctttctctccttccatggattatgtaatacattgtaaagttttaattaattaaaaattggatatctgtttccttccc

SEQ ID NO: 254633 - DNA, 648 bp, Homo Sapiens
  misc_feature (606)..(606): n is a, c, g, or t
  misc_feature (623)..(623): n is a, c, g, or t
ctagcgaagttgataaacaactttcaatatttgcctttttgtgagaaaaggtatttcacagtatttaccactttgatgtcctcgcagttttattaaatgtatcctctctgtaaaactttgcctgttttaaatgagcctttccttgatttaaaaaaatacctgtttacacatcttctagattcttgagaacgccagacacagttcttaaggccaaatttgtatcgttattgttaagaatcgtcatcaaaagtgtctttggaaccatacaaatctgctagtttcttaaaacgaggtccccagttctgtagataatcatagtccaagtctgaatctgtggtggccgactctagggagctcagggacccggccactgagcccctgccttcataaccgtagatttgaatggagtcataaggaggagccgtggggtcattgtctgcctcctgtattctcgtgttgatgaagtcatcgacatccacgctgttgggcgctggccggagcccaggtctaggcatgtactgatactcaggtttgatgtctttgcgggggataaatccattgataccatcaggattctggagggtggcaatatcaaaggcttctgtntcttcttccccaccccnttcatcatcataagtaatgatgttc

SEQ ID NO: 254634 - DNA, 759 bp, Homo Sapiens
  misc_feature (660)..(660): n is a, c, g, or t
tggaggcgagcagggcagcagcggtggcggcagtggtgagggagagggctgcgaggaggcccaaggcggggccaaggcttcaagctctcaggacttggctatggaggaggaggaagaaggcaggagctcatccagtccagccttacctacagcaggaaactgcaccagctagactccattctgggaccatctccaggagtccatgagaggctctcttctcctatgtcccaattctcagaactcagatgtggctagaccaaccagtgggaaactgccccagcttctcccaccatagggggccggacccccatcaccagcctaggatccaggggctgcctctggcctcttagggagcagagagcagaactccgcagcccagcccagaggagtgtcacctcccacctttggagaggaatccttccctcccctggacaaagttgctgacaagctgctgaagtggcctctccatattccagctgagcctgaatctgactcttgagggttggtgctgcacttatttattgcggggagacagctctctctcccaccttctccacagatgggaggagagcctgaggcccaagcaggacccgcgggttccagccactagctgctctggagatggagaggttggtggaccatggaagtcctggtgctgcncttagtgcgactcaggccgtctagctgtactctatgccgatggcatttgcgtgcatgatatatgcggctggtactactgtcttagttcgatcgcgccca

SEQ ID NO: 254635 - DNA, 701 bp, Homo Sapiens
  misc_feature (198)..(198): n is a, c, g, or t
  misc_feature (235)..(235): n is a, c, g, or t
  misc_feature (601)..(601): n is a, c, g, or t
  misc_feature (609)..(609): n is a, c, g, or t
  misc_feature (627)..(627): n is a, c, g, or t
  misc_feature (637)..(637): n is a, c, g, or t
  misc_feature (661)..(661): n is a, c, g, or t
  misc_feature (669)..(669): n is a, c, g, or t
  misc_feature (677)..(677): n is a, c, g, or t
  misc_feature (686)..(686): n is a, c, g, or t
ttaatagtagttcaaataaaattacatatgtaaataaaaagaaaaattttcttcattattaaaaggaagaaaaataaccctgcctcaaaacaggtcctgttttgcacggcagttgtttcaatattttcagaaacaaatttgccatttatatcagataaagttactagagtactgtatatacattttcctttctaattntacacacgctattatttatagagcacaaaacactcanaactaaatcaggaagtatagtcggttagttgagataggatgtggtcttaagtagtaaacagtgttctaaagttcaggttgcatgtagtcacatctgtagagggaaacataatttgaaagatgctcttgcaggaaatttttctttggttagtcaaaatatgctctctttgtttttaagttaatttattatgacctaaaggcatctaaaaaataaataagaaaatgaaattccatatttggggaaattcatattgaagtctaactgtgggctgttttgggtaaaagtatttgctgctttgaatcaaatttaggcattaaaggggctgccacagtataatcatgttagggaggaaaggaatgttgtgcncacttgcnttataagcccattagggnatgggtaccngggccggggtccgtggcctcacgncccgttantccccatnccctggggnggcccaggtggggcc

SEQ ID NO: 254636 - DNA, 1212 bp, Homo Sapiens
tagcaggtcgccttctggcggccttgttctcccttgcatctgcggagttgctggctagtttctgcaccactgcactttccatcctgagctccctcaccctctaatttgaaagaaactctgtaccactgagaatttcagagtcatgtcccgactggggacttggtggatgatttgggatttggtgggcactcccttagttgaaaactgcatttgaacagtgttgttgtctgtctctcctcttcccccacttcctgctgttcccagtgtggcgagaaaggacactacgccaacagatgcaccaaagggcacttggcctttctcagtggacagtgacagcagctggagccagctccgagcagcccgggggccccgctgttgggagtgtgcatttaactgtttcatgcgcttgttggcgcgactgtggctcgagctggcccgcagacacgtgggtttcatcactctgaggggccacgtctgttagtttcctatcattttgccttagtattttttgaaaaagggacatggtgtcctgtgggtccctgcagtcgacatcatgtttggctgggcatcgatgcctcctttctgggactcccggcacaactcccctcatccagggagggaggcagctgctggggaggggcttggctaggtagttctgtgtggcggtggtcattcccctcattaaacaccagttcttggtgacgccaggggctggtaggtcattcaaagctgtggccagctcacgcctgcttcctccctccctgccctgctgaatcctaaagctgtgcctatatctgtgatttgaatgagggagccctttggggcaaattcaggtgcccccattgcctcaggctggccctggtcccaggtggcagcggttgaggaggggtacagggctctcaagcctgaggttttcttctctgggcttaattttctcttggggtacgtgcctgacagtgtttaaggtgtccgttgaactggagttgcagacttttaaatagatgaccccttcagatcatctgtgcctacctcctgcccatcaggcgtctacactgtcactcagacacctgtggcatgtggaggagactgccctgtcctgagcctggaaaatgtgaaactgtctcctgcaacctgctgggcatgtgggcctggctgtgttcaattgcaagaacaatttttatgaaatggattaaagcttgttttttaaaaaaa

SEQ ID NO: 254637 - DNA, 1169 bp, Homo Sapiens
aaaaaacaagctttaatccatttcataaaaattgttcttgcaattgaacacagccaggcccacatgcccagcaggttgcaggagacagtttcacattttccaggctcaggacagggcagtctcctccacatgccacaggtgtctgagtgacagtgtagacgcctgatgggcaggaggtaggcacagatgatctgaaggggtcatctatttaaaagtctgcaactccagttcaacggacaccttaaacactgtcaggcacgtaccccaagagaaaattaagcccagagaagaaaacctcaggcttgagagccctgtacccctcctcaaccgttggccacctgggaccaggggccagcctgaggcaatgggggcacctgaattttgccccaaagggttccctcatttcaaattcacagatataggcacagttttagggtttcagcagggcagggagttgtgcccggagtcccagaaaggaggcatcgatgcccagccaaacatgatgtcgactgcagggacccacaggacacatgtccctttttcaaaaaatactaaggcaaaatgataggaaactaacagacgtggcccctcagagtgatgaaacccacgtgtctgcgggccagctcgagccacagtcctgccaacaagcgcatcaaacagttaaatgaacactcccaacagcgggcccccggagctgctccgagctggctccaactgcggtcactgtcaactgagaaaggccaagtgccctctcgtgcatctgttggcgtagtgtcctttctcgcaacacttgtaacaggtgacctgctccagtggccggggtccccggttgcacgcgctgctgttttgactctgcatgaccccgatgacctgcggggttctctgctgattgggagaagagttctgactcgttaactggatcaaggaggacgacctttgtaatggcggattgttactttgctggaaagagttacacaacacggttttactgtggaaaacacgtgcacgcagactaccgatggggacaggaaaaaagagcgcgggactcgtcccgcaaacggcaggaagcagggcttccacgacggcccacctcaggacagtgggcagcagagaaacatgtggtgatgatggcagaagccactgcccgaaaaacaccatgcagacacaca

SEQ ID NO: 254638 - DNA, 1217 bp, Homo Sapiens
  misc_feature (463)..(471): n is a, c, g, or t
  misc_feature (1201)..(1201): n is a, c, g, or t
gcctgtcccgttgatatgggggggtggcaccgcgccaggttttctttaccccatctgttggtctacccagagagagatggggtggcggtccgaggagaaactccagggtagatgggctccccggggggctcccttttcccatatgtgcggttttcttttggccccgccggtacggcgggagaataagagagtgcccctgtcggaggtttaatgctgctgcagccccgcaagttggcggcccttcatgcaaaattgtgttccttgagttctgcgtgtacaaagtttatggaaagaaaacacccttttttccattcttttttcgcgcccagggtttccatttctggaaaaagggggagggtttcccccccttggggtgtagaacccaattaggggagacaaggcaaggtttgtggccacagggtctccattggaaagggagtggctccgggcttgggagggtacnnnnnnnnnaggcattggactgctttttccccccagcattagccgccccatggtttcccccacccctctttggtgcccccgggatctggcgatccctgagtcccagaagagctcagcagggaaggtgggatctgagaaggctgttgggagccaggagggcccctggaccctctgttttctgccccagggcttcagccaccctgcaagcccctccggacaaggcaacgtcagcccaggtagaaaacttaaggagtccctcctagaaaaccagtgatgtgctgggccctttcaggaacacaggcccccttcagcttcaccggagatgagaaggtgccacccgcaacagggctgctggtcacagctcagtgcgcggatgccttggccacaatcaccagcttggacagctcagctttgaatgccccgggcctgtgagccactgctgttttggtcacttcaaattcctcagttttcagagggacatcactttccctttcaaatgcggctttagagtaggccatggcgtactcaatctcagcgccccgcacctctgccttgaactgtgtgaagtacagataggacttcccctggggcctccagatggtgcaggtgaagtgctggtggtcttcgctggtccccagactcatctgccattgctcattggtccctcctgagaggcgcctcgtgccgaattcgccacccaggctcggtacctttgatttttgtttcggcgttgtgaaanagaaacccacaccacc

SEQ ID NO: 254639 - DNA, 960 bp, Homo Sapiens
ggggccctgaggaccctagtccaacatggcggcgcccagcggagggtggaacggcgtcggcgcgagcttgtgggccgcgctgctcctaggggccgtggcgctgaggccggcggaggcggtgtccgagcccacgacggtggcgtttgacgtgcggcccggcggcgtcgtgcattccttctcccataacgtgggcccgggggacaaatatacgtgtatgttcacttacgcctctcaaggagggaccaatgagcaatggcagatgagtctggggaccagcgaagaccaccagcacttcacctgcaccatctggaggccccaggggaagtcctatctgtacttcacacagttcaaggcagaggtgcggggcgctgagattgagtacgccatggcctactctaaagccgcatttgaaagggaaagtgatgtccctctgaaaactgaggaatttgaagtgaccaaaacagcagtggctcacaggcccggggcattcaaagctgagctgtccaagctggtgattgtggccaaggcatcgcgcactgagctgtgaccagcagccctgttgcgggtggcaccttctcatctccggtgaagctgaaggggcctgtgtccctgaaagggccagcacatcactggttttctaggagggactcttaagttttctacctgggctgacgttgccttgtccggaagggccttgcagggttggctgaaaccccgggggcaaagaaaagaggggcccaggggcccttcctgggctcccaacagctttctcagttcccaaatttcctggtggaggttctttcggggactcagggatcgccagattccggggccacaaaagaagggtgggggaacactgggggggctatgcctgggggaaaagaaacccatggtttcccccccggactttccagccgaagaattcctttccttgagccctggcaaaaactgctttttact

SEQ ID NO: 254640 - DNA, 854 bp, Homo Sapiens
  misc_feature (34)..(34): n is a, c, g, or t
  misc_feature (43)..(43): n is a, c, g, or t
ccgtacggcgccggcgccccccggtctcgccacnctaaagcancgaggcctgggtggcgaattccgcacgaggcgcctctcaaggagggaccaatgagcaatggcagatgagtctggggaccagcgaagaccaccagcacttcacctgcaccatctggaggccccaggggaagtcctatctgtacttcacacagttcaaggcagaggtgcggggcgctgagattgagtacgccatggcctactctaaagccgcatttgaaagggaaagtgatgtccctctgaaaactgaggaatttgaagtgaccaaaacagcagtggctcacaggcccggggcattcaaagctgagctgtccaagctggtgattgtggccaaggcatcgcgcactgagctgtgaccagcagccctgttgcgggtggcaccttctcatctccggtgaagctgaaggggcctgtgtccctgaaagggccagcacatcactggttttctaggagggactcttaagttttctacctgggctgacgttgccttgtccggaggggcttgcagggtggctgaagccctggggcagagaacagagggtccagggccctcctggctcccaacagcttctcagttcccacttcctgctgagctcttctggactcaggatcgcagatccggggcacaaagagggtggggaacatgggggctatgctggggaaagcagccatgctccccccgacctccagccgagcatccttcatgagcctgcagaactgctttcctatgtttacccaggggacctcctttcagatgaactgggaagagatgaaatgttttttcatatttaaataaataagaacattaaaaagca

SEQ ID NO: 254641 - DNA, 152 bp, Homo Sapiens
ctggataaattaggcttcatcagaaacttaaaatttctcagctaacaaactgagagaaaaatatgtgaaaaatatgtgtttgatacaagactgttgtcacaagatatgtaaagaactacaaactggtaataaaagtcagcccctttgcctgc

SEQ ID NO: 254642 - DNA, 480 bp, Homo Sapiens
  misc_feature (128)..(136): n is a, c, g, or t
tcagcctcccacgcactcacgcaccacacccgcttgaacccaggaggtggaggatcactcagctgagactgcgccattgcactctagcctaggcgccagactccatctcaaacaaacaatcacaaccnnnnnnnnnccctcaagttcacatctgtcagaggtgtagcatcgcacagatgaggcagtgaggaaccaacacgccttctgggtcccctccctcctatacagtaagtaaagagaaattatctcaattaaaggcatgccctgaagggcgacaacctgagccactagacagaaacgcggaaccagcggaaatgcgcaggtgagtaaatgaccgatgggagaggaggcgaggcaaaaggaaaggaaggaagtccaaatcactggcaaaaccctggaaataaggacgccaaggcctatttctaccatggtggcatggccagggatctggtctgagaatctgaacagactcggttcagg

SEQ ID NO: 254643 - DNA, 2012 bp, Homo Sapiens
  misc_feature (1517)..(1567): n is a, c, g, or t
gttttccgtttccgctaggactctggcagttggtgagcatcatggcaaccgttacagccacaaccaaagtcccggagatccgtgatgtaacaaggattgagcgaatcggtgcccactcccacatccggggactggggctggacgatgccttggagcctcggcaggcttcgcaaggcatggtgggtcagctggcggcacggcgggcggctggcgtggtgctggagatgatccgggaagggaagattgccggtcgggcagtccttattgctggccagccgggcacggggaagacggccatcgccatgggcatggcgcaggccctgggccctgacacgccattcacagccatcgccggcagtgaaatcttctccctggagatgagcaagaccgaggcgctgacgcaggccttccggcggtccatcggcgttcgcatcaaggaggagacggagatcatcgaaggggaggtggtggagatccagattgatcgaccagcaacagggacgggctccaaggtgggcaaactgaccctcaagaccacagagatggagaccatctacgacctgggcaccaagatgattgagtccctgaccaaggacaaggtccaggccggggacgtgatcaccatcgacaaggcgacgggcaagatctccaagctgggccgctccttcacacgcgcccgcgactacgacgctatgggctcccagaccaagttcgtgcagtgcccagatggggagctccagaaacgcaaggaggtggtgcacaccgtgtccctgcacgagatcgacgtcatcaactctcgcacccagggcttcctggcgctcttctcaggtgacacaggggagatcaagtcagaagtccgtgagcagatcaatgccaaggtggctgagtggcgcgaggagggcaaggcggagatcatccctggagtgctgttcatcgacgaggtccacatgctggacatcgagagcttctccttcctcaaccgggccctggagagtgacatggcgcctgtcctgatcatggccaccaaccgtggcatcacgcgaatccggggcaccagctaccagagccctcacggcatccccatagacctgctggaccggctgcttatcgtctccaccaccccctacagcgagaaagacacgaagcagatcctccgcatccggtgcgaggaagaagatgtggagatgagtgaggacgcctacacggtgctgacccgcatcgggctggagacgtcactgcgctacgccatccagctcatcacagctgccagcttggtgtgccggaaacgcaagggtacagaagtgcaggtggatgacatcaagcgggtctactcactcttcctggacgagtcccgctccacgcagtacatgaaggagtaccaggacgccttcctcttcaacgaactcaaaggcgagaccatggacacctcctgagttggatgtcatcccccgaccccaccctgttttccaccagagttctgacactgtgactctgtataaaatggttgggaagctgcnnnnnnnnnnnnnnnnnnnnnnnnnnnnnnnnnnnnnnnnnnnnnnnnnnnccacaggaaaacatacaagaaagaagaaagacaacaaaccagaaaaacaaaaaaggggggggcgccgaacataaaatagaacccgctgggagggccagcgatataagtgacccgcgcaccatgttaccattcacaaacagagggccccccaccgtaggaagcgaggtaactataataaacacgacgcaggcccgcggcgcggcgacttataaaccacgaccggccgcagcggacaaaacgagcgactgcagctggcacgtcccatcgacggcagggggaaccacccaactaggcggggggcacacatacgaggcgggagcaacccccaccacgcagaatgagagacccggcagcataagaaaagaaacgcgaggcggtagcagcgcagcacagcgacaatacgcgcggagaacaagcgaccgaggatagaaacaaacaatgccgc

SEQ ID NO: 254644 - DNA, 1634 bp, Homo Sapiens
ggaacctcttgtatctccaattgaacagcctgagagacgaggacacggccatatattactgtgcgaaagatcatcctgagggtgagggaaagaaccacctcgtctttgactattggggcccgggaaccctggtcaccgtctcttcagggagtgcatccgccccaacccttttccccctcgtctcctgtgagaattccccgtcggatacgagcagcgtggccgttggctgcctcgcacaggacttccttcccgactccatcactttctcctggaaatacaagaacaactctgacatcagcagcacccggggcttcccatcagtcctgagagggggcaagtacgcagccacctcacaggtgctgctgccttccaaggacgtcatgcagggcacagacgaacacgtggtgtgcaaagtccagcaccccaacggcaacaaagaaaagaacgtgcctcttccagtgattgctgagctgcctcccaaagtgagcgtcttcgtcccaccccgcgacggcttcttcggcaacccccgcaagtccaagctcatctgccaggccacgggtttcagtccccggcagattcaggtgtcctggctgcgcgaggggaagcaggtggggtctggcgtcaccacggaccaggtgcaggctgaggccaaagagtctgggcccacgacctacaaggtgaccagcacactgaccatcaaagagagcgactggctcggccagagcatgttcacctgccgcgtggatcacaggggcctgaccttccagcagaatgcgtcctccatgtgtgtccccgatcaagacacagccatccgggtcttcgccatccccccatcctttgccagcatcttcctcaccaagtccaccaagttgacctgcctggtcacagacctgaccacctatgacagcgtgaccatctcctggacccgccagaatggcgaagctgtgaaaacccacaccaacatctccgagagccaccccaatgccactttcagcgccgtgggtgaggccagcatctgcgaggatgactggaattccggggagaggttcacgtgcaccgtgacccacacagacctgccctcgccactgaagcagaccatctcccggcccaagggggtggccctgcacaggcccgatgtctacttgctgccaccagcccgggagcagctgaacctgcgggagtcggccaccatcacgtgcctggtgacgggcttctctcccgcggacgtcttcgtgcagtggatgcagagggggcagcccttgtccccggagaagtatgtgaccagcgccccaatgcctgagccccaagccccaggccggtacttcgcccacagcatcctgaccgtgtccgaagaggaatggaacacgggggagacctacacctgcgtggtgcccatgaggccctgcccaacagggtcaccgagaggaccctggacaagtccaccggtaaacccaccctgtacaacgtgtccctggtcatgtccgacacagctggcacctgctactgaccctgctggcctgcccacaggctcggggcggctggccgctctgtgtgtgcatgcaaactaaccgtgtcaacggggtgagatgttgcatcttataaaattagaaataaaaagatccattcaaaagata

SEQ ID NO: 254645 - DNA, 464 bp, Homo Sapiens
  misc_feature (206)..(206): n is a, c, g, or t
  misc_feature (363)..(363): n is a, c, g, or t
aataacgtcccctggtgaagggcttctctccccggggaacgtcttcgtgaaagtggatgcaagagggggcaagccccttgtcccccggaaaaaagtatgtgacccaagcgcccccaatgcctgaagcccccagcccccaggccggtacttcgccccacagcatcctgaccgtgtccgaagaggaatggaacacgggggagacctanacctgcgtggtgcccatgaggccctgcccaacagggtcaccgagaggacccgggacaagtccaccggtaaacccaccctgtacaacgtgtccctggtcatgtccgacacagctggcacctgctactgaccctgctggcctgcccacaggctcggggnggctggccgctctgtgtgtgcatgcaaactaaccgtgtcaacggggtgagatgttgcatcttataaaattagaaataaaaagatccattcaaaagataaaa

SEQ ID NO: 254646 - DNA, 1076 bp, Homo Sapiens
gtcgggggcggtgggtgcgccggggtagccgagaggcggacgcaacagcggggtcccgcgctgtctgggcggccccaggggctgtcggctcacttccgggaacgccggggaaccgcagtagccgcctgctagtggcgctgctagccggccggcgcaggctgccgagcgggtgagcgcgcaggccaggccaaagccctggtacccgcgcggtgcgggcctcagtctgcggccatgggggcgtccgcgcggctgctgcgagcggtgatcatgggggccccgggctcgggcaagggcaccgtgtcgtcgcgcatcactacacacttcgagctgaagcacctctccagcggggacctgctccgggacaacatgctgcggggcacagaaattggcgtgttagccaaggctttcattgaccaagggaaactcatcccagatgatgtcatgactcggctggcccttcatgagctgaaaaatctcacccagtatagctggctgttggatggttttccaaggacacttccacaggcagaagccctagatagagcttatcagatcgacacagtgattaacctgaatgtgccctttgaggtcattaaacaacgccttactgctcgctggattcatcccgccagtggccgagtctataacattgaattcaaccctcccaaaactgtgggcattgatgacctgactggggagcctctcattcagcgtgaggatgataaaccagagacggttatcaagagactaaaggcttatgaagaccaaacaaagccagtcctggaatattaccagaaaaaaggggtgctggaaacattctccggaacagaaaccaacaagatttggccctatgtatatgctttcctacaaactaaagttccacaaagaagccagaaagcttcagttactccatgaggagaaatgtgtgtaactattaatagtaagatgggcaaacctcctagtccttgcatttagaagctgcttttcctaagacttctagtatgtatgaattctttgaaaattatattacttttatttctactggattttatttggaaactaaagaatgggccaat

SEQ ID NO: 254647 - DNA, 367 bp, Homo Sapiens
actcaaggagaagctatgtgagttcaactgcaacatccgggcacctccaaagcagatggtctggtgcagccgtcctcgtagcaaggagagggccgtggtggtggcctgggaaaggcggctgatggtggtgggcgatgcacccgagagcatccagtttgtgctggatgaggactcctacctggtgcctgagctcgatggggtccgcatcttctcccgcagcacccacgagttcctgcatgaggttccagcggccagcgaggaaatcttcgaggagagccaggcgcgcacgagtacctgcgggagatccaggagctgagccagctgacccaggccgtgcagcagtgcattgaggcttgaggacatggcc

SEQ ID NO: 254648 - DNA, 368 bp, Homo Sapiens
cgagacagttgtatgcttaagctcctctctacaacacaatgagcagtaatggaattttcgttttgctttaaccacatagcagtaatgggtttctatatgagaaattataggcatcaattcttcatagggtctggttagctaattgtctaggtatttaaaaaatttcttattctgctccacacaggtgcttcttagtcttgtcctcatcaaaccagtgtaagtctctccattgctagtggcagagtgctgtgtgagctcccaaaatattccccacgacagagagatacctgtcaccatgtttccatatgtctagtgattggaacacatagtactccgacatctaaaccaacccagaggcattctaacac

SEQ ID NO: 254649 - DNA, 831 bp, Homo Sapiens
aaaggcatttagtttatttttcaaaaaaatactttgctagaagggttgagtactgtaattttacatgatcataatctctaaataaattctttttctgaccaacaggtaccagaagtgaacagctcgtctaggtctgcgtaacaccctaatacaattagcacttctctgctggtattccctgggccgtcttaattatctagaggccaggaggcaaagcctagcacgtatcaaagtatgtgctttgtaactgctgattaattcagtttcttaactaggcagagcaggtcatcagtgtatctaattcacactattaatacactgtcttgctgaagagtctgacctgcccagaaccccgttatggctagcccagggaagcagtaaactgcaaagcagagaaaaggggcagctaagatgaggctagtgctggatgagtcccagttaggtctgttactgttctgttcccaactaataaacccaggatgaactgttactcagaattccagtgcctatgtaagaaaatagaatgcacagcccaaaaacataatttggggatgactggccagcacctttttttccctttcttaagaggctaactgaaagttgattaggattcttgagagaacgtaactaaaagttgaatcaaatctatattcactgctatagatttaataaaaggaaagaccactgtaaagatgcaactacaacctgatgcgtctgctgaggagaggactgggcagcttgttgaaggctcgtcaaaagtagcgcttagttatcacaaggcctgcactcaacctcaaaagcgtaaggtttaggccaggcacggtagctcat

SEQ ID NO: 254650 - DNA, 624 bp, Homo Sapiens
  misc_feature (167)..(167): n is a, c, g, or t
  misc_feature (470)..(479): n is a, c, g, or t
cagagatgtatcagccacagatgatctcagaaaagaaagagtaaagaaaccccaaatgacatgtggtagaacagtccaatccatctaaattatccagaaaagaaatggcctagcctgaagaatctagaaccggatagaacaccaaacacaatttgaatataagtganaaagagaagggaatctcttcctaaatgaaggtgctaaaaatcctcagtttattattacataagccttgtctgggtttcctaaattaaacattaagtaattactctgcttttatctcctttagttcaaataactgagtaccacttgtcatagatacagaataaaaaactagacttctaagcttaattacctgggttttttgtttgttttagccaaaaaaccaaaaatatactctccatattactgtgtctggtagccatctatctgatttcaattacagataacatgtgatatcttttcctttnnnnnnnnnngtatgtattccataatgaaaaactaaagagactggttgttggtttattgcatcctttgtaactatccaaagtacaaaatttcacatcataagccagaaaaccatgcatggaaatgtaaataaccaataagaaatgtaaatagctc

SEQ ID NO: 254651 - DNA, 1420 bp, Homo Sapiens
  misc_feature (871)..(871): n is a, c, g, or t
  misc_feature (904)..(904): n is a, c, g, or t
  misc_feature (921)..(921): n is a, c, g, or t
  misc_feature (958)..(958): n is a, c, g, or t
  misc_feature (963)..(963): n is a, c, g, or t
  misc_feature (965)..(965): n is a, c, g, or t
  misc_feature (1007)..(1007): n is a, c, g, or t
  misc_feature (1013)..(1013): n is a, c, g, or t
  misc_feature (1146)..(1195): n is a, c, g, or t
  misc_feature (1197)..(1275): n is a, c, g, or t
  misc_feature (1380)..(1380): n is a, c, g, or t
ttcggcacagcagccactaatgaagttgggaactcagaccgtaccttgcaacaagattcttctttggagcagaataaaagatctggcccatcagttcacacaggtccagcgggacatgttcaccctggaggacacgctgctaggctaccttgctgatgacctcacatggtgtgaaataaactatcaatcttgcccagactggagaaaggactgcagcaacaaccctgtttcagtattctggaaaacggtttcccgcagtttgcagaagctgcctgtgatgtggtccatgtgatgctcaatggatcccgcagtaaaatctttgacaaaaacagcacttttgggagtgtggaagtccataatttgcaaccagagaaggttcagacactagaggcctgggtgatacatggtggaagagaagattccagagacttatgccaggatcccaccataaaagagctggaatcgattataagcaaaaggaatattcaattttcctgcaagaatatctacagacctgacaagtttcttcagtgtgtgaaaaatcctgaggattcatcttgcacatctgagatctgagccagtcgctgtggttgttttagctccttgactccttgtggtttatgtcatcatacatgactcagcatacctgctggtgcagagctgaagattttggagggtcctccacaataaggtcaatgccagagacggaagcctttttccccaaagtcttaaaataacttatatcatcagcatacctttattgtgatctatcaatagtcaagaaaaattattgtataagattagaatgaaaattgtatgttaagttacttcactttaactctcatgtgaccctcttatgtcacttatatancggtcacaccctccctattgaaaaaccaccacnccaaacccctcttatcngcacaggcaagtgaagaaaagtgaacgctcaagtctntcagnangcatcacattcccaaatgaatgaccttgttgcatgatgtatntttgtnccccccccacagatagtcaaaccataaacttcatggtcatgggtcatgttggtgaaaattattctgtaggatataagctacccacgtacttggtgcttcaccccaaccctcccaacagtgctgtgaggttggnnnnnnnnnnnnnnnnnnnnnnnnnnnnnnnnnnnnnnnnnnnnnnnnnntnnnnnnnnnnnnnnnnnnnnnnnnnnnnnnnnnnnnnnnnnnnnnnnnnnnnnnnnnnnnnnnnnnnnnnnnnnnnnnntaatttaccgtaagtcctacatttagtatcaagctagagactgaatttgcactcaactctgtcccactccaaaattcatgtgctttttccttctaggcctttcanaccaaactaatagtagtttatatgcgcttccaacaaaggc

SEQ ID NO: 254652 - DNA, 1292 bp, Homo Sapiens
gggtgaagcaaggaagatatacatgaaaattttaaaaatacatatccgctgacttcatggaatggacatcctgtataagcactgaaaaacaacaacacaataacactaaaattttaggcactcttaaatgatctgcctctaaaagcgttggatgtagcattatgcaattaggtttttccttatttgcttcattgtactacctgtgtatatagtttttaccttttatgtagcacataaactttggggaagggagggcagggtggggctgaggaactgacgtggagcggggtatgaagagcttgctttgatttacagcaagtagataaatatttgacttgcatgaagagaagcaattttggggaagggtttgaattgttttctttaaagatgtaatgtccctttcagagacagctgatacttcatttaaaaaaatcacaaaaatttgaacactggctaaagataattgctatttatttttacaagaagtttattctcatttgggagatctggtgatctcccaagctatctaaagtttgttagatagctgcatgtggcttttttaaaaaagcaacagaaacctatcctcactgccctccccagtctctcttaaagttggaatttaccagttaattactcagcagaatggtgatcactccaggtagtttggggcaaaaatccgaggtgcttgggagttttgaatgttaagaattgaccatctgcttttattaaatttgttgacaaaattttctcattttcttttcacttcgggctgtgtaaacacagtcaaaataattctaaatccctcgatatttttaaagatctgtaagtaacttcacattaaaaaatgaaatattttttaatttaaagcttactctgtccatttatccacaggaaagtgttatttttaaaggaaggttcatgtagagaaaagcacacttgtaggataagtgaaatggatactacatctttaaacagtatttcattgcctgtgtatggaaaaaccatttgaagtgtacctgtgtacataactctgtaaaaacactgaaaaattatactaacttatttatgttaaaagattttttttaatctagacaatatacaagccaaagtggcatgttttgtgcatttgtaaatgctgtgttgggtagaataggttttcccctcttttgttaaataatatggctatgcttaaaaggttgcatactgagccaagtataattttttgtaatgtgtgaaaaagatgccaattattgttacacattaagtaaatcataaagaaaactttccatagc

SEQ ID NO: 254653 - DNA, 1161 bp, Homo Sapiens
  misc_feature (875)..(1028): n is a, c, g, or t
  misc_feature (1041)..(1052): n is a, c, g, or t
ggggccagcggcggagtctccaactgggagagctgcagctgccgagaggaggagaacgctgaggtcggtcggaccaacggacgcgctgaccgctgccaactgcagctcgcgctgcctcctgctcgcgccgtgccactaaggtcactcccgcctccgagagcccagagccgagatggaaacggtccaggagctgatccccctggccaaggagatgatggcccagaagcgcaaggggaagatggtgaagctgtacgtgctgggcagcgtgctggccctcttcggcgtggtgctcggcctgatggagactgtgtgcagccccttcacggccgccagacgtctgcgggaccaggaggcagccgtggcggagctgcaggccgccctggagcgacaggctctccagaagcaagccctgcaggagaaaggcaagcagcaggacacggtcctcggcggccgggccctgtccaaccggcagcacgcctcctaggaactgtgggagaccagcggagtgggagggagacccagtagacagagacagaccgagagaggaatggagagacagagggggcgcgcgcacaggagcctgactccgctgggagagtgcaggagcacgtgctgttttttatttggacttaacttcagagaaaccgctgacatctagaactgacctaccacaagcatccaccaaaggagtttgggattgagttttgctgctgtgcagcactgcattgtcatgacatttccaacactgtgtgaattatctaaatgcgtctaccattttgcactagggaggaaggataaatgctttttatgttattattattaattattacaatgaccaccattttgcattttgaaataaaaaactttttataccnnnnnnnnnnnnnnnnnnnnnnnnnnnnnnnnnnnnnnnnnnnnnnnnnnnnnnnnnnnnnnnnnnnnnnnnnnnnnnnnnnnnnnnnnnnnnnnnnnnnnnnnnnnnnnnnnnnnnnnnnnnnnnnnnnnnnnnnnnnnnnnnnnnnnnnnnnccttgggcccccnnnnnnnnnnnnaaaaattttttaaaccctttttttgggggcggggcccccaaaggaaaagaaaaggggtctattcttttcccaaaaaaacccgggccaaaaaaaggggttgatccccccc

SEQ ID NO: 254654 - DNA, 346 bp, Homo Sapiens
aacaaataatcataattatacctccttataatactaaccatcctaaaaagtgcaaaagtaaatgtttgttgatccagtgaaagtctagcaactgggtacaataatttgataacacgaagctaaccaccaaagtatgtgctgtgttcataggccaggaaagaagaaatgaatggtttactagagtaagggaacatggctaaagaaggcatgagtagggccacaaccagaatttctccacacacctctcataaaataaaacaattgaaccaccaggtacaaaaaagaaggcttcttggggatcacacaaatgacatataaaaacagtacttcctgggttctgcctccc

SEQ ID NO: 254655 - DNA, 779 bp, Homo Sapiens
  misc_feature (35)..(35): n is a, c, g, or t
  misc_feature (110)..(228): n is a, c, g, or t
  misc_feature (449)..(527): n is a, c, g, or t
  misc_feature (606)..(617): n is a, c, g, or t
ggctccacagcctgtaatccccagcactttagganggctgagttgggcgaatcacgaggtcaggagttgagaacagcctggccaatatggtgaaacctcatctctactannnnnnnnnnnnnnnnnnnnnnnnnnnnnnnnnnnnnnnnnnnnnnnnnnnnnnnnnnnnnnnnnnnnnnnnnnnnnnnnnnnnnnnnnnnnnnnnnnnnnnnnnnnnnnnnnnnnnnnaaaagcaaaatactcaaggacttttaatataaccaccaacacagtgtgccttctggccaagcagagtcacttctgtggttcttaaagtatgaatgaggtgaaagaatgtgcattcctagctaaatgccaaattccaaagcctttagtacaaaaacagcagactttctgcaaaacaggtcgacttttaaaagaggtatgagggctgggcgtggtggcttatnnnnnnnnnnnnnnnnnnnnnnnnnnnnnnnnnnnnnnnnnnnnnnnnnnnnnnnnnnnnnnnnnnnnnnnnnnnnnnnagactctcaaaaggaggcatgaaatgcacctcaatcttttgctccaagtctgccaaagattgtcaaaccctccctgttnnnnnnnnnnnntcagtttacctactctcccttctatataaaggaccctaaaattaaatgtcaatgccaaaatgcgaagtgcagatcgtcttctctccaaataagagttacttggaatccttaacaaatccaaggagaagaagcgaccactgcgaatctgtctccaaaaagccc

SEQ ID NO: 254656 - DNA, 688 bp, Homo Sapiens
ggaatctgtcctggatggggccagcttaaataatactggcaaccaagattctgttaggatttctgtgcatatagtgtagtaaagaagtatcattcaggggtgaaaaacaaagagccgttttaatgatgttgagtacatttggctgttttatagcctttttcttccctcccccaaagaattctgtttgcctaactcccaaactgttggggtggtacattcctttaggaccaattaaaacataattgagggtcagtgatacatttggctgactctggttcagtattctcttaggtgattatattctctcatgtacagttacaggaaattaaaatgttaaagtaacctaaaatgaattcagaccaataaaatcaagggaaatacaagttgattgcattacttctgtatgttgcttgctattaaaaaggttaagaggccaggttacccaccagtccttgcactgttctgacactttccccaggaggaaaacaagtacaaaggttacggtggaggcataagtagaagagattgttaagaagggtattcatgtgtctttgctctttctgctttatgcctcagtttggtttaaaaacttctgtactggcaaatggtggtattcagtgtgggatagtgtcataactaatttgacaatttattaatcataaaataacaataaatttttaggttttac

SEQ ID NO: 254657 - DNA, 800 bp, Homo Sapiens
  misc_feature (136)..(422): n is a, c, g, or t
  misc_feature (481)..(608): n is a, c, g, or t
gccctgaaatgccgtacaagaaaaagagacctcaggcccaagaaaagtgggggtcgtcatgggtaatcacgtaccagtgatcgttcagtcatgcggaatgctttcaaggtgttggacactgttcattatttttagnnnnnnnnnnnnnnnnnnnnnnnnnnnnnnnnnnnnnnnnnnnnnnnnnnnnnnnnnnnnnnnnnnnnnnnnnnnnnnnnnnnnnnnnnnnnnnnnnnnnnnnnnnnnnnnnnnnnnnnnnnnnnnnnnnnnnnnnnnnnnnnnnnnnnnnnnnnnnnnnnnnnnnnnnnnnnnnnnnnnnnnnnnnnnnnnnnnnnnnnnnnnnnnnnnnnnnnnnnnnnnnnnnnnnnnnnnnnnnnnnnnnnnnnnnnnnnnnnnnnnnnnnnnnnnnnnnnnnnnnnnnnnnngcttgcagggtgttggacactgtggatatcacctcattcattctcctaacaacccaagnnnnnnnnnnnnnnnnnnnnnnnnnnnnnnnnnnnnnnnnnnnnnnnnnnnnnnnnnnnnnnnnnnnnnnnnnnnnnnnnnnnnnnnnnnnnnnnnnnnnnnnnnnnnnnnnnnnnnnnnnnnnnnnngcacctcggaaccttagtctcttcatctgcaaaatcagcactgaggtgacaaggccaacgagcagagggttggagttacccagaacaacaacaacaacaaaagtaatagtaacacatatttggtcaaggcttagattctggcatcatggggatctgggttcaaatcctaattctgccttagccgattagggt

SEQ ID NO: 254658 - DNA, 833 bp, Homo Sapiens
attgctaccaatctcagcaaagttcaggtacatattattagcatagaattcatcattttcagcagataggaccacttctcttaagtctttactgattcccggcactctggaaagatcaatccgattgttgtttatgcctagtagttcgtggaccatggcctgatatgtccactggtttagcaatggggtgatggcatcatcacagcgatctaaaataaggagcaatggaggaacctctgtccgacggaattcaaacagttcatattctttagttatcacttgcttaacgcactctgcaagtctctttgctgcctctgatgagagctgataacgaatcatgggacacttcttcagagataaaaggagagctgtaagcccttgagttgttctagatagctgggctggatcccaatttcgaccctggcagcaacccaaaatattgagggaaaacaaatgtgggttcacagcaatgtaatcaccataaaattcctgaacctcagccacaacttcctgttcatcagcttcagccaatgacttcacgtcactcttgctgatcacattactgaaataaatgaaatatatagtgtatttgggtcttcggagctcctgaataatataatccacattctcctgagaatcaatgcgttcaaagaggtacacttccttctgtagaatctccgattgtgtgtataccatactcactatgccagtcgtctctttatccatgagaagtactttcataccaggcccgctgtcctctatcaggaaatgtactgcttcacagcaaaaaccacgttcatggcggcgaattgacaagtaccctacagcccttc

SEQ ID NO: 254659 - DNA, 548 bp, Homo Sapiens
ccataaggctctctggtgggtgcgaaatgtactgggaactcttaagtaatccaaggcaaaggagtgttaaagggtgcacttcgtcagggtatgaagccaggtggttgaaatgaaggcaggtgtgtcttaagctctaatggtgattccaaaactatcaggcttgaaaatgatgtaatcaagtccttaaaagctatagacacgaatttcttctgtgataatgatgcatcataatctggttcatctctgaagagatggaaacattcatttctagagcttcgatgggaagcaggaggaagcgggcgggaatcggcccaacggaaagcgccagaaggcggcggaagacgggagcggtcaagtagaaggacgaggggccagtccgtggagactgaaaggaagggggagcgccaccgagaactcgcgggaactcgctcgctcgccgatacagccgcgccgaagcagcaggcggagaaactgcgcccagcagctctgagcgaccgacctccacgcgcgaccgccagacactgcctccgccgccgccgaccgctcgc

SEQ ID NO: 254660 - DNA, 606 bp, Homo Sapiens
ctaccctctgttgcttcttgatgagattcttcccttggacgatcaactcgtggctttggcacagggcactctccgtatattgaacccaacagaaagtggaatgtatgggattaaaggtgttttctgctgttctgcctgttatctttccaggagtcatagactatgaattcaaaatcaggactatcttcatcacggatgagttcttcagcttctagcggatttacacccatatgtgtgagtagagtttcaacatatcttaacatgtcaaaggagctcaggtctgagcgcagctgctttgctttctctttgcccaaatctgaagccaaaacaagaaagtgggcatccaggactgcttctcttgctcgggacacttcattaaacagagtgttagcctcttcaaggacctctgttaatttgtcaccggcattcagtatgtcctcacggttttcatcacctggagggccactccacagttgcgcggacccacccagagattcggattccgtgggtccgggtggggtccgagaacgtgcatttgacagctctcgcgtgccgctgcagctgcagctgccgctgcgaggccgggagcccacgccgaggactccc

SEQ ID NO: 254661 - DNA, 857 bp, Homo Sapiens
gggagtttctggcgcgaacttccgccgttccgaagttgcacggtgaattggcgctatgtctggggacagcagcggccgcgggccagagggccggggccggggccgcgacccgcatcgggatcgcacccgctcccgctcccgctcgcggtcccctttgtcgcccaggtcccgccgcggctctgcgcgggagcgcagagaggccccagagcgcccgagcctggaggacacagagccgtcggattccggggacgagatgatggacccggccagcttggaggcggaggccgaccaaggcctgtgccgccagatccgccatcagtaccgggcgctcatcaactccgtccaacaaaaccgtgaggacatactgaatgccggtgacaaattaacagaggtccttgaagaggctaacactctgtttaatgaagtgtcccgagcaagagaagcagtcctggatgcccactttcttgtttgggcttcagatttgggcaacagagaaagcaaagcagctgcgctcagacctgagctcctttgacatgttacacgatatgttgaaactctactcacacatatgggtgtaaatccgctagaagctgaagaactcatccgtgatgacgatagtcctgattttcgaattcatagtctatgactcctggacgataacaggcagaacagcagaaaacacctttaataaaaccatacattccactttcctgtcgggttcaatatacggagagtgcctgtgccaaagccaccgagttgatcggtccaagaaaagttctgtgataccacgaggagagggcaatgcctggcccagttaagaagactggacagactctcctcaagcagcacagacaacg

SEQ ID NO: 254662 - DNA, 1051 bp, Homo Sapiens
gcagaggggcttcctaacccctgcctgataggtgcagaacgtcggctatcagagcaagcattgtggagcggttccttatgccaggctgccatgtgagatgatccaagaccaaaacaaggccctagactgcagtaaaacccagaactcaagtagggcagaaggtggaaggctcatatggatagaaggcccaaagtataagacagatggtttgagacttgagacccgaggactaagatggaaagcccatgttccaagatagatagaagcctcaggcctgcaaacgcaacaaaagcctcaagagccaagaaaacagaagtcgtaagacctgagacaggacacatggaaggcctaagaactgagacttgtgacagaaggccaaggcttgagattagaagtcttaagacctggagacacgacacatggaaggcctaagaactgagacttgtgacacaaggccaacgacctaagattagcccagggttgtagctggaagacctacaacccaaggatggaaggcccctgtcacaaagcctacctagatgggatagaggacccaagcgaaaaaggtatctcaagactaacggccggaatctggaggcccatgacccagaacccaggaaggatagaagcttgaagacctggggaaatcccaagatgagaaccctaaaccctacctcttttctattgtttacacttcttactcttagatatttccagttctcctgtttatctttaagcctgattcttttgagatgtactttttgatgttgccggttacctttagattgacagtattatgcctgggccagtcttgagccagctttaaatcacagcttttacctatttgttaggctatagtgttttgtaaacttctgtttctattcacatcttctccacttgagagagacaccaaaatccagtcagtatctaatctggcttttgttaacttccctcaggagcagacattcatataggtgatactgtatttcagtcctttcttttgaccccagaagccctagactgagaagataaaatggtcaggttgttgggg

SEQ ID NO: 254663 - DNA, 708 bp, Homo Sapiens
  misc_feature (438)..(483): n is a, c, g, or t
ccggcgtacccggtaagtggaaaaaaacaagcaaaacctgtcgatgctgatcactcatgtctccagactcccagagggcaaacaccctgctcatccggggaagcagcagtctgggggggaaaaggcaccagtatctgcttgcaaccggcggccagcaccgtgtcctgtagcatgcggtccgagatgccgctgaagagtgtgtggccgggggccagcctggccaagtgcagattgaagaggcgcttgagttcgctcagcgtgagcacaaactgtctctgaaaggtggcctccacgaaggccttcagttcccgagccacaggggtgctggcacagccctggggcgggtgcccgttgaagctgtctgtgcccgcagcccgcccgagagacagcccgttggccagcttgctgtggaggccgctgggggaagtgtccatgggnnnnnnnnnnnnnnnnnnnnnnnnnnnnnnnnnnnnnnnnnnnnnnacgggctcctccttgatccgcacaccgggcgggaccgcaggcacccgcagctgctccttccgccgctgcagctcccgctccagcaacgcgtggttctgctgggccttggttttggctacttggatccgctggtccccacagaccagcccggcaggccctgattgtgcatccggcttctttggcatggtttcccctcgtgccgaattcgccacccaggcctcgctc

SEQ ID NO: 254664 - DNA, 578 bp, Homo Sapiens
  misc_feature (13)..(13): n is a, c, g, or t
gaccgcagtgctncgtggcagtacagcgcttccacccagagcaaaccacagctcagcactttgacattatgcagtatgtagggcaatgaaatgtcatgactgcaaatttctacggtggtcaggatcaccatagagaggtcaaaaagggtagtctcccgggcttgatcagcaagggtcccttgaggatggtgggggatgaaggcagtacattgggccggtggcatccctttggtccttagcatgggtcatctgaatgtgcacgtgtcgtctgggcaacatccacgcgggtctccggggcagacgtgcagctcagacgcagcgcgtgaacctttcgtcttgtggggcgcatcgcagtaattgaaaccttgcgcaccgcaggactgccgtggcgtctataaatactcaccgcctaactgctgacaaacaaaacgcgggctcccggcaccgcgggggaagaggcggcggcagcatgtgaccgaggacagggactgggtagaactgggggtaaccccgccagacaggaaggcatcacagagcggattcctgaagcacagttagcaagcacacagcctggtccc

SEQ ID NO: 254665 - DNA, 522 bp, Homo Sapiens
  misc_feature (71)..(71): n is a, c, g, or t
gacaaccatactcttccagcctccaagtactgtccagtatttcctaagagagccagtcatttatagctganaatgtaaccaagtttactctcataaaccagagatctccttgactgttaaccagaaaagaaaaatactgcttctcctaactcatttcaagacgatcagaatatgaagatccatacatacctactttccccaaaaaaggaggtgaatttggggcagctacaaagggcatatagagatgaaaatatagagaggaggagagccaggcaaatcagctgctccatcatggtgagccgggaagaggttaagggttaattgcatgtatcccacctctggtctcttttagaccctgttctcagcaggtggctttcctgcctcactgccccaactgcttatcagtggaacaaagactggccctgagtaatggcctgaattgtcatctgcagtagatttagattcagaaatagtcaactaatcatttgaatagattttgctttttagttctctcattcttca

SEQ ID NO: 254666 - DNA, 855 bp, Homo Sapiens
ggctctttcagggctgagccatcctgcgtgtcttgcgctcggtggaaatgcccagccgagggacgcgaccagaggacagctctgtgctgatccccaccgacaattcgaccccacacaaggaggatctaagcagcaagattaaagaacaaaaaattgtggtggatgaactttctaaccttaagaagaataggaccgaacagaaatgctgtctgagagcaagaatatattggatgaactgaaaaaagaataccaagaaatagaaaacttagacaagaccaaaatcaagaaatagtcaacctgatttcacataacaatgtgtggcatttgttgttctgtaaacttttctgctgagcatttcagtcaagatttaaaagaggacttactatataatcttaaacagcggggacccaatagtagtaaacaattgttaaagtctgatgttaactaccagtgtttattttctgctcacgtcctacacttgaggggtgttttgactacccagcctgtggaagatgaaagaggcaatgtgtttctatggaatggagacattttttagtggaataaaggttgaagctgaagagaatgacactccaattttgtttaattatctttcctcctggagaatggatctgagattttgtcactcttctcagaagaacaagggtccctggtcctttatatattatccaggcacctaggtcattattttatgggtttgggtaagggatattttttgggtcgcccgtaaccttgcctttgggcattttaaataaattttgggccaagaaagttttctgccctcctccttcaggttgggcacccccaaaaaatttggggatttgggcaaaatacact

SEQ ID NO: 254667 - DNA, 707 bp, Homo Sapiens
ggggtggctaatgccgtaggctccttcagggctgagccatcccgcgtgtcttgcgctcggtggaaatgcccagccgagggacgcgaccagaggacagctctgtgctgatccccaccgacaattcgaccccacacaaggaggatctaagcagcaagattaaagaacaaaaaattgtggtggatgaactttctaaccttaagaagaataggaaagtatataggcaacaacagaacagcaatatattctttcttgcagaccgaacagaaatgctgtctgagagcaagaatatattggatgaactgaaaaaagaataccaagaaatagaaaacttagacaagaccaaaatcaagaaatagtcaacctgatttcacataacaatgtgtggcatttgttgttctgtaaacttttctgctgagcatttcagtcaagatttaaaagaggacttactatataatcttaaacagcggggacccaatagtagtaaacaattgttaaagtctgatgttaactaccagtgtttattttctgctcacgtcctacacttgaggggtgttttgactacccagcctgtgggaagatgaaagaagcaatgtgtttctatgggaatgggagaaaattttagtgggaattaaaggttggaagctgaagagaatggacacttcaaattttgttaaataatctttcctcctgttaggatggattctgag

SEQ ID NO: 254668 - DNA, 535 bp, Homo Sapiens
agtccggacgacagaccgagacccctgacacaaaagaagaaaaaaagaaaccaataataataaagaaaggacaaataataaaagttcggtgcttaaagtgcaaaagctagcactcaatcagaaaatgctcagcaagtccaacatgactcctcccgcaattctggacaaggaaggcgtcctgtaccctgtgctgtgctgatctgcgggtccgccctgagagaggaccagtgcctgcctccctgtgcaatgctggctccgagcccacccagagcacctgggagcatgtgggctcccacagagacaggctctgtggccacaaggctcacctcacagctcaggctccggacacaggcctggcggacaatgctgaagagctgggggtgcctggggtgctggtggctgacgtatttaatggaggtctctttatcatggctgatatatcccgggtgccctgcagcaagtgaccggcagccctcgcacatgtccgactttttgggccccgggctgctggactagacgctggccccctctgcgg

SEQ ID NO: 254669 - DNA, 730 bp, Homo Sapiens
  misc_feature (709)..(709): n is a, c, g, or t
taagccagttgagggggtggtgccgcccgataccaaatgttcaccgcgatccttccgaactgcgtctgaaacacggggtggcacaggtttctcctggtctttcccaggactgctccggaattggagatcaccacggctgtattccacaaaacatccccatgctcgctgtctcgttccaggatgggagacaccaccaccatgtcatggttcttcgccagcttctgacagaatctggtggtgggcccatcctctgctgactcagcaaattctgtccaaggaagcttctctctcgtacagaaggcaaagggcatagtccatgcttcctggaaacagatgatgttgactccacacattgcagccacctctacgatagcctttatgcgtctatgaagggcagagacctgttctgccacaggggcatttgcggggagggggattctgttctgaaccagccccacgtgcacaatgcggggtcgtctcagctgctcctccgctgcttcaaaggcatatccctgcagttcaaagtcttctctggaggcagcttcgaaagcttccctgggcagatcaagcttcctgagttccttgccatagagaacgcgcttcacttcctgcaagtcggggagcggcaggtgcttctccaagcattcctccagcgacttccactcagcgcccgccatggccacggtccgccatgtgcttgtgtccgctnacgaactgcctgccctttgcc

SEQ ID NO: 254670 - DNA, 1312 bp, Homo Sapiens
taaaaacctggtgaaacgttgcaagcagttagaaagcacacaaactgagagcaacaaaaaaatggaagaaaatgaaaaggagttagcagcatgtcagcttcgtatctctcaacatgaagccaaaatcaagtcattgactgaataccttcaaaatgtggaacaaaagaaaagacagttggaggaatctgtcgatgccctcagtgaagaactagtccagcttcgagcacaagagaaagtccatgaaatggaaaaggagcacttaaataaggttcagactgcaaatgaagttaagcaagctgttgaacagcagatccagagccatagagaaactcatcaagaaacagatcagtagtttgagagatgaagtagaagcaaaagcaaaacttattactgatcttcaagaccaaaaccagaaaatgatgttagagcaggaacgtctaagagtagaacatgagaagttgaaagccacagatcaggaaaagagcagaaaactacatgaacttacggttatgcaagatagacgagaacaagcaagacaagacttgaagggtttggaagagacagtggcaaaagaacttcagactttacacaacctgcgcaaactctttgttcaggacctggctacaagagttaaaaagagtgctgagattgattctgatgacaccggaggcagcgctgctcagaagcaaaaaatctcctttcttgaaaataatcttgaacagctcactaaagtgcacaaacagttggtacgtgataatgcagatctccgctgtgaacttcctaagttggaaaagcgacttcgagctacagctgagagagtgaaagctttggaatcagcactgaaagaagctaaagaaaatgcatctcgtgatcgcaaacgctatcagcaagaagtagatcgcataaaggaagcagtcaggtcaaagaatatggccagaagagggcattctgcacagattgctaaacctattcgtcccgggcaacatccagcagcttctccaactcacccaagtgcaattcgtggaggaggtgcatttgttcagaacagccagccagtggcagtgcgaggtggaggaggcaaacaagtgtaatcgtttatacatacccacaggtgttaaaaagtaatcgaagtacgaagaggacatggtatcaagcagtcattcaatgactataacctctactcccttgggattgtagaattataacttttaagatgtataaattatacctggcctgtacagctgtttcctacctaactctcttgtctctgctgcttccaacacaactagaatgctttggcatcttaggacgg

SEQ ID NO: 254671 - DNA, 873 bp, Homo Sapiens
cgtcccaacatttgggcattttggttttatcccacaggttttcccagagcttcttcttggaattgaaagcaaaatatattggcaaacactgcttctcaatacacaggaaggggagcctcagtgcctcctgccaacagaggcggctctgtgcagtcagactgtggggtgcacagcagtctctcaggctggggtttctggcctctttccatccaatcaccccttccaggaaattcagcagcctaccagacactgggcctctgcctggctgccctttcccccaggcagagcggccttgggcataataccaggcaacctgccagccccagagcagaaaccctgctgggatcccttccttcatcaaccttggtgtggaggatgctcaatagcgcttccacctccccctccccagcccctagctacatctctccacccttccctggacagtcctacttcccagctcacccacccaccagcagcttaagtctgggtgggatctatcatcagctcctccccctgtaacctcttccctccacagatccaccctgtgctcctctcctcacctctccccctccactcacattcttactcaagtctccaagaccctgaggctggatggtgccacaagagaggagggtcagtttccctcagggaaccaaaaaactggcttgcttggcacccagggacagtagctgtttggctctccacccaattaaaaaaacaaatccctgccctttcccccaccccactagctaagcaagagcagagctgtgataaagagccagtgccgggtggctggtgcccaggactgtaaacagtgcggacgcgtggcgacgcgtgggtcgacgatatcccgtaaattccggaccggtacca

SEQ ID NO: 254672 - DNA, 562 bp, Homo Sapiens
aaattattcacaaaaagcagctgcgaaatcagaaaggcagctgccctccagggtctcaaatccattaaaaccaccacagaacaattaaaacaatcagagagagaaaaggaaaaggaaacaacgtccaacatttggcatttggttttatccacaggttttcacagagctcctcttggaattgaaagcaaaatatattggcaaacactgcttctcaatacacaggaaggggagcctcagtgcctcctgccaacagaggcggctctgtgcagtcagactgtggggtgcacagcagtctctcaggctggggtttctggcctctttccatccaatcaccccttcccaggaaattcagcagcctaccagacactgggcctctgcctggctgccctttcccccaggcagagcggccttgggcataataccaggcaacctgcggtcaaaaaggaaagggggttcaggtgctctccgcagttgagaactcagaagaaaaacaaaagaaagaacaatacatgcggtctcctcaagccccacagactgtatcagcaaaatgtgctcaggagcc

SEQ ID NO: 254673 - DNA, 359 bp, Homo Sapiens
acccggggggtcatactgctcaagctcggggatccccgcggggaggtcccccaccgttgccctgggccgaatacatgtagtccaggcccccaagcttccactcgccagctcggtccacgaacacggcggccatgcagacattgttgtggatgaggctgcagtcgttgaccaggaagctgagggccacgatctggtgtagcccccaggagatctccagctccttcaggccaccagcctccactctcgcctctgtctccagtccatcgatgtaagccaggatgttggggtgccgtagaggaagcgcttgaaggcagctttggccacctgggtctgctcttccgcgccaggcttcacatcat

SEQ ID NO: 254674 - DNA, 1034 bp, Homo Sapiens
aaggtagcgaggcctgggtgggcgaattcggcacgaggctggagagcagcctggactcaggggagacttcttcctggactcgggtcgtaagacccgctccgctcgtcggcgcaccacgcagatcatcaacatcaccatgaccaagaagctagatgtggaagagccagacagcgccaactcatcgttctacagcacgcggtctgctcctgcttcccaggctagcctgcgagccacctcctctactcagtctctagctcgcctgggttctcccgattatggcaactcagccctgctcagcttgcctggctaccgccccaccactcgcagttctgctcgtcgttcccaggccggggtgtccagtggggcccctccaggaaggaacagcttctacatgggcacttgccaggatgagcctgagcagctggatgactggaaccgcattgcagagctgcagcagcgcaatcgagtgtgccccccacatctgaagacctgctatcccctggagtccaggccttccctgagcctgggcaccatcacagatgaggagatgaaaactggagacccccaagagaccctgcgccgagccagcatgcagccaatccagatagccgagggcactggcatcaccacccggcagcagcgcaaacgggtctccctagagccccaccagggcccctggaactcctgagtctaagaaggccaccagctgtttcccacgccccatgactccccgagaccgacatgaagggcgcaaacagagcactactgaggcccagaagaaagcagctccagcttctactaaacaggctggaccggcgccagtcgatggcctttcagcatccttcaacaacacccaagaagctaggggaacagccttctgcggcggggagcctcaaagaagggccctgtccaaggcttcccccaacactcgcagtgggaacccgccgttctccgcgcattgccaccaccacagccagcgccgccactgctgccgccattggtgccacccctcgagccaaggggcaggcaaagca

SEQ ID NO: 254675 - DNA, 653 bp, Homo Sapiens
tgtgcattgagaacctgaatagctgtcataaaatgagactttctttctaaagaaagatactcacatgagttcttgaagaatagtcataactagattaagatctgtgttttagattaatagattgaagtgcctgtgtgggataatgataggtaatttagatgaatttaggggaaaaaaggtatctgcagaaatgttgagggcccatatcttcccccacacccccacagagcgtaactgggttacagtggtttatccgaaaggttccaattccactgtcttgtgggttcatgtgtgaaaatacttttgcatttttcctttgagtgccaatttcttactaggactatttcttaatgtaacatggttacctggaatgtattttaactatttttgtatagtgtaaactgaaacatgcacattttgtacattgtgctttcttttgtgggacatatgccgtgtgatccacgatggtttccatcatttggttgcgctgacctaagaatgttggtcatatcaaacattaaaaatgaccactcttttaattgaaattaacttttaaatgtttataggagtatgtgctgtgaagtgatctaaaatttgtaatatttttgtcatgaactgtactactcctaattattgtaatgtaataaaaatag

SEQ ID NO: 254676 - DNA, 1583 bp, Homo Sapiens
  misc_feature (1403)..(1403): n is a, c, g, or t
ccgacaccggcttcttagctgaatacctctcctacgactccagtgacccatgcccggggcagttcacgtgccgcacggggcggtgtatccggaaggagctgcgctgtgatggctgggccgactgcaccgaccacagcgatgagctcaactgcagttgcgacgccggccaccagttcacgtgcaagaacaagttctgcaagcccctcttctgggtctgcgacagtgtgaacgactgcggagacaacagcgacgagcaggggtgcagttgtccggcccagaccttcaggtgttccaatgggaagtgcctctcgtcctgccccaaggtgaacgtcgtcacttgtacccacacctaccgctgcctcaatgggctctgcttgagcaagggcaaccctgagtgtgacgggaaggaggactgtagcgacggctcagatgagaaggactgcgactgtgggctgcggtcattcacgagacaggctcgtgttgttgggggcacggatgcggatgagggcgagtggccctggcaggtaagcctgcatgctctgggccagggccacatctgcggtgcttccctcatctctcccaactggctggtctctgccgcacactgctacatcgatgacagaggattcaggtactcagaccccacgcagtggacggccttcctgggcttgcacgaccagagccagcgcagcgcccctggggtgcaggagcgcaggctcaagcgcatcatctcccaccccttcttcaatgacttcaccttcgactatgacatcgcgctgctggagctggagaaaccggcagagtacagctccatggtgcggcccatctgcctgccggacgcctcccatgtcttccctgccggcaaggccatctgggtcacgggctggggacacacccagtatggaggcactggcgcgctgatcctgcaaaagggtgagatccgcgtcatcaaccagaccacctgcgagaacctcctgccgcagcagatcacgccgcgcatgatgtgcgtgggcttcctcagcggcggcgtggactcctgccagggtgattccgggggacccctgtccagcgtggaggcggatgggcggatcttccaggccggtgtggtgagctggggagacggctgcgctcagaggaacaagccaggcgtgtacacaaggctccctctgtttcgggactggatcaaagagaacactggggtataggggccggggccacccaaatgtgtacacctgcggggccacccatcgtccaccccagtgtgcacgcctgcaggctggagactggaccgctgactgcaccagcgcccccagaacatacactgtgaactcaatctccagggctccaaatctgcctagaaaacctctcgcttcctcagccctcaaagtggagctgggaggtanaaggggagggaactggggggtctactgacccaactgggggcaaaggttggaagaaacagccttcccccgccagcccccagactgggcccaaggggcgtttggggcataatctgccttcccctgtcttctaagggaacaacggggaaacggaaccttccggggcctcccttccatggaaaa

SEQ ID NO: 254677 - DNA, 1355 bp, Homo Sapiens
  misc_feature (1252)..(1261): n is a, c, g, or t
ccagctgccagtccccagcagctcagtcctgcagtgagagtcttgggagtccatagctaagcaccaggagctgagcactgcccgctgtgcctgcctgcaagtctgacatggctcaggagtggagctggaccttgagcctgacacatcttatgggggaaccctgaggagatccagcagcgctcccctaatccatgggctcagtgacctttcacaggttttccaaccttacacacttagaactcggaggaatagtacaacaattatgagccgtcacagcctggaagaaggcctggatatggtgaacagagaaactgcacatgaaagggaaatgcaaacggcaatgcagataagccaatcatgggatgagagcttgagcctgagtgacagtgattttgacaagccggagaaattatattctcctaagagaattgacttcactccagtttctccagcaccttcacccaccaggggattcggaaagatgttcgtgagcagcagtggattgccaccaagtccagttcccagtccaagacgattttcaagcaggagaagtcagagtccagtcaagtgcattagacccagtgttcttggtcctcttaaaagaaaaggtgaaatggagacagaaagtcagcccaagagactcttccaaggcactaccaatatgttatctccagatgccgcgcaactgtctgatctcagttcatgttcagatattttggatggcagtagtagcagcagtggcttatcctcagacccgctggctaaaggcagcgctaccgcagagtctccagtagcatgctccaattcatgctcttcgttcatcttgatggatgatctctcacccaagtgacttaaccatttctgattcaacgttttaactgctgtttcctacataaaatgtttagtggggaacgcagagaactttgatccataatgaggattaaaggtttacagatttcacacattctgatgctattattactctttggcatctctcttctccaaagttcaattttgtgagcctagtgaccttactagtatctggttttgctgatctcattttggatttagtgattaaatctcaaatgctgatttttgattgcttagaggaatcttttttcttagtgcctcaaaaaacacctattttgagtctatacatttaagaaaggcactgatgtgtattgcctttaatggtccttttccgcagcagtgatatgacagatttgatcagaaattctcttgcttgagagannnnnnnnnngtcctctgttgactacatagtttcaaatctctctttatttcatgatgatatataaattgcttttaattatattaaatttttatttttctgcaaa

SEQ ID NO: 254678 - DNA, 362 bp, Homo Sapiens
cggaagcgctccgctgtacctggatcctgctcctctgggttgaaacccgggcgccgccaagatgccggcttaccactcttctctcatggatcctgataccaaactcatcggaaacatggcactgttgcctatcagaagtcaattcaaaggacctgcccccagagagacaaaagatacagatattgtggatgaagccatctattacttcaaggccaatgtcttcttcaaaaactatgaaattaagaatgaagctgataggaccttgatatatataactctctacatttctgaatgtctgaagctgcgtgcaattcccctggagagcctggttttccacttaacgcaatttatgcccctgcgac

SEQ ID NO: 254679 - DNA, 792 bp, Homo Sapiens
gggcaggctgccagaccggaagcgctccgctgtacctggatcctgctcctctgggttgaaacccgggcgccgccaagatgccggcttaccactcttctctcatggatcctgataccaaactcatcggaaacatggcactgttgcctatcagaagtcaattcaaaggacctgcccccagagagacaaaagatacagatattgtggatgaagccatctattacttcaaggccaatgtcttcttcaaaaactatgaaattaagaatgaagctgataggaccttgatatatataactctctacatttctgaatgtctgaagaaactgcaaaagtgcaattccaaaagccaaggtgagaaagaaatgtatacgctgggaatcactaattttcccattcctggagagcctggttttccacttaacgcaatttatgccaaacctgcaaacaaacaggaagatgaagtgatgagagcctatttacaacagctaaggcaagagactggactgagactttgtgagaaagttttcgaccctcagaatgataaaccccagcaagtggtggacttgctttgtgaagagacagttcatgaacaagagtctttccaggaacctggacagtgaaaggaagccccggccagccacccgtctcccagagccccggggcaagcattttcccaagcaagatggtaccccaatccttttggcctttattttcctaaaaggttttttaccggaaagaagaggaagagccatgtccttttacttggaaaaaacctccttgaattcaaagaaattt

SEQ ID NO: 254680 - DNA, 785 bp, Homo Sapiens
  misc_feature (705)..(705): n is a, c, g, or t
gggaggctgccagaccggaagcgctccgctgtacctggatcctgctcctctgggttgaaacccgggcgccgccaagatgccggcttaccactcttctctcatggatcctgataccaaactcatcggaaacatggcactgttgcctatcagaagtcaattcaaaggacctgcccccagagagacaaaagatacagatattgtggatgaagccatctattacttcaaggccaatgtcttcttcaaaaactatgaaattaagaatgaagctgataggaccttgatatatataactctctacatttctgaatgtctgaagaaactgcaaaagtgcaattccaaaagccaaggtgagaaagaaatgtatacgctgggaatcactaattttcccattcctggagagcctggttttccacttaacgcaatttatgccaaacctgcaaacaaacaggaagatgaagtgatgagagcctatttacaacagctaaggcaagagactggactgagactttgtgagaaagttttcgaccctcagaatgataaacccagcaagtggtggcacttgccttgtgaagagaccagttcatgaacaagagtctttcaggacctggacagtgaagggagcccgggcagccaccgtctccagagccctgggcagcattttccagcaagatgtacacaatcttttgccttttattttcgtaaggntttatacagaagaagagaaagagcttggtctttacttgaaaaaaactcttggatccagaatttttgggttgggaagaaaa

SEQ ID NO: 254681 - DNA, 1674 bp, Homo Sapiens; identical to SEQ ID NO: 14815
  misc_feature (890)..(891): n is a, c, g, or t
  misc_feature (893)..(997): n is a, c, g, or t
  misc_feature (999)..(999): n is a, c, g, or t
  misc_feature (1007)..(1010): n is a, c, g, or t
  misc_feature (1049)..(1063): n is a, c, g, or t
  misc_feature (1141)..(1165): n is a, c, g, or t
  misc_feature (1216)..(1225): n is a, c, g, or t
  misc_feature (1287)..(1307): n is a, c, g, or t
  misc_feature (1346)..(1354): n is a, c, g, or t
  misc_feature (1424)..(1444): n is a, c, g, or t

SEQ ID NO: 254682 - DNA, 515 bp, Homo Sapiens
  misc_feature (413)..(413): n is a, c, g, or t
ccccgcaaagaatgccggcttaccactcttctctcatggatcctgataccaaactcatcggaaacatggcactgttgcctatcagaagtcaattcaaaggacctgcccccagagagacaaaagatacagatattgtggatgaagccatctattacttcaaggccaatgtcttcttcaaaaactatgaaattaagaatgaagctgataggaccttgatatatataactctctacatttctgaatgtctgaagaaactgcaaaagtgcaattccaaaagccaaggtgagaaagaaatgtatacgctgggaatcactaattttcccattcctgggagagccgggttttccactttaacggcaatttatgccaaacctgcaaacaaacagggaaggtggaagttgatgaggagcctnttttacaacagcttagggcaagaggattggattgaggatttgtggaggaaagtttttcggaccttcggatggttaaacccggcagtggtgggtttgtttttt

SEQ ID NO: 254683 - DNA, 982 bp, Homo Sapiens
  misc_feature (147)..(147): n is a, c, g, or t
  misc_feature (747)..(747): n is a, c, g, or t
agccaagctgaccacgaagccacagaactggctaggcaaataagctctaaggcagaagtcaattcatctggaaagactatctctgagtcagacttccactctttttcactaactgatttacaagatgatatacctacaacattcccnagggtgctacggccagtacatcgtacggactcccagaattcctcagcagcatcctttcatcaacctacccaacctgtagctaagaatacctccatgagccctcgacagcgccgggcccagcagcagagtcagagaaggttgtctacttcaccagatgtaatccagggccaccagccaagagacaaccacactgatcatggtgggtcagctgtactgattgtcatcctgactttggcattggcagctcttatattccgacgaatatatctggcaaacgaatacatatttgactttgagttataatatggttttgtgacttatgagctgtgactcaactgcttcattaaacattctgcattgggtataatctaagaattgtttacaaaaagattattttgtatttacccttcattcctttttttgatccttgtaagtttagtataaatatatctagacattcagactgtgtctagcagttacgtcctgcttaaagggactagaagtcaaagttccttgtctcactatttgatctgctttgcagggaaataacttgttttttctcatggttcatcctctttttatgtaaatttgtaatacttntcctatattgccccttttgaaatttttggataaaagatgatggttttaagtttccaatgaggattacctaggttactccaatacccactttattggagaattcttggtttctaccttattggaaaaaggaattaggggataaaaaagagttggaaaaggggaaaacccaaaactccctccaagtaagcttccccttaaaaaattgccatttccattaggaaaaatagaactgggg

SEQ ID NO: 254684 - DNA, 424 bp, Homo Sapiens
ccagtctgtaacctgtccctcccatatctgtgtgtgttctgtgttgcttgaagaatatggtccaggccctcagctcatgggaatctgcctctcactgggcctcacatgtggtttataccagtgaccaattctaggatgaccacgaagaatgattccactgggcttgggagtgtgttgctggtacctctaatctctgtgtagaggtcataggacctgtgtgctctgtggctaggtcctcagagtcagtccctgggcaggtactcgcagccttcagttttccccacagactgtgttcctgggcctgaatcgctcagactacatgtgtccagcgcaacgcagatggctccccagacctgaaacagatcgtccaccatctctgccagctttgggggcctggccttccggaccccagctgtgcaccgac

SEQ ID NO: 254685 - DNA, 1903 bp, Homo Sapiens
atcgaggccccgccccctgagcctgggtagcggcgcgagggccgggagaaccgttcgcggaggaaaggcgaactagtgttgggatggccaccaactgggggagcctcttgcaggataaacagcagctagaggagctggcacggcaggccgtggaccgggccctggctgagggagtattgctgaggacctcacaggagcccacttcctcggaggtggtgagctatgccccattcacgctcttcccctcactggtccccagtgccctgctggagcaagcctatgctgtgcagatggacttcaacctgctagtggatgctgtcagccagaacgctgccttcctggagcaaactctttccagcaccatcaaacaggatgactttaccgctcgtctctttgacatccacaagcaagtcctaaaagagggcattgcccagactgtgttcctgggcctgaatcgctcagactacatgttccagcgcagcgcagatggctccccagccctgaaacagatcgaaatcaacaccatctctgccagctttgggggcctggcctcccggaccccagctgtgcaccgacatgttctcagtgtcctgagtaagaccaaagaagctggcaagatcctctctaataatcccagcaagggactggccctgggaattgccaaagcctgggagctctacggctcacccaatgctctggtgctactgattgctcaagagaaggaaagaaacatatttgaccagcgtgccatagagaatgagctactggccaggaacatccatgtgatccgacgaacatttgaagatatctctgaaaaggggtctctggaccaagaccgaaggctgtttgtggatggccaggaaattgctgtggtttacttccgggatggctacatgcctcgtcagtacagtctacagaattgggaagcacgtctactgctggagaggtcacatgctgccaagtgcccagacattgccacccagctggctgggactaagaaggtgcagcaggagctaagcaggccgggcatgctggagatgttgctccctggccagcctgaggctgtggcccgcctccgcgccacctttgctggcctctactcactggatgtgggtgaagaaggggaccaggccatcgccgaggcccttgctgcccctagccggtttgtgctaaagccccagagagagggtggaggtaacaacctatatggggaggaaatggtacaggccctgaaacagctgaaggacagtgaggagagggcctcctacatcctcatggagaagatcgaacctgagccttttgagaattgcctgctacggcctggcagccctgcccgagtggtccagtgcatttcagagctgggcatctttggggtctatgtcaggcaggaaaagacactcgtgatgaacaagcacgtggggcatctacttcgaaccaaagccatcgagcatgcagatggtggtgtggcagcgggagtggcagtcctggacaacccataccctgtgtgagggcacaaccaggccacgggaccttctatcctctgtatttgtcattcctctcctagccctcctgaggggtatcctcctaaagacctccaaagtttttatggaagggtaaatactggtaccttcccccagctttccatctgaggaccagaaaagttgtgtctcccttagatgagatctagacgcccccaaatccttgagatgtgggtatagctcagggtaagctgctctgaggtaaaggtccatgaaccctgccccactcctgtcagcccctcatcagccttttcagcaggttccagtgcctgacttgggataggactgagtggtaggaggagggggagtggaggggcatagcctttccctaattctgccttaaataaaactgcattgctgattca

SEQ ID NO: 254686 - DNA, 972 bp, Homo Sapiens
gtagcgaggcctgggtggcgaattcggcacgagggacatccacaagcaagtcctaaaagagggcattgcccagactgtgttcctgggcctgaatcgctcagactacatgttccagcgcagcgcagatggctccccagccctgaaacagatcgaaatcaacaccatctctgccagctttgggggcctggcctcccggaccccagctgtgcaccgacatgttctcagtgtcctgagtaagaccaaagaagctggcaagatcctctctaataatcccagcaagggactggccctgggaattgccaaagcctgggagctctacggctcacccaatgctctggtgctactgattgctcaagagaaggaaagaaacatatttgaccagcgtgccatagagaatgagctactggccaggaacatccatgtgatccgacgaacatttgaagatatctctgaaaaggggtctctggaccaagaccgaaggctgtttgtggatggccaggaaattgctgtggtttacttccgggatggctacatgcctcgtcagtacagtctacagaattgggaagcacgtctactgctggagaggtcacatgctgccaagtgcccagacattgccacccagctggctgggactaagaaggtgcagcaggagctaagcaggccgggcatgctggagatgttgctccctggccagcctgaggctgtggcccgcctccgcgccacctttgctggcctctactcactggatgtgggtgaagaaggggaccaggccatcgccgaggcccttgctgcccctagccggtttgtgctaaagccccagagagaggggtggaaggtaacaacctatatgggggaggaaatgggaacaaggccctgaaaacagctgaaaggacaatggaggaaaaggccctcctacatcccccctggggagaaagaaccaaccctgaagccttttttgaaaaatggcccgga

SEQ ID NO: 254687 - DNA, 431 bp, Homo Sapiens
aaaaacttctggtcctgcacagggcctgttctctccagctccagacctggatctcccaggctcacagtggtggaaagtgaggtggcagtgcaagaagggcatagagatcggctacaaagggaaagaagagatgacaagaaaggccgaggaaggatgcccaaaagcttgattcagggttcaaagatggtggccaggccatcatttcttcatcgtctccatctgctgggggagcactactgtggtcagcacccttctttgaaacacagcaaaccgtgattaggtccatgacttctccatctgcagcctcatcttctccacacagcaggctcctttggttgataacttgccatttctgagaaagcctcatatggaggtaggtgaaaagaggtccgaggatgctcgtgctgtattcgtgcagcccgtggtacaca

SEQ ID NO: 254688 - DNA, 884 bp, Homo Sapiens
ggggaggctttctcagaaatggcaagttatcaaccaaaggagcctgctgtgtggagaagatgaggctgcagatgaaaacccagagtctcaagagatgctggaggagcaacgtggtgaggatgttaacccggagaagtcatggacctaatcacggtttgctgtgtatcaaagaagggtgctgaccacagtagtgctcccccagcagatggagacgatgaagaaatgatggccacatggaggtcaggccccctcagctatggcagagcttacagacctgggcaaatgtctgagtgaagcatgaggatgtttgtacagcgctattaattacagccttcaattccctggcctggaaagatactctgtcctgccagaggacaacctcacagctctgctggcctctcctcaaacaagtgctgtcagggacactgctcgcagatgcagttacgtggcttttcaccagtgtgctgaaaggcttacagatgcacgggcagcacgacgggtgcatggcttccctggtccatctggccttccagatatacgaggcactgcgccccaggtacctggagataagagctgtaatggagcaaatccctgaaatacagaaggactcactggaccagtttgactgcaagcttttaaacccctccctgcagaaagtggctggactaagacggccggaaaggaaccaatttcaaacgcctcaattgctggttgcatttgggaaaacccttgggagagcaggtccgaaaaagaagttcacatttaagaatcttccctcacttttcaaaaaaacaaagccaatgctggagacggaggtgctggacaatgatggggtgcctggccaccatctttgaaccctgaatcaagcttttgggcatccttaa

SEQ ID NO: 254689 - DNA, 979 bp, Homo Sapiens
  misc_feature (33)..(33): n is a, c, g, or t
  misc_feature (38)..(38): n is a, c, g, or t
  misc_feature (41)..(41): n is a, c, g, or t
  misc_feature (48)..(48): n is a, c, g, or t
  misc_feature (61)..(61): n is a, c, g, or t
  misc_feature (67)..(67): n is a, c, g, or t
  misc_feature (71)..(71): n is a, c, g, or t
  misc_feature (121)..(121): n is a, c, g, or t
  misc_feature (123)..(123): n is a, c, g, or t
  misc_feature (125)..(125): n is a, c, g, or t
  misc_feature (141)..(141): n is a, c, g, or t
  misc_feature (201)..(201): n is a, c, g, or t
  misc_feature (212)..(212): n is a, c, g, or t
  misc_feature (229)..(229): n is a, c, g, or t
  misc_feature (271)..(271): n is a, c, g, or t
  misc_feature (327)..(327): n is a, c, g, or t
  misc_feature (877)..(877): n is a, c, g, or t
  misc_feature (881)..(881): n is a, c, g, or t
  misc_feature (909)..(910): n is a, c, g, or t
  misc_feature (912)..(912): n is a, c, g, or t
  misc_feature (914)..(914): n is a, c, g, or t
  misc_feature (948)..(948): n is a, c, g, or t
gtgttaattaaaaaagtaacagatccatgcacncaacnccnggggagngggggtgggggtnggagtnaggnatgaagaatgggtgggaagcaaggagggaggggtggaaggacagaaaganananacagagagaggcaganacggaaagaactggagaaccagagccataaaaagaaaaagacatccataaaaaggcaganagaaagaagtngtgtattaaaagcaganatcaataaaggagaagaggggaaattgaaaaaatagacaganatacataggcagagaacaaaagcccagcaaaaaggcggggagaaagggcgttacanagacagagagatcacccttgagggacacaggcagaatgaaaagggcccccagcccccggaggccccccaggcagcagcccgagccacagcattggctcaggggtccccagaggtgctgatgaccgtgaaacagggtgacattgtagagcacctggtggccgttgttccaggtatagagggcgcgctcccgggggttgtaatccagcatcgagatgtgggaatactggttgtggaagggcacgtccgtgtactcgtaactggacgtgttggtaaaataggcgaagtagaccttggccccagccaggtgggagttggtcacgtagagcacaccgcagatcatgaaggcctcgccagcgctgcgcttgagggtagccggtgtcccaggaccgcatgacctcgagggtgtacgggtccagccggctgaacacgatgttgcacgcgttctggttggtggtgtacacagcccagagcccactctcgtccaccatgaagtccatgtcggagaagccgccccaggagtaggggaaggtgttgttgtaaccggcgcccnggangctcctctgcaccagcacagagcgcgannanangtggtatttgaccaccacgttgctctggtacttnttatagaacagggagccgttgtacaccacgt

SEQ ID NO: 254690 - DNA, 1048 bp, Homo Sapiens
  misc_feature (392)..(411): n is a, c, g, or t
ggaacggatttggaactggaatctcacctggccaagaaagaccaccttcttttggaacagaagaaatatctagaggatgtcaaactccaggcaagaggacagctgcaggccgcagagagcaggtatgaggctcagaaaaggataacccaggtgtttgaattggagatcttagatttatatggcaggttggagaaagatggcctcctgaaaaaacttgaagaagaaaaagcagaagcagctgaagcagcagaagaaaggcttgactgttgtaatgacgggtgctcagattccatggtagggcacaatgaagaggcatctggccacaacggtgagaccaagacccccaggcccagcagcgcccggggcagtagtggaagcagaggtggtggagnnnnnnnnnnnnnnnnnnnngagctttctaccccagagaaacccccacaccagagggcaggcccattcagcagtcggtgggagacgactatgggagaagcgtctgccagcatccccaccactgtgggctcacttcccagttcaaaaagcttcctgggtatgaaggctcgagagttatttcgtaataagagcgagagccagtgtgatgaggacggcatgaccagtagcctttctgagagcctaaagacagaactgggcaaagacttgggtgtggaagccaagattcccctgaacctagatggccctcacccgtctcccccgaccccggacagtggttggacagctacatatcatggactacaatgagactcatcatgaacacagctaaggaatgatggtcaatcagtgttaacttgcatattgttggcacagaacaggaggtgtgaatgcacgtttcaaagctttcctgtttccagggtctgagtgcaagttcatgtgtggaaatgggacggaggtcctttggacagctgactgaatgcagaacggtttttggatctggcattgaaatgcctcttgaccttcccctccacccgccctaaccccctctcatttacctcgcagtgtgttctaatccaagggccagttggtgttcctcagt

SEQ ID NO: 254691 - DNA, 196 bp, Homo Sapiens
gacaggaaacccacagtatcctctgggggtaaatcaattcttcaacccttgggtgtgtgagtttgaggcagggtcatttgtgtaatgtgtttggccttaccaaagcaaaagagggtgcaagaatgtgggagtatgtctgccggtgtattactgctccctacttaacatacttgaattctcaaatttcctttggggt

SEQ ID NO: 254692 - DNA, 1114 bp, Homo Sapiens
  misc_feature (178)..(186): n is a, c, g, or t
  misc_feature (498)..(508): n is a, c, g, or t
  misc_feature (684)..(693): n is a, c, g, or t
  misc_feature (965)..(965): n is a, c, g, or t
  misc_feature (967)..(968): n is a, c, g, or t
  misc_feature (1024)..(1025): n is a, c, g, or t
  misc_feature (1028)..(1047): n is a, c, g, or t
  misc_feature (1066)..(1066): n is a, c, g, or t
  misc_feature (1073)..(1073): n is a, c, g, or t
  misc_feature (1087)..(1087): n is a, c, g, or t
gggagaagaggagcccgcttcctgtacatatatttaagtgacaaacacggtcaaaagcttaagggacaggttttatggttgcttgtgtaataaagcatgtccttcgtatgtcacagtttggggcaacggaagtcttttagtgatggctaatgggtctgggcagcatcccttcatgaannnnnnnnnaatccaatatccgttgatttgattgtgattagagaaccttggacattttgctgctaaagaatcttttttcccctctcccccttcctgaccctacttgcactgctgtggatttttttaagagaagcaaaaacaaaagtaaactcctttccctggccctccaaacatatattctgtgagataactgtgcctgctaccaagtgttaatcctgggatcgtatttttatatcatattcacatatttgtttttttaattggtgttagatgacatgattaataaaaaaggcaagatattttcagaatttgaatttcagnnnnnnnnnnncttttgaaatgtccctttaagatttttttattctaaacaaaataaagaaaatcctgctgctctggtccttgtgataagcctctcttcggcatctgaggagcagctgcagcaaaatctaggggtgtaagtgtatcaggacttatgtgacttatattttggggagatgagggttgggnnnnnnnnnnaatgctacgtgacagtttgaaaccttcacagttatcctctgggggtaaatcaattcttcaacccttgggtgtgtgagtttgaggcagggtcatttgtgtgatgtgtttggccttaccaaagcaaaagagggtgcaagaatgtgggagtatgtctgccggtttcaacacacacagacaaacacagccacacgcgcacacaagtataagactttttgtattactgctccctacttaacatacttgaattctcaaatttcctttggggtaaaaanannaaaggatttgaaaccataaagtgttctgaagaaattaagtctataaaaagcatacnntcnnnnnnnnnnnnnnnnnnnncctccacagacaatgtccnctgttcnattcctaacgcaanctacaataaatggtgacacacgtataa

SEQ ID NO: 254693 - DNA, 734 bp, Homo Sapiens
atttaatagggacttagaaacagaagccacacctgtggcttgtgcagcagtgaggcaagatgatgggttcccacactcttagcccccagacccagaggggtttatctattgtaggggagattacatgtagaggagaggtgcacatgcttcagagggaatgggtagaaatgtgccctaatagcaggatttatgataagtacttgttcttacacaagggacagtagataaattggaaacctcagaggccctccagaactggggttaatcagaagccaacatggcagattagcatccaaaatggagttgctttagcctccagattccactccactaatttggcttttataatctcacacaccctcatcttctgttatggtctctgagcatttagggagagtacttgataggatataggtttagcagaagtgcattggtgatgggaaacagatcaggcccagtggggttccaaatgaagaagattcataggctattgaatcacctctagtcttcagaatatcatgccttaaagagcatgaagaaaactaaaacccagctcttagagacctcttgtagccagcaaatagttcagaatttagcctaaattgtaggaaaataataaaaattcaaaaacaatggtcaggacctagaatccaattttttctctctccaatttcttcatttctaccaaggataaattatgtcaggaacaatttatttgcaaaattttagtcttg

SEQ ID NO: 254694 - DNA, 451 bp, Homo Sapiens
  misc_feature (11)..(11): n is a, c, g, or t
aaaaccccttntccaagaaccttccgccagcacctatgaaccgttgtgatgttcgaagatgtccgttgccaaagaagggccgagactataatgcacctgatagcaaatgggaaataaagcgctgtcagtgttgtggttccagtggcacacatttagcctgctcctcattacggtcatgggagcaaaattgggagtgtttggaatgtaggggtattatctacaattcaggagagttccaaaaagccaaaaaacatgtattacccaattctaataatgtggggattacagattgtttgttggaagagtcatcacctaaattacccagacagtcacctggatcccagagtaaagatctactgaggcaaggcagcaaatttagaagaaatgtatcaacactattaatagagttaggattccaaattaaaaaactagaaatcgcttttccttcatt

SEQ ID NO: 254695 - DNA, 1683 bp, Homo Sapiens
  misc_feature (1430)..(1581): n is a, c, g, or t
  misc_feature (1591)..(1593): n is a, c, g, or t
  misc_feature (1614)..(1615): n is a, c, g, or t
  misc_feature (1625)..(1641): n is a, c, g, or t
ctttgtaaaaggtacccaggctttatgcgggtggcgctctcagagccccagccagagaggaggtttttccgtcgtggctgggtgaccttcgaccgcagtgttaacattaaagagatctgttggaacctgcagaacatccgtctccgggagtgtgagctgagccctggtgtgaacagggacctgacccggcgcgttcgcaacatcaacggcatcacccagcacaagcagattgtgcgcaacgacatcaagctggcggccaagctgatccacacgctggatgacaggacacagctttgggcctcagaaccagggacgcctcccctgcccacgagcctgccctcgcaaaacccgatcttgaagaatatcaccgactacctgatcgaggaagtaagcgccgaggaggaggagctgctggggagcagcgggggcgctcctcctgaggagcctcctaaggaagggaacccggcagagatcaacgtggagcgggatgagaagttgattaaggtcttggacaagctcctcctttacctgcgcatcgtgcattccttggattattacaacacctgtgagtaccccaacgaggacgagatgcccaatcgctgtgggatcatccacgttcgggggcccatgccacccaaccgcatcagtcacggggaagtgctggagtggcagaagacttttgaggagaagctcacgccgttgctgagtgtgcgggagtcactctcagaggaagaggcccagaagatggggcgcaaagacccagagcaggaagtggagaagttcgtcacctccaacacgcaggaactgggcaaggataagtggctgtgtcctctcagtggcaagaaattcaagggtcctgagtttgtgcgcaaacatatcttcaacaagcatgcagagaaaattgaggaagtgaaaaaggaagtcgcgttttttaacaacttcctcactgatgctaagcgcccagctctgcctgagatcaagccagcccagccacctggccccgcccagatactccccccaggtttgaccccaggactcccctacccacaccagactccccagggcctgatgccctatggtcagccccggcccccgatcttgggctatggagctggtgctgtccgccctgcagtccccacaggaggccctccatacccccatgccccgtatggtgctggtcgagggaactatgatgccttccgaggccagggaggttatcctgggaaacctcgcaacaggatggttcgtggagacccaagggccattgtggaatatcgggacctggatgccccagacgatgttgatttcttttgagccgtcccccgttcctcagtcctgtatcatccatacttgtactaccttgtcctatgaagctctgagaattttttgtacgatcagccttactgctaataaaagcacttccacaggtnnnnnnnnnnnnnnnnnnnnnnnnnnnnnnnnnnnnnnnnnnnnnnnnnnnnnnnnnnnnnnnnnnnnnnnnnnnnnnnnnnnnnnnnnnnnnnnnnnnnnnnnnnnnnnnnnnnnnnnnnnnnnnnnnnnnnnnnnnnnnnnnnnnnnnnnaagtttgggnnngaaaaagaaaaaaaaaaaaannttgtgggcgnnnnnnnnnnnnnnnnnaaaaaattttaaaaaacccttttttggggggccggggccccc

SEQ ID NO: 254696 - DNA, 1022 bp, Homo Sapiens
  misc_feature (246)..(246): n is a, c, g, or t
  misc_feature (264)..(264): n is a, c, g, or t
  misc_feature (297)..(297): n is a, c, g, or t
  misc_feature (330)..(330): n is a, c, g, or t
  misc_feature (353)..(353): n is a, c, g, or t
  misc_feature (419)..(419): n is a, c, g, or t
  misc_feature (437)..(437): n is a, c, g, or t
  misc_feature (451)..(451): n is a, c, g, or t
  misc_feature (458)..(458): n is a, c, g, or t
  misc_feature (896)..(896): n is a, c, g, or t
  misc_feature (902)..(902): n is a, c, g, or t
  misc_feature (910)..(910): n is a, c, g, or t
  misc_feature (920)..(920): n is a, c, g, or t
  misc_feature (937)..(937): n is a, c, g, or t
  misc_feature (962)..(962): n is a, c, g, or t
cgaaggattatgtatgtgaaaataagggaggtattccgattggtgttatagaggtggtgggttttggtttccctgtggaagtgcttttattagcagtaaggctgatcgtacaaaaaattctcagagcttcataggacaaggtagtacaagtatggatgatacaggactgaggaacgggggacggctcaaaagaaatcaacatcgtctggggcatccaggtcccgatattccacaatggcccttggntctccacgaaccatcctntgaggtgagaggtacaggatgagagctgagggntcccaaaagggagtctgcaggcggcaacaaagnttgggcgtctgcctcctcacctnttgcgaggtttcccaggataacctccctggcctcggaaggcatcatagttccctcgaccagcaccntacggggcatggggggtntggagggcctcctntgggganttgcagggcggacagcaccagcttttgacagagtttcagtttttgagtttgcaaaacttatgtcctcaattccatcctctgttttcttcttcccaaagccacacactcaccaagccccttcatctccctcctgtactttacctccatagcccaagatcgggggccggggctgaccatagggcatcaggccctggggagtctggtgtgggtaggggagtcctggggtcaaacctggggggagtacaacacggacagggacatgaattactgcgggggcggggagggggatacgggtacaattgacttctagggctatggccctgaggatggggcagaaacttctcggggtgacacgttaaagagaaacaggagtcccctgggtagtcaaggaagagggcacatgcgaccttcatggatcgtatcttactctgggcgggnccaggnggctgggntggcttgatntcaggcagagctgggtncttagcatcagtgaggaagttgttnaaaaacgcgacttcctttttcacttcctcaattttctctgcatgcttgttgaagatatgt

SEQ ID NO: 254697 - DNA, 587 bp, Homo Sapiens
gcgaaagtccagtctaagagctttctgcccaaaataccatctgtcaccatgcttaaagtccacccttggctccccaccccttcgggtctgacagccaccactgtgaagccaccaatggaaatataggactctcctgggtaaattcatgcaccaaagagattattggtgagaatagaaagatagagaggtaggggatctgcaaatttcttcctgctcccttgtatcctccatttttctactctcaagacacacattcagtaaaggctactgaatacattcaagaagagggtggaaacagtgtgtttgaggtaggtctgtaaggcaatatatcagaaagagtggggaaaccccgtgtgacaccttctgggtggtcctgaacaaacccagtgctctctctgagcttctgtttctccacttgtcaagtgtgcaggttgagttggattctcttcaggggagcttgcagtcttgacttctgtgatctccagtttagacagcaaagtaagaggagagcctgtttctgtggctgacaggcttgggctttgtttaatctgtctacactgaagccaggtctgtggaatcacgcaaaa

SEQ ID NO: 254698 - DNA, 336 bp, Homo Sapiens
ggcaacttcaatgaacaaacatattccaaaactcttgaatatttcttctgcttgctaaatactatattgtaaagattcaattactaggtcaaatacacacctcaataaatagatatgtattagagaaggaatggaaaaatatttactcattaagaataccaacacatgaaagtgatttcagagtatggagtcttgagtcacaaaggacccttcccggaagcttccttttttgcgtcaggttttgaatttgactgaaggaaggtggtgagcactcgagcccctaatgaattctccttagtttcagatgttttcccacttggccctctcttctccttt

SEQ ID NO: 254699 - DNA, 386 bp, Homo Sapiens
tcagcacgagggatagatactctgtgacgtaaatgggagttgcagacaagaaggctgactggcagggcacctgatgaatgccatgggagcaacaagatgtctaaggactcagcaggtatctggtcccaattaatcaatacccaagaaaagcaaaagcccaacagtttccttgtgcttaactgttttctctgacccaattggccaatcttaggctgttaacattctctcttcagcatttgaggacagaaggaagcttaatgactggtctggggtacatcccaggattttgtaatggatccccaggaagcctaagggatcaggatcactctagtatttgtgtctactatgttaagagctgctgctcttaaggtgggtgagcatgcccc

SEQ ID NO: 254700 - DNA, 426 bp, Homo Sapiens
attggaggggcaagtgtgcctgcagatgtcctcatacggcaaggtttgagaagggtcagatggtaggcgggcctaacaagggctccgtgctagccactgtcccgcacacagacaggatcaggtcatcttgatatggagatcagtccccaaatcactgaattgtcccagcagtgctatgccctaggtactaccaatatcactcctctatttcccagaggaggaagcagcagctagactccacgaccttggggtcatacctctcagaaagccaagagtgcacgatgagagctgtctgtctcttacctgcctgtatttgtgccccatttttaaagagcacagggcctgggccacacgaaaggtatcagcccttggtgataggcacattttttaccagactatcatttgggcattaaatatgtgtacact

SEQ ID NO: 254701 - DNA, 1221 bp, Homo Sapiens
  misc_feature (14)..(14): n is a, c, g, or t
  misc_feature (38)..(38): n is a, c, g, or t
  misc_feature (49)..(49): n is a, c, g, or t
cccggctcaagganaagggattttccccaaaggtgatncctttggaaancccctgagagccttcaaacaatgaccctcaatgtcgcccacccaacttccctgctgcagcactgatagtccccggccaaacactgggaccggaccggcagcccgagtgaacagtgccgtggtcccccacccatcagatcagcccggggaccgagcatctctggtgctgatgttcttgtgggaagagggaggttccaccgcacccctgccctcaaccgcaagactgttgccgttttagtgtggagataagtttgccattacattagcatgtattttctatctatattttttattgggcattttccctaggttggagagtcagcactcgttttgaatgtgtttaaaatgcattaaaatggaagatttctgcaggcagttgaatggcactccagatggggaattgctgtaaccctcttactgtaacatgtcatctcctgcgtcgtgatggggagagggtaatgttacttcacaaaggacatgtcagatccttcttcatggacttttttagttactggtttttctctcaaacttgttttcgaatctcctgggagtgagggagaaacagggagctgaatcctcccccaagctgttccaggccagaggactctgcagtaccttctcctacatctagtaacaaagaatggtgataaccatgcactggttcaaggttctggagttctccatgaaacttgggttaattttgctcagagtatccagagttagccactacgctgcgggtgaaatgggatggagaagaacaacagcaggcttcctggagccacatgggctgactagggcactctgtggctggcctggcacgggctcagcccaggaagaggagaaacgatcccttgcctgcccctccctgtggcagggctaactgcctggccctcctggctcgcagccagccagccccctggcagcaggttctcctcagggcttgggtcttcaacctgtggcgacaggaggcagggcagactgtggaggacaggatgcaggtcagggagagggaaggcaggggtggaccgccatgagcatgaaaagacccgaagcaagttgactcttgcaatgtgcaactgttatgttctgcaaaatgagcaacgatgtatcaaattgatgcaaatttagatgttgatacttacaataaagtttttaatgtgttttactcttcga

SEQ ID NO: 254702 - DNA, 768 bp, Homo Sapiens
  misc_feature (42)..(42): n is a, c, g, or t
  misc_feature (163)..(380): n is a, c, g, or t
acccccacccaaacaccgagcgaagcatttcagtaacggagnaagcgaaaagcgcccataccgcaaacggcctctccccgcgcgttggcagatcattaatgcaacgtggcagacaagttttccggcctgaaagcggcaagtgagcgcacggcattaattgtannnnnnnnnnnnnnnnnnnnnnnnnnnnnnnnnnnnnnnnnnnnnnnnnnnnnnnnnnnnnnnnnnnnnnnnnnnnnnnnnnnnnnnnnnnnnnnnnnnnnnnnnnnnnnnnnnnnnnnnnnnnnnnnnnnnnnnnnnnnnnnnnnnnnnnnnnnnnnnnnnnnnnnnnnnnnnnnnnnnnnnnnnnnnnnnnnnnnnnnnnnnnnnnnnnnnnnnnngcacgagccgggctggcggcgggcggggactgcgaaggaggcagcttgcgccggggctggggcctgcttcgggggactagcggcccgggaggtatggaggtgccgctccgggggggcgaaagaaacgtggaaaggtcgcccaggagggagcctgtcccccagggtttccaggggcaacggtggcccgtgtccctggaggacatgcgccagggcagcagggagtggtccccgcaggctcccaggctggggccggctgccttctggggcgctcagacctgtctgctgcagtttgcaaacagtacgcccgaattcttttcattgtaaaaaatttctattaaaaataactcgtaaagcctatcatctcttttaaataaaggggaagaaagag

SEQ ID NO: 254703 - DNA, 627 bp, Homo Sapiens
  misc_feature (105)..(105): n is a, c, g, or t
  misc_feature (124)..(124): n is a, c, g, or t
  misc_feature (201)..(201): n is a, c, g, or t
cccagccatcttggacaggggtgaccctgcctgatcggatgggaagctctcacaccataggcagaacatgatgaggggtcacatatcaaggcttggcaagaaganccttggggtccagaacccnccatatgacctggtggcctcggtccagagaagccagggggccaagggctgccagaccgactctcccctgaaggtctntctcgataccagttagacctcgttctcctggggtccctggcacgcctgcattccggggaagcctggtgtgcctgggggtccttgttcaccaggggctccaggtgagcctggcctcccaggctccccaggaggcccttggacagtccggatggatgaggagtggctgggaatctggttgaggatggcagtgtacctggccatgtgactctggatgagctgttcgcatacttgacgcgccactgatctcaccatggcttgagactgcaggtcacgccgctctcctcgttccccctttgctccagggacaccaggtggtcccagggcgccttgcggtcccatgcttcctgtgatccctgggactccaggggtgccaggaatgcctattggccctggtggtcctggaggtcccgaggatccatcctttcc

SEQ ID NO: 254704 - DNA, 801 bp, Homo Sapiens
  misc_feature (57)..(57): n is a, c, g, or t
  misc_feature (66)..(66): n is a, c, g, or t
acttgagattccggaaatgaaatttaatccacactgattgtgcccctcctactttantaaaggttnctggccttacagagccctcttccccatcctctgatgttcaattttaaatatacagcaatcaactcttagaggacaaagaaatctggaattgggtagcatgagccacagctatatagcccacactaatgcatgttctgtagtataagaaggcagttcttccctttcttttctgggggcttgttcctttgtccacttgcagctaaattctttctatagatttatcacagataagaaggaggttgtttttggataacaaataagcatttgtgctattaaacaaacaaaaggtaataaggatactgtcttttccctcaaaatagaatcctgccctaaagcaacgcaagtagagcatacttctgtgcaaagccagtgatagagaagcagccttgccagagtcactgaggatgaattaaaggcttataaaagaaaacttgaccttaacagagactacatttgatcatggaaataatacatttctccactgatatacaataccatgtaatgcactggaaaagttgcaccttggagtaatagcacaatttgtaacattacagatcacctcttcccactctgtgttccactctgagactctttccttttcctcgtgtatccagatacactgacatacggatgattttaaaagtgtcacaagccacagtggagccatatacatgcagttcagcctgatttcacccttattttcttctaatacagactccattaccattttggacc

SEQ ID NO: 254705 - DNA, 2367 bp, Homo Sapiens
  misc_feature (529)..(529): n is a, c, g, or t
  misc_feature (760)..(760): n is a, c, g, or t
  misc_feature (1947)..(1947): n is a, c, g, or t
  misc_feature (1971)..(1971): n is a, c, g, or t
  misc_feature (2007)..(2007): n is a, c, g, or t
  misc_feature (2060)..(2060): n is a, c, g, or t
  misc_feature (2105)..(2105): n is a, c, g, or t
  misc_feature (2129)..(2129): n is a, c, g, or t
  misc_feature (2163)..(2163): n is a, c, g, or t
  misc_feature (2179)..(2179): n is a, c, g, or t
  misc_feature (2212)..(2212): n is a, c, g, or t
  misc_feature (2235)..(2235): n is a, c, g, or t
  misc_feature (2265)..(2265): n is a, c, g, or t
  misc_feature (2294)..(2294): n is a, c, g, or t
  misc_feature (2299)..(2299): n is a, c, g, or t
  misc_feature (2351)..(2351): n is a, c, g, or t
ctttttctggagtcctgtagagaaagtgctctctgccgcattgatagcagcgagagctggaggtgttgggtcgggagaccagccgttcgatcccgccgcaggtaggagctggtttccatcctggcaccacggcacacacctccagcctcgagcccggcgctgctgcccgggggtctccttcaggctctttgacgccgttccagggggcacctatccaggcatcctctgggcctctagccagaggactggctcccggcttcagcactccgggctgcagtaagaagtgcccttatcgctctgagccctgccaccatcccgtgaaccaccgaaaccctggtccagcgcgacagccttggacctgggactggacggatccaaaacgctcagcctcggccccccacagacggggctctgcatcgtctctgatatgtcacccaccatctcccacaaggacagcagccggcaacggcggccagggaatttcagtcactctctggatatgaagagcggtcccctgccgccaggcggnttgggatgacagtcatttggactcagcgggccgggaaggggacagagaagctcttctgggggataccggcactggcgacttcttaaaagccccacagagcttccgggccgaactaagcagcattttgctactactctttctttacgtgcttcagggtattcccctgggcttggcgggaagcatcccaactcattttgcaaagcaaaaatgttagctatacagaccaagctnttcttcagttttgtcttttggcccttcagtctcaaattactctggggccccgttggttgatgcggtctacgttaagaacttcggtcgtcgcaaatcttggcttgtcccgacacagtatatactaggactcttcatgatctatttatccactcaggtggaccgtttgcttgggaataccgatgacagaacacccgacgtgattgctctcactgtggcgttctttttgtttgaattcttggccgccactcaggacattgccgtcgatggttgggcgttaactatgttatccagggaaaatgtgggttatgcttctacttgcaattcggtgggccaaacagcgggttactttttgggcaatgttttgtttttggcccttgaatctgccgacttttgtaacaaatatttgcggtttcagcctcaacccagaggaatcgttactctttcagatttcctttttttctggggaactgtatttttaataacaacaacattggttgcccttctgaaaaaagaaaacgaagtatcagtagtaaaagaagaaacacaagggatcacagatacttacaagctgctttttgcaattataaaaatgccagcagttctgacattttgccttctgattctaactgcaaagattggtttttcagcagcagatgctgtaacaggactgaaattggtagaagagggagtacccaaagaacatttagccttattggcagttccaatggttcctttgcagataatactgcctctgattatcagcaaatacactgcaggtccccagccattaaacacaatttacaaagccatgccctacaaattattgcttgggttagaatatgccctactggtttgggggactcctaaagaagaacatcaagggggattccctatatattactatatcgtagtcctgctgagttatgctttacatcaggttacagtgtacagcatgtatgtttctataatggctttcaatgcaaaggttagtgatccacttattggaggaacatacatgacccttttaaataccgtgtccaatctgggaggaaactggccttctacagtagctctttggcttgtagatcccctcacagtaaaagagtgtgtaggagcatcaaaccagaattgtcgaacacctgatgctgttgagctttgcaaaaaactgggtggctcatgtgttacanccctggatggttattatgtggagnccattatttgtgttttcattggatttggttggtggntctttcttggcccaaaatttaaaaagttacaggatgaaggatcatcttcgtgnaaatgcaaaaggaacaattaatatatatgctactggacattctancaaggttgaattttagagtggggnttttataagtaatggaggataaaatgggtggganaaaatggcacacagcncctgaagaaagatggggcagtgacctctagaantcatgcattgccattggaaagcntgtgttgggcatcgatgtcagatcctgaanaatcacctggaaaaaatcccatcctagangcaangagctacaccaaaccatacactacagtactttgtcacatggttgtccattancatgattaagtcaaaa

SEQ ID NO: 254706 - DNA, 419 bp, Homo Sapiens
gtcctagaggtcactgccccccgactgtcctccaggtgcctgtgtgcccattttcctccccaccccatttatcccccccattaccttataaaaacccccactctaaaattcaaccctatgttataaaattaacaaaatcaggagttagtacacatttttcccacaatgataaaattaagactcataatgtactatcttgtttcgtctaacttttggaggatttatataatctctaaagagtcagagtaatacataacacaaaacatgcaaagaaccttatcactgggtgtatgtaatacgctgggaattgctaaagtactcaaaagcttaattttcttggaatagcaactgtccactgaaaactatagtattcaaacaaaaggttatgtgttaatacatggaaatacagtacctgattt

SEQ ID NO: 254707 - DNA, 428 bp, Homo Sapiens
tataaacccctcccaaaagttaagacgaaaacaagatagtaccattatgaagtccttaatttttatcattgtggaaaaatgtgtactaactccctgattttgttaattttataacataggttgaattttagagtggggtttttataagtaatggaggataaaatgggtgggagaaaatggcacacagcacctgaagaaagatggggcagtgacctctagaactcatgcattgccattggaaagcctgtgttgggcatcgatgtcagatcctgaagaatcacctggaaaaaatcccatcctagaggcaaggaggctacaccaaaccatacactacagtactttgtcacatggttgtccattatcatgtattagagtctaaatgattacttgaataaagaaaaaaaaccacttaactcttacatatgaaa

SEQ ID NO: 254708 - DNA, 2149 bp, Homo Sapiens
  misc_feature (5)..(5): n is a, c, g, or t
  misc_feature (7)..(7): n is a, c, g, or t
  misc_feature (15)..(15): n is a, c, g, or t
  misc_feature (17)..(17): n is a, c, g, or t
  misc_feature (27)..(27): n is a, c, g, or t
  misc_feature (34)..(34): n is a, c, g, or t
tgttncnctggaganangacattcagngccctgntcctcccaagtcggtgtccatatatgcaactatatttcatgttgtaatacaaaggattaaactacaaaagtgaaaattaaaagtcattgcatatgtggggtaaaggaggggataaaggaagagtccacggttaaggacttttcattctgccttggcaacaaaacgacacagaagagaggcagcacgcttgcccgcgtagcaggccctgcggctcagaggaagctggaagcggcggtcagtgccatgcagcagcctggttctcgctcggctggccaatcagtgggatccgaggtggctcggcccatcatgcccaggatctgagcccacatctggcaccagctctaccaagggcctgttgggcccacacaagcttgcctgtacctagtcaggctggtaccggcacctcctgaaatgggtcaccctccggttcctgctcagcagctctgagcccttttccagcctcttggagggaagtaacaacaacagcatctgccgaggagcacacggttcaggctccatcaatgacggcgatgtcgaggggccccagggctaccctccacctcgagttacctttgatcacaactagggcatctttctggctgagttaaggtgagaacagtcccctgaagcctcccccaaataagtgaaaagtgctctactgtggggtctggaaagaagaaagcaaaaagcagcctattcacgttcacagtcgaaaaatgtaagctaaattgtaaacctgctcaaagaaaattctagaaaggcctcttcccctcctgatataccttccctatgacaggaatccagagacccaagtgaaaaagaaactgagctcctgaatctgattctggtcgagggatcgtcggtcagacatgcatagcatcacgttgggtgcacacaggcccatctgccgctggggtttcctgcccagcatctggcccagacctgcctcttcaaggccgctggtgggcacacgagtgttttcacgggaccaaggctttgtatatagatttaagtgagatcactgagcagagagaatgccacatgaagccaggagtctgagtccgtcacctgagactttagggtggaggggaagccaagcagagacagaatgtggtgatttcacaacaggagggacggcaggaaaggtgaggctcaggagggtgacgtgcagccaaagctgcagaagccttcagtaccttccagccaggaccatgacttagtgcctcccccctgtggggagagcatgtctcccccagaagctgaggctctgagaggacaaggggcagggtggggtggggctgctgagcacacactgggtcagcccggggctacacggggctggtcacgtgaggggacctctaggcggagggcttggcttttttgcattccattacacaaggacagagcacagacgtggccggggacgctggcagagccagggtcgctccggacaggacagtgttagcgcagggctttcaggagtcactcttcttcttgctcttcttcagaaaggacggggtacggaacttcctcttctttttggacggggacttgcctggagacccatcgctgccagggtccgcggcggccccctcctcgacagctgagggggcagcctcttcagccaccggggctgggtctggggctggctcggggctggcctcagtaggggcctcagtggggcttgggggtctatgggcttcctcctccttctctaacattgggaagccgagtgcttctgaaggttcatcaggggacagatcggggagagttggcttaaaggtggcagcatcactgtcatctccagtagtcggctccggcacaaggtctagtgggtgaggtgagagatgggattaagggttcctgcccagatctcaaagggcagcttgagatgggggagccccacacacgaaactgccattttattttactctacagatttttaccaagacaagaaacttaaaatatggtctactctactgtacggctggatggagctaatatcataaaatacagactcagtctcggggtagtttttagctccttctggtgggcagtgtgctgacaacacccagctccgtcccaggcctggtccccccgccggaaagacagacc

SEQ ID NO: 254709 - DNA, 421 bp, Homo Sapiens
tggtaaaaaactggtgcccaaaatgtgggcctaagaccctgggcatgatgggccgaagccaccctcggatccccactgattggcccagccgagcgagaacccaggctgctgcatggcactgaccgccgcttccagcttcctctgagccgcagggcctgctacgcgggcaagcgtgctgcctctcttctgtgtcgttttgttgccaaggcagaatgaaaagtccttaaccgtggactcttcctttatcccctcctttaccccacatatgcaatgacttttaattttcacttttgtagtttaatcctttgtattacaacatgaaatatagttgcatatatggacaccgacttgggaggacaggtcctgaatgtcctttctccagtgtaacatgttttactcacaaataaaattctttcagccc

SEQ ID NO: 254710 - DNA, 451 bp, Homo Sapiens
gtggccccaaaagccccttggtaaaagctggtgcccaaatgtggggcctaagaaccccgggcatgaatgggccgagcccacctgggatccccactgattggcccagccgagcgagaacccaggctgctgcatggcactgacccgccccttccagcttcctctgagccgcagggcctctacgcgggcaagcgtgctgcctctcttctgtgtcgttttgttgccaaggcagaatgaaaagtccttaaccgtggactcttcctttatcccctcctttaccccacatatgcaatgacttttaattttcacttttgtagtttaatcctttgtattacaacatgaaatatagttgcatatatggacaccgacttgggaggacaggtcctgaatgtcctttctccagtgtaacatgttttactcacaaataaaattctttcagcaagttccttgtcta

SEQ ID NO: 254711 - DNA, 1215 bp, Homo Sapiens
  misc_feature (52)..(98): n is a, c, g, or t
  misc_feature (482)..(482): n is a, c, g, or t
caaacaactttttaacgacattttatagattaagtaaaaataccagtattannnnnnnnnnnnnnnnnnnnnnnnnnnnnnnnnnnnnnnnnnnnnnnacattaacattacatgcttctcaggacagaagaattaggacatgttccctcctatcaatttaaaactcgatcacaatttaaaatcatggaagaaaacttgcttcctttattttctgcttttagacttcaagtacaggaagttatgaaaccaggatctaaatgtggaaaccatctgctatgcaccaattataagggactgccacaaatgatgagtcaggggtcttctgaattcttacataggtctctgtaaccctacaactgtgtcaaccttctacctgagatgagagggaatgatgaagcatgacagtgtgtaggtttcatgtggacgttcacattgacattggaacaaaaccaaacggaaaaatgtcttcctagagcaacaancactgatcataaaatcaccctggaggaggattcccttctcccctttccttgccaaacaaaacagaaaaactgtcagaaaacaatacaaaacaaaactcagggtgaagcacctctggcgatgatcagcatacagcaagggacagagaggtagcgtttccttggtgacagctcctggctgactccgatgatttcaaacacaccctcttctgcaaaaggcactcacatattgtctgtttataaatcatacagtgggattccatacatgggagtttctcctacaaatataaaagagataagctgaggaaatggtataacaaagaaaagcgtataagaaatacacattttggataaatatgcacttttcttttttaaaggacaatcaatatagtagttaaaaaaaatgtcattgaaaagttaggaattccagcaaaattatcagtaagaagcaaggtactggaggatgagagatggagtccaaaacactgagaggaggtacactagcttttcaagcggccaaagtaaaagatctgttctgctcttaaactgcaatgaccatccacagacaacggaatgagacggggagggaggtagcggcagagaaacaggtcaagccggagggaggagtggcatccccctggctgtgggtgcaggaagaaacaccctcagcatctccaaagggaaggatgggctacatcaccaccttcttctgcagtccaaacagaccctgccgcaa

SEQ ID NO: 254712 - DNA, 461 bp, Homo Sapiens
ggaacctctcagccgatgccccccagtatgggaaccagcacctgccaccaaccagccacacccggtgggggcacagcacagaccccagaggcaggaacctctcagccgatgccccccggtatgggaaccagcacctcccaccaaccaaccacacccggtgggggcacagcacagaccccagagccaggaacctctcagccgatgcccctcagcaagagcaccccatcttcaggtggcggcccctcggaggacaagcgcttctcggtggtggatatggcggccctgggcggcgtgctgggtgcgctgctgctgctggctctccttggcctcgccgtccttgtccacaagcactatggcccccggctcaagtgctgctctggcgctccggagccccagccccaaggctttgacaaccaggcgttcctccctgaccacaaggccaactgggcgcccgtcccagc

SEQ ID NO: 254713 - DNA, 1162 bp, Homo Sapiens
  misc_feature (143)..(168): n is a, c, g, or t
  misc_feature (1097)..(1111): n is a, c, g, or t
attcggcacagcctgtgcctcttgcctgggagaggggaagcagatctgaggacatctctgtgccaggccagaaaccgcccacctgcagttccttctccgggatggacgtggggcccagctccctgccccaccttgggctgaannnnnnnnnnnnnnnnnnnnnnnnnnccctcagggcacaagccaacacaggctgctacgggatcccagggatgcccggcctgcccggggcaccagggaaggatgggtacgacggactgccggggcccaagggggagccaggaatcccagccattcccgggatccgaggacccaaagggcagaagggagaacccggcttacccggccatcctgggaaaaatggccccatgggaccccctgggatgccaggggtgcccggccccatgggcatccctggagagccaggtgaggagggcagatacaagcagaaattccagtcagtgttcacggtcactcggcagacccaccagccccctgcacccaacagcctgatcagattcaacgcggtcctcaccaacccgcagagagattatgacacgagcactggcaagttcacctgcaaagtccccggcctctactactttgtctaccacgcgtcgcatacagccaacctgtgcgtgctgctgtaccgcagcggcgtcaaagtggtcaccttctgtggccacacgtccaaaaccaatcaggtcaactcgggcggtgtgctgctgaggttgcaggtgggcgaggaggtgtggctggctgtcaatgactactacgacatggtgggcatccagggctctgacagcgtcttctccggcttcctgctcttccccgactagggcgggcagatgcgctcgagccccacgggccttccacctccctcagcttcctgcatggacccaccttactggccagtctgcatccttgcctagaccattctccccaccagatggacttctcctccagggagcccaccctgacccacccccactgcaccccctccccatgggttctctccttcctctgaacttctttaggagtcactgcttgtgtggttcctgggacacttaaccaatgccttctggtactgccattcnnnnnnnnnnnnnnncaagtattggaaggggtggggagatatataaataaatcatgaaatcaatac

SEQ ID NO: 254714 - DNA, 560 bp, Homo Sapiens
atagaatgttaaaccacccatatcatcatatatctaggactttagcacaaggatagttgccataagaatgaagctcttagagtgatttcttagggaatggacacaccaattaactgtctcctggccccacctttgatgttttcttcacagcaatgcactgacggatatgagtgggatcctgtgagacagcaatgcaaagatattgatgaatgtgacattgtcccagacgcttgtgaaggtggaatgaagtgtgtcaaccactatggaggatacctctgccttccggcagaacgaacctcaggggcaaccaccgcggttgtagctgtcagcagcatggcaaccagtgtagtgtttcccggaggtgtgtttgtcggcagtgctgctgcagtcgcaggccctgtgcatactggcccagataactttgtcattcggcggaacccagctgaccctcagcgcattccctgcaaccctttccaccgtattcagagtgcatcaaggctactagccaagtgtacaccgcgtgccacgacatacacgagtgcactgcagggacccaccct

SEQ ID NO: 254715 - DNA, 377 bp, Homo Sapiens
aaccaccaccgggcaacacccactgggccatgctgctggcagctacaacccgtgtggttgcccctgaggttccttctgccggaaggcagaggtatcctccatagtggttgacacacttcattccacctttacaagcgtctgggacaatgtcacattcatcaatatctttgcattgctgtctcacaggatcccactcatatccgtcagtgcattgcgtgtacgtgatggtttcttcggtgtcctgtgacttgaccagcgccagagtcagcatagttaggaaaagggctttcaacattgtgaatctgtgcggccgcgctgcgctccgggcccgggcagcgaggggagtgcgcaggggagggcagccccgtgggtctccc

SEQ ID NO: 254716 - DNA, 585 bp, Homo Sapiens
ccaggcagaagaggcgtccaggcgccagtgctccaccttgcagtcataactctcctcagcaaaagggaggagggtcaggtaactgatcttgaagaaggaatgatcactcttggagaggaagctggtctcagaaacaccttctgtgactgagtgcccattgctcagccatgtgatgttgaccacaggaggaaagatgttgtccacaagacagatgaggatgttgggctgacccagtgtcacgggagacttggaaaacactgtgacctcaggaacctcaaggacagcgatgtttgtcagtgcaaattgcgggtcaaatctaaattgtctgagaacaggcaaacaccagacagtctccttcctccccaggtccacgtagaactgctcatctccatcaaattcatgggtgtactggccagagggaccgtaagactggtacaagtttacaccataagaggcgacgtggtcagccacaatgtcttcacctccacaggggctcatcacggtggtcagggcaagggtccccagcatcagagctttgtttaggatcatcctcttcccaaggcagccttagcagttgctgttctg

SEQ ID NO: 254717 - DNA, 1342 bp, Homo Sapiens
  misc_feature (1216)..(1216): n is a, c, g, or t
gggctcacaattgctctacaactcagaacagcaactgctaaggctgccttgggaagaggatgatcctaaacaaagctctgatgctgggggcccttgccctgaccaccgtgatgagcccctgtggaggtgaagacattgtggctgaccacgtcgcctcttatggtgtaaacttgtaccagtcttacggtccctctggccagtacacccatgaatttgatggagatgagcagttctacgtggacctggggaggaaggagactgtctggtgtttgcctgttctcagacaatttagatttgacccgcaatttgcactgacaaacatcgctgtcctaaaacataacttgaacagtctgattaaacgctccaactctaccgctgctaccaatgaggttcctgaggtcacagtgttttccaagtctcccgtgacactgggtcagcccaacaccctcatctgtcttgtggacaacatctttcctcctgtggtcaacatcacatggctgagcaatgggcactcagtcacagaaggtgtttctgagaaccagcttcctctccaagagtgatcattccttcttcaagatcagttacctcaccttcctcccttctgctgaggagagttatgactgcaaggtggagcactggggcctggacgagcctcttctgaaacactgggagcctgagattccagcccctatgtcagagctcacagagactgtggtctgcgccctgggattgtctgtgggcctcgtgggcattgtggtggggaccgtcttgatcatccgaggcctgcgttcagttggtgcttccagacgaccaagggcccttgtgaatcccatcctgaaaaagaaggtgttacctactaagagatgcctggggtaagccgcccagctacctaattcctcagtaacatcgatctaaaatctccatggaagcaataaattccctttaagagatctatgtcaaatttttccatctttcatccggggctgactgaaaccatggctaagaattgggacactctcatgtttcaagccaatttaacatcatttaccagatcatatgtcatatccagtaacacagaagcaaccaactacaatatagcctgataacatgttgatttcttagctgacattaatatttctttcttccttgtgttcccacccttggcactgccacccacccctcaattaaggcaacaatgaagttaaatggatacccntctgcccttggctcagaaatgttatagcaaaaattttaaaaccaaaaaataagtttgtactaatttcaatatggcttttaaaagtatgatggagaaataaattaggataaaggaactttgaatcac

SEQ ID NO: 254718 - DNA, 479 bp, Homo Sapiens
aacaatttccgaaacccagaccttaagccatattccctgaagtggggatgacctggggataaaccacagggcaaagggactcctttttcctcctgaagagagagtatcacctcatctgaatggcttcttgacccacaaaaatctaaagaacagcatgcctcctgttatacggcaggtcttgttcttggaaacttggtctgcattactgctcacccaatattgcatggctcccatgttaatgaccctttcctacatccataccacttaaagttgtaatgcagtcctgcatccagtgccctcagctgtgtccctgagctgttaagctgaatttctgtgccaactgacaaataccgagtgcctactctggggaagcctctgtggctgttccagacagaagatgacaaagttctaagtgcatagtgtacaaaaaaccactaacttcatgcccgctggcttgatctcaacagttaagcaaaatc

SEQ ID NO: 254719 - DNA, 351 bp, Homo Sapiens
aatgatgtcttttttggcagtgcacagccagaggacaacacatcacacacaagaaacagttgtgctcatgtgatgggggcctcagcactaggaaggagtggactgttggcgcacgcagcagcttgaataaatctgaaagtcactacgctgcgtaagagaagccaaataaagcgcatgctgtgtacagagggtgtcgagaatgcctcctacgtgacggaaagcagatccgtggttccctgcagactggcaggagcagattccaaaggcacaggaagaagcttgcaggtagaatgtgttcattaccttctgcgcattataccacaaaaaaagttgggaataaaaatgctaacc

SEQ ID NO: 254720 - DNA, 677 bp, Homo Sapiens
  misc_feature (25)..(25): n is a, c, g, or t
  misc_feature (28)..(28): n is a, c, g, or t
ggttaatttacccacagaatgtgantangtaataggggagggaggctgctgtgggtttaactcctgggttggctgttgggtagacaggtggggaaaaggcccgtgagtcattgtaagcacaggtccaacttggccctgactcctgcgggggtatggggaagctgtgacagaaacgatgggtgctgtggtcctctgcaggccctcaccccttaacttcctcatacagactggcactgggcagggcctctcatgtggcagccacatgtggcgttgtgaggccaccccatgtggggtctgtggtgagagtcctgtaggatccctgctcaagcagcacagaggaaggggcaagacgtggcctgtaggcactgtctcagcctgcagagaagaaagtgaggccgggagcctgagcctgggctggagccttctcccctccccagttggactaggggcagtgttaattttgaaaaggtgtgggtccctgtgtcctcttccaggggtccaagggaacaggagaggtcactgggcctgttttctccctcctgaccctgcatctcccaccccgtgtatcatagggaactttcaccttaaaatctttctaagcaaagtgtgaataggatttttactccctttgtacagtattctgagaaacgcaaataaaagggcaacatgtttctgtt

SEQ ID NO: 254721 - DNA, 416 bp, Homo Sapiens
agcaagccggctagcaaagaaagaaacgtgattcctggagtaagagcgacgctggtatgtcaaatgacaagctgttgcagctgtcaagggtatttcagaaggaattggggatgagcttgaaggtgagtaagaattctggttttgcttgaatgtggacattttaatctagtcattttatctttttctcaggacattggtgtgcccagtggaagtttcctacaaggggtgacagctctggacagggcatcaggtgcctgtgctcactgcaagtctgcccctggtcggctatatgatcttggtcaagctgctctgtctctctgggtccagctagacaagatgctcactgagtcccctcctgactcatttgtgattttataagggttgcctggtacatgctttctgaaggggagagcaag

SEQ ID NO: 254722 - DNA, 968 bp, Homo Sapiens; identical to SEQ ID NO: 3601
  misc_feature (521)..(533): n is a, c, g, or t
  misc_feature (573)..(625): n is a, c, g, or t
  misc_feature (725)..(738): n is a, c, g, or t

SEQ ID NO: 254723 - DNA, 822 bp, Homo Sapiens
  misc_feature (5)..(6): n is a, c, g, or t
  misc_feature (13)..(13): n is a, c, g, or t
  misc_feature (15)..(15): n is a, c, g, or t
  misc_feature (55)..(55): n is a, c, g, or t
  misc_feature (58)..(58): n is a, c, g, or t
  misc_feature (118)..(118): n is a, c, g, or t
  misc_feature (121)..(121): n is a, c, g, or t
  misc_feature (135)..(135): n is a, c, g, or t
  misc_feature (260)..(260): n is a, c, g, or t
  misc_feature (281)..(291): n is a, c, g, or t
  misc_feature (780)..(780): n is a, c, g, or t
  misc_feature (795)..(795): n is a, c, g, or t
catcnntgtggantntctcaaagcttaagagtaacagtctagaccaaggttgggngtnggggcaggcctcacacagagcccagcttgaggcccctgagccccaccctcctttccaganggngggaggagacagcngagggggccctgaatcagtcctctccctcgtccccaaggccagctgtgccaggcccctggagggcaacagctcatgcggaggactggggggggaagcaaacaggtaggaaacggaaatgaggttnacaattacaccatcacccccnnnnnnnnnnnaaataacaaagcttgtgactatgaaaggatggaagatgaatactgataaactcctcagctccccagaaaagcccagtctgggctgggttgggctgattggaggaaaggtcttgagacccaactgcatgttacctctgaagaataaatattctaagaaaaagggaaaaccatgaggcaagctgctgcagtcagtcaacgcagctgacaggcctggcatggcccacaacctgaccccatccacacaggaaacagctgtgcgggtctggatagaggagaggtcaagggcttggactggggaccctgagctgccaaggtgtggggactccttgcagtcctggtgcagcaatggcaggaaggccagcaggggccctagttgagcaggttgccctgctcctgggcctggggtcaggctgtccttgcggtgcaggtggtgaacccccatcctcttggggctgcgctgggggcgactggagctggggagtggccagncctgccctcggtgtnggaagtgcctggccctcctctgtgccc

SEQ ID NO: 254724 - DNA, 614 bp, Homo Sapiens
  misc_feature (36)..(36): n is a, c, g, or t
  misc_feature (102)..(102): n is a, c, g, or t
aacctcagtgggagaaaaatacctgaccaatgacantcagtcatctgtgatagtcatggatgcttttattttccctggggtgctgaaattgagctgaaaaanaaaggctctttgaatatagttttaatttctctctacagttttttttgtttggtttgtgggctgttggaattgtaatttttaattgccttctaaaaaatggaaatttaacaatgtctgatctcagctgaacaaattagatgtttcagttgctcttgggtcaactggcttacagatttacatgtgcacacacacacaaatttcttatcacattttcgacttcttcacttgacctaactgattatgcgaaatacccaagattcatgctactgtaccacagatttgttttcacagcaataaatcttcagttctttgtttatgattccacttaacaaaaggcctgcagaagtgatttattatttgggtatttggagataatacatttgatggttttttggaaaacctttttcactccatactcagatatgcttcattgtcaaatgcatatttagattagattattgaattgtaatgtttatctgctgctttttttaaataaaatttgactgaaaatg

SEQ ID NO: 254725 - DNA, 327 bp, Homo Sapiens
cagcgaacaaaagatgcagttgctcttgggtccgacttcttcacttgacctaactgattatgcgaaatacccaagattcatgctactgtaccacagatttgcacagcaataaatcttcagttctttgtttatgattccacttaacaaaaggcctgcagaagtgatttattatttgggtatttggagataatacatttgatggttttttggaaaacctttttcactccatactcagatatgcttcattgtcaaatgcatatttagattagattattgaattgtaatgtttatctgctgctttttttaaataaaatttgactgaaaatg

SEQ ID NO: 254726 - DNA, 617 bp, Homo Sapiens
aagcagaggaggcccaacaagcaagggggttcttgtcacttaaaacccacgagcatcctggaacttgtgttgaaccacaagcaggaatgtgctggcctgtccagagtgaaatcccatgtggtgccactgttgttactgtgtaagaaacagggactgttccttgatggagctgatcatgtatgtcaaccatgactgcattctgctggggtggatgagcagcaggatgtagcagacggggagatacattcggagggtggaaggcatcttgactaatggaattatgtcgagacagacgatcccttcttcctctctggcgcctgacaggaggacttcttctgttgcgtgcaggtgtgttgcatcgttcccctgagaagtgatgttggcttggtcgaactgaagggggctgcctagatgtcatctcccatggtcgcattggtggtgagggagctggtgatgctgatgtataatcaaagactgaatgagagaggcgctgtctcttaggacttggactatcttcactctagcgagcccagcgcgccagaccaccggagcgctcctccccccccaggctccgcaccgcgcgccgaaccccctttgtttccaccccgagggggaag

SEQ ID NO: 254727 - DNA, 984 bp, Homo Sapiens
  misc_feature (650)..(650): n is a, c, g, or t
gggaaggggcagggaggaggaagcggtggctgctgcggatgtcggtgtgagcgagcggcgcctgaacacacggcggctgccgagcgcctgacccgggcctgcgccagagcctgcaccgagctccggggccccacacccgctaccgtggccctgcgcccgttgctactgaggcggcgtgctctgcattcttcgctgtccaggcctgccggctctggtgtctgctggctcctccttgctcgcctgctccctcctgcttgcctgagtcaccgccgccgccgccgccacagccatggccgagagtggtgaaagcggcggtcctccgggctcccaggatagcgccgccggagccgaaggtgctggcgcccccgcggccgctgcctccgcggagcccaaaatcatgaaagtcaccgtgaagaccccgaaggaaaaggaggaattcgccgtgcccgagaatagctccgtccagcagtttaaggaagaaatctctaaacgttttaaatcacatactgaccaacttgtgttgatatttgctggaaaaattttgaaagatcaagataccttgagtcagcatggaattcatgatggacttactgttcaccttgtcattaaaacacaaaacaggcctcaggatcattcagctcagcaaacanatacagctggaagcaatgttactacatcatcaactcctaatagtaactctacatctggttctgctactagcaacccttttggtttaggtggccttgggggacttgcaggtctgagtagcttgggtttgaatactaccaacttctctgaactacagagtcagatgcagcgacaacttttgtctaaccctgaaatgatggtccagatcatggaaaatccctttgttcagagcatgctctcaaatcctgacctgatgagacagttaattatggccaatccacaaatgcagcagttgatacagagaaatccagaaattagtcatatgttgaataatcc

SEQ ID NO: 254728 - DNA, 670 bp, Homo Sapiens
  misc_feature (79)..(89): n is a, c, g, or t
cagaccaggaaaagtgtaagtgctgtccctgcccaccaacttcctagagacgggcagcactttacagcttcaatttccnnnnnnnnnnnaaagtttacacgaccagtgagactgctcgcaactttcatcacttagcatatccttccacaacacagtacagtaagtggactgcagggtggcctggtgctgagggtgatgggtgcagacgtacacctgtccaggtgcaggctcaggggcctcgctggatccttcccaccttccccaactgcctactggcctggctactggataggtcctattctgtacataatgggggtttgttgacaggtggctttatagcaagtactccaaaaaaggtaaaaggaatttcacaagtttggcacgcaaaggctgcacagatctaaagaaaggcctttgtaaaggtgaatgcaaactaatgttgaaacatggaaatgtgactttaaaaaagagggaaggtgaggatgagctggacgtggagcaagtggaggcagggagaggctggccagacagcctcccttcctgggtatctcaagatcccaggtgtcggcgtggtccagccactggaaacacgtggccaagagtctgcttgccccttgctgtgtctttacacatctccaggcccttactgatgtgtggaccgcatgtggag

SEQ ID NO: 254729 - DNA, 516 bp, Homo Sapiens
  misc_feature (102)..(110): n is a, c, g, or t
gataagcaaatatagatagtgttaaacaaacctccagccagtatatctgttatcttaaaatattcaatgcaaggcaggagatgtaactaaaaacctacatgnnnnnnnnngctataaaatacagtgattggtgtggtccatcactcaaggtgtggaggagggaggagagggtttccaaaaaatggtcagttatgccctcagctttcaggcctgatgtcttcccaacacacagcaggactaaaaacccaagagctgtgtttcttcaagtgtggctgtggcgcctgcatcagagtcacctgtggcgcttactaggcatgcaggttccctagcaagcccctgaaggccagacgcctgtgtctccagctggctctccagggctctgatgccatcgtttcagaagccaggtttaaaggcttggagctgccaaccacccttgtccccaaggaaccctccctgggatggggcgcactggtcctctgaggggctggtgtcagctaagtggccctggggtgggga

SEQ ID NO: 254730 - DNA, 1116 bp, Homo Sapiens
  misc_feature (1084)..(1084): n is a, c, g, or t
gggaagaacaccagcgctccaatgagagggtaagagagaaggcgaagtagcaacagctgctgcccacttcccacctcaactcttccaccctcttccaggttgttttggacataggctggtcttcaactctggatcctccagcctccaacttcaaactactcgttttacatagcaggagccgccacgcccagtgtgctctatggaccatgtgctgctatggatgcctgaagttgttgacctgcaggttgggaagactcagccatctccatgctgggctggattaagtgcctgatgaggatgtggtttcagcgagttggggtcagcatgcagtcggtactatggtctggaaaaccatatggttcatctcgaagtatcgtaaggaaaattggtaccaacttatctctgattcagtgtccaagagttcaatttcagattaacagccatgcaacagaatggagtcccagccacccaggagaggatgcagtggcgtcttttgctgatgttggatgggtagccaaagaagaaggagagtgttcagcaagactaaggacagaggtcagatcaaggccaccccttcaggatgaccttcttttctttgagaaggccccaagcagacagatttccttaccagacttgtctcaagaagagcctcagctgaagaccccagcgctggcaaatgaggaagcactgcagaagatttgcgctctcgaaaatgaacttgctgctctcagagctcagattgccaaaattgtgacccagcaggagcagcaaaatctcactgcaggtgacttagattctaccacatttggtaccataccaccacacccttcaccttccccaccgcccctgcctccccctgcactggggctccaccaaagtacatctgctgttgatctgattaaagaacgaagagagaaaagagccaatgcttggaagactttggttaagaacaatccaaagaaacctgaaatgccaaatatgctagagatccttaaagagatgaacagtgtaaaacttcggtcagtgaagaggtcagagcaagatgtgaagcccaagccagtggatgctactgaccctgctgccntcatgagaggctcttgatttgcttatcggttc

SEQ ID NO: 254731 - DNA, 1116 bp, Homo Sapiens
  misc_feature (32)..(32): n is a, c, g, or t
  misc_feature (52)..(52): n is a, c, g, or t
  misc_feature (58)..(58): n is a, c, g, or t
  misc_feature (64)..(64): n is a, c, g, or t
  misc_feature (77)..(77): n is a, c, g, or t
  misc_feature (85)..(85): n is a, c, g, or t
  misc_feature (95)..(95): n is a, c, g, or t
  misc_feature (112)..(112): n is a, c, g, or t
tgctgtcaaccccagttcttcttgggccaggntgggggttggcgtaacaggntgccanatcacnttcccgcggtgcnaccacttngtacgggatntttttcccagaggcttntccatagcctggaccatctgcagcactgaatagcctgtgcccgtgcccaggttgtagatccggcagccacactgttctttcagcttccttaaggctgcaatgtggcccttggccagatccacgacatggatgtaatcccggacacctgtgccatcctctgtgtcatagtcattgccaaagacattcagggcctcccgtcgcccgatcgccacctgggagacataaggcatgaggttgttgggtaatgccctggggatcctcacccaatgcaaccagaggcatgggcacctgtggggttgaaaataagcgcagcaagcactgcgttccaagtcttgtctgcctggcacaggtcccggatcatttcctcgatgaagaacttggacttgccgtaagggttggtacaaccacccgtggggtgggcctcatcaaggggcaggtactgggggttcccgtacacagtggctgagctgctgaacaccaggttcttcaccccgtgggccttcatgatctccagaagctggatggtcccggtcaggttaactctgtaataatccagaggcttctgcaccgactcgcccacggccttgagccccgcaaagtggatgaccgccataaagctgtactttttgaagagacgctgtagggctccctggtccaaaatgtccatctcctcaaactccacagagcggcctgtcagctcctggacccgccgcaggctctcaggcagggagccccctccacggaaggcattatggaagttatcgatgaccacaggcaagtagccagcctccagcagctccagcaccgtgtggctgccaatgtagccagccccacctgttaccagcaccttctctgccatggcaccttggagttggaaaagatggaatctgaggatccacacttctttgtccaaggtgactgaggactggagagtcctgctcgggttcccgcgccccacgcttgctgcagaggcaccgcccagtaggccaacagtgaattcccta

SEQ ID NO: 254732 - DNA, 957 bp, Homo Sapiens
  misc_feature (194)..(233): n is a, c, g, or t
aactggaagagaagggagaagtgagggaggggagggaccagatccaggcagagcggcccagaggcgtggtcagtccagcccgctccataaaccctgttctccgtgggccagatctacaacctgggcacgggcacaggctattcagtgctgcagatggtccaggctatggagaaggcctctgggaagaaggtagnnnnnnnnnnnnnnnnnnnnnnnnnnnnnnnnnnnnnnnnagctctcagcaacagagcagctttggcccttcccactcacctctctggagggtacctggcactgcccagtctcctcagcctgcctagcacccggtgcctgcgggccagccgctgctctgcacttctgcttcttaaagacctggccagcagctgggccagggccggctcagctaagctccaactacctcctgtcttgcagatcccgtacaaggtggtggcacggcgggaaggtgatgtggcagcctgttacgccaaccccagcctggcccaagaggagcttggggtggacagcagccttagggctggacaggatgtgtgaaggatctctggcgctggcagaagcagaatccttcaggcttttggcaacgcaagcctgaggaccctcccctaccaaggaccaggaaaagcagcagctgcctgctctccagcctctggcaggaactcagggccctggagctgctggggccaagccaaggcctcccctacctcaaaccccagctgggcccgcttagcccaccaggcatgaggccaagggctccactgaccaggaggccgaggtctctaactcttatcttccacagggtccaagagttcatcaggacccccaagagtgagtgagggggcaaggctctggcacaaaacctcctcctcccaggcactcatttatattgctctgaaagagctttccaaagtatttaaaaataaaaacaagttttcttacaaa

SEQ ID NO: 254733 - DNA, 1620 bp, Homo Sapiens
  misc_feature (59)..(59): n is a, c, g, or t
cccggctgcaggaattcggcacgaggttctctacttctgtgaatgtttgcaaaataaanagttaacatacaaatacataacatctacccatgaaacggaagtttgtctagttgtattttgtaaccggtttactattgtgaatccctcatcagtgctgcttctccccattcaggtggcaatcactgggcagcttggtgtgaagccccaaacaggcaacagcattccactcacagccactaacttccgcatccagggtaaggatgtattgcgtctgccgccctcttccatcaccacagatgccaagggccagacggttctgcgaatcactccggacatgatggccacattggccaagtcccaggttaccacagtcaaattgacccaggacctcttcgggacaggaggcaacactacaggcaaaggcatctctgccaccttacacgtcacttccaatccagtacatgcagctgatagccctgccaaggccagttcagccagtgccccttcatccactccaacaggtaccactgtggtcgtgactcctgacctcaagccaacagaagcctcaagttcggcttttcgcttgatgccagctcttggcgtgagtgtggctgaccagaagggaaaaagcacagtggcctcttcagaagcaaaaccagctgccacgatccgcatcgtgcagggactgggagtgatgcctcccaaagcaggccagaccatcaccgttgcaacccacgccaagcaaggggcctcggtggccagtgggtctggaactgtccatacttcagcggtgtccttacccagtatgaatgctgctgtgtccagaactgtagctgtggctttctggggctgcaagcacccccatcagcatcagcacaggagcccccaccgtgcggcaggtccctgtcagcaccacggttgtgtccacgtcccaggctgggaagttgcctacacggatcacagttcccctctctgtgatcagccagccaatgaagggcaagagcgtggtcacagcccccatcatcaaaggcaaccttggagccaacctcagtgggttgggccgcaacatcatcctcacaactatgccagcaggcactaagctcattgctggcaataagcctgttaagttcctcactgctcaacagttgcagcagcttcagcagcaaggtcaggccacacaggggcgcatccagactggccctgcatcccatctccaacagggaacagcttctggctcctccaaagcagtctccactggtggtgtgactacagcttccgtcttcctaaacaggcacctgagcaacaatgattatgagagaggatggcttccgtgaaagaccatgcctggtctgtcctggctgagaaggcaccagggaggttgcatcattgttttaagcttgcctgttcaaggcagccaggcgaagggtgatggcaaccgtggcctggaattctgggcctggattctgctggcacgggccataatggaaccccctgaaaaaagtttacctccaggggttccaagggccggctctctaccaattctagggaaaaatatttctggtgggaaattgccgggaaatttacccgttttacctcccacacaagccccaaagtttcttg

SEQ ID NO: 254734 - DNA, 961 bp, Homo Sapiens
  misc_feature (823)..(823): n is a, c, g, or t
gtagcgaggcctgggtggcgaattcggcacgaggagtacatgcagctgatagccctgccaaggccagttcagccagtgccccttcatccactccaacaggtaccactgtggtcaaagtgactcctgacctcaagccaacagaagcctcaagttcggcttttcgcttgatgccagctcttggcgtgagtgtggctgaccagaagggaaaaagcacagtggcctcttcagaagcaaaaccagctgccacgatccgcatcgtgcagggactgggagtgatgcctcccaaagcaggccagaccatcaccgttgcaacccacgccaagcaaggggcctcggtggccagtgggtctggaactgtccatacttcagcggtgtccttacccagtatgaatgctgctgtgtccaagactgtagctgtggcttctggggctgcaagcacccccatcagcatcagcacaggagcccccaccgtgcggcaggtccctgtcagcaccacggttgtgtccacgtcccaggctgggaagttgcctacacggatcacagttcccctctctgtgatcagccagccaatgaagggcaagagcgtggtcacagcccccatcatcaaaggcaaccttggagccaacctcagtgggttgggccgcaacatcatcctcacaactatgccagcaggcactaagctcattgctggcaataagcctgttagtttcctcactgctcagcagttgcagcagcttcagcagcaaggtcaggccacacaggtgcgcatccagactgtccctgcatcccatcttcaacagggaacagcttctggctcccccanagcagtcttcccacctggtggttgtgactacagcctccggtctcctaaaacaggcacctgagcaacattggttaagtgaagagaggaaggcctttccgggaaaagaccatgccctgggtctgtccctgggctgaaaaa

SEQ ID NO: 254735 - DNA, 669 bp, Homo Sapiens
gcccagggttgattattaatatagtaacatttttttaattaaacaaaatttgtaaaatacacctgtacaattaacattcaagtttatagaaaaacactagtttctgccttgctaataaaagaattacttgattaactagaataccaaccattcctttattaaaataaatacctgcttcttcttcgccggctgtaacgatgacaatcataagcataatgtcccttttcgccacactcatagcatctatcatttggatcaaagggacgtcgggcaggtggtctatcaaaacgtgatctccgaggcatgcctgtcgatagttcaaccctcactcgggagccacaaatcacctttccatccagtcctcgtactgcatcttctgcatctctaggatcttcgaattccacaaaggcaaatcctggaggatttctcgcaatccatacagttcttaaaggaccataataactgaaagccctttctaactctcctttgccagcgccagttcccaggttaccaacatacaccttggtttctcctccgtaccgcccgtaacgcgacatgatgacagacccgcgtgctcggctctttagcaagcagcgcccagggctcgagtgacgcaaaagctgacacacaccttcacccgccaagactcgtgccgaatcctgcagcccg

SEQ ID NO: 254736 - DNA, 950 bp, Homo Sapiens
gggtagtgccgccgggactcttggcgggtgaaggtgtgtgtcagcttttgcgtcactcgagccctgggcgctgcttgctaaagagccgagcacgcgggtctgtcatcatgtcgcgttacgggcggtacggaggagaaaccaaggtgtatgttggtaacctgggaactggcgctggcaaaggagagttagaaagggctttcagttattatggtcctttaagaactgtatggattgcgagaaatcctccaggatttgcctttgtggaattcgaagatcctagagatgcagaagatgcagtacgaggactggatggaaaggtgatttgtggctcccgagtgagggttgaactatcgacaggcatgcctcggagatcacgttttgatagaccacctgcccgacgtccctttgatccaaatgatagatgctatgagtgtggcgaaaagggacattatgcttatgattgtcatcgttacagccggcgaagaagaagcaggtcacggtctagatcacattctcgatccagaggaaggcgatactctcgctcacgcagcaggagcaggggacgaaggtcaaggtcagcatctcctcgacgatcaagatctatctctcttcgtagatcaagatcagcttcactcagaagatctaggtctggttctataaaaggatcgaggtatttccaatccccggtcaaagtcaaaatcaagatccagggtctatttcacgacccaagaagcagccgatccaaagtccagatctccatctccaaaaagaaagccgttccccatccagaaagtccctcgcaagaagtgcaagtccctgaaaagaatggactggaaactcctcaggttcaccccttttatggaataagctaattttggcttaacctgaattactaagggaatttgggcgaaggcccgttaaacgggcaaagctcagggaaacaaaattct

SEQ ID NO: 254737 - DNA, 757 bp, Homo Sapiens
tggaacccttgggaattccttgggattcctgtgacccctcgaacgggggggaattgggaaaaatacccttcgaatccctttttattagaacccaagaccttaagatcttcctgaagggaaagctggatcttggatctaagaaagaggagataagattcttgatcgttcgaaggagatgctggaccttgaccttcgtcccctgctcctgctgcgtgagcgagagtatcgccttcctctggatcgagaatgtgatctagaccgtgacctgcttcttcttcgccggctgtaacgatgacaatcataagcataatgtcccttttcgccacactcatagcatctatcatttggatcaaagggacgtcgggcaggtggtctatcaaaacgtgatctccgaggcatgcctgtcgatagttcaaccctcactcgggagccacaaatcacctttccatccagtcctcgtactgcatcttctgcatctctaggatcttcgaattccacaaaggcaaatcctggaggatttctcgcaatccatacagttcttaaaggaccataataactgaaagccctttctaactctcctttgccagcgccagttcccaggttaccaacatacaccttggtttctcctccgtaccgcccgtaacgcgacatgatgacagacccgcgtgctcggctctttagcaagcagcgcccagggctcgagtgacgcaaaagctgacacacaccttcacccgccaagagtcccggcggcactccc

SEQ ID NO: 254738 - DNA, 1836 bp, Homo Sapiens
  misc_feature (519)..(519): n is a, c, g, or t
  misc_feature (532)..(532): n is a, c, g, or t
  misc_feature (542)..(542): n is a, c, g, or t
  misc_feature (741)..(741): n is a, c, g, or t
  misc_feature (1263)..(1389): n is a, c, g, or t
  misc_feature (1393)..(1534): n is a, c, g, or t
  misc_feature (1577)..(1632): n is a, c, g, or t
gtttgagtcagtcgccttgattcagaatgtcacgagccttatgatatcatgctgaggcgccttgcaaatccgacaattaagatcctcctagaccttgaggtgatcagcataagaggcccagatcccctcgagtcatctacacctagcttcaccttattctttaaagggcagaaaatttgagacggtgatcgccgtaacagtaaatttgggcttacaattggggcccccctccggtttagaaagaggaacaccagattgaccacattcccaactaggaaaaatcttcttgcgtcaatcaaggcctcacctggcttcatttgggctgtcagtttgattcgtcgttagattgaagaaaacatctagatgcagcgatcggctatagatacttctagatcgtctagatctactagaccatggaccaaagagggtcgacctgcaaactagcaaggttgattttaaatacacattacagtgtttaatattatgtaatgctaagttgtaattcagcttttaacaaanctcctcttaggtngtaaaaaaanaaaatactcaacaactaataggcccagagtttatttccaaatgagacactaaacttaaatagttttgagatttgatttcagcagaggcacacaaactcttaaaaacgagttattgtctgacattttgttttttctctaacttgaaaaataggtcacggtctagatcacattctcgatccagaggaaggcgatactctcntcacgcagcaggagcaggggacgaaggtcaaggtcagcatctcctcgacgatcaagatctatctctcttcgcagatcaagatcagcttcactcagaagatctaggtctggttctataaaaggatcgaggtatttccaatccccgtcgaggtcaagatcaagatccaggtctatttcacgaccaagaagcagccgatcaaagtccagatctccatctccaaaaagaagtcgttccccatcaggaagtcctcgcagaagtgcaagtcctgaaagaatggactgaagctctcaagttcaccctttagggaaaagttattttgtttacattattataagggatttgtgatgtctgtaaagtgtaacctaggaaagataattcaaccatctaatcaaaatggatctggattactatgtaaattcacagcagtaagataatataaattttgttgaatgtattaacatcatatggtctgaaaatgtgggtttttatttggcacatttaaataaaatgtttctaactagnnnnnnnnnnnnnnnnnnnnnnnnnnnnnnnnnnnnnnnnnnnnnnnnnnnnnnnnnnnnnnnnnnnnnnnnnnnnnnnnnnnnnnnnnnnnnnnnnnnnnnnnnnnnnnnnnnnnnnnnnnnnnnnaggnnnnnnnnnnnnnnnnnnnnnnnnnnnnnnnnnnnnnnnnnnnnnnnnnnnnnnnnnnnnnnnnnnnnnnnnnnnnnnnnnnnnnnnnnnnnnnnnnnnnnnnnnnnnnnnnnnnnnnnnnnnnnnnnnnnnnnnnnnnnnncccccgggggcaaaccaaagggttttaaaaaaaccccaaggannnnnnnnnnnnnnnnnnnnnnnnnnnnnnnnnnnnnnnnnnnnnnnnnnnnnnnnctttctaattctaaatttaaccccccgcgccgtgggccatttttattaaaaaaatggtggggggaaataaattaaaacacttcttcccccccacatgggggacccctccccccaaagggggtggtggaaaaacccggaaaccccgccgcgggggaatcaaacccccgttggggcccgctgggagaataaaataatattcccccc

SEQ ID NO: 254739 - DNA, 463 bp, Homo Sapiens
tacatgaaaacatgtttattgcctgaataataaaacttagctaaggagttattagaattacgattccccctacttgaagtacaagtttccaataaacagacagacagaagcaaaaccccaaatgagaagaatacattggtaacctaaatcataggcatttgtgggtatgttcatacaatctacctatttctttgtaatttactatagcactgatgacaaagcatagacatacaatgagaaagagcaaatcagcatatcagtgtgactgtgcaaccactacaaagcttggccttcttaaatgtggccactttaacttacacacacccacagaggcatcagaaatctccctgcaaacacgatttgcctatagttttgtggcaatactgttacatagaacaaaaacaactctcagaccatggttaataaataagagagaaaagaagtaagaaacaacttccatggg

SEQ ID NO: 254740 - DNA, 341 bp, Homo Sapiens
aaggcacagagtaagcggaaaaaacgcctctgaagagactaaatagaatacatgcaaatccccattaatgacaggtgatgattaatttcctagtatatattataatcgatgtcattgtatgttttctttaaagttgttttgaaaaaattttattttactatgtcattttacccattttaataacttggtattttaaataaagaattttcattgttgttatatgtatgtactttattgttttatgtaacattttaaatttgtgcatttcatcactcttgacatgttcttcaatccttttttaaaaaatagtttttcagataatattaaagattttgaactct

SEQ ID NO: 254741 - DNA, 664 bp, Homo Sapiens
gtcgcaacttattccacatgaagtccagaagctccagtgctccaagatcaaaactgtgaatatcagcatgatcagaaacataggcttagatgactgagccagcaaaactcccgagggccaaactggaaacataagagtgactgctcggtggaatggatttcacaggaaccgtcatgcttgttcactccctctcccctgtaacctcacttcttattgattcctaagaagatagaccaactttttatgtcggtttgggtgtttgtgagtttggggagcaatttttataaaagaaaaactttattctcctcttttgaaaaggtaagacctcgttttagttgtaactgtttaaaaaataacacttggaataagatttgtaagctcacaaagccttcttccaaagttgcttgagccaagtgcttaaaaagttaataaaataaaatgatctgtatgatacctgcaattgaaaagccgaaaagattatactgtcaagtccagtaaatgacatttttagagatgcttttgtagacaagcatatggaatatgtgattgtatttattttctgcaactaaaaaaggaataaaaacttgtgtttgtgtgtttttctaaaactttgtgttttggcaatcgttttataactaaaataaaatgaaagctaaatctataa

SEQ ID NO: 254742 - DNA, 1639 bp, Homo Sapiens
  misc_feature (1506)..(1534): n is a, c, g, or t
  misc_feature (1536)..(1536): n is a, c, g, or t
  misc_feature (1538)..(1538): n is a, c, g, or t
cccggttctccttcccgcagtctgcagccggagtaagatggcggcgctgagggctttgtgcggcttccggggcgtcgcggcccaggtgctgcggcctggggctggagtccgattgccgattcagcccagcagaggtgttcggcagtggcagccagatgtggaatgggcacagcagtttgggggagctgttatgtacccaagcaaagaaacagcccactggaagcctccaccttggaatgatgtggaccctccaaaggacacaattgtgaagaacattaccctgaactttgggccccaacacccagcagcgcatggtgtcctgcgactagtgatggaattgagtggggagatggtgcggaagtgtgatcctcacatcgggctcctgcaccgaggcactgagaagctcattgaatacaagacctatcttcaggcccttccatactttgaccggctagactatgtgtccatgatgtgtaacgaacaggcctattctctagctgtggagaagttgctaaacatccggcctcctcctcgggcacagtggatccgagtgctgtttggagaaatcacacgtttgttgaaccacatcatggctgtgaccacacatgccctggaccttggggccatgacccctttcttctggctgtttgaagaaagggagaagatgtttgagttctacgagcgagtgtctggagcccgaatgcatgctgcttatatccggccaggaggagtgcaccaggacctaccccttgggcttatggatgacatttatcagttttctaagaacttctctcttcggcttgatgagttggaggagttgctgaccaacaataggatctggcgaaatcggacaattgacattggggttgtaacagcagaagaagcacttaactatggttttagtggagtgatgcttcggggctcaggcatccagtgggacctgcggaagacccagccctatgatgtttacgaccaggttgagtttgatgttcctgttggttctcgaggggactgctatgataggtacctgtgccgggtggaggagatgcgccagtccctgagaattatcgcacagtgtctaaacaagatgcctcctggggagatcaaggttgatgatgccaaagtgtctccacctaagcgagcagagatgaagacttccatggagtcactgattcatcactttaagttgtatactgagggctaccaagttcctccaggagccacatatactgccattgaggctcccaagggagagtttggggtgtacctggtgtctgatggcagcagccgcccttatcgatgcaagatcaaggctcctggttttgcccatctggctggtttggacaagatgtctaagggacacatgttggcagatgtcgttgccatcataggtacccaagatattgtatttggagaagtagatcggtgagcaggggagcagcgtttgatcccccctgcctatcagcttcttctgtggagcctgttcctcactggaaattggcctcnnnnnnnnnnnnnnnnnnnnnnnnnnnnntntntaatgtcccggaacaccttgcctgccagggctttctgggcatggcactaaaaaggagaaaattattaataaattacccctcttggccggccccctaaggcc

SEQ ID NO: 254743 - DNA, 910 bp, Homo Sapiens
cggtgaggcgcggggtaggctgggcggagtatagatcgtggtatacacccaaccacccgaggaggggccccaatttttccccaggtgggagggaacccgggggcttccccccaggaaggaaaggttgaataaggccaggggggggattcaaaacggttggctccccctgctcccccggatttactttctccaaaatacaatatcttgggtacctatgatggcaacgacatctgccaacactgtgtcccttagacatcttgtccaaaccagcccagatgggcaaaaccaggagccttgatcttgcatcgataagggcggctgctgccatcagacaccaggtacaccccaaactctcccttgggagcctcaatggcagtatatgtggctcctggaggaacttggtagccctcagtatacaacttaaagtgatgaatcagtgactccatggaagtcttcatctctgctcgcttaggtggagacactttggcatcatcaaccttgatctccccaggaggcatcttgtttagacactgtgcgataattctcagggactggcgcatctcctccacccggcacaggtacctatcatagcagtcccctcgagaaccaacaggaacatcaaactcaacctggtcgtaaacatcatagggctgggtcttccgcaggtcccactggatgcctgagccccgaagcatcactccactaaaaccatagttaagtgcttcttctgctgttacaaccccaatgtcaattgtccgatttcgccagatcctattgttggtcagcaactcctccaactcatcaagccgaagagagaagttcttagaaaactgataaatgtcatccataagcccaaggggtaggtcctggtgcactcctcctggccggcctcgtgccgaattcgccaccc

SEQ ID NO: 254744 - DNA, 798 bp, Homo Sapiens
  misc_feature (696)..(729): n is a, c, g, or t
tcactttaagttgtatactgagggctaccaagttcctccaggagccacatatactgccattgaggctcccaagggagagtttggggtgtacctggtgtctgatggcagcagccgcccttatcgatgcaagatcaaggctcctggttttgcccatctggtaagaatcaatcccagtaactataactccaatgaattaaacctgaccttggttgaggtttttatgaactcttctttctactcccaccttccaagtcttaactaacattgttgccatctcaatctccctaggctggtttggacaagatgtctaagggacacatgttggcagatgtcgttgccatcataggtacgaggcctattgtgtagtagaggtatcctagacaaaggagttcgggacgcccactggggacagaaggagaacacttcctgttcaccataggccatggcatggactcgggtcctcaatcttttgagcacagtaatgggttctggatcttgggtaacaccactttttttgtttgttttgcctcacaacaggaagataagtaacatcacttttttcctccatcctctcacctaggtacccaagatattgtatttggagaagtagatcggtgagcaggggagcagcgtttgatcccccctgcctatcagcttcttctgtggagcctgttcctcactggaaattggcctctnnnnnnnnnnnnnnnnnnnnnnnnnnnnnnnnnnatgttcatgtacacttggctgtcaggctttctgtgcatgtactaaaaaaggagaaattataataaatta

SEQ ID NO: 254745 - DNA, 808 bp, Homo Sapiens
caggatttggcccgaacttgccttcaaaagtgttgggatacagcaatgagcgccacggcggccaatttattcttaattaaatagttttcccgggtttatcaagaatctttaaacttaattccttccataaagtcattattatgaccacacccagtgaaagaggaggaatgaaagatgcaaactttaaggtttcaggatatttgaagtgttgggtgcattgagaccagtagctgataataaccctttaattttctcgtttattaaaggttaaagacatatactcaatcccaagtactaaaatagatgtaaaaaaattctggatttgaaaaccgttggtttttaaaagagaaatatttttaaattcttattttaggatgaggatatgttcatgaaatttgtaagtgaagatcttcatcggtgtgcacttttaacaggtttgaacctattcatatagtttttgtttagcataaaactttgaatggataaaaaagaagatgaggaaactaaaaagtcagattgaataatatagggaatgattattctagtagattgtgaaagagaactgtatctacttgcagagttcaaacttttcaggtttgttttaggtaagcctattttatattagaaaataataaatgaaagtggtgattatcctatatttaacataaggatttaccttgtcatttgtttaaatgtattgactgtatgactcaagttataacggacagattatgttagaagtacatcttcatttaaacgaagtacattgtctaaagagtctcattaataaagtcattcatttgcaact

SEQ ID NO: 254746 - DNA, 583 bp, Homo Sapiens
  misc_feature (541)..(541): n is a, c, g, or t
gggccacaccataagatcatcatccctccccaatcataaagtctgggctgagccttgagggtctgtctgcagataagattgtgttacttgtcatagacaaggactggttcttgtctcggtcgtcccggtctcggtccctatctttgtcactttcttcttttcctttttgtgcttcttatgtttctctgtgctgtattctggaagtggtcggataccatcgtctgagctgggactattctgataagatttctctgctatggaggagcctgactcactttcactgtccagattctggggggtatatgctggtgacttactatggctgggagagccacgctcatgctttggagtggaaccactgatgagtggagagccatagtttttagaagaagccatttgaggcctaagcccttctccactactttccccagggtttctgcaaagtcactttgggctttaatgctaggggagcctcccatcatgcttactgatgataatttttgccacacctgtgctccccacattttttgactctgagggncttcttaggaaggaatccactgaactcccggaggtgggaaac

SEQ ID NO: 254747 - DNA, 585 bp, Homo Sapiens
  misc_feature (382)..(390): n is a, c, g, or t
gaattcactagcatctgtcttacccaaagccttttggatctttcggtttgaaacgccggtccctgttcccctcaattttgatactaaagttcagacacaaaactgaagtgttgaaactcatagattggatggggtgcctctgaatttaggtgtacttgcgtttattgagaaacatgtatgccaggtgaggctctgtacatatttaacgcaaacttcagcatcctttaaattttaaaggagaatatatttaacctcagtttttagattctaatcaagaaaatgatttgctatgggaagagaagtttcctgaaagaacaactgttactgaattacctcaggtaatactttttaaatatcattagaatgtgtatttgtataaacnnnnnnnnnataggatttgagcctatttttaaaaatacatttatacttctcagaagcattttgcttggaaagtagttttacagagaggcttgatcatctcaaccagggatgtaccgcatcagccaaggtaaaggagttggtttgatacagttgatgactgtgatagccagcgctactcttctttgggcagttgacttctccgtt

SEQ ID NO: 254748 - DNA, 2196 bp, Homo Sapiens
  misc_feature (40)..(40): n is a, c, g, or t
  misc_feature (42)..(42): n is a, c, g, or t
  misc_feature (672)..(672): n is a, c, g, or t
  misc_feature (2035)..(2043): n is a, c, g, or t
tccggaattcccgggatctccagccgcgcggatcgcgccntncccgccgctctgcccctaaacttctgccgtagctccctttcaagccagcgaatttattccttaaaaccagaaactgaacctcggcacgggaaaggagtccgcggaggagcaaaaccacagcagagcaagaagaagaatcagagagcagccttcccggagcaccaactccgtgtcgggagtgcagaaaccaacaagtgagagggcgccgcgttcccggggcgcactgcgggcggcgggagcaggcgcaggaggaggaagcgagcgcccccgagccccgagcccgagtccccgagcctgagccgcaatcgctgcggtactctgctccggattcgtgtgcgcgggctgcgccgagcgctgggcaggaggcttcgttttgccctggttgcaagcagcggctgggagcagccggtccctggggaatatgcggcgcgcgtggatcctgctcaccttgggcttggtggcctgcgtgtcggcggagtcgagagcagagctgacatctgataaagacatgtaccttgacaacagctccattgaagaagcttcaggagtgtatcctattgatgacgatgactatgcttctgcgtctggctcgggagctgatgaggatgtagagagtccagagctgacaanatctcgaccacttccaaagatactgttgactagtgctgctccaaaagtggaaaccacgacgctgaatatacagaacaagatacctgctcagacaaagtcacctgaagaaactgataaagagaaagttcacctctctgactcagaaaggaaaatggacccagccgaagaggatacaaatgtgtatactgagaaacactcagacagtctgtttaaacggacagaagtcctagcagctgtcattgctggtggagttattggctttctctttgcaatttttcttatcctgctgttggtgtatcgcatgagaaagaaggatgaaggaagctatgaccttggagaacgcaaaccatccagtgctgcttatcagaaggcacctactaaggagttttatgcgtaaaactccaacttagtgtctctatttatgagatcactgaacttttcaaaataaagcttttgcatagaataatgaagatctttgttttttgttttcattaaagagccattctggcactttaatgataaaatcccattgtatttaaaacatttcatgtatttctttagaacaacataaaattaaaatttaacatctgcagtgttctgtgaatagcagtggcaaaatattatgttatgaaaaccctcgatgttcatggaattggtttaaacttttatgcgcaaatacaaaatgattgtctttttcctatgactcaaagatgaaagctgtttcatttgtgtcagcatgtctcagattgaccttaccaagttggtcttactttgttaatttatctgttgtccccttcctctcctctgccctcccttcttgtgcccttaaaaccaaaccctatgccttttgtagctgtcatggtgcaatttgtctttggaaaattcagataatggtaatttagtgtatatgtgattttcaaatatgtaaactttaacttccactttgtataaatttttaagtgtcagactatccattttacacttgctttatttttcattacctgtagctttgggcagatttgcaacagcaaattaatgtgtaaaattggattattactacaaaaccgtttagtcatatctatctaatcagatcttcttttgggaggatttgatgtaagttactgacaagcctcagcaaacccaaagatgttaacagtattttaagaagttgctgcagattcctttggccactgtatttgttaatttcttgcaatttgaaggtacgagtagaggtttaaagaaaaatcagtttttgttcttaaaaatgcatttaagttgtaaacgtctttttaagcctttgaagtgcctctgattctatgtaacttgttgcagactggtgttaatgagtatatgtaacagtttnnnnnnnnngttggtattttataagctcagacaattcgaatgggaacttttgtagtcctatgaatacacataaattgtaatttgggaccataagaacgactgaataaatcatgtggcctaatattgaaaaacagaccggaagcactcgagactagttctctc

SEQ ID NO: 254749 - DNA, 500 bp, Homo Sapiens
  misc_feature (25)..(25): n is a, c, g, or t
  misc_feature (45)..(45): n is a, c, g, or t
  misc_feature (55)..(55): n is a, c, g, or t
  misc_feature (73)..(73): n is a, c, g, or t
  misc_feature (91)..(91): n is a, c, g, or t
  misc_feature (109)..(109): n is a, c, g, or t
  misc_feature (137)..(137): n is a, c, g, or t
gatacccaaacattcgggaaaagcnccccattcagcatccttggnaactaacagncttggtaagttatttgcnaaaagcaggcgtctgtcntcaatattgcccatcagnttatcctataaaggttgcaaaacttcgnaaatcacctggcagccatcccaatatctctacctagacacacacaggataatacattcagatttcctctggccaattcagaagtgaatctggtaataaacagtctcatcgacaggctctttggtcttgatttacagacactgtgaaacacttagaaatcaaacccacgtcatccttgagagcagacggccgttagcaaaggggagatgtacatttgatcaaaaatgtacaaaatttataacagtgacattttcaatattaggccacatgatttattcagtagtttttatgttcccaaattacaatttatgtctattcataagactacaaaagttaccattagaattgtctgtgcttataaaat

SEQ ID NO: 254750 - DNA, 3266 bp, Homo Sapiens
ctaaagagattgagagtttgaaagtatctatatcccagctaacaagacaagtaacagccttgcaagaagaaggtactttaggactctatcatgcccagttaaaagtaaaagaagaagaggtacacaggttaagtgctttgttttcttcctctcaaaagagaattgcagaactggaagaagaattggtttgtgttcaaaaggaagctgccaagaaggtaggtgaaattgaagataaactgaagaaagaattaaagcatcttcatcatgatgcagggataatgagaaatgaaactgaaacagcagaagagagagtggcagagctagcaagagatttggtggagatggaacagaaattactcatggtcaccaaagaaaataaaggtctcacagcacaaattcagtcttttggaaggtctatgagttccttgcaaaatagtagagatcatgccaatgaggaacttgatgaactgaaaaggaaatatgatgccagtctgaaggaattggcacagttgaaagaacagggactcttaaacagagagagagatgctcttctttctgaaaccgccttttcaatgaactccactgaggagaatagcttgtctcaccttgagaaacttaaccaacagctcctatccaaagatgagcaattgcttcacttgtcctcacaactagaagattcttataaccaagtgcagtccttttccaaggctatggccagtctgcagaatgagagagatcacctgtggaatgagctggagaaatttcgaaagtcagaggaagggaagcagaggtctgcagctcagccttccaccagcccagctgaagtacagagtttaaaaaaagctatgtcttcactccaaaatgacagagacagactactgaaggaattgaagaatctgcagcagcaatacttacagattaatcaagagatcactgagttacatccactgaaggctcaacttcaggagtatcaagataagacaaaagcatttcagattatgcaagaagagctcaggcaggaaaacctctcctggcagcatgagctgcatcagctcagggatggagaagagttcctgggaaatacatgagaggagaatgaaggaacagtaccttatggctatctcagataaagatcagcagctcagtcatctgcagaatcttataagggaattgaggtcttcttcctcccagactcagcctctcaaagtgcaataccaaagacaggcatccccagagacatcagcttccccagatgggtcacaaaatctggtttatgagacagaacttctcaggacccagctcaatgacagcttaaaggaaattcaccaaaaggagttaagaattcagcaactgaacagcaacttctctcagctactggaagagaaaaacaccctttccattcagctctgcgataccagtcagagtcttcgtgagaaccagcagcactatggtgaccttttaaatcactgtgcagtcttggagaagcaggttcaagagctgcaggcggggccactaaatatagatgttgctccaggagctccccaggaaaagaatggagttcacagaaagagtgaccctgaggaactaagggaaccgcagcaaagcttttctgaagctcagcagcagctatgcaacaccagacaggaagtgaatgaattaaggaagctgctggaagaagaacgagaccaaagagtggctgctgagaatgctctctctgtggccgaggagcagatcagacggttagagcacagtgaatgggggactcttcccggactcctatcattggctcccgtggcactcaggagcaggcactggtaatagatcttacaagcaacagttgtcgaaagacccggagtggcgttggatggaagcgagtcctgcgttcactctgtcattcacggacccgagtgccacttctagcagccatctactttctaatgattcatgtcctgctcattctgtgttttacgggccatctatagacttagttgttactctttggaccactcccttcaaaacttggaattctctcacctctaacatcagaacatcaattccagtggaacagtcttcccatttacaggtcttctctccaactcttcacggaaagtgcctgcaaaaacagaggtggatacgaggacaggttggagctgcagggactggcgagtctgctttcttctactgccctgagcctgaacgcttctgcttaatctgagaatcacatttggtttgttgagcctaatatttgttgagattttgcaggaccctgatcttttgtggtcctgtaaaagatactgaggaatgtctttcagccaagccaagaggatggtttcaataaacctaataatctgaagttcagtatcattttgattgataactttctttgccttgtttgcctgtattttctcctgtttcagggggaaggtggctctgcattaaacagagttcagggaaatgaacatgtcacctcataggacatctgatttaggtctcttgcagaatagggtggtgaaagctgaaggaactccctaaggggttttagctgttagatcacatgggaggacagcatcttcttccctgccaatttcagatataattggagggagaatttcaggtcttagactataaggatagaatccctttgcttttgcccttgatcacatgtatactaaggtattaagtggcccaagtctttcctttcaccaaagggcagggagaagtgtctatggacagcagggttccaattcttgtcattccaggaatatctgaatattcctggaatgtggaccctgagacagtgctcaggggccactgggagccaatattaggcattgactctcagccaggagtctgactggtctaacaccacactgcaactcctgacctcttgaagtactaagctactttgctgttagtgacagttattacagtttctcagccccattgtctctgccctctgtggcaatggaaggagaatatagagaagacaaaattaaatatagatagacctgagaaggacagccaggatagaattccatttgtgcctattccctgcctcccctcccctcccccatcctaccagttggttattttctcattgcatacatgatgtgttcactgcctagcctctccctaaagaagagagaagacaagtgggctgactgatctgctctaaatctactgtggtgattaaatcttggttacaacatcctgggaagtttcctgaacaactgtaaaataataaaattattttcagaatgaaaaaa

SEQ ID NO: 254751 - DNA, 591 bp, Homo Sapiens
  misc_feature (88)..(88): n is a, c, g, or t
  misc_feature (240)..(250): n is a, c, g, or t
gtactggtgactgtaaagaaaggtatatcagaaagacctgtctgatgtagaaaaatgaatattatacttcacggtgccccagaaatgnaagagatcagtgcaggtgaagatttaagcatctcaattgtagattagcacgtattgagaaattaatctgcccactgaataatacaagaaaaaattgtgaccccagaagaattagcatcacaggaagatcacagaatgaaatacagattctgnnnnnnnnnnncttgcgcaaacttaaaattcacaacctatttcaagatatttctcatcggcaaccttataactatgtagcataaaatttattttatacatcaacaaggatcagtttcactcatgattatttttcattaactgattttcttacactctaatattgtatttatttcctgaggcctattatgtagacttattccaaagaagaacaacagtgctgaggagttgttcatagttgcttaaggacaaagcactgtgctaaatattgtggaattattatatggtgccccacacacagaatccctggaaattaatttagacaggcaagaattagtttgattttcatgtgtg

SEQ ID NO: 254752 - DNA, 377 bp, Homo Sapiens
cgatgggagagatagaccgcatctaccaaggtggaaggcggggaggatgctgtctggaaagaatgctagatatgtgtgcatgtgtgtggcagaaggctctgggctcataaactgtctggctacagggaaggctggacctgacctgaccacaggctcttgaagtccccatggtcttgctgacagaggcccctagagtaaaaggagcaggctggaattgttcaggaaaatgttcttcccaggctggggtggccaagagaccattcatttaatgcctgatggagaagagccaagcaggtagatgtcctcatctgtgccctggttgagatgcttcaccaaattcttctcatagagcagcgggtggtaggcacccatcgtgc

SEQ ID NO: 254753 - DNA, 563 bp, Homo Sapiens
gccacacaccccaagcatcaggagaggtgccgggaggagatccacagcctcatgggtaatggagcctccatcacctggaaccacctggaccagatgccctacaccaccatgtgcattaaggaggcactgaggctctacccaccggtgccaggcattggcagagagctcagcactcccgtcaccttccctgatgggcgctccttgcccaaaggtatcatgggcctcctctccatttatggccttcaccacaacccaaaagtgtggcccaacccagaggtgtttgaccctttccgttttgcaccgggttctgctcaacacagccacgctttcctgcccttctcaggaggatcaaggaaatgcaatgggaaacaatttgccatgaacgagctgaaggtggccacggccctgaccctgctccgctttgagctgctgcctgatcccaccaggatccccatacccattgcacgacttgtgttgaaatccagaccagctttgagggccttcacctgccgtgctgtgttcctgacccccgcttctgtgcccttcctgtctgcccatatcct

SEQ ID NO: 254754 - DNA, 1853 bp, Homo Sapiens
  misc_feature (186)..(186): n is a, c, g, or t
  misc_feature (1204)..(1204): n is a, c, g, or t
gggatgggcactcagagatccagcaggtgctgcaccatgagtgtctctgtgctgagccccagcagactcactgaggtgatgtctctgagaatcctccaagcggcctccctgctcattctgcttctgctgctgatcaaggcagttcagctctacctgcacaggcagtggctgctcaaagccctccancagttcccgtgccctccctcccactggctcttcgggcacatccaggagctccaacaggaccaggagctacaacggattcagaaatgggtggagacattcccaagtgcctgtcctcattggctatggggaggcaaagttcgtgtccagctctatgaccctgactatatgaaggtgattctggggagatcagacccgaaatcccatggttcctacagattcctggctccatggattgggtacggcttgctcctgttgaatgggcagacatggttccagcatcgacggatgctgaccccagccttccactatgacatcctgaagccctatgtggggctcatggcagactctgtacgagtgatgctggacaaatgggaagagctccttggccaggattcccctctggaggtctttcagcacgtctccttgatgaccctggacaccatcatgaagtgtgccttcagccatcagggcagcatccaggtggacagaccaagtgatccaactgaggaaggctcaactacagaaggagggggagctggagaagatcaagaggaagaggcatttggattttctggatatcctcctcttggccaaagggcccctggtctgcccaggccttgctggtgttcaggatggaattgtttcaggaaccacctggaccagatgccctacaccaccatgtgcattaaggaggcactgaggctctacccaccggtgccaggcattggcagagagctcagcactcccgtcaccttccctgatgggcgctccttgcccaaaggtatcatggtcctcctctccatttatggccttcaccacaacccaaaagtgtggcccaacccagaggtgtttgaccctttccgttttgcaccgggttctgctcaacacagccacgctttcctgcccttctcaggaggatcaaggaactgcattgggaaacaatttgccatgaacgagctgaaggtggccacggccctgaccctgctccgctttgagctgctgcctgatcccaccaggnatccccatccccattgcacgacttgtgttgaaatccaaaaatggaatccacctgcgtctcaggaggctccctaacccttgtgaagacaaggaccagctttgagggtctccacctgccgtcctgtcttcctgacccccgcttctgtccccttcctgtctgcccatatcctgttttctgtctgcccaccttcccttcttcccacctgcctgctgtcccccagtctgcctgcccttctctctctcacctttctccaggctccctacctgcttgtctacctgtctcctacccacctgtatctcttgttgggagaaaagctgagtgttgggagaagctgaggccgagcttgcatgtctgacataatgtaaaagagtcttgaatcatgtccaggatccagggtctaaaaccccttgtggcctttggaacaccaagctctgtgctgaagggtggaaggctaccctgacgcaccataatctaagcccggggcataaaacccctcgtggcttggatagaatccagggctcgtggctctggaatgtgtctggacttgctggctccttgctccttgctctcccaggatcaattgtatcttgagttaaaagaacctgctctccattatctcaagtaacagagcagatgctaaaccgtcaag

SEQ ID NO: 254755 - DNA, 748 bp, Homo Sapiens
tcttcaaagggctaccttaacctctcccttatatggcttgaaaggtaggacttgcaggtccatctgtattataaacagatgcaaagatttcaatgattcatctctatgacagactagtgaattaaatagggaaggtagtgtgctgcattgaggatgtgtggggagagagaaatctacagtttactattcctgataactgagaaaagcaaacagctgaagttgaatttactggagaatatctaattttgagaattcatatccttaaagtgaggaaaatacatgaatatactgaagtttggaacatgcactgacagtgaattcaggctgcccatttgaagaagcagagggagcaaagtctccatggggtgctctgaatgccaccttccttttgtacacagagacgcccacaccaggtgcctgactttccccacaaataccaatatttaagagcacacctgaagatgcccacatatgaacatcgggctcacaaagatcagagggttgaccagagacttccctcatttctctattccaattaccacacaggacgtctcaccttgatcctcctgagaagggcaggaaagcgtggctgtgttgagcagaacccggtgcaaaacgggaagggtcaaacacctctgggttgggccacacttttgggttgtggtgaaggccataaatggagaggaggaccatgatacctttgggcaaggagcgcccatcagggaaggtgacgggagtgctgagctct

SEQ ID NO: 254756 - DNA, 511 bp, Homo Sapiens
  misc_feature (47)..(47): n is a, c, g, or t
  misc_feature (77)..(77): n is a, c, g, or t
  misc_feature (136)..(136): n is a, c, g, or t
gaaaaccccaactgtcccaaacaaaaaatgccaaaactccctcccanatccccttgtgcctgaaaggttcccaaaanatggggaaggaaaaaagggcccttgccaatccaccccatgaaacctcctaatcccctanggtgggggaaacaaaagcgtggaataatgaacctgaatgccccgggtgttcctccctaccttaatacaactcctggggaaccctcctactcctcacagcaatgacctgaagagtgttgttcccatgagtcctatgtctatgtctgcctgtgggacacagggttgagagtggagttggtgagagtgtgtgctgtgagtgggtgtggggagaggagagagacatggactcaccagcatcactcgtacagagtctgccatgagccccacatagggcttcaggatgtcatagtggaaggctggggtcagcatccgtcgatgctggaaccatgtctgcccattcaacaggagcaagccgtaccctaagagagacatgaat

SEQ ID NO: 254757 - DNA, 631 bp, Homo Sapiens
gcactcagagatccagcaggtgctgcaccatgagtgtctctgtgctgagccccagcagactcctgggtgatgtctctggaatcctccaagcggcctccctgctcattctgcttctgctgctgatcaaggcagttcagctctacctgcacaggcagtggctgctcaaagccctccagcagttcccgtgccctccctcccactggctcttcgggcacatccaggagctccaacaggaccaggagctacaacggattcagaaatgggtggagacattcccaagtgcctgtcctcaattggcttatggggaggcaaagttcgtgtccagctctatgaccctacctgcttgtctacctgtctcctacccacctgtatctcttgttgggagcactttagaagggtaaacctcctaagtctttgagaagataaggcttggctactgttaacatatataaatcaataatagaaatcaaatacagtaaactagcatatagtctacgaatagaatgggagaatagtaaagctgtaggttgaactgatttgaaaacaggaaagaggaactattggcgttgataaaattaaatcttcgctcacccagttttggtaaataaaagtcgtaaaagtgagagatcac

SEQ ID NO: 254758 - DNA, 1325 bp, Homo Sapiens
tctggctccaccagcagcaagcaggatgtctcaggggttgaggatactaccatcagcaggtcttggttgaatacaggctagcctccctgagatttgacttccttcactatgaaatggggataaagaatagtttctatttcatagaatcattggaaggactaattaaggtaatttgtgattgttttgtgctcttgtagaaagacctggacaaagactctccttgtgtccttctgtcagatgaagtctgtcactctgctagtaaaggggcccttgtcagactgaataacaatgcaagcctgaatgtttacattagtgttggtcaaagtcagggttcctgctccatctatatctaaatacactagggtgcttgttaacaaatgcacatttctggactcaaacccagaattatggagtcagaaattctaagggcacggccctggaatctgcattttaagtatgctccttgggtatgctgtttctgcacaaatgaagtttgagaaccactggtctagataattcaatctgaagagcttggcttactcaggtatcaaggcctcagactccactcacttttctggggcctgttggggtattttgacaatgcatcagaaatagcattaaatctgttgcctggctggctcagctggactgttaggcctgagaaccacagggagcttcccacctggtcttgctgctttagatgattggagcatgcaggtttagggagctgaaaggacacatgccaggcccacagcagtgagcaacagaacagaccaatggaaccaggttgcctgagacagcgccctctaccaagcattttctttggttttgggactggcagtccaaaccgctaaaccagtctgtgtaggtacagtatacacacagctgcagcatgaccccacttcctaggatggtagaggggaaggcaggggctcccagccacacagccactgcctccaacgctctctgtccctagctccactgcatgcggttagctggagtctggaaatggctgggggtgtctggttctccagaggagccctgcccagctgccgggtgtgaggaggttagagaaccaacctcattctcgcagtgctctggcagttcatctcttgcaaatactcttaaaagggagagcctggtcaaggtcactatgatttaaattcctcatctttgaattattcagccaaaagagcctggagattaaccaaaccaacttaggccttcttttaaagtcaagaacagtagccaattttactaaatcgaagtattgaaagttacttaattcctctgtcaaaatttaaatgatggcgaccattttggag

SEQ ID NO: 254759 - DNA, 559 bp, Homo Sapiens
  misc_feature (190)..(237): n is a, c, g, or t
agtgtatttagatatagatggagcaggaaccctgactttgaccaacactaatgtaaacattcaggcttgcattgttattcagtctgacaagggcccctttactagcagagtgacagacttcatctgacagaaggacacaaggagagtctttgtccaggtctttctacaagagcacaaaacaatgatgatnnnnnnnnnnnnnnnnnnnnnnnnnnnnnnnnnnnnnnnnnnnnnnnncacaaattaccttaattagtccttccaatgattctatgaaatagaaactattctttatccccatttcatagtgaaggaagtcaaatctcagggaggctagcctgtattcaaccaagacctgctgatggtagtatcctcaacccctgagacatcctgcttgctgctggtggagccagaagggaagaccagtatggagcatgcccaaggctggagcagcaagccacatcagtctgttaacacggacattcaactgtagagattgatcacatttaattttaaaataattcgacaacaaatttcatgatcgcttggccctgagtta

SEQ ID NO: 254760 - DNA, 895 bp, Homo Sapiens
gagttctttgtaagtgtttgatatgatggctgcttagttatctccctggtcgtgaaatcatagctttagattctgggtctagaatgggaggacccacggagaccactgggttcaagtctcttgttttagaagtgaagaaactggggcccatagagaagtgactggcctaggggcacagggtgaatttttggcacttagtgacacctcttaacccatggcttgtaaaaaggcacaaacaatgcctttgatttctgagtatctcgcaaatggcatggcttgatgcacctaccttgttctgttttacatgcttgttttggggtcatctttaacaaactctactttcattcctccgtgccagttttcttccctgaccatggtcttgctttaaacactgacttggacagagggatttgaaggccactccaagagtgggctgcatcctcagcctctcccctgctccacacactgcatctcaccaaacggatgtgtttaaaatgaggtgcgcttatggagagaaagtaactcagggccaagcgatcatgaaatttgttgtcgaattattttaaaattaaatgtgatcaatctctacagttgaatgtcagtgttaacagactgatgtggcttgctgctccagccttgggcatgctccatactggtcttcccttctggctccaccagcagcaagcaggatgtctcaggggttgaggatactaccatcagcaggtcttggttgaatacaggctagcctccctgagatttgacttccttcactatgaaatggggataaagaatagtttctatttcatagaatcattggaaggactaattaaggtaatttgtgaaaatgcttagcctagtgcatagtaagtgctcaataaatattagttatatcatc

SEQ ID NO: 254761 - DNA, 374 bp, Homo Sapiens
cctcagtccccatagcagatcctgctgcctgcccagggacccactgtgagacatgcccatcagtgacaccagaggtaggcctgaatatttcgatctcagttgtagaccttgaagcagccctgcaacttggtttctgcccctctcagctgcagactggagcagtactgcctgtccaaagtctcacccagtggtccagcaagagccttcctggggacctggaggagtcatacccattcacctgggcaacaggcctattcctgtgcacctgaagtagaccatcagcccagtaccagccctttggaccggtcgtggagacagtagagaccaccctgggcccagacaggatccatgcctgctagggcccctgctactgg

SEQ ID NO: 254762 - DNA, 375 bp, Homo Sapiens
gaaaccaggtaagacaaccctcagtgatcaaaatcaaagtgggttggaattagcttgttagggatttgttctgtaccatacaaagtggacttaaaagactgtatctgactacatacacttattatcagaaagtaaatacttctgtttcagcataaacattcacatgtctatgggtttcaatacaaattgaattatagtagagccaatcaaaaagtttaaaagccactgttctaagctacctaattatctaactaacttcagtttataaatgggaacttcttggcattaaaagaacagcaatgattttcggtaagcagaggggtaaaggaaacaacggcaagaagaggcagcaactgatcacaagcttcgctgccc

SEQ ID NO: 254763 - DNA, 745 bp, Homo Sapiens
ctattagtaccccaacaaacagcgggaaatgctgaactaatcaaatgtactgaagtgtgttctgaaaacagaacatattactagttgagagatgtgccttcgtgaaacctggaagctggaagacagcacagcagtgttttccatgaggcttttccaaaagagaatacataatctggtagctacaaaggtgtttcccacttcagtttctctaatatctgggggagaaagtataaacacatattcatttctcaatataaatatatcaatagccacttctcagtatggatggccaattcggtttgatcagaatgagataccctggacggggaagacaacactctgggcatcaaaaatatccatcttctacttgctgaagtaacaaattaacgtttttttaaagtcactaacaaatctggttgatatgataactgagtgggactgataaatgattcttagaccagcaaaagtggggatcatatgctgaaatggggcaactcatgagtagtgccttctaaatggtttgaaaccatggtaagacaacccttagtgatcattaaatcaatttagtgggttggaattagcttggtagggatttgttctgtccatacaaagtggacttaaaagactgtatctgactacatacacttattatcagaaagtaaatacttttggtttagcataaacattcacatgtctatgggtttcaatacaaatggaatttttatagtagagccaatcaaaagtt

SEQ ID NO: 254764 - DNA, 361 bp, Homo Sapiens
gcaggattcggcacgagcaccagcctttgctccttctcccagtgggagtggagagaactgactgctggagtggagacagtcaaggctgtccttctgagggagcacagcacagggtctggtgtcccagggaggcaatctgaaattcaagccaggcctccccagcggagaggacacacccctcaccatgcagagtgacgtttagtaaactctcaaaagagagcacagagccccactcctccagccgacccatactctgcctccccactccagaccagtgaacaaggtggattgcccttaagccagctcagaggcaaagtccaaagacctcaggtgagtcaaacaataaaaacacagaattaag

SEQ ID NO: 254765 - DNA, 504 bp, Homo Sapiens
ccagaccaacacctggctctctaaaacctgtccaaaatcaaagtgaaaggcagtaaatgcaggactgtggatcatgtcactgcagctgacaatgattaacaataggagacatgcaacccccattaaggttaaaagtccaaaactagtcacacgcatctctttattggggaaaagtgagactattatgcattcttggtaggtttgcaaccttgcatgaagagcacccattgcatttctttcatctttcagaaagcaccggtatctgttccaagggcctaacagtacgaaaatggtttgtaacaaaattatgaaatacaatgcaagcacctcggtatagcattattactgaaaccacttaattcccagctttttgagttttttaaaaaaacccactgcactaagattcacaattcattgctacatacaaattaaagctagtaagaacacactaacgtcacaagtttctcattctaaagtgcaaaagcctaatcatctgaaagtgaa

SEQ ID NO: 254766 - DNA, 910 bp, Homo Sapiens
gtcacggcgcgctcacaatggagctctcggagtctgtgcagaaaggcttccagatgctggcggatccccgctccttcgactccaacgccttcacgcttctcctccgggcggcattccagagtctgctggacgcccaggcggacgaggccgtgttagatcatccagacttgaaacatatcgacccagtggttttaaaacattgtcatgcagcagctgcaacttacatactagaggcaggaaagcaccgagctgacaagtcaactctaagcacttatctagaagactgtaaatttgacagagagcgaatagaactgttttgcacggaatatcagaataataagaattccctagaaatcctactgggaagtataggcagatctctccctcatataacggatgtttcttggcgcttggaatatcagataaagaccaatcaacttcataggatgtacagacctgcatatttggtgaccttaagtgtacagaacactgattccccatcctatccagagattagttttagttgcagcatggaacaattacaggacttggtggggaaacttaaagatgcttcgaaaagcctggaaagagcaactcagttgtaacttggggaagttaacgatccgcccgagtgcagaggaaaaccagaaacgccttgccttcagctgaaccaccgtttgtgcgagctggatgtccttttcagtagaaaagaattttccttttgaatttataccattcatcaattttgacactttaaaaacgtgtgaaagggttaagagggaaagatactgcccaagtatttgaatcgtttagtagtaactgtccatttatcctattttgatctttttcaagtcttctgaaaggaagtagacagtattacaccctgaataaataaggtgttgttttccac

SEQ ID NO: 254767 - DNA, 644 bp, Homo Sapiens
gtgcgtgtcgaaggtcacggcgcgctcacaatggagctctcggagtctgtgcagaaaggcttccagatgctggcggatccccgctccttcgactccaacgccttcacgcttctcctccgggcggcattccagagtctgctggacgcccaggcggacgaggccgtgttagatcatccagacttgaaacatatcgacccagtggttttaaaacattgtcatgcagcagctgcaacttacatactagaggcaggaaagcaccgagctgacaagtcaactctaagcacttatctagaagactgtaaatttgacagagagcgaatagaactgttttgcacggaatatcagaataataagaattccctagaaatcctactgggaaggtaggtactgtataaggtgtcaagctgaggcacttttcacttgcaggtatgaatggagagtgttggtgtgaaacaagatcttcgggatcttgacccaaagaaaaggagccaaagggcatgtcaagcaattgaagttaagctcatgtttttaaagatcgtttattgagatgattttgaaatgctcctttaccattcataatttaaaaataaagtttaacaatggtttaaattcaaaatggattaaaatggagttgggggtggaaa

SEQ ID NO: 254768 - DNA, 589 bp, Homo Sapiens
atgtttcagtgtgagggcaaataaccgatttgaacatgaggtatttccgaggaaacgctttttttgcccgatagtagtttgtcaaaagttaaaatcttgttgaattttaaacttgtttggaaggtgtgtcctgattttttttcttgcatctttcttgagcttggatacttctttccatgttttatcctaaaaacgtggtattgtatacacgtcttttaggacttggtggggaaacttaaagatgcttcgaaaagcctggaaagagcaactcagttgtaacttggggaagttaacgatccgcccgagtgcagaggaaaaccagaaacgccttgccttcagctgaaccaccgtttgtgcgagctggatgtccttttcagtagaaaagaattttccttttgaatttataccattcatcaattttgacactttaaaaacgtgtgaaagggttaagaggggaaagatactgcccaagtatttgaatcgtttagtagtaactgtccatttatcctattttgatctttttcaagtcttctgaaaggaagtagacagtattacaccctgaataaataaggtgttgttttccacaaaa

SEQ ID NO: 254769 - DNA, 933 bp, Homo Sapiens
  misc_feature (389)..(420): n is a, c, g, or t
gggggccccaccaacacacaaggccgtgagctgcacgcaggaacatgggctgcactcacgacaacattgaaaaaatatacattatatatgtacacccggggcccccacgtcccctcccgtcaccgcagcctggccacaccaggtcacggaggaggggccggggctgcaggacctcaggactgcaagggcaggaagggaaacaggacaagaaaggaaggaagttggaaaggagggagaaatggggtccccagactgaaatggaaatgaggtggggcgatcataagagaagcagggacgatggtccagctgagggagccctgcagagggggaaaagcttcccatggacaggagagagaagggaaggggagaggagagggtttccttcaatnnnnnnnnnnnnnnnnnnnnnnnnnnnnnnnnttgcaatcgtcaccctctccccaacacagtgagtgctaagggggcagctgccattgggggtagaaaggcagctgaagtccagcccactttctaacccagccagccccagtgcaaggggcacaccaggagcatgacagcccagaagtgagggatggggggccgggggaggggcagggcggactccagagggcccgctggggttttgaaatgaaaggaggactggttctgaagcctctctccctcttggtctctgtgttcccagaaagtccttctcccatgtctggagtgtctgtttcaccagggcagaattccccctctgcgtggggagaggtgtaggccttagtagcggtgtgggggggtctcgatgatgcgtctctcgtcgctgctgggggaatcggccacctccgagtcactgctgtcctcatcctcctgctggcccccaacagcccccgtcacacaggactgccgattctggtaggactccatggggttcacaatgatggtgagagctga

SEQ ID NO: 254770 - DNA, 489 bp, Homo Sapiens
ggggccggaggtgtcgttggtgtgttgcgcgactggccttgagggagagctggggcctgctcccggagagatacggctatgtcgatcgaaatcgaatcttcggatgtgatccgccttattatgcagtacttgaaggagaacagtttacatcgggcgttagccaccttgcaggaggagactactgtgtctctgaatactgtggacagcattgagagttttgtggctgacattaacagtggccattgggatactgtgttgcaggctatacagtctctgaaattgccagacaaaaccctcattgacctctatgaacaggttgttctggaattgatagagctccgtgaattgggtgctgccaggtcacttttgagacagactgatcccatgatcatgttaaaacaaacacagccagagcgatatattcatctggagaaccttttggccaggtcttactttgatcctcgtgaggcatacccagatggaagtagc

SEQ ID NO: 254771 - DNA, 1554 bp, Homo Sapiens
  misc_feature (1299)..(1299): n is a, c, g, or t
  misc_feature (1422)..(1422): n is a, c, g, or t
  misc_feature (1534)..(1534): n is a, c, g, or t
tcccgggatctgccagcaccctgtggggcccagactacaggctgatggcggaggcttcgagtgacccgggtgccgaggagcgggaagagttgctggggcccactgctcagtggagcgtggaggacgaggaggaggccgtccacgagcaatgccagcatgagagagacaggcagcttcaggcccaggacgaggagggaggcggccatgtccccgagcggccgaagcaggagatgctcctcagcctgaagccctcggaggcccctgaactggatgaggacgagggctttggcgactggtcccagaggccagagcagcggcagcagcacgagggggcgcagggcgccttggacagcggagagcccccccagtgcaggagtcctgagggggagcaagaggacaggcccggcctgcatgcctacgaaaaggaggacagtgatgaagtccacctggaggagttgagtctgagcaaggaggggccaggcccagaggacactgtccaggacaacctgggggccgcagggctgaggaggaacaggaggagcaccagaaatgtcagcagcccaggacacccagccccttggtcttggaggggaccatcgaacagagctcgcctcccctgagccctaccaccaaactcatcgacaggaccgagtccctaaaccgctccatagagaagagtaacagtgtgaagaaatcccagccagacttgcccatctccaagattgatcagtggctggaacaatacacccaggccatcgagaccgctggccggacccccaagctagcccgccaggcctccatagagctgcccagcatggctgtggccagtaccaagagtcggtgggagacgggtgaggtacaggctcagtctgcggccaagactccgtcctgcaaggatattgtggctggagacatgagcaagaaaagctctgggagcaaagggagctccaagactcatcaacaattaagagcaccccatctgggaagaggtataagtttgtggccaccgggcatgggaagtatgagaaggtgcttgtggaagggggcccggctccctaggcgtcccatctcgcttcctgggtctgcaggtccagccggctggcaccctccatgtacccaggggagattccagccagacacccgccccccggccctggctaaagaagttgcttcctgttgccagcatgacctaccctcgcctctttgatgccatccgctgccacctccttttgctccctggaccctttagcctctctgcccttccactctctgaccaccgcccccgccctccccacccantccgcttcttgttacttgggggaggaaagaaactcctgatcattggccaaagggacttacccctggagaggccaagtgccttctaggaagttaggaggtttgaggcacagcctgtgcagagangggtgggtcacccccccagatccaaggggaaactgcaggtcaagggctgataacggccatgcaggatgcttgatgctgcgtcccccgctgcttgccgccccccaccccgccnttttgtataataaagctccc

SEQ ID NO: 254772 - DNA, 564 bp, Homo Sapiens
ggggcacagcgcgggcgcaggcgccgagaggcgcacgggagacctcaggcccagactccactccccagctgtgaaaggactgctggccagacccccaagctagcccgccaggcctccatagagctgcccagcatggctgcgtccagtaccaagagttggtgggagacgggtgaagtacaggctcagtctgcggccaagactccatcctgcaagactctttggcagttgcactgggtactggctgagttctggaaaaacaggaatgtgaagcagagtgctgcaggatctccttgtcagggagcaccctaagaactggcatgactctacaccctctctccttctgcaatgacctcatgtcaagaaggcagacctgcagaaatgaatgtgcctggatacctgagtcaccaggtgaaggaaactcccattgacatgcatcacactccacatatgaaacccttctttttctgcactgtcactgaggttagggattattactcactgcaacttagcctagcattaagttgcttgactaatacaagtttcaataaatgtcgcttcatttcc

SEQ ID NO: 254773 - DNA, 582 bp, Homo Sapiens
atctcactatagtgtgtttcctaatgtctctgtcagataattccactgtgcatgttattcactgcttggtgtccactgaatggccatttgccagacaagtggagatttttgcagctcatccttgaattctcagtaattccgatatgtaccctcaacatgtgaatgctatcttatgagactctgtgttatttgtatccaacacaagatgtttattatttatttggctttctgtgaactgaggtcttaatatcagctcattttaaaagtctttgcagtggtattcggatctatcctgtgtgtgcctatgagattgggtgcagtgtatcctgttagctccattctcagggcgtttgaatgtgaattaggaccagcgcaatgaatgctcaagttggggttgggcgttagaattcataaaagtctttatatgctcagattctgcagctccatcctcttcatgattgtgatcgtaaggacagtggaattttgcagttgtctataccttatcttgaagtagaactaaattggtacatttgaagaatgtactctataaattacagatatatagatttatttgaggtgctt

SEQ ID NO: 254774 - DNA, 732 bp, Homo Sapiens
cgggcctggactgccgtgtgtgccccacctgccagcaggtgctcgcgcatggcgatgccagcagccaccaggcgctgcatgctgcccgggacgacgacttcccctccctgcaagccatcgccaggatcatcacgtagctcccgccagcgtggccagagctgtcgcaccgtgagcgtccttcctccttcctctccgggctgccaggcagccaggtaaggcctggtgaggccacttggcctcttggttggccaggcccaccaggaagtcaccaggacagtccacccgccctgttggcacactcaagcgggagtccacccctgcctcagtggtgggccagtctcggtttgcattcttgtgcttttgggaggtgccaggggagggaagggctgggatgctgggacctgttgttgctggcaaagccagaggtcacagtggcctgatctgggccctcccaaagctgagggctgcacgccgtggggcctcagagctgaaagctgcggcgccaccggtgccagagtcagatgtcacagatgtgttgtgtaaacagatggctgtttcgtgcttcaagaatgttcaggattaaaagcagacaagaaattgtgctacttgaagttgaatctttttatgagacaagctgaatctgggatctcaaattgcctctgaccttttataagacagtttatcttcaaatacatttattttgcaataccacgcacaagatacacatagggc

SEQ ID NO: 254775 - DNA, 1398 bp, Homo Sapiens
  misc_feature (1364)..(1364): n is a, c, g, or t
  misc_feature (1389)..(1389): n is a, c, g, or t
ctgggggcagtgtcctcgcgggccagcgacgggcaggacgccccgttcgcctagcgcgtgctcaggagttggtgtcctgcctgcgctcaggatgagggggaatctggccctggtgggcgttctaatcagcctggccttcctgtcactgctgccatctggacatcctcagccggctggcgatgacgcctgctctgtgcagatcctcgtccctggcctcaaaggggatgcgggagagaagggagacaaaggcgcccccggacggcctggaagagtcggccccacgggagaaaaaggagacatgggggacaaaggacagaaaggcagtgtgggtcgtcatggaaaaattggtcccattggctctaaaggtgagaaaggagattccggtgacataggaccccctggtcctaatggagaaccaggcctcccatgtgagtgcagccagctgcgcaaggccatcggggagatggacaaccaggtctctcagctgaccagcgagctcaagttcatcaagaatgctgtcgccgctgtgcgcgagacggagagcaagatctacctgctggtgaaggaggagaagcgctacgcggacgcccagctgtcctgccagggccgcgggggcacgctgagcatgcccaaggacgaggctgccaatggcctgatggccgcatacctggcgcaagccggcctggcccgtgtcttcatcggcatcaacgacctggagaaggagggcgccttcgtgtactctgaccactcccccatgcggaccttcaacaagtggcgcagcggtgagcccaacaatgcctacgacgaggaggactgcgtggagatggtggcctcgggcggctggaacgacgtggcctgccacaccaccatgtacttcatgtgtgagtttgacaaggagaacatgtgagcctcaggctggggctgcccattgggggccccacatgtccctgcagggttggcagggacagagcccagaccatggtgccagccagggagctgtccctctgtgaagggtggaggctcactgagtagagggctgttgtctaaactgagaaaatggcctatgcttaagaggaaaatgaaagtgttcctggggtgctgtctctgaagaagcagagtttcattacctgtattgtagccccaatgtcaatatgtaattattacccagaatttgctcttccataaagcttgtgcctttgtccaagctataccaataaaatctttaagtaatgcagtagttaagtccaaatagtggcaatggggtcttgaattactaccttttaatttctatatggaaaagaactcactttgaccaacacttctgtaaattacattacaatataggttccttcacactattatcncatgtaaaaacaattttgctttgcntaacccaga

SEQ ID NO: 254776 - DNA, 990 bp, Homo Sapiens
  misc_feature (12)..(12): n is a, c, g, or t
  misc_feature (105)..(105): n is a, c, g, or t
  misc_feature (112)..(112): n is a, c, g, or t
  misc_feature (485)..(485): n is a, c, g, or t
  misc_feature (736)..(736): n is a, c, g, or t
  misc_feature (802)..(803): n is a, c, g, or t
cgcactcgatcncaggggctctgggggggcatcttggctgcaagaaatgcggagcctggctccctgtcagtaagagcacgccaaaggtcagcaccgcagccatcntgaaggnccgtgggggacctccctcgtgccgaattcggcacgagctagtctcttatgtttcagagaaaatgaagactgcaagcagtggttgttcaactaacctctttttagcgatgacttttaaagaaacttaccttccaggtgtgagcctcaaatggactgaataaccctgagttggttgcagtcccaggagcctgatgttaatgaggctgccaggatgaaatactccagaactgttggggatccaaattcgggtctcaccctagcagaactgatccaagaacgtcacaacttttgaagtcgattggcacagatcaagaccaagatttggccctttgtctgtaataagtagaggaacttggtgtgagttaacttatttnttcccccagccattggtgtctggagttcccatcatcaatagaaggattagagaattctaggaatgatttcttttgatttggcaagggagatatggtcaattaggggaactactggaactgtggctctcactctgtgacagtgtgaccatgtaggtgtgttggaattgggtgaatgactggctgctccttgatatcctagcccttgtgaccatcatttctgaaagcttgtttactgtgaaagattaaaacanaacacatttagaatagtgcaattcgccatatatgacatctcaggatcttctgcttttccttgactnncaaattaaattgcagttcttgaaaatgtatgtatgcccctttgttacagcaacagtaggccttctgtcacaggggttatcttgcctatcttgtcccatatatataagccataaggggatttctatatatagctattggtagactcccaggtaattaccacgggataagaggtatgatccccgctgcg

SEQ ID NO: 254777 - DNA, 1722 bp, Homo Sapiens
  misc_feature (1487)..(1583): n is a, c, g, or t
ccgacggcggccgagacggacatgaagcaatatcaaggctccggcggcgtcgccatggatgtggaacggagtcgcttcccctactgcgtggtgtggacgcccatcccggtgctcacgtggtttttccccatcatcggccacatgggcatctgcacatccacaggagtcattcgggacttcgcgggcccctactttgtctcagaggacaacatggcctttggaaagcctgccaagtactggaagttggaccctgctcaggtctatgctagcgggcccaacgcatgggacacggctgtgcacgacgcctctgaggagtacaagcaccgcatgcacaatctctgctgtgacaactgccactcgcacgtggcattggccctgaatctgatgcgctacaacaacagcaccaactggaatatggtgacgctctgcttcttctgcctgctctacgggaagtacgtcagcgttggggccttcgtgaagacctggctgcccttcatccttctcctgggcatcatcctcaccgtcagcctggtctttaacctccggtgatggctgctcggtggccccacacccaccagggtcccgaggaaacagccgccatcccttttggttccagatttttttctcctcaccccaaaaggcagggttgggcctgctgttgtggaccgggggtcggggctggcaggatggaaggactgaggaccagcatgaagtgggggtttgttgtctccctgcctctcagaagcaccctgtcccctcctccccaggcctgtgactccggccctggaagcccctttgttcttctgttgaaaggctttggcttccctctgtagagctgctcccgccaccacctgctggggtcctgcctcagcccagtgcccagtatggggagaggaggacatttgggctcacctgtcaaggtggccctgggaccagagctggtcccagcatggggtgcaccgggtacacttaacgtgtctctataagccaagttgcttcaggaccttcaccactggcctctagaatggtccagaggggctggctgggtccctttgtcagactcctgccggcagctgccctgggggacatgtgtgcccatctggcatcctccagcccgtgcagtccgctcttcactgttccacggcctcccagtgcctcccagcatgtggacccatctcccccctgcagtttgaggccagagaggttgagtggacctgacaagtgccagagtaaccgtgtagacagaagcagtgtagacagcgctcagccccagccccaggtgtggacctcatgctggtgatggctcccctgggtggcctgccagcacagccagtgccatcagggagctgaaggggctgtcccccacctaactccagctcccccttcacgttgtcaccaaggccctgtgccgcccgcctcgcccccctgctctgtggattcctttgggaagggctccctgggcaggacaataaagagttttgactccnnnnnnnnnnnnnnnnnnnnnnnnnnnnnnnnnnnnnnnnnnnnnnnnnnnnnnnnnnnnnnnnnnnnnnnnnnnnnnnnnnnnnnnnnnnnnnnnntttgtcggccccctcgcccctcgaaaaacctttcaaaacctttcgttgggcgcccggccccattaggaaaggaaaattgggccatacctgttcccaaggaaaacccgtggccagaaaatagggttgggaatcccccccc

SEQ ID NO: 254778 - DNA, 1720 bp, Homo Sapiens
  misc_feature (97)..(141): n is a, c, g, or t
  misc_feature (1039)..(1039): n is a, c, g, or t
  misc_feature (1049)..(1049): n is a, c, g, or t
  misc_feature (1097)..(1097): n is a, c, g, or t
  misc_feature (1156)..(1347): n is a, c, g, or t
gggagttgtgtccagccggtcacggggcggctatggcggccacgttcttcggagaggtggtgaaggcgccgtgccgagctgggactgaggacgaagnnnnnnnnnnnnnnnnnnnnnnnnnnnnnnnnnnnnnnnnnnnnntgcgtctgcagctggcgcggaagagggaagtgcggctccttcgaagacaaacaaaaacatctttggaagtttctttgctagaaaaatatccgtgctccaagtttataattgctataggaaataatgcagtagcatttctgtcatcatttgttatgaattcaggagtctgggaggaagttggttgtgccaaactctggaatgaatggtgtagaacaacagacactacacatctgtcctccacagaggctttttgtgtgttttatcatctaaaatccaatccctcggtttttctctgtcagtgcagttgctatgttgcagaagatcaacagtatcagtggctggaaaaggtttttggctcttgtccaaggaagaacatgcagataactattctcacatgtcgacatgttaccgattataaaacctcagaatccaccggcagccttccttctcctttcctgagagccctaaaaacacagaatttcaaagactcggcgtgttgtccattgctagaacaaccgaatatagtacacgaccttcctgcagcagttctaagctactgtcaagtatggaaaatcccagcaattctgtacttgtgttatactgatgtgatgaaattagacctaatcacagtggaagcttttaagcctatactttctaccagaagcttgaagggtttggttaagaatattccccaaagcactgagatactaaagaaattgatgacaacaaatgagattcagagtaacatttatacatgatcttaaacattgttttgtagtgtatattacttgtccattcctttaaggggagcagcctgcactcttttgtagattacttttgggggatatattttgagaatgatgaaacggaataaaattgtaaaaaactaattgtagtnttaatccctnatttatggtggtattattcacaaccaaaataagccaggcattttcctnttatccactaggtgggagtattgttgtatttgaatattttaaggtactatagttaaatnnnnnnnnnnnnnnnnnnnnnnnnnnnnnnnnnnnnnnnnnnnnnnnnnnnnnnnnnnnnnnnnnnnnnnnnnnnnnnnnnnnnnnnnnnnnnnnnnnnnnnnnnnnnnnnnnnnnnnnnnnnnnnnnnnnnnnnnnnnnnnnnnnnnnnnnnnnnnnnnnnnnnnnnnnnnnnnnnnnnnnnnnnnnnnnncaaagctacagatatcagcagatggtattcatgtggcaaagtgtagttaattaggtgtaactattcattgacctgttggtgattcttaatatgtggaaagtttctggatattttaggagtcctgcagttttttttatcttgtgggtaaaaattgatgacaaagtaacaaaattatatatttactaaaaatgaaacagaaatgtgtatgtcctcactttttagtaatatctgacagatagcctcttcacccagactttcccagggctctctttcaaggctggctctgcgcgtgtcagcagttctcttacagtcatgtgttatcattaggagtgtgaatggaatcatgaacccggagtagccacacaacttcaca

SEQ ID NO: 254779 - DNA, 424 bp, Homo Sapiens
ggcgcggccgcgcgctgcagctcgagttcgggccgcggggggaggctatggagcggcgccggcggtggctcggccggctcaacccctccgccccgcaaccccaccgagcgcggacttccatgatgcggacgtccgcatgggaccgggatcgacaggactggcggacgtacacacttcaggaatcccagccttacggcgtgctcggcgacgcccagaatgcacaatgtcacccggccctcatgtacctcgcatgtgcttgcccaccgacgctcatggatctgcattattgcaccgtgagcctcctgggcttattcgcacgggcctaatcgaacttattattgcttgtcacacatctcatcactcgaactgtacattacacattcactcgctttgtacctatcacaagtgtatctcatatctcctc

SEQ ID NO: 254780 - DNA, 895 bp, Homo Sapiens
ctcagtcatgccagtgcctgctctgtgcctgctgtgggccctggcaatggtgacccggcctgcctcagcggcccccatgggcggcccagaactggcacagcatgaggagctgaccctgctcttccatgggaccctgcagctgggccaggccctcaacggtgtgtacaggaccacggagggacggctgacaaaggccaggaacagcctgggtctctatggccgcacaatagaactcctggggcaggaggtcagccggggccgggatgcagcccaggaacttcgggcaagcctgttggagactcagatggaggaggatattctgcagctgcaggcagaggccacagctgaggtgctgggggaggtggcccaggcacagaaggtgctacgggacagcgtgcagcggctagaagtccagctgaggagcgcctggctgggccctgcctaccgagaatttgaggtcttaaaggctcacgctgacaagcagagccacatcctatgggccctcacaggccacgtgcagcggcagaggcgggagatggtggcacagcagcatcggctgcgacagatccaggagagactccacacagcggcgctcccagcctgaatctgcctggatggaactgaggaccaatcatgctgcaaggaacacttccacgccccgtgaggcccctgtgcagggaggagctgcctgttcactgggatcagccagggcgccgggccccacttctgagcacagagcagagacagacgcaggcggggacaaaggcagaggatgtagccccattggggaggggtggaggaaggacatgtaccctttcatgcctacacacccctcattaaagcaaagtggcggcttcccccaaaaaatccaaccgggcgtgaaagagttagcctc

SEQ ID NO: 254781 - DNA, 803 bp, Homo Sapiens
gaggaattcggcacgagcgtgcccagccaggcctcaatgtttctgtggacaaattcactgctatgtcttctcattttacccaagaccttctgccagagcagggcatacaagatgcattcccaaaaagaatactgagaggatatggaaattgtggccttgataatttatatttaaggaaagactgggaaagtttagatgagtgtaagttgcaaaaagattataatggacttaaccaatgttcatcaactacccatagcaaaatctttcaatataataaatatgttaaaatctttgataacttttcaaatttacatagacgtaatataagtaatactggagagaaacctttcaaatgtcaagaatgtggcaaatcctttcaaatgctctcattcctaactgaacatcagaaaattcacactggaaaaaaattccaaaaatgtggagaatgtggcaaaacctttatccagtgctcacactttactgaacctgagaacattgacactggagagaaaccttacaagtgtcaagaatgtaacaacgtcattaaaacttgctcagtccttactaaaaatagaatttatgccggaggggaacattacagatgtgaagaatttggcaaagtatttaaccagtgctcccaccttactgatcatgagcatggtactgaggaaaaaccctgcaaatatgaagagtgcagcagtgtctttatctcttgctcaagcctttctaatcaacagatgattcttgctggagagaagctctccaaatgtgaaacatggtacaaaggttttaaccacagccca

SEQ ID NO: 254782 - DNA, 644 bp, Homo Sapiens
  misc_feature (211)..(211): n is a, c, g, or t
cccagtacatgctcatgtcagtaaaggtgggagcactggtaaatacgccaaattcttcacatctgtaatgttcccctcggcaataaattctaaagtaaggactgagcaagttttaatgacgttgtaacattcttgacacttgtaaggtttctctccagtgtcaatgtttctcaggttcagtaaagtgtgagcactggataaaggttttgcncacattctccacatttttggaatttttttccagtgtgaattttctgatgttcagttaggaatgagagcatttgaaaggatttgccacattcttgacatttgaaaggtttctctccagtattacttatattacgtctatgtaaatttgaaaagttatcaaagattttaacatatttattatattgaaagattttgctatgggtagttgatgaacattggttaagtccattataatctttttgcaacttacactcatctaaactttcccagtctttccttaaatataaattatcaaggccacaatttccatatcctctcagtattctttttgggaatgcatcttgtatgccctgctctggcagaaggtcttgggtaaaatgagaagacatagcagtgaatttgtccacagaaacattgaggcctggctgggcacg

SEQ ID NO: 254783 - DNA, 640 bp, Homo Sapiens
  misc_feature (600)..(600): n is a, c, g, or t
ggcccccgggagctgtgccctatggagctattgcggccgtgggtggtcgcgggcgatgcggggctgccagctcctcgggcttcgtagctcttggcccggggacctactaagtgctcggctcttgtcccaagagaagcgggcagcggaaacgcactttgggtttgagactgtgtcggaagaggagaaggggggcaaagtctatcaggtgtttgaaagtgtggctaagaagtatgatgtgatgaatgatatgatgagtcttggtatccatcgtgtttggaaggatttgctgctctggaagatgcacccgcttcctgggacccagctgcttgatgttgctggaggcacaggtgacattgcattccggttccttaattatgttcagtcccagcatcagagaaaacagaagaggcagttaagggcccaactgggcgggtctcgtgtcgtggtgtgtgacatcaacaaggagatgctaaaggttggaaagcagaaagccttggctcaaggatacagagctggacttgcatgggtattaggagatgctgaagaactgccctttgatgatgacaagtttgatatttacaccattgcctttgggatccnggaatgtcacacacattgttcaggcactccaggaagctcg

SEQ ID NO: 254784 - DNA, 1235 bp, Homo Sapiens
  misc_feature (984)..(984): n is a, c, g, or t
  misc_feature (994)..(994): n is a, c, g, or t
  misc_feature (1052)..(1052): n is a, c, g, or t
  misc_feature (1080)..(1080): n is a, c, g, or t
  misc_feature (1092)..(1092): n is a, c, g, or t
  misc_feature (1104)..(1104): n is a, c, g, or t
  misc_feature (1137)..(1137): n is a, c, g, or t
  misc_feature (1153)..(1153): n is a, c, g, or t
  misc_feature (1162)..(1162): n is a, c, g, or t
  misc_feature (1175)..(1175): n is a, c, g, or t
  misc_feature (1185)..(1185): n is a, c, g, or t
actcgactaccaagatggcggcccccgggagctgtgccctatggagctattgcggccgtgggtggtcgcgggcgatgcggggctgccagctcctcgggcttcgtagctcttggcccggggacctactaagtgctcggctcttgtcccaagagaagcgggcagcggaaacgcactttgggtttgagactgtgtcggaagaggagaaggggggcaaagtctatcaggtgtttgaaagtgtggctaagaagtatgatgtgatgaatgatatgatgagtcttggtatccatcgtgtttggaaggatttgctgctctggaagatgcacccgcttcctgggacccagctgcttgatgttgctggaggcacaggtgacattgcattccggttccttaattatgttcagtcccagcatcagagaaaacagaagaggcagttaagggcccaacaaaatttatcctgggaagaaattgccaaagagtaccagaatgaagaagattccttgggcgggtctcgtgtcgtggtgtgtgacatcaacaaggagatgctaaaggttggaaagcagaaagccttggctcaaggatacagagctggacttgcatgggtattaggagatgctgaagaactgccctttgatgatgacaagtttgatatttacaccattgcctttgggatccggaatgtcacacacattgatcaggcactccaggaaagctcatcgggtgctgaaaccaggaaggacggtttctctgtctggaatttagccaagtggaacaatcccctcatatccaggctttatgatctatatagcttccaggtcatccctgtcctgtgagaggtcatcgctggagactggaagtcctatcagtaccttgtagagagtatccgaaggtttccgtctcaggaagagttcaaggacatgatagaagatgcaggctttcacaaggtgacttacgaaagtctaacatcaggcattgtggccattcatnctggcttcanactttaattcctttcctatcatggagcatgaaccagtcatatcctgttgaaagcctgngaacttgaaggataatctggcaaatganacagcagcagancatctcctcttnaaggatacgtgccttggactcatgtttgaatcngaacagtctcaaagtngaagaacanattcttgtcactnttttacagcngtctttgggagctgcttcagtccatctcccagaggcattttggtctggta

SEQ ID NO: 254785 - DNA, 972 bp, Homo Sapiens
  misc_feature (23)..(23): n is a, c, g, or t
  misc_feature (492)..(570): n is a, c, g, or t
agcatgaaccaagtcaaaacccngttgaaaaccccggaactgaaggataatctggcaaatggagacagcagcagagcatctcctcttaaggatacgtgccttggactcatgtttgaatcgaacagtctcaaagtggaagaacaaattcttgtcacttttttacagctttctttggagctgcttcagtccatctcccagaggcatttggtctgtatctttgctcaactgctaatttctcttggctgtagggtgtgtggttaaggtacaaccacccctaaagctcagttttgaagtgagtgtatttatagcttctctgctggtgctgccttctagagggatgatagatcatttgaacccaatgacaatttttaaccagaaaatttaattgtacctgaatcaacctttcagcctaggacgaagtctaggcccaagtcagagtattaatgatcatgagaattgtgtgctgaaccagtaaacgagtttaccttttgnnnnnnnnnnnnnnnnnnnnnnnnnnnnnnnnnnnnnnnnnnnnnnnnnnnnnnnnnnnnnnnnnnnnnnnnnnnnnnntggcggcccgccccggcccccaaaaagtttccaaaaccatcctttggccgcggggccccaaaaggaaaggaaccagggcccaaactggttccaaaggaaacccggggcatgaataagggcttggaatcccccccataaaaaaaccccggggggaacccaaggttttgaaaaaatccaaaggggattccgggggcctttactgggttcaacaacggggggcccaggggagcttcaaattcaaattcacccccccgcccctgccatttattggaagaaggtggtgggaattccattaaacactttccgccccgaacgtggaaagcccttccccaaaaggggctgtgatagaacccgtgaaatctgccaagggcgggaaataacaaaaccctgtggggcgccccc

SEQ ID NO: 254786 - DNA, 873 bp, Homo Sapiens
  misc_feature (94)..(94): n is a, c, g, or t
cagaccatccacaggtgtggagggtacgtcactttctgtgacagcttagcagatgacctaagaccaggcggtgtaagactgagaagaggagganagtcacagaggcagcgcagattgctcagggcaaacacacggaatcccaccttaccagcaatgcagccatggcaacagcttctcactagccctggggccagccccaccacactcatggatcaatggactttctctacagttgggaatagcctgactccacagcatggcatgtggtttctttacctgcactgaggttttttacctgcaaaatgtacagataaaggacctgagatcctttgcctgcactgaaatgattctcctgaattagatactaatattgagccactctacaccctttgaatacttgggccccaactcagatttcctttgcaacaagactgtgaaaaccactttgatctcttttttgcagggtcctttgctgggcagacagatgactcagtgaaatctagtctatttattcgttaccggagaggaagtgattaagctttccaggctggaacaacatccaccatcaggaactgggattgggccttaggaatgagctgttgcaaatgagagggccaagacaaccaatgcattaggatctgcaaaattgaaggatgagggactgaagcggaaaacatccctgacttgtgctggaaagcgttaaccccagcaaacagcttgttgaattcaaggcagaacttaagttagtcaggaaagaaaggagcagagtagactagtgatactcttactcccttctccacccaacccaaggggaacagtataactaaactcatacagcctattcccaaatgaggcaaaattatctgggagttg

SEQ ID NO: 254787 - DNA, 490 bp, Homo Sapiens
cccatctgttgatggtaataatacttcacctacctcataggggaggttgtgaggccaccatcacctgacctgggggtcaaggcaggaggactccgaaggtgctacccgtgagcaaagtgtaattaccgaatcctgactgcaaggcccacctgcccctcccccacagagcctccagagctagctgaggccaacgcaggcccatccgtctcttcactctgtcgcaggccctttcatgggcttcgtctgccatctttgtgggtgccctagacttagtccttatcttgtcctggtttcctttcttgtgaccatctccccatgaaagtgctgtacaaattccacccgccccaggacccccgcacctgccctctggcaccagatgccagggaagggacagaggaaaacagccacaaacaagccagtggctccccggagccccaggggtggggattggtggccactgtttgtatgttcttgagtgcaagtgttttat

SEQ ID NO: 254788 - DNA, 738 bp, Homo Sapiens
  misc_feature (26)..(26): n is a, c, g, or t
  misc_feature (31)..(31): n is a, c, g, or t
cagtggctttacaatttcctgtctgnatctnagaaaatatatggatgatctttgccgtgagctacttccatgattgcaatggccttcttcagggctttctcccttgcggcttttgtgttccaggcccatgtagagtctccctagcttcaaccacatgaaggccacgttgaggaagtacaaaggatagtgctaactgtagggcttaatgattttctgtccatattgcagggctccttcccagtcctgcatgtacaagcagacacccatggcctggtacatcatgtgcaacatgtacacgttactgtcctcaaacacagagctcatcttctcctggctgagctcgcagatctccagcagctcactaggggatttatagtgcttggccctccggaactcttcaatgacgttgcgtgcatatctgaccatgtctcggatggcttctgcctttgggggatcgctgagcttccggatttccaccttggcctgagccttgtccttggtggtacactcctggcactcacaggtaaagaaataagaatctcttaaccggtcatttctatcttccgttgggtacaggagatcaatatagctggtaaaaacctcctctcccggcttgatttcctgtacagctctgacttctgccagggtccctttgtaggtcacaatgacattggggcaacagctatgattcatcaatgcaacatcaggaaatatcgctgatcccaaatgagaaagttc

SEQ ID NO: 254789 - DNA, 618 bp, Homo Sapiens
gggggtgtctgcttgtacatgcaggactgggaaggagccctgcaatatggacagaaaatcattaagccctacagtaagcactatcctttgtactccctcaacgtggcctcccatgtggttgaagctagggagggactctaccatgggcctggaaccacaaagccgccaggggagaaagccctgaagaaggccattgcaatcatggaagtagctcacggcaaagatcatccatatatttctgagatcaaacaggaaattgaaagccactgaaactatgcagcatttcagttttcatttaaacacttagttcagaaaccttaaaggatttgaatatttcaaattgcacacgtcactccagcatctctgtaaaataattggaatgaaaatacttcttgcacttaaacactgcacatgccgtactttgaggttagtctgaatcttgaactttaataccaaattaattttgaatgcttttgtttcctaagagataatggcatggtttcatatgttatactttggacagacagagttttaaaaatggaattattttttctttcatgcctcttgtaatgttctgaacaaacttgaatgatgaaagtattaaagagatatcagtaa

SEQ ID NO: 254790 - DNA, 391 bp, Homo Sapiens
ctgtgagtgccaggagtgtaccaccaaggacaaggataaggccaaggtggaaatccggaagctcagcaatcccccaaaggcagaagccatccgagacatggtcagatatgcacgcaacgtcattgaagagttccggaggccaagcactataaatcccctagtgagctgctggagatctgcgagctcagccagggagaagatgagctctgtgtttgaggacagtaacgtgtacatgttgcacatgatgtaccagggccatgggtgtctgcttgttacatgcaggacttgggaaggagccctgcaattatgggacaggaaaatcatttaaggccctacagttaagcactattccttttgttactcccttcaacgtgggccttccctgttggtt

SEQ ID NO: 254791 - DNA, 530 bp, Homo Sapiens
  misc_feature (16)..(16): n is a, c, g, or t
  misc_feature (27)..(27): n is a, c, g, or t
  misc_feature (77)..(77): n is a, c, g, or t
  misc_feature (89)..(89): n is a, c, g, or t
  misc_feature (120)..(120): n is a, c, g, or t
  misc_feature (147)..(147): n is a, c, g, or t
cctagggagacccccnacaggcccccnggaacacaaaagccccgcagggggagaaaacccccctgaaagaaggcccnatgccaatccangggaagtagcctccacggcaaaaggatccanccccatatattccctgagatcaaaccnggaaattgaaaagcccacctgaaacctatggccagcatttccagttttccatttaaaacaccttaggttccagaaacccttaaagggatttggaatatttcacaattgcacacgtcactcccagcatcctctgtaaaataattggaatgaaaatacctcttgcacttaaacactgcacatgccgtactttgaggttagtctgaatcttgaactttaataccaaattaattttgaatgcttttgtttcctaagagataatggcatggtttcatatgttatactttggacagacagagttttaaaaatggaattattttttctttcatgcctcttgtaatgttctgaacaaacttgaatgatgaaagtattaaagagatatcagt

SEQ ID NO: 254792 - DNA, 356 bp, Homo Sapiens
cacgggatataaagggtgtcattactgcgggaatgagacaggggtacgagtccagtcatcttctgaaccacctcttcactggtcatgtcccccaggtggttcatagccagttcatatgtttcccaaattaaacgccgagagatttcatccaccttgttgttatattgcttcctgtgggtcttcttccatagctcccagtgggtgtccagtatctcctcagggtacagagcaaagctcaccacaggtagcagcagaaccttgagcccccacatcctgctgatggaaatctgttgtctggcttcgtttcggcagcaaagtgtgggcacaccatcaggggtgctagatttattccatcg

SEQ ID NO: 254793 - DNA, 549 bp, Homo Sapiens
  misc_feature (520)..(520): n is a, c, g, or t
aatggctaaatccccctagatcaaagtccttggaaccagatgtaccagcatcctatctaaacacaggcccctcctgactatcattgttttatcaccctttttccgtctacctttctcttcctcataaagcctagttttcctctgtttccctgccaaatggaagagttttccctaactacattcttctgcaggatgtgggggctcaaggttctgctgctacctgtggtgagctttgctctgtaccctgaggagatactggacacccactgggagctatggaagaagacccacaggaagcaatataacaacaaggtgcctggggtcctggagggggcaaggcaggaaagctgagacctgagctctctcatcttagcttccagactcccttcttcaatccaaatgccttattccaagcaaaatagtccctctttcctaactcatgtaacaatacggtttcaatcctatgcttcaaatcatcctctggcgtcctaggattaatggcgttaaactataagccatntatctggcttttcacaaactttgggttgc

SEQ ID NO: 254794 - DNA, 550 bp, Homo Sapiens
attggagtaggcgggaggattcttgagacctgagtaaggggaagtttggttcctgttgggcttttagctctgtgggtgccctggagggccaactcaagaagaaaactggcaaactcttaaatctgagtccccagaacctagtggattgtgtgtctgagaatgatggctgtggagggggctacatgaccaatgccttccaatatgtgcagaagaaccggggtattgactctgaagatgcctacccatatgtgggacaggaagagagttgtatgtacaacccaacaggcaaggcagctaaatgcagagggtacagagagatccccgaggggaatgagaaagccctgaagagggcagtggcccgagtgggacctgtctctgtggccattgatgcaagcctgacctccttccagttttacagcaaaggtgtgtattatgatgaaagctgcaatagcgataatctgaaccatgcggttttggcagtgggatatggaatccagaagggaaacaagcactggataattaaaaacagctggggagaaaactggggaaa

SEQ ID NO: 254795 - DNA, 525 bp, Homo Sapiens
  misc_feature (324)..(324): n is a, c, g, or t
  misc_feature (448)..(448): n is a, c, g, or t
  misc_feature (476)..(476): n is a, c, g, or t
  misc_feature (504)..(504): n is a, c, g, or t
  misc_feature (511)..(511): n is a, c, g, or t
gaccctggttcttctgcacatattggaaggcattggtcatgtagccccctccacagccatcattctcagacacacaatccactaggttctggggactcagatttaagagtttgccagttttcttcttgagttggccctccaggaacccacagagctaaaagcccaacaggaaccacactgaccctgatttttgacaggagtaacatatcctttctttcgatagtcgacagagtctgggggctctaccttcccattctggggatataaagggtgtcattactgcggggaatgagacaggggtactttgagtccagtcatcttctngaaccacctcttcactgggtcatgtcccccagggggggttcataggccagttcatatgtatgggacaccaaggagaaggccttcaaggttatgggatgggaaatatactttcaggttttttttncccaaatttaaacggccgaggagatttncatccaccttgttgttatattgcttccngtggggnctttctttccatag

SEQ ID NO: 254796 - DNA, 606 bp, Homo Sapiens
gaaccatgcaaatacaacagggtacgcactcttctatcttatactttaccagtcttagttgcaaaatccgtcttaacaagatgaaaatatatcttcttgacccagagcttgtgagtccagaagagcctctgttttcagactttcagggcttccagaaatgcgctttcattgccattttacgtccaaaattgtgtctcactcgagtttttgtatccgccagtgcccagcacaatccctagaaaagcaatgactggtaacgtggaaacttagatactgtttatttaattttcagttaactccctattgtgtacatttagatcttagtctcgagtgtctgaatttattacttcctataggatttgctttggacataatttcttgtgactaggtcttccacaaggatatgtgagtaacagtgaatcagagttgtgtaagctgtagtaggttgggtaagaatgttccacttagtttggaactaccagctagatctactacctacgccgtcactctaaattacttgtttgtatcattattttttgaatttcagttggtttaagggtgcttttcaaggtgaagataacttgtttcaaatagtccttggttttt

SEQ ID NO: 254797 - DNA, 650 bp, Homo Sapiens
  misc_feature (83)..(83): n is a, c, g, or t
aatcactccattcctaatctctctaggtaagcattcactatcaccacagtaatcgtcttagtgtctacatgtaaatattcgtngaagtccgccatatgtaagaatactcccttgtttatataagctgtgagagagactatcttattcagctgtcacagggcttacttgtttctcacacaataacatcttgtgacggaaaacactgaacagaacctaataaactgtgccagtcaaattacgcaatacagatgctcctctgcttatgatggggttacttcctgataaacacatcgtaagttgaaaatactgtaagttaaaaatgcatttaaatttaatactgaacatcacagcttagccgggcctaccttaaacatgctcagataataaagtgttgaatatctcatataatttattgaatactatactgtaagtgaaaacagaatggttgtaagggtacttaaagtataatttctactaaatgcatattgcttcggcatcactgtaaagatgaaaaatcataagtccaaccactgtaagtgagaaactgataatgtacagaagcagttcccaaaggatggtccagaaattcctataaagttaaaactacacagtaatacagaaacattatttttctcactctcactctctct

SEQ ID NO: 254798 - DNA, 629 bp, Homo Sapiens
ataatttggataatacaatttacattccttttgctagaagcactcctgaaaagaaatcaccactttctaagagactatcccctcagccacaaataagagcagctacaacacagctagtcagcaacagtggacttgctgtctctggaaaagaaaataaactgtgtacacctgtaatctgttcctcttcaacaaaggaagcagaagatgcacctgaaaaactttccagagcatctgatatgaaggacacacagctcctcaagaaaataaaggaagcaattggtaagatccctgctgccaccaaggagccagaggaacaaactgcatgtcatgggcccatcaggttgtcttaggcaacagcctttcaagttgaaagggcaatactgtctgtgatggtagtgttttcacttctgacttgatgtctgactggagcatctcttcgttttcaacgttcacttctcgtgatgaacaagacttcagaaatggccttgcggcattagatgccaacatagctagactccagaagtctttaaggactggtcttctggagaaatgaattcagaagaaaactcatcaggtgcttctttttaaaactagacttggctatattgaatgtgtattttctttagtga

SEQ ID NO: 254799 - DNA, 811 bp, Homo Sapiens
  misc_feature (675)..(675): n is a, c, g, or t
  misc_feature (732)..(732): n is a, c, g, or t
  misc_feature (739)..(739): n is a, c, g, or t
  misc_feature (752)..(752): n is a, c, g, or t
  misc_feature (758)..(758): n is a, c, g, or t
  misc_feature (767)..(767): n is a, c, g, or t
  misc_feature (775)..(775): n is a, c, g, or t
  misc_feature (793)..(793): n is a, c, g, or t
gcgaccgcggcgatccccctggggacctccgtagcgtcttggtcacgaccgtgctcaacctcgagccgctggacgaggatctcttcagaggaaggcattactgggtaccggccaagaggctgtttggtggtcagatcgtgggccaggccctggtggctgcagccaagtctgtgagtgaagacgtccacgtgcactccctgcactgctactttgttcgggcagagcagatgccctcatgtgttctgcgtagatccccagctgagaagagtttgtggacctttacagggacccgaagctgccagtactgtaccaagtggagcggacacgaacagggtcgagcttctcggtgcgctctgtgaaggccgtgcaacatgggaagcccatcttcatctgccaggcctccttccagcaggcccagcccagccccatgcagcaccagttctccatgcccactgtgccaccaccagaagagctgcttgactgtgagaccctcattgaccagtatttaagggaccctaacctccaaaagaggtacccattggcgctcaacacgaattgctgctcaggaggtccccattgagatcaagccagtaaacccaatcccccctgaggccagctgcagaagaatgggagcccaaacagatgttctggggtgcgagcccggggttattattnggcgaggggcgacatggaagatggcattgctggcgtgggccgcctatattttccgantatggcnttctttggggcantggcanttgttggcnttcaccantgggcaggaacaaggttnaatttttcatggggtttt

SEQ ID NO: 254800 - DNA, 805 bp, Homo Sapiens
ggggccggaagagtcaggttctgtgtatgtctccgcgtcttccgcggagcgggtgtgcagggcctgcagcattgaactagatgtcgtccccgcaggccccagaagatgggcagggctgtggcgaccgcggcgatccccctggggacctccgtagcgtcttggtcacgaccgtgctcaacctcgagccgctggacgaggatctcttcagaggaaggcattactgggtaccggccaagaggctgtttggtggtcagatcgtgggccaggccctggtggctgcagccaagtctgtgagtgaagacgtccacgtgcactccctgcactgctactttgttcgggcaggggacccgaagctgccagtactgtaccaagtggagcggacacgaacagggtcgagcttctcggtgcgctctgtgaaggccgtgcaacatgggaagcccatcttcatctgccaggcctccttccagcaggcccagcccagccccatgcagcaccagttctccatgcccactgtgccaccaccagaagagctgcttgactgtgagaccctcattgaccagtatttaagggaccctaacctccaaaagaggtacccattggcgctcaaccgaattgctgctcaggaggcccccattgagatcaagccagtaaacccatcccccctggagccagctgcagagaatggagcccaaacagatggtctgggtggcgagcccggggctatattggcggagggccaaatggagattgcctgctggctgggccccctatatctcccaattttgccttcttgggcactgccact

SEQ ID NO: 254801 - DNA, 1266 bp, Homo Sapiens
catgtcagccttcctggctacccaccgggccttcacctccacgcctgccttgctatggcttatggctgacaggctggaagcccttgaatctcatcctaccgacgaactagagaggacaacagaggtagccatctctgtactgtcaacctggctggcctctcaccctgaggattttggctctgaggccaaaggtcagcttgaccggcttgagagcttcttacttcagacagggtatgcagcatggaacggtgttggggggggcagcgctgacctcatccgcaatctccggtcccgggtggacccccaggcccccgaccttcctaagcccctggccctccccggcgatccccctgctgaccccacggatgtcctggtgttcctcgctgaccacttggccgaacagctgaccctgctagatgcggaactttttctcaatttgatcccctctcagtgcctgggaggcctgtggggtcacagagaccggccaggacattctcacctctgcccatctgtccgagctactgtcacacagtttaacaaggtggcaggggcagtggttagttctgtcctgggggctacttccactggagagggacctggggaggtgaccatacggccactccgtcccccacagagggcccggctcctggagaagtggatccgcgtggcagaggagtgccggctgctccgaaacttctcttcagtttatgccgtggtgtcagccctgcagtccagccccatccacaggcttcgggcagcctggggggaagcaaccagggacagcctcagagtcttttccagcctctgccagattttctccgaggaggataattattcccagagtcgggagctgctcgtgcaggaggtgaagctgcagtctcctctggagccacactccaagaaggccccgaggtctggctcccggggtgggggggtgtggtcccataccttggcaccttcctgaaggaccttgtgatgctggatgcagcctccaaggatgagttggagaatggatacatcaattttgacaagcggagggaaggagtttgcagtcctttctgagttgcgacggctccagaatgaatgtcgtggctataacctcccacctgaccatgatatccagaaggtggctacagggggctcgggccactgacagaggctcagagccatcgtgtaatccctgtgaaggtgggagccaccctgggttccagtggacccttccttggccccacggggtggctttcggcccaaccattgggtccatct

SEQ ID NO: 254802 - DNA, 1741 bp, Homo Sapiens
ggagcgaggcctgggtggcgaattcggcacgaggcatccacagggcttcgggcagcctgggggggaagcaaccagggacagcctcagagtcttttccagcctctgccagattttctccgaggaggataattattcccagagtcgggagctgctcgtgcaggaggtgaagctgcagtctcctctggagccacactccaagaaggccccgaggtctggctcccggggtgggggtgtggtcccataccttggcaccttcctgaaggaccttgtgatgctggatgcagcctccaaggatgagttggagaatggatacatcaattttgacaagcggaggaaggagtttgcagtcctttctgagttgcgacggctccagaatgaatgtcgtggctataacctccaacctgaccatgatatccagaggtggctacaggggctccggccactgacagaggctcagagccatcgtgtatcctgtgaggtggagccacctggttccagtgaccctcctgccccacgggtgcttcggccaacattggtcatctcgcagtggacagaggttttgggctctgttggggtccctaccccgcttgtgtcctgtgaccggcccagtactgggggagatgaggcgcctacaactcctgctcctctgctgactcggctggcccagcacatgaagtggccatctgtctcgtcactagactctgccttggaaagcagtccatccctgcacagtccagctgaccccagccacctctccccaccagcctcctcccctaggccttctcgaggtcaccgccgctcagcctcctgtggctccccgctgagtgggggtgcagaagaggcctccggggggactggatatgggggagagggatctgggccaggggcctctgattgccgtatcatccgagtccagatggagttgggggaagatggcagtgtctataagagcattttggtgacaagccaggacaaggctccaagtgtcatcagtcgtgtccttaagaaaaacaatcgtgactctgcagtggcttcagagtatgagctggtacagctgctaccaggggagcgagagctgactatcccagcctcggctaatgtattctacgccatggatggagcttcacacgatttcctcctgcggcagcggcgaaggtcctctactgctacacctggcgtcaccagtggcccgtctgcctcaggaactcctccgagtgagggaggagggggctcctttcccaggatcaaggccacagggaggaagattgcacgggcactgttctgaggaggaagccccgttggcttacagaagtcatggtgttcataccagatgtgggtagccatcctgaatggtggcaattatatcacattgagacagaaattcagaaagggagccagccaccctggggcagtgaagtgccactggtttaccagacagctgagaaatccagccctgtgggaactggtgtcttataaccaagttggatacctgtgtatagcttcccaccttccatgagtgcagcacacaggtagtgctggaaaaacgcatcagtttctgattcttggccatatcctaacatgcaagggccaagcaaaggcttcaaggctctgagccccagggcagaggggaatggcaaaatgtaggtcctcgcaggagctcttcttcccactctgggggtttctatcactgtgacaacactaagataataaaccaaaacactacccgggggagggaagaagg

SEQ ID NO: 254803 - DNA, 975 bp, Homo Sapiens
ggtaccggcccggaattccgggatatcgtcgacccacgcgtcgcccacgcgtcgccacgcgtcgccacgcgtccggggcggacaccacttgttctggctactcagatgagtaggccaacaatatgtcaactgctgatagatagaggagcggatgttaattccagagacaaacaaaacagaactgccctcatgctaggttgcgaatatggttgcagagatgcagtagaagtcttaattaaaaatggtgctgatataagcttgctggatgcgcttggccatgatagttcttactatgcaagaattggtgacaatctggacattctaaccttgttgaagactgcatcggaaaataccaacaaagggagagaactttggaagaaagggccatctttgcaacagcgaaatttgacacacatgcaagatgaagtaaatgtgaagtcacatcagagggagcatcaaaatattcaggatttggagattgaaaatgaagatttgaaagagaggttgagaaaaattcagcaagaacaaagaatacttttggataaagtcaatggtttacagttacagctgaatgaggaagttatggttgctgatgatctggaaagcgagagagaaaagctgaagtcccttttggcagctaaagaaaaagcaacatgaagaaagcttaaggactattgaggctctgaaaaatagatttaaatattttgagagtgatcatctaggatcaggaagtcaatttcagtaccgaaagagatatgctctaacagtcagatgtttggcgattaaaggacttcccagttacaggccatatgaagaattagttagactctgaatttacagaaggtatttgatgaattagaggtaccaggattggagtgaaagagtgcgcaggggcaagggagagttttagtggggggaaaaaaataatggagaggaggaaagccgaaaagaggaaatgggaacaaaaagaaattg

SEQ ID NO: 254804 - DNA, 422 bp, Homo Sapiens
  misc_feature (45)..(45): n is a, c, g, or t
ccaagccaattaataagcaagtgtcttttcgtcatgatttttttngttttctgtttaggatttaacaaaatggttgagataacagtcacttctgtttgatgaagagtatcacttcattccatttttgtgtttttgttgcatctccaagtcagaataaatgccttttggagcagatatatttcatttagcatttagtatcatcttcatcaatactcgtatgaacgaaaaaataaaaagccctctcttattcccactctacaacgcatgtcaaaggtgatctgtttagtttttccttagtatcgaacatatcacagctactcaatgaagtttcttctcaactaaagaaacacagtctcttagagaatttgttcctgtgtttccaccataagataaatgagataaagtgcactttggtttacgtc

SEQ ID NO: 254805 - DNA, 1447 bp, Homo Sapiens
  misc_feature (835)..(855): n is a, c, g, or t
tcgtgcatacttagactaccttctatttagaggaagaatgagagctttgtgtgtttaactgagcttatagtaggacttctttgcatatgtatggtactgaaaaatcttaatatacatctttaatcctttttaggttgtcctttaaagagtttttgactagtttctttttcttgacagctcttctctttggacacatgggccttcttagagggttcagtctaggacccggctctcctggccctgtgttgagggtagctggtccctctgtccctgtgtctgctagcactaggactttgttgctgcagattgatccagtgggtacataggctaattaatgtgagtctttttccttgtttaaaggagtccctcttgctgaaagtagatgattactattgctgtagtgttaggaaagtattaagtttgtgctgaaaatccattgccatttggtacaaatgacatttgttctttctgtgaaagagatgccctcgagtgtgtttgtacacaaacccttaggatggtgagttgaagcatcaccctcgcgctatcttcagtgacgggtgacggctcagggagatggcaggcagattgggctctaagtcattattctctcagttactccattggtgaaatggccctttccctctttgcagttcagtctaagtctcgtatttgctttgctgtctgtgtgctgaagctcgtcccgtgtgagttgctgtctgccccttgtcaggctgtgaggtgctcgtgtagacctggagcatgcaggctgcctccgtttttgggtactgtgttgtgttttgctctgtctaaaaacatctgcatagttttcaactgnnnnnnnnnnnnnnnnnnnnntgggatgtcctaaaatgaaagctgctcaaagtcacagaacaaccgagggacaaaggagattggatgactgggaagcgctggcccggaacagcccctgcaactgtggggcctgcacacagcccttccacagttggcactgcaggtgcaggccaaccctttaaagaataaacaaggaagtcagctctttcactttttacaagttggcaaaaacagacttccggggaattttgatgttttcccgtgttgtagagcttccagggtttaataaaactggttaaaaattgagtctttccctgaagtaagtgctctttccagatgaaaactactcttttggttttgtttgaaagtaagaaagggaggggaaactttgctcttttaataattatgttcagcctatgatgaagtatttgattattagacagcaatgtcactaataagttttaagttgtccaaagttaattgtaaacatcatcagtacagtactcttagttacagtaaagcaattgttgcaagatgaatggctaatattttggtgcagtgtttgatgttcaaaacaaaatgttacaacaataaacgaacataacataaaccc

SEQ ID NO: 254806 - DNA, 633 bp, Homo Sapiens
acccagcctacccctcaacacagggcccaggagagccggggtccctagactgaaacccctcctaagaaggccccatgtgtcccaaagagaagagctgtcaagaaaaagaaactagtcaaaaactctttaaaggacaacctaaaaaggattaaggatgtatattaagatttttcagtaccatacatatgcaaagaagtcctactataagcctcagttaaacacacaaagctctcattcttcctctaaatagaaggtagtcaagaggacacacagatggcatctatgaaataaggtggctgcatggctgctgtactagaattcacaaactgggaagaacttcatataaacagaacccaggatccctaacctactgtagataaataaactcattaaacaattagtccttatcaactatttaagctgggggaagctttgcatgggagaaggctcatgtggtcccttctctgggaacatgagccttcctaggttttgccactgagaactgtgtttaggggatttcaacattgtctctgcatccgacaagcactaggaaaatggctgaaatcagtcagggactttcaactctccaatctggaaaaataaccacccctatttctctatctctagatcagc

SEQ ID NO: 254807 - DNA, 622 bp, Homo Sapiens
  misc_feature (520)..(550): n is a, c, g, or t
ctggattggcggaagtaaatctggaaggattctcactcgtatttcccacccctagtggccagaggagggaggggcacagtgaagaagggagcccaccacctctccgaagaggaaagccacgtagagtggttggcatggggtgccagcatcgtgcaagctctgtcataatctgcatcttcccagcagcctggtaccccaggttcctgtaactccctgccttcctcctctcttctgctgttctgctcctcccagacagagcctttccctcaccccctgaccccctgggctgaccccatggtgtgaatgtagagatgccaccttcctctctctgaggcaagcctgtggatgaaggaggagggtcaaggctggccttactctgtgcatcactctgctaggttgggggcccccgacccaccatacctacgcctagggagcccgtcctccagtattccgtctgtagcaagagctagggctgctgcctcagatccaagacaagaatgaacctggctgtgtcagtcannnnnnnnnnnnnnnnnnnnnnnnnnnnnnngccacattggcagagatgggaacctaagggtctcaccccttaccccagcccccctcttctggtgtttgtctt

SEQ ID NO: 254808 - DNA, 1206 bp, Homo Sapiens
  misc_feature (1181)..(1181): n is a, c, g, or t
  misc_feature (1195)..(1195): n is a, c, g, or t
caacatctccatgtcgcgggaggcagacctggactttgcaaggcagtactacgagatgctttacaacacagctgacgagctcctgaacctggtggtggaccagggtgtgaagtacacggagctggagtacatccacgctctgaccctgctgcaccgcagccaaactggggtgggggaactgaccacccagaacacgaggctgcagaggctcaaagagatcatctgcgagcaggctgccatcaagcaagccaccaaggacaagaagataactaccgtttagcagggcgtactgcggttggtgacgggggtcccctcagtcacactcacttttttccttggtatgttattgagtatattctgagcttagttttctctacagtgatactttagtggagaggaggtgtaaggattctttctctctggctatggcttttcatataaatgctaaaggaaagcgacagtacagagtgttttggttgaacaaatactttaatgcagtcaaatctaacgggactagggtgggatagggaggaaggtggtatcaaattgttggactctgaaaaacaagtggatggattactaatatttgatttattactcaatatatatataattccagccttggaaagtaggaaagtaggctgctacctaacttttagtcccttccaaaaccatttagtagggttctattacataaacagtagggtttttcctctcctgaccttatccgtttacagttcaatgaaataagtgtatgtgcattgctgtctgtctctattgccaaaatcaaataaatggcttctcagctgctgtttacaacaaacttccctaaccaaaacagaacctctaatttagggctaggaatagaagtcttttgatcccagtccgtgggacagttttgtatgctgtatcttgtacacaggttgtaggttggtttattgccattttgttttatttctgctatataaaaaccaagagccagacaattagacaactatggaggaatgaaaggcaattcaaacatctgcttgattcccgccccgccacccctaatttctgagagaataatggttagagaacattgcatctcacttgaaacatcctttgggggtaaatgattcttaggtgctcacttggtctgagctcagctggaatgcggggaggtggggacagagtggacnttctcctttgtgcnggcttccgctg

SEQ ID NO: 254809 - DNA, 370 bp, Homo Sapiens
tgaacctgtcacccaggtactaagcgtagtacccaatagatagtttttcagcccttgcccccctcctccctctagtagtccccagtatctattgctcccatctttatgtccatgtgtacccaatgttgagctctcacttgtgggaacataactgcatttagttttctgtttctgcattctgtttctcctgttctcttaggataatggcctccagctgtatccatgttgctgcatgtactacattttctttttagcctgggcacccacagtggattgggcactgggcccttgatgggcacctgggttcattccacatttttgctcttgtgaatggcgttaagatgcatacaggtgcatatgttcttgtggc

SEQ ID NO: 254810 - DNA, 730 bp, Homo Sapiens
  misc_feature (20)..(20): n is a, c, g, or t
  misc_feature (629)..(643): n is a, c, g, or t
gcactgaatactcaacaganatgtagtgatcaaaagtctgagaaagcaatccaaacatattctatcagaacactccgcactaaggtgaaggcttcacaaattcacaaaaacttacttgcaaatcaaaaccaaaatataaatattatggcttagctgtgggaacagccagttttttatatgcgaatctgtcatggtaaatatactaatgtatttcacagttagttagttagttatgtccttaagaaaaaattccacgcactcatattattttcttttctcttccaaaaagaattccctggcagagaatctatcattccaaaaggtaacctgggtaccagccatccctatatggaaatctcaggcaaactagaaaccctgtgtctggcttcccactttaaaagaactgtcacttcatcttcatgacaagagtgccaaagtcatgaggcagatgtcagagcctgaaggaaacttagccatctgcaaagccatccctctttgacaaacgagcaaagcaggcctggatagatgatgaaaaaacttgcccaaactcacacactgctagttgatggcagaaccaggcctagaacccaagtattttgtgttctagttcagtgctccattaggtagannnnnnnnnnnnnnnaagctttaaagaagaagttttatgcagaaattgtttgtgagaatgttgaagttaaaaaacatagttattaatccaaactcagaaatc

SEQ ID NO: 254811 - DNA, 659 bp, Homo Sapiens
  misc_feature (18)..(18): n is a, c, g, or t
  misc_feature (69)..(69): n is a, c, g, or t
  misc_feature (168)..(168): n is a, c, g, or t
  misc_feature (203)..(203): n is a, c, g, or t
cgtcgtggggtgggaagnatagcaagagaaatacctaaatgtaaatgacgagttaatggatgcagcaanaccacatggcacatgcatacctatgtaacaacctgcacggtgtacatgtaccctagaactaaattaaaaatttaaaaaaatctcaggagttggtgagtnaggtcaagcatgcacactacgaggcaaagtggcanagtttaaccagcgtgtgaccttcccctaggaactggtaagggaagactgcctcaagagggcaccgcacaactccagtaagcacactgtgcacgcggccctcccaagtgtcggcaggccactgcgcatgcggacagcccaccccaagggaagaatcaggggagaagggacgcagcccccagaagcatgccaagatataaaccccaagtcaaaggtcaaaaccgtgtacttgctctctcaacatgcccacttaataaactttcactcttgctctgaaacttacctcagtctctgaccctgccttgtgccccctggatgaattatttcctctgaggaggcaaaagctaagttgctgcagacttatatggatttgctgctgctgacaccaggaggtggcgttctgggctccctgtggccctggagagtagcagcctacaagtgccgaattcctgcagccc

SEQ ID NO: 254812 - DNA, 367 bp, Homo Sapiens
acagcctgggagtaaagataaagtgaaaaactgacagcgaatcatcgtgcaagtctcttggcaaacattcactcctttagaatggcagggttctgtgtcaattataaacacaaaaagatatcagatgggaaaagcaatgaacgacatttacacaagtttctgttaccttgaggattgtttcatcactgttgctgttaaaagtcatgaaataggttacaatgtaatattattatcaaatcacattaccaggtaaagttcttttgcaggttaaaaggctatatccagatatggtgttttcttgaggagtagaggaacttggtgtgccactttcagatgttttaagaagacaaacatttctatttttttt

SEQ ID NO: 254813 - DNA, 1864 bp, Homo Sapiens
gtcatcaaataagtgcttgccatcgagacatttataaaggagttgatatgagaggagtcaattttaatgtgtctaaggttagcagtgttgaagaatgccaaaaaaggtgcaccaataacattcgctgccagtttttttcatatgccacgcaaacatttcacaaggcagagtaccggaacaattgcctattaaagtacagtcccggaggaacacctaccgctataaaggtgctgagtaacgtggaatctggattctcactgaagccctgtgccctttcagaaattggttgccacatgaacatcttccagcatcttgcgttctcagatgtggatgttgccagggttctcactccagatgcttttgtgtgtcggaccatctgcacctatcaccccaactgcctcttctttacattctatacaaatgtatggaaaatcgagtcacaaagaaatgtttgtcttcttaaaacatctgaaagtggcacaccaagttcctctactcctcaagaaaacaccatatctggatatagccttttaacctgcaaaagaactttacctgaaccctgccattctaaaatttacccgggagttgactttggaggagaagaattgaatgtgacttttgttaaaggagtgaatgtttgccaagagacttgcacaaagatgattcgctgtcagtttttcacttattctttactcccagaagactgtaaggaagagaagtgtaagtgtttcttaagattatctatggatggttctccaactaggattgcgtatgggacacaagggagctctggttactctttgagattgtgtaacactggggacaactctgtctgcacaacaaaaacaagcacacgcattgttggaggaacaaactcttcttggggagagtggccctggcaggtgagcctgcaggtgaagctgacagctcagaggcacctgtgtggagggtcactcataggacaccagtgggtcctcactgctgcccactgctttgatgggcttcccctgcaggatgtttggcgcatctatagtggcattttaaatctgtcagacattacaaaagatacacctttctcacaaataaaagagattattattcaccaaaactataaagtctcagaagggaatcatgatatcgccttgataaaactccaggctcctttgaattacactgaattccaaaaaccaatatgcctaccttccaaaggtgacacaagcacaatttataccaactgttgggtaaccggatggggcttctcgaaggagaaaggtgaaatccaaaatattctacaaaaggtaaatattcctttggtaacaaatgaagaatgccagaaaagatatcaagattataaaataacccaacggatggtctgtgctggctataaagaagggggaaaagatgcttgtaagggagattcaggtggtcccttagtttgcaaacacaacggaatgtggcgtttggtgggcatcaccagctggggtgaaggctgtgcccgcagggagcaacctggtgtctacaccaaagtcgctgagtacatggactggattttagagaaaacacagagcagtgatggaaaagctcagatgcagtcaccagcatgagaagcagtccagagtctaggcaatttttacaacctgagttcaagtcaaattctgagcctggggggtcctcatctgcaaagcatggagagtggcatcttctttgcatcctaaggacgaaagacacagtgcactcagagctgctgaggacaatgtctggctgaagcccgctttcagcacgccgtaaccaggggctgacaatgcgaggtcgcaactgagatctccatgactgtgtgttgtgaaataaaatggtgaaagatcaa

SEQ ID NO: 254814 - DNA, 1011 bp, Homo Sapiens
  misc_feature (653)..(663): n is a, c, g, or t
gggtatcggtccggaattaccgggatatcgtcgaccacgcgtccgggtctttaaacccaaaccccctttaaggcatgttggtctcaaggggatttgggattgaagcacagctttctgttgaggaaacctaggtgtcactttttagaacattaagaagaaagttgtagggtgggcttttccatttaaaggaatgtgatgatcctaggttctgatgagtgataggtggtctccgtttataccctttcttcttttggcacctgtaagttcgggtagtggccatcttacattctcatgtcctgctggaagtgcctagttgcctgcaaagccagctaaggcttattatttcaaaagaagattatttaaaacatgagtgacaggtagtcagaagagaacaaaaggacgcaagatactctatagccaagtcagcttggaggcaggatgggttgctgagtgaagtcgccgctcacttttggattcttacggactgtgagttagtcttccctctacacggagtcacaggaagggtataaatgcatgttcctgaggtgccctcccccaaagaatgtacctgcactcaaaccaggatctgtttttgctgttttaatcataaatagactagttagtagaagacttttgaagaacaaagtaaaaannnnnnnnnnncattaaaaagatgtcccagagggaaaggcctgtgcagcagtatattctaaatgactgctggacatgtcctaataaggggttaagtggtgccaaaccttaaagaaataggaaaattggcgaagtttagcgacctacaggtcccggaggttgccccaactgaattaggggagcgtcacgccgctcaacaccggtgttgggcggccgggtccggccctgccagcggatcacacggcaagacgcgctggtcaacacccgcagggcccggaagaagaggccgcgcgagaactggagggcagccgggaactcaaggacgacgaaaacggcagggtgggcaggcgcccgcgacgg

SEQ ID NO: 254815 - DNA, 670 bp, Homo Sapiens
aaccccgagcaaatgtctcagcatactgccatcgcgctttatctctaactctatactctaattccagtttttcctctgacttctgaaaaggggaaagggaaattcccttgagaaaaacagttttctataaatgacttcattgaaattttctcacaacacactaaagaaccatttcagtgccaacattatacaggcactaaattaatataagtgcccaattaatataagattaaatacagctatagtaaaactgaaatcctcagagtagaatacaccctaagtaactcactcctaaactttccttattctttcattgaggaaatgtcgaagaatatgaaagaagcaaaataggtcccttatatttaaatggtgaccatttgcaaaaccatgacttaatagaacaagtggaaaatagatgacctgagcgatataaatgcatataaaaataggcactgaaacatcaatcagtatgtctaaacctatatatttatgttaagctatttcacatgtaaggtttttaaagaatctgggagttccccaggcaagcaagttcttggaacccagtatttttgctggattcccatacaaagatatctcttcaataccagttctacttcatttcttccctgggaccagtcagatatgctccttcccccaggaaacatattcc

SEQ ID NO: 254816 - DNA, 192 bp, Homo Sapiens
gccttttctttttttaattgccacttaaccctgcctccttcttgcaataaaacatattcattcatgtgttagtgaataattggggaaaggaaatcccatacatctgtcaagagatacattttcaataatatttttatttttctatttgagatctatttataaaagaaggttcaaaattttttggtgggagtt

SEQ ID NO: 254817 - DNA, 786 bp, Homo Sapiens
  misc_feature (340)..(372): n is a, c, g, or t
cttgactgcaagaaaaactgtgtagtctggcaggaagtggattatctgcctcgggagtgggaattgctggtacaaagaccaaaacaacccaaatgccaccgctgccctgtgggtagcatctgtttctctcagctttgccttcttgctttttcatatctgtaaagaaaaaaattacatatcagttgtcctttaatgaaaattgggataatatagaagaaattgtgttaaaatagaagtgtttcatcctttcaaaaccatttcagtgatgtttataccaatctgtatatagtataatttacattcaagtttaattgtgcaacttttaacccctgttggctgnnnnnnnnnnnnnnnnnnnnnnnnnnnnnnnnnaactaatactgagagatttggtcagaatttgaggccagtttcctagctcattgctagtcaggaaatgatatttataaaaaatatgagagactggcagctattaacattgcaaaactggaccatatttcccttatttaataagcaaaatatgtttttggaataagtggtgggtgaataccactgctaagttatagctttgtttttgcttgcctcctgattatctgtactgtgggtttaagtatgctactttctctcagcatccaataatcatggcccctcaatttatttgtggtcacccagggttcagagcaagaagtcttgctttatacaaatgtatccataaaatatcagagcttgttgggcatgaacatcaaacttttgttccactaatatgggctctgtttggaaaaaact

SEQ ID NO: 254818 - DNA, 587 bp, Homo Sapiens
  misc_feature (55)..(87): n is a, c, g, or t
atagtataatttacattcaagtttaattgtgcaacttttaacccctgttggctgnnnnnnnnnnnnnnnnnnnnnnnnnnnnnnnnnaactaatactgagagatttggtcagaatttgaggccagtttcctagctcattgctagtcaggaaatgatatttataaaaaatatgagagactggcagctattaacattgcaaaactggaccatatttcccttatttaataagcaaaatatgtttttggaataagtggtgggtgaataccactgctaagttatagctttgtttttgcttgcctcctgattatctgtactgtgggtttaagtatgctactttctctcagcatccaataatcatggcccctcaatttatttgtggtcacccagggttcagagcaagaagtcttgctttatacaaatgtatccataaaatatcagagcttgttgggcatgaacatcaaacttttgttccactaatatggctctgtttggaaaaaactgcaaatcagaaagaatgatttgcagaaagaaagaaaactatggtgtaatttaaactctgggcagcctctgaatgaaatgctactttc

SEQ ID NO: 254819 - DNA, 2267 bp, Homo Sapiens
  misc_feature (32)..(32): n is a, c, g, or t
  misc_feature (1067)..(1099): n is a, c, g, or t
  misc_feature (2018)..(2044): n is a, c, g, or t
  misc_feature (2092)..(2095): n is a, c, g, or t
  misc_feature (2097)..(2098): n is a, c, g, or t
  misc_feature (2100)..(2191): n is a, c, g, or t
tgtgcaaatagggataatgaaacccggtgtanaagcaggctggtaccggtcgcgaatgtgggatatcgtcgacccacgcgtccgggggcagcgtgggaggcgccaagggagcgcgaacctgaggaggaagaaacggggctagcgcgcaggcccagaacggtccgagccgcggcagtcggcgacgccccagagcggaagagggaagtgaatcaggcgccgggtagtgggttgctgggctgggcttgctgaggtagaggcagcgccaagaagaggcctttgccgctggtcgggattgggatgtcgaagaacacagtgtcgtcggcccgcttccggaaggtggacgtggatgaatatgacgagaacaagttcgtggacgaagaagatgggggcgacggccaggccgggcccgacgagggcgaggtggactcctgcctgcggcaaggaaacatgacagctgccctacaggcagctctgaagaacccccctatcaacaccaagagtcaggcagtgaaggaccgggcaggcagcattgtcttgaaggtgctcatctcttttaaagctaatgatatagaaaaggcagttcaatctctggacaagaatggtgtggatctcctaatgaagtatatttataaaggatttgagagcccgtctgacaatagcagtgctatgttactgcaatggcatgaaaaggcacttgctgctggaggagtagggtccattgttcgtgtcttgactgcaagaaaaactgtgtagtctggcaggaagtggattatctgcctcgggagtgggaattgctggtacaaagaccaaaacaaccaaatgccaccgctgccctgtgggtagcatctgtttctctcagctttgccttcttgctttttcatatctggaaagaaaaaaattacatatcagttgtcctttaatgaaaattgggataatatagaagaaattgtgttaaaatagaagtgtttcatccttttcaaaaccatttcagggatgtgtataccaatctgtatatagtataatttacattcaagtttaattgtgcacttttaacccctgtgggctgnnnnnnnnnnnnnnnnnnnnnnnnnnnnnnnnnaactaatactgagagatttggtcagaatttgaggccagtgtcctagctcattgctagtcaggaaatgatatttataaaaaatatgagagactggcagctattaacattgcaaaactggaccatatttcccttatttaataagcaaaatatgtttttggaataagtggtgggtgaataccactgctaagttatagctttgtttttgcttgcctcctgattatctgtactgtgggtttaagtatgctactttctctcagcatccaataatcatggcccctcaatttatttgtggtcacccagggttcagagcaagaagtcttgctttatacaaatgtatccataaaatatcagagcttgttgggcatgaacatcaaacttttgttccactaatatggctctgtttggaaaaaactgcaaatcagaaagaatgatttgcagaaagaaagaaaaactatggtgtaatttaaactctgggcagcctctgaatgaaatgctactttctttagaaatataatagctgccttagacattatgaggtatacaactagtatttaagataccatttaatatgccccgtaaatgtcttcagtgttcttcagggtagttgggatctcaaaagatttggttcagatccaaacaaatacacattctgtgttttagctcagtgttttctaaaaaaagaaactgccacacagcaaaaaattgtttactttgttggacaaaccaaatcagttctcaaaaaatgaccggtgcttataaaaagttataaatatcgagtagctctaaaacaaaccacctgaccaagagggaagtgagcttgtgcttagtatttacattggatgccagttttgtaatcactgacttatgtgcaaactggtgcagaaattctataaactctttgctgtttttgatatctgcnnnnnnnnnnnnnnnnnnnnnnnnnnnaaaaatgataaaacttcagaaaataaaatgtcagtgtttgataaaccnnnncnncnnnnnnnnnnnnnnnnnnnnnnnnnnnnnnnnnnnnnnnnnnnnnnnnnnnnnnnnnnnnnnnnnnnnnnnnnnnnnnnnnnnnnnnnnnnntcctccccttccaccctaatatctctttaattccctcatcccactcccctcttcatcataccctaataataatttt

SEQ ID NO: 254820 - DNA, 398 bp, Homo Sapiens
  misc_feature (11)..(11): n is a, c, g, or t
aaaagaaaaanaaaaatatctagggaggataatttctcactttagagtaaaacaaatcttgggtcttgtcactgtttgatcaagtttctagttacttcaaactcatcaggatctcaataaatcagcgagtactctttgctgtctgatccttttatgatttatggtttgggatttcagctctgatgtcgttcattaattcctttattctagtcacttgttcagttaagaaaaccatttccagtgtcctctatgtaccaaacactatcatggttcctgaatattattttgcagttgttcaagctgtttggacaaagcccctgaggaagctgagaagaatatggtgtgcttttaatttattctgtttattctcacattattaaagactgaacagtctgtca

SEQ ID NO: 254821 - DNA, 1753 bp, Homo Sapiens
  misc_feature (634)..(634): n is a, c, g, or t
tgccaggcggggatcgggcggcgccgagctgaggtggtgagggactagctcccggatgtggagaagctggggagaaggcgtgggaggaagatggactcggtggagaagggggccgccacctccgtctccaacccgcgggggcgaccgtcccggggccggccgccgaagctgcagcgcaactctcgcggcggccagggccgaggtgtggagaagcccccgcacctggcagccctaattctggcccggggaggcagcaaaggcatccccctgaagaacattaagcacctggcgggggtcccgctcattggctgggtcctgcgtgcggccctggattcaggggccttccagagtgtatgggtttcgacagaccatgatgaaattgagaatgtggccaaacaatttggtgcacaagttcatcgaagaagttctgaagtttcaaaagacagctctacctcactagatgccatcatagaatttcttaattatcataatgaggttgacattgtaggaaatattcaagctacttctccatgtttacatcctactgatcttcaaaaagttgcagaaatgattcgagaagaaggatatgattctgttttctctgttgtgagacgccatcagtttcgatggagtnaaattcagaaaggagttcgtgaagtgaccgaacctctgaatttaaatccagctaaacggacctcgtcgacaagactgggatggagaattatatgaaaatggctcattttattttgctaaaagacatttgatagagatgggttacttgcagggtggaaaaatggcatactacgaaatgcgagctgaacatagtgtggatatagatgtggatattgattggcctattgcagagcaaagagtattaagatatggctattttggcaaagagaagcttaaggaaataaaacttttggtttgcaatattgatggatgtctcaccaatggccacatttatgtatcaggagaccaaaaagaaataatatcttatgatgtaaaagatgctattgggataagtttattaaagaaaagtggtattgaggtgaggctaatctcagaaagggcctgttcaaagcagacgctgtcttctttaaaactggattgcaaaatggaagtcagtgtatcagacaagctagcagttgtagatgaatggagaaaagaaatgggcctgtgctggaaagaagtggcatatcttggaaatgaagtgtctgatgaagagtgcttgaagagagtgggcctaagtggcgctcctgctgatgcctgttctactgcccagaaggctgttggatacatttgcaaatgtaatggtggccgtggtgccatccgagaatttgcagagcacatttgcctactaatggaaaaggttaataattcatgccaaaaatagaaattagcgtaatattgagaaaaaaatgatacagccttcttcagccagtttgcttttatttttgattaagtaaattccatgttgtaatgttacagagagtgtgatttggtttgtgatatatatatattgtgctctacttttctctttacgcaagataattatttagagactgattacagtctttctcagatttttagtaaatgcaagtaagaacatcatcaaagttcactttgtattgtaccctgtaaaactgtgtgtttgtgtgctttcaaagatgttgggattttatttatctggggacagtgtgtatggtaagacatgcccttctattaataaaactacatttctcaaacttga

SEQ ID NO: 254822 - DNA, 343 bp, Homo Sapiens
gagaaatgtagttttattaatagaagggcatgtcttaccatacacactgtccccagataaataaaatcccaacatctttgaaagcacacaaacacacagttttacagggtacaatacaaagtgaactttgatgatgttcttacttgcatttactaaaaatctgagaaagactgtaatcagtctctaaataattatcttgcgtaaagaggaaaagtaggaggcacaatatatatatatcacaaaccaaatcacactctctggtaacaattacaacaggggaatttacttaatccaaaaattaaaaggcaaactgggctggagggagggctggtatccatttttt

SEQ ID NO: 254823 - DNA, 725 bp, Homo Sapiens
  misc_feature (210)..(210): n is a, c, g, or t
  misc_feature (309)..(309): n is a, c, g, or t
taggccgcctcgcgaaggagtggtcccacgcgcgttcgggggcctccccggttcattggccccaggccggaaacaggggcgctttattttttaaaggaatctttataagacgctgtcaccctgccagatatccactctgcgccacaccagtcagtcatcagagcttgtgtgctactgattctaaatctggaggctgatcagctctaatantatctgcgaagagaaatgtgagcacatatatattatcacaaccaaatcacactctctgtacattacacatcggatctacttaatcaaaaatacaagcanactggctgaagaacgctgtatcatttttttctcaatattacgctaatttctatttttggcatgaattattaaccttttccattagtaggcaaatgtgctctgcaaattctcggatggcaccacggccaccattacatttgcaaatgtatccaacagccttctgggcagtagaacaggcatcagcaggagcgccacttaggcccactctcttcaagcactcttcaatcagacacttcatttcctatcaagtaaaataaatactgagcaaacatttaaagagacaaagaatattctagctaaataatgcagacagcaaccaacaggtaactctggcaacttcagtaagacctaggggcactgcatataagaatactaaagattagatggaacaaaaatattttacagtataattgagg

SEQ ID NO: 254824 - DNA, 558 bp, Homo Sapiens
  misc_feature (146)..(411): n is a, c, g, or t
ggggggtcctgctacattgctcaggctagactccaactctgagctcaggcaatcctatggccttggcctccggaacagctaggatggcaggtgcgtataaccacagccagcttaaacccttgggtttttctttttgtgagacacannnnnnnnnnnnnnnnnnnnnnnnnnnnnnnnnnnnnnnnnnnnnnnnnnnnnnnnnnnnnnnnnnnnnnnnnnnnnnnnnnnnnnnnnnnnnnnnnnnnnnnnnnnnnnnnnnnnnnnnnnnnnnnnnnnnnnnnnnnnnnnnnnnnnnnnnnnnnnnnnnnnnnnnnnnnnnnnnnnnnnnnnnnnnnnnnnnnnnnnnnnnnnnnnnnnnnnnnnnnnnnnnnnnnnnnnnnnnnnnnnnnnnnnnnnnnnnnnnnnnnnnnngcatccagccagccttggatttttaacacatctaactcaggggctccttgttcttgttcactctcgcttgccccatctgtgacagcagggcccctgtgggtccttctgatacaaccacagtgtgtcttacacaattaccctcgtgcc

SEQ ID NO: 254825 - DNA, 342 bp, Homo Sapiens
  misc_feature (141)..(165): n is a, c, g, or t
  misc_feature (234)..(248): n is a, c, g, or t
gaagatgaggaaaaaccctccccaatacgcaggtctttggtatcttgcagattaggtggctcatccaggcttccaagagttcaagaacccatcttcactgtaacatcagttaaaatgaggaatgaatccctttattccttnnnnnnnnnnnnnnnnnnnnnnnnnaagttaaacacagagttggagaatgtgatgattaagaagttaatagcttaattaaatttcaaatctgcnnnnnnnnnnnnnnngtttatttttatataactaacaaggatattctatccctgcccgccacacaatctgaaatctaaaatgtatgctctggcccagacgaggtggctc

SEQ ID NO: 254826 - DNA, 1874 bp, Homo Sapiens
gatggagtcacgcctcccgcctcccggagctgcccagtggctgccttgtccttcaagtgcaggagctggttcaaatgtcaggaatggaagccactgtgaccatcccaatctggcaaaacaagccacatggggctgctcgaagtgtagtaagaagaattgggaccaacctacccttgaagccgtgtgcccgggcgtcctttgagaccctgcccaacatctctgacctgtgtttgagagatgtgcccccagtccctaccctggctgacatcgcctggattgctgcggatgaagaggagacatatgcccgggtcaggagtgatacgcgccccctgaggcacacctggaaacccagccctctgattgtcatgcagcgcaatgcctctgttcccaacctgcgtgggtccgaggagaggcttctggccctgaagaagccagctctgccagccctaagccgcactactgagctgcaggacgagctgagccacttgcgcagccagattgcaaagatagtggcagctgatgcagcttcggcttcattaacgccagatttcttatctccaggaagttcaaatgtctcttctcccttaccttgttttggatcctcattccactctacaacttcctttgtcattagtgacatcaccgaggagacagaggtggaggtccctgagcttccatcagtccccctgctttgttctgccagccctgaatgttgcaaaccagaacacaaagctgcctgcagttcgtctgaagaggatgactgcgtctctttgtccaaggccagcagctttgcagacatgatgggtatcctgaaggactttcaccgaatgaaacagagtcaagatctgaaccggagtttattgaaggaggaagaccctgctgtgcttatctctgaggtcctaaggaggaagttgctctaaaggaagaagatatcagtagaaaaggaaattgacaaccctcagctctgcaaactcagtctcatgctcctggaataccttcaatagctgccttcctcaccgcagatgtttctgcctcttaaggatagatcttctgcaacagtcttgctgacaagctagagcttggactgaaagagaagagctggattatatatttcccagacttcaaaccctagcagaagctaaggcttgtgatttgacctgagacatttgtttcaggtaatcgtgtagaatgaagtatcttagtttaaagggtaagagagaagttgtttctggtttttccttgcccctgtgtgaaaataggtcctaaatgactgacttcactgcattagaccctatagctggtctcacaagacactttgtgcccagctgtcactcactctcagcagcttccttgcagcagagcagggctgaggggaaggggctatgaatgtttgtatacgtgttcacagggcacggaaaatcttatgctgctccgtcataaacctacaccaatgcccagcaatcaccctcctcacttccttgtctagatgtagaggtcaggctgctgaaccagccaacacatgggctactgctgggaagcctgggctgttttttttcttaaacacattttatattactgaacaaccaaatctaccctccacggccctgaggccttatcagttccactgattaaaaactttctcttccacggactttaagcccggtaggaaagagagaggaggagggggaaagagcaaaccatctttcttccaggcccttgactgctcctttgggctgggccaaggtttgtatgtaccacaccatgcatgactcagatgccctcaggtccctttctctatggtatgtatactgcttgtgtttgggttgaagcactacctgacattaaaggaaggacttggagagagaatgccaaaa

SEQ ID NO: 254827 - DNA, 420 bp, Homo Sapiens
ggagtgtggagtgtagagcacctgctgggccagtctctgtagtagcaatcattgaacatgtgggcagggggtggtggggacagtgtccaaagattcctgggaccagaattggcaggaagaactgcctgatttccgtttgccagggtaagcaaagcaccctcggggaggccagaaacccagccctgactggtgctgctgcaagccgggaggatgagttgtgcctggttccctgggcaacctcacccgggctgggctggacctcactatggacttcctgtgggttttcttcaagcatctctcccttcaagcttgttagccaagggaggccttcagtgggggaactgtgggccacagctggaggacctctaccccagggtctttattggacctggctctggtggatgaggggacggctccggc

SEQ ID NO: 254828 - DNA, 367 bp, Homo Sapiens
aagatggcggacggcccggatgagtacgataccgaagcgggctgtgtgccccttctccacccagaggaaatcaaaccccaaagccattataaccatggatatggtgaacctcttggacggctcatattgatgattacagcacatgggacatagtcaaggctacacaatatggaatatatgaacgctgtcgagaattggtggaagcaggttatgatgtacggcaaccggacaaagaatactatatttcgaaaggtgctattgtggatcaacttggaggggacctgaattcaactccattgcactgggccacaagacaaggccatctatccatggttgtgcaacttgtatggtgcagatccttcttttg

SEQ ID NO: 254829 - DNA, 366 bp, Homo Sapiens
gtggactctgcctgcctacctggtctgggaagatgttctaccatatctccctagagcacgaaatcctgctgcacccgcgctacttcggccccaacttgctcaacacggtgaagcagaagctcttcaccgaggtggaggggacctgcacagggctcaggcatcccgaagattgagatctgttgcctcaaggactccagccttcttggacatttattgtgttaccagaacagcatttggtcttacacatactgatctctgttctgtcttcttttggtcattaagctctctgggagcagaggtgctatctacttgtccttttgctctccccgaccctacccccgagctcagcgacttttattgcagtgt

SEQ ID NO: 254830 - DNA, 1091 bp, Homo Sapiens
  misc_feature (850)..(852): n is a, c, g, or t
  misc_feature (854)..(854): n is a, c, g, or t
  misc_feature (856)..(859): n is a, c, g, or t
  misc_feature (861)..(861): n is a, c, g, or t
  misc_feature (865)..(866): n is a, c, g, or t
  misc_feature (875)..(930): n is a, c, g, or t
  misc_feature (980)..(981): n is a, c, g, or t
  misc_feature (995)..(1009): n is a, c, g, or t
aaggagcgaggcctgggtggcaattcggacgaggctggggttgcggcgtctaagtgtttccggtggattcccagggactgtcggaggtgtggactctgcctgcctacctggtctgggaagatgttctaccatatctccctagagcacgaaatcctgctgcacccgcgctacttcggccccaacttgctcaacacggtgaagcagaagctcttcaccgaggtggaggggacctgcacagggaagtatggctttgtaattgctgtcaccaccattgacaatattggtgctggtgtgatccagccaggccgaggctttgtcctttatccagttaagtacaaggccattgttttccggccatttaaaggggaggtcgtggatgctgttgtcactcaggtcaacaaggttggactcttcacagaaattgggcccatgtcttgcttcatctctcgacattccatcccttcagagatggagtttgatcctaactccaacccaccatgttacaagacaatggatgaggatattgtgattcagcaggacgatgagatccgcttaaagattgtggggacccgtgtggacaagaatgacatttttgctattggctccctgatggacgattacttggggcttgtaagctgagcctggtggcctcctacccttggtcctactctaggaagtgtgattgtcacacttatcatgttgtccagaggtccagtctggctgctgttgtggaggcaaggaaggcaactcatcccagaaggcatctggtgcttcttgtagcttaactactgcctcctcatttttcagtatgtgttctaagtataaaaagtccttggttctcatggaaaannnancnnnnanaatnncccccaaannnnnnnnnnnnnnnnnnnnnnnnnnnnnnnnnnnnnnnnnnnnnnnnnnnnnnnntatcttaccccccactatctttcggacaccccccattaaaaaaacaaatnnaaaaattgtggggnnnnnnnnnnnnnnntaaaaaaatttcttaaaaactttttttggggcgcggggcccccctttaggcaaggggacaaggggccaaaacctttttcctc

SEQ ID NO: 254831 - DNA, 750 bp, Homo Sapiens
ggcacgagggcagttgaggaagggaagtagatataatggagcttagtggcagagcagctggaatcctgagagaagagaataactttagttcagagcaggtggggaaatgagagattgagtaggaggaccaaggttgagggaagcagatcttcttagttgctgtcagcggctgatggggaagattgttggtagaaggaagtcagaatataggtacagagggataagtttgctaagaacagagatcagcaaacagcttttctgagagaaagaaacatctgcaaatgacatgctgtttctgcagtttctgctgctagctcttcttctcccaggtggtgacaatgcagacgcatcccaggaacacgtctccttccatgtcatccagatcttctcatttgtcaaccaatcctgggcacgaggtcagggctcaggatggctggacgagttgcagactcatggctgggacagtgaatcaggcacaataattttcctgcataactggtccaagggcaacttcagcaatgaagagttgtcagacctagagttgttatttcgtttctacctctttggattaactcgggagattcaagaccatgcaagtcaagattactcgaaatatccctttgaagtacaggtgaaagcgggctgtgagctgcattctggaaagagcccagaaggcttctttcaggtagctttcaacggattagatttactgagtttccagaatacaacatgggtgccatctccaggctg

SEQ ID NO: 254832 - DNA, 604 bp, Homo Sapiens
aatgcacacttttaatctctatatggcagcatttttgaggctttatatctgcccgtgtaccctcaactgcctcctttttgcagagaacgatccccacaggaactggtctaagaacactgtctgcacatgattgatgcttaaaatccaatataccaccacatatcaaaggttgggattttcagagtccttcttgatttctgagctgaaaccttaacaaatagggaatttggcagggaacacacctgggtttttaattcagaaccctatttatatacggttaaaatttaaggtactgtagtttatataaaagtcggatgttaaaatattatatttcagtactagaagcttctttgcagtcattaacatgacaaattaagtaataaatataaaagtgattgtccataaattatcattgaatttttgtgtttatttggaagtgttcggtatttatctgcactttgggtatatatacacacatacatatgccaacatgtaaataacctcatgtttattcctaatctaaattgccacaatatttttaaggtatagttacactgtgttttaaattactttaaaaataaactttgtaagcagattttaattt

SEQ ID NO: 254833 - DNA, 643 bp, Homo Sapiens
  misc_feature (574)..(574): n is a, c, g, or t
  misc_feature (579)..(579): n is a, c, g, or t
  misc_feature (630)..(630): n is a, c, g, or t
atcattgagtttgaatctccttctcacttggagtggaagttgtaggattctgcctctaggaaatgtgccatccttctgaataattggacccaggaagaggagtgtaactagagtggccagctctccgccagctgatcacaccaagagagaagatgatgaggcccaggcccagagtcactgcagacacagaaaccttcagggtctgcatgggggacagcccaggtgtccagtcccgaaggatgggctcaggagccccaatgtgctctaccacacaggtgtaagtgtccccgtaagagggggttaaggctaaatgggagagggtctggtatgtccaagtctccaattgggctgggcagtcttgtgcgcactgctgtgaggcatgacaagcttcccgttcttcctccacgtgatagtcacttctgctggatagaagccccacacatagcaggccagcatcacaggctccctcgtgttaaaaggagtggttttggctacttgcacagatggtggccgtgtcctgttggtcagtgatccccagaagggctgggtgtgtgtggcacaattctgaagcccnatttncaagcgctgcatcagggtgtctttttggttgaggtgctgtgagaggacatntcgccaagctatt

SEQ ID NO: 254834 - DNA, 456 bp, Homo Sapiens
  misc_feature (52)..(52): n is a, c, g, or t
  misc_feature (64)..(131): n is a, c, g, or t
cagcacagtggtgtgcactatagtcccagctactcaggtgctgaggtggagnatccctgagcannnnnnnnnnnnnnnnnnnnnnnnnnnnnnnnnnnnnnnnnnnnnnnnnnnnnnnnnnnnnnnnnnnnaaaaactggtgtcatcaattgtgaaggaacccgaggctcctttaaaagtttgttataaaattatagatatctcataaatattgaggtggaaagattccctggaagcagcctagtcagaaagtgaagacagtgacatccagataggttaatacttctgccagcaccataattacactctcttggctgtacattccaatcactcgaagacaggcaaaactgaaccactggctgggcccacaaaacaactttgcccactgaaggttcacttaatcaactgataaggccgggtgcggtggctcatgcctgtaattccagcgctttggat

SEQ ID NO: 254835 - DNA, 781 bp, Homo Sapiens
  misc_feature (60)..(369): n is a, c, g, or t
  misc_feature (587)..(624): n is a, c, g, or t
ccaacgcccgagccaacgagttattaccaagaagcggaaaagcccccaaatcgcaaccgnnnnnnnnnnnnnnnnnnnnnnnnnnnnnnnnnnnnnnnnnnnnnnnnnnnnnnnnnnnnnnnnnnnnnnnnnnnnnnnnnnnnnnnnnnnnnnnnnnnnnnnnnnnnnnnnnnnnnnnnnnnnnnnnnnnnnnnnnnnnnnnnnnnnnnnnnnnnnnnnnnnnnnnnnnnnnnnnnnnnnnnnnnnnnnnnnnnnnnnnnnnnnnnnnnnnnnnnnnnnnnnnnnnnnnnnnnnnnnnnnnnnnnnnnnnnnnnnnnnnnnnnnnnnnnnnnnnnnnnnnnnnnnnnnnnnnnnnnnnnnnnnnnnnnngcacgaggacttgctggccctggggccttctttgccttggcagcgacccagtgtggcagaatgcaatgttctggtttggggtctcaagctaagggctggtgaggaaggctgcggaagtataaatcttcaaagtgaatatgtcccaaaggggctggagagttgcaccaacctttagggtcttgatttccctcagtggttcctacatttcatgtaactgnnnnnnnnnnnnnnnnnnnnnnnnnnnnnnnnnnnnnnatgtaaatgaatttataggttaatgaaaaatttttgtcataacatatatcccaacttttggttcagaaaatgtggccaccatgcccactgggaaatgttgggatctccatgaaagaggtggctggatgaaaaagctcatggcttgaaggtgggaaag

SEQ ID NO: 254836 - DNA, 355 bp, Homo Sapiens
ggcagaggtgcaagagagggatgtactgaagcttcttcccgtcctgccacagacacttctcctgccttcccaccctgacccggcagaacccaccaagtgcctgtgtgcagcctcctgtgcctcacccagggcctgaccccagagtggtcccaacaacccggtctcatgcccactccccatccctgcttcccagggaaccctttctcattctccaagcctggtcagctgcctgcacaggcagaggtgccctcagcccagattagcaacactcatagttttgccaattaccagtagacactagtggaaccatctaactggctgcctctctccttccacttatttcctccttggtgct

SEQ ID NO: 254837 - DNA, 1020 bp, Homo Sapiens
  misc_feature (164)..(164): n is a, c, g, or t
  misc_feature (167)..(167): n is a, c, g, or t
  misc_feature (629)..(659): n is a, c, g, or t
ggtacggtccggaattccgggatatcgtcgacccacgcgtcgagaggctgggagcaaatgccccatgcggtgagaggatgaggggagcctacgcctcaggcatgtggtgagaggatgagggggagggagcccacgcctcaggtggagtgggcagaggtgcaagnagnagggatgtactgaagcttcttcccgtcctgccacagacactactcctgccttcccaccctgacccggcagaacccaccaagtgcctgtgtgcagcctcctgtgcctcacccagggcctgaccccagagtggtcccaacaacccggtctcatgcccactccccatccctgcttcccaaaaattgcactgtgtgcagtttgcaacaaagaatcccgctggcatcctgtccttgggaaccctttctcattctccaagcctggtcagctgcctgcacaggcagaggtgccctcagcccaggttagcaacactcatagttttgccaattaccagtagacactagtggaaccatctaactggaacttcctctctccttccacttatttcctcaaacttgttgctttacactagacacatgcaaatgtatgttttaaacacaccaaaacagatcatgccaaatgagttnnnnnnnnnnnnnnnnnnnnnnnnnnnnnnncctgggtttgggttctttcctcccagcctttggatggtgccttgggccccttagccccagcgccagggcctcccagctgaggccacaggaaagcacttttttatgatgtactaaaagccacagtatgtggcaactgcaaaaggatcaggaatttagggtatgatctcggtcacgtgtcccgggcgctgaggggaaaggaagcgggcatgattgtagacaatgagggggttctcttgatgtaatgaaatgcaattttatggtttggtgcaaaaactcctattttccagtaaattaactttatttctaaagcatattttgatttgccatcaagagcaataaagcattaaatctgtaacaaaaa

SEQ ID NO: 254838 - DNA, 435 bp, Homo Sapiens
  misc_feature (212)..(212): n is a, c, g, or t
  misc_feature (215)..(215): n is a, c, g, or t
  misc_feature (217)..(217): n is a, c, g, or t
  misc_feature (301)..(301): n is a, c, g, or t
  misc_feature (304)..(304): n is a, c, g, or t
  misc_feature (351)..(351): n is a, c, g, or t
  misc_feature (396)..(396): n is a, c, g, or t
  misc_feature (419)..(419): n is a, c, g, or t
gtggagcagaggtgcaagagagggatgtactgaagcttcttcccgtcctgccacagacactactcctgccttcccaccctgacccggcagaacccaccaagtgcctgtgtgcagcctcctgtgcctcacccagggcctgaccccagagtggtcccaacaacccggtctcatgcccactccccatccctgcttcccaaaaattgcactgtgtnagntnttgcaacaaagaatcccgctggcatcctgtccttgggaaccctttctcattctccaagcctgggtcagctgcctgcacaggcgnagngttgccctcagcccaggttaggcaacactcatagttttggccaattnaccagtaggacactagtgggaaccatcttaactgggaatttcctnttgttcctttccatttattttcntcaaattgtttggttt

SEQ ID NO: 254839 - DNA, 621 bp, Homo Sapiens
  misc_feature (44)..(163): n is a, c, g, or t
atgatggccaagcttcatccatgtccttgtgaagaatatgaacnnnnnnnnnnnnnnnnnnnnnnnnnnnnnnnnnnnnnnnnnnnnnnnnnnnnnnnnnnnnnnnnnnnnnnnnnnnnnnnnnnnnnnnnnnnnnnnnnnnnnnnnnnnnnnnnnnnnnnnnataggcacaacagacaaaacatggactcacaatctaaactctgaaaaatgacagaaaaggaaaaccagtgaattaagaacaagtatttaaaaagggaattataaaaagcaaatactgtgctgctgggtaatcaattgactccccttacccggaagtcaatagggtgtcttaatttatactttaatcaaaaaaataaataagaaaatatttaatattttgaagttcagagaaagaaaattaagcattctccatgacatcctcagaaatgtagacaattctataataaatgcatttttaaacttaacacagtaggaaacatgggatttggttgctggcacaaaggctgcatggtatggcttaggcttatgccctatgatcgccctcactgacatcgcctgttgtctcactgtaagaaatactactgaggataattattgcatgagtttcaaatgcaccca

SEQ ID NO: 254840 - DNA, 593 bp, Homo Sapiens
tcaactgggacatccggcagtggccatcgagtttgatgaacacatcaatgtggccttcagctgcgtgtctgccagctgccgaattgtacacgagtatatcgggggctacattttcctgtcgacgcgggagcgggcccgtggggaggagctggatgaagacctcttcctgcagctcaccgggggccatgaggccttctgagggctgtctgattgcccctgccctgctcaccaccctgtcacagccactcccaagcccacacccacaggggctcactgccccacacccgctccaggcaggcacccagctgggcatttcacctgctgtcactgactttgtgcaggccaaggacctggcagggccagacgctgtaccatcacccaggccagggatgggggtgggggtccctgagctcatgtggtgccccctttccttgtctgagtggctgaggctgatacccctgacctatctgcagtcccccagcacacaaggaagaccagatgtagctacaggatgatgaaacatggtttcaaacgagttctttcttggttactttttaaaatttcttttttataaattaatattttattgttaa

SEQ ID NO: 254841 - DNA, 774 bp, Homo Sapiens
  misc_feature (736)..(736): n is a, c, g, or t
atgatggcggccgcctggccgtctggtccgtctgctccggaggccgtgacggccagactcgttggtgtcctgtggttcgtctcagtcactacaggaccctggggggctgttgccacctccgccgggggcgaggagtcgcttaagtgcgaggacctcaaagtgggacaatatatttgtaaagatccaaaaataaatgacgctacgcaagaaccagttaactgtacaaactacacagctcatgtttcctgttttccagcacccaacataacttgtaaggattccagtggcaatgaaacacattttactgggaacgaagttggttttttcaagcccatatcttgccgaaatgtaaatggctattcctacaaagtggcagtcgcattgtctctttttcttggatggttgggagcagatcgattttaccttggataccctgctttgggtttgttaaagttttgcactgtagggttttgtggaattgggagcctaattgatttcattcttatttcaatgcaggtaagtttctcaatctagaatgtaaactacttttacattcaaaattgagttctgtgatctcctgtgctatttaaaatgtttagtatacgaggaagcagagaagaatggttgtttccatttttcttcatgtactagatctaaggaatcctggtcatgtttccaactagcatttctcaaactgtgctctaccagttagtagttctcaaagacattaagaagntcattaaaaaatatcccggggctcaaatatgatttgta

SEQ ID NO: 254842 - DNA, 504 bp, Homo Sapiens
aagatggcggccgcctggccgtctggtccgtctgctccggaggccgtgacggccagactcgttggtgtcctgtggttcgtctcagtcactacaggaccctggggggctgttgccacctccgccgggggcgaggagtcgcttaagtgcgaggacctcaaagtgggacaatatatttgtaaagatccagtttcctgttttccagcacccaacataacttgtaaggattccagtggcaatgaaacacattttactgggaacgaagttggttttttcaagcccatatcttgccgaaatgtaaatggctattcctacaaagtggcagtcgcattgtctctttttcttggatggttgggagcagatcgattttaccttggataccctgctttgggtttgttaaagttttgcactgtagggttttgtggaattgggagcctaattgatttcattcttatttcaatgcagattgttggaccttcagatggaagtagttacattatagattac

SEQ ID NO: 254843 - DNA, 491 bp, Homo Sapiens
ggacggcttgtccccactagtcctgggcaatcatggcagagtgctgggtgccccagggctcatgctgctagggggcggcttggttctgctgctgcaccacaagaagtactcagagtaccagtccataaattaaggcccgctctctggagggaaggacattactgaacctgtcttgctgtgcctcgaaactctggaggttggagcatcaagttccagccggccccttcactcccccatcttgcttttctgtggaacctcagaggccagcctcgacttcctggagacccccaggtggggcttccttcatactttgttgggggactttggaggcgggcaggggacagggctattgataaggtccccttggtgttgccttcttgcatctccacacatttcccttggatgggacttgcaggcctaaatgagaggcattctgactggttggctgccctggaaggcaagaaaatagatttattttttttcacagtgaa

SEQ ID NO: 254844 - DNA, 436 bp, Homo Sapiens
cgagcgacggccaggaaggagaggcggatgtcagccgcaccagcctgcacctcggaaggtcaagggagccacattgctacagtcctggaaggcttaacgcagggctgcccgggctgtgtggcgtgaaagggtggagggcaggttcaagatgcgaaaagtcaggtgcgtctttctccagcggcccagcaacagagtatttaagggtcttctggttgaagggatcctctaggccacaacgaggctgcctcatgcgggcccttgtggcatcatccagctgacctgagactggaagttcagatgcttcctgaaaagctctcagagcctcggtgatatcttctggcttgaagttattagatccttctacaggcttctgtaggtacccatattgtgacaggtagtccacgggcgccacctctgcaagccccagaacccggcc

SEQ ID NO: 254845 - DNA, 442 bp, Homo Sapiens
aaggcaaaagggaagacatcttaattaaaaggggaggtagtagttgcagaatggcttgcacataaccttcttgagcaagtgagtatgagcaagattggataagctaaaaataacttcaaatgttgttaattttgctcatttggtatactaacatcactttacagacttgtaaaatattagagataatatccaatgttggcaagaaagagtaaacaagtatgttggtgggaatataaaatgatacagccttttgagaagataatttgctatgatctagaaaaatatttagtatgcatcccatttgacccagaaattccacactgaagtccatattctacagagatatgaacccacgtgtaattatatgattgtatatatttacatataagtgcaaaatattttgaggtagcattgtttggaatagcatgatactggggctggg

SEQ ID NO: 254846 - DNA, 647 bp, Homo Sapiens
  misc_feature (561)..(561): n is a, c, g, or t
  misc_feature (595)..(595): n is a, c, g, or t
  misc_feature (632)..(632): n is a, c, g, or t
agccagcgagcgagcaagcaagcaagcaccggaccccggccgcgccttcagctacggcccgagcgagcccgccgccgccgggcccggccacagcctgcagcggagcccacgagaggcagcgccatggcggagcagacctactcgtgggcctattccctggtggattccagtcaagtgtctacatttctgatttccattcttcttatagtctatggtagtttcaggtcccttaatatggactttgacagcaccaataatagcatccaaacaattgactctacccaggctctgttccttccaattggagcatctgtctctcttttagtaatgttcttcttctttgactcagttcaagtagtttttacaatatgtacagcagttcttgcaacgatagcttttgcttttcttctcctcccgatgtgccagtatttaacaagaccctgctcacctcagaacaagatttcctttggttgctgtggacgtttcactgctgctgagttgctgtcattctctctgtctgtcatgctcgtcctcatctggggttctcactgggccattggntttcttcatgggatggcactgggccatggggctncttgtggttcggccatggatcggcctttggttccggnctggccgaggcctca

SEQ ID NO: 254847 - DNA, 1828 bp, Homo Sapiens
  misc_feature (1313)..(1338): n is a, c, g, or t
  misc_feature (1700)..(1700): n is a, c, g, or t
tgctgtgctgctctcaagctcttggagcaattgtctacattaccgaaatcgaccccatctgtgctctgcaggcctgcatggatgggttcagggtggtaaagctaaatgaagtcatccggcaagtcgatgtcgtaataacttgcacaggaaataagaatgtagtgacacgggagcacttggatcgcatgaaaaacagttgtatcgtatgcaatatgggccactccaacacagaaatcgatgtgaccagcctccgcactccggagctgacgtgggagcgagtacgttctcaggtggaccatgtcatctggccagatggcaaacgagttgtcctcctggcagagggtcgtctactcaatttgagctgctccacagttcccacctttgttctgtccatcacagccacaacacaggctttggcactgatagaactctataatgcacccgaggggcgatacaagcaggatgtgtacttgcttcctaagaaaatggatgaatacgttgccagcttgcatctgccatcatttgatgcccaccttacagagctgacagatgaccaagcaaaatatctgggactcaacaaaaatgggccattcaaacctaattattacagatactaatggaccatactaccaaggaccagtccacctgaaccacacactctaaagaaatattttttaagataacttttattttcttcttactcctttcctcttgatttttttcctataatttcattcttgttttttcatctcattatccaagttctgcagaccacacagggaacttgcttcatggctctttagatgaaatagaagttcagggttcctcactctagtcactaaagaaggattttactctcccagcccagaaaggtgattctttctttaccatttctggggactttagtcttaattaggtaccttattaacaggaaatgctaaggtaccttctctgtggaacaatctgcaatgtctaaatcgccttaaaagagcccatttcttagctgctgaaatcagtgctctttcacttcttcagagaagcagggatggtacctacccggcaggtaggttagatgtgggtggtgcatgttaatttcccttagaagttccaagccctgtttcctgcgtaaaggtggtatgtccagttcagagatgtgtataatgagcatggcttgttaagatcaggaggcccacttggatttatagtatagcccttcctccactcccaccagacttgctcatttttcgagtttttaactagactacactctattgagtttaattttgtcctctaggatttatttctgttgtccnnnnnnnnnnnnnnnnnnnnnnnnnnttaggagaattttgggggtaatgctgaggaatgctctgagtggttagtggtaccaatttctctttgaaccttgagctaaggatgctgagtctagagaaatgctagtctcaagccctgttaagtcctctgtttctagccggtagttcatagcatcagtgaatggagccacaaggaatttatcagtggtacatacagctgtgctggaggcaattctgagccattatcaggataaaggccacgggtccaaccttagcgataacctaaggagcaatcggtacaggggctgggaaccaaaaattacggggaggggtggcggggggaacgaaatgggccgggaaaaactttctaatggcgggcatgcnatacagtgtgacaactgctgcggccacccaggacctggacaggcgcgtgagaaccgcgccgagaaaagaaggatagccaggaccaggagagatactacgccgcgctaccgaccaccacgtagcgccaa

SEQ ID NO: 254848 - DNA, 803 bp, Homo Sapiens
  misc_feature (514)..(571): n is a, c, g, or t
  misc_feature (665)..(665): n is a, c, g, or t
gggatcgcatgaaaaacagttgtatcgtatgcaatatgggccactccaacacagaaatcgatgtgaccagcctccgcactccggagctgacgtgggagcgagtacgttctcaggtggaccatgtcatctggccagatggaaaacagagttgtcctcctggcagagggtcgtctactcaatttgagctgctccacagttcccacctttgttctgtccatcacagccacaacacaggctttggcactgatagaactctataatgcacccgaggggcgatacaagcaggatgtgtacttgcttcctaagaaaatggatgaatacgttgccagcttgcatctgccatcatttgatgcccaccttacagagctgacagatgaccaagcaaaatatctgggactcaacaaaaatgggccattcaaacctaattattacagatactaatggaccatactaccaaggaccagtccacctgaaccacacactctaaagaaatattttttaagataacttttannnnnnnnnnnnnnnnnnnnnnnnnnnnnnnnnnnnnnnnnnnnnnnnnnnnnnnnnnatctcattatccaagttctgcagaccacacaggaacttgcttcatggctctttagatgaaatagaagttcagggttcctcactctagtcactanagaagggattttactctcccagcccagaaaggtgattctttctttaccatttctggggactttagtcttaattaggtaccttattaacaggaaatgctaaaggtaccttctctgtgggaacaatctgcaatgtctaaa

SEQ ID NO: 254849 - DNA, 1019 bp, Homo Sapiens
ggtatgtgaaaccatatagaaatgaggatatgtcagcatatgtgaagaaaatccagtttaaattacatgaaagctatggcaatcctttaagagttgttactaaacctccatatgaaattactgaaacaggatggggtgaattcgaaataatcatcaaaatatttttcattgaccctaatgaaagacctgtaaccctgtatcatttgctaaagctgtttcaatcagacaccaatgcaatgctggggaaaaagacagtggtttcagagttctatgatgaaatgatatttcaagacccaacagcaatgatgcaacaattattgacaacatctcgtcagctaacattaggagcctataagcatgaaacagaatttgcagagcttgaagtgaaaaccagagaaaaattagaagctgctaagaaaaaaacaagctttgagattgcagagcttaaggagagattaaaagcaagtcgtgaaactataaattgtttaaaaaatgaaatcagaaaacttgaagaagatgaccaagcaaaagacatataaacagttctcatgagaacttggtagtaagctaaactgaaaataaggtgggcttcactggagaaatggacttactgcaaatgctgtgatgtttcttagaggaacttcatatacagctgttgaccatgaatttcttagcaataggaatttgtactatttaagcaatctttaatggaaaatatgtgtgtaagaatggatgctatataggtattttaccaacccattttaagaaaattctatgatattaagcacagtttttaaaaatgtttattgtagtatatgtatagcttattacccttttgacaggcatcaaaatttcattataaagtattacttgtacaaattttgtacttctttagtggctagaattagtgaagaaacttaatgtgtatatttaatttcttcaagttcttacctgcccccatccttttttgtatatgatgtgtccagtaagtattcaataaatgtagtttacagatccta

SEQ ID NO: 254850 - DNA, 1380 bp, Homo Sapiens
  misc_feature (429)..(461): n is a, c, g, or t
tgaagttaaaggacactttatttactgacagattgaaaactgtaactccaggtagtgcaaaatgcaccacaacccaattacaaagaacaggtgttaacacacaatgtttaaacaatgctacactcatttttggcaaagtgctgtattgttcagtctgtgtacaaaactgaccatctatgaaccaatcagtataaaaaatttctataaaaacaaaatttagacagtggctcaagaaaacaagctgccatttatgcatagattgatgtacagtaacctaaccaaatgtcccttttgaattttcaagttactgaaaaaaaatgtgtcgagaaacacattaagaaggcacatgtacagtctacaatactcttcagtctccctaactcatgccctgcccctataaaggaaatatgttcacaattttacttgagnnnnnnnnnnnnnnnnnnnnnnnnnnnnnnnnncacacacgcaattattaaagttcaaaatctctggaggaaaatacaagcaaaaccactcatacactccaagcctgaaacacacatctaacctccccaggtactggtttggttttcagaggtccacctagaaaacaaatactaaaacttcaggcaaaacagagcaaaactggacatttaacaattacacaatttttaaaagtgtcgtaaaattctcaactatatacaaaacattgtccacttaagctgcctgcctttcaagagtaactctcctcccatgcaaaggatactgttgcacataaaagatatcctcatctgcatgttttccagtacctctttctccaccctaaacagttgaaatttaattggtctcaaatttcaagtgaaactgatacatggcaaggctgacaccactgtatcatgtaggttttctaaataaagcattttatgtataattttaagcattaaagtaagtagatagggatgccatttctaatatatcagcatggctgatggcagtgaaaccatccaagatagaaggcccacttttaacagagtttaaccagtatttatgggccttataaaataaaaagataattttaaagtaacattacaaacatatactactagtgtctcccagtacaaggagcagtctcttgactcaaaaaatgaaaactaatatgtggaaactcttaaagttttcccactaatctatttaaatgtaaatatctgtcttctagttggagtccttcatgtttttgtttccaactcagagaaaatgagaataatgaagatactcttccttgctcgtttttcttaagagtacataaagataatatataatgtatttcattgaggaggaagatttcttaacgttctctagaacattaatcttcttcctctaattttcatagatgaaaaa

SEQ ID NO: 254851 - DNA, 1324 bp, Homo Sapiens
  misc_feature (627)..(627): n is a, c, g, or t
  misc_feature (819)..(819): n is a, c, g, or t
  misc_feature (1117)..(1117): n is a, c, g, or t
ggagagtcgccgcgcggccgccggtgagccgcatggagccccgggcggcggacggctgcttcctgggcgacgtgggtttctgggtggagcggacccctgtgcacgaggcagcccagcggggtgagagcctgcagctgcaacagctgatcgagagcggcgcctgcgtgaaccaggtcaccgtggactccatcacgcccctgcacgcagccagtctgcaaggccaggcgcggtgtgtgcacctgctgctggcggctggggcccacgtggatgctcgcaacatcgaccgcagcaacccgctctgcgatccccgcgcccccgggcaacatcgagcgtgtgaagctcttggctgtcctacgcgggccaacggtcaatcccctccccttggacacgaccggtccccccctgcatccacggccctgcatctgaacgggtgagctcccacccctggggtggaacgtcttcccttacccggaccttagaggcgccccatacccttacgaaatgtgtcccccaatgtgtcccacctctatggagggcatccccacttcggtctggcgtcctgccccactgcagcgccccaggccaaatacctatttctctcgcacgcagacatcgatacaccccacntgtgtcactgcccctccaaagctggcgcatccagggctgttcatccacacccgccgcgacacaagttggtgcggagtaatagaaggagcgtctatgtgcccagcgcggaaaacactcggtgccacacgccccgtgtcgacattgtagatgcgggtggcgcgagcggccccgagagaggcgggtatacaatgngtaagataatctgcgcgctgcgaaagtacactatgtcccaccccgcagagaaagaaagtatgcctcctctcacgcccccggcaccagtattattggggggagcggatgcgcaagaaccatcatcgaataaccgcattctctctgcgcgatgatcatagatacagcgccggaggcggacacagccacataaacgcacggggcaatttgttgaaagtttcacggcggaatggcgacaaagctcatcactagtcgctcccttccccactgtgtgcaaccgcgttgcgccctcccctacgantgcaccaaccctcgcttcacttttggatacccctctcttggtcgatcttttttggtttgcaccccgccttctcttttcgtgcgctcgcagatacgtctccgccgcgaaatagcgagcctgtgctcgccggcgatacgaagcttgcaaggcggttcacaccggaatctagtgccgatcataatcgagtcgacctggatcacctgtggt

SEQ ID NO: 254852 - DNA, 803 bp, Homo Sapiens
  misc_feature (684)..(684): n is a, c, g, or t
  misc_feature (725)..(725): n is a, c, g, or t
  misc_feature (734)..(734): n is a, c, g, or t
  misc_feature (768)..(768): n is a, c, g, or t
  misc_feature (776)..(776): n is a, c, g, or t
  misc_feature (787)..(787): n is a, c, g, or t
cgaacatcaagaaccctatcgaggcaagtgtcttgctggctgaagcctcgctggcacggaagcagcggataacacatactacctttattccactgatgctgaatgagatgccacagattgtggacctggagggtctggatgctgagtttgtcacccttaatgaggaggaagcagagttacgcaatgatggtaccaagtctaccattaaaccaagccagatgtcagtagccaggattacctgtgttaggggccagggacccaatgagggtatccccttcattgatgactacatctctacccacgagcaggaggaggattacttgactcaatactcgagtataaagcctggtgacctcgatgcctttcctccaagcacctaacaactctcaagtctacctacttaaagcttcgttatctcattgacattggagtcaacgatgagggtcatggcctgcagaaggacttacgggtcatcaacctgatggtgcccaaggtaccaagtccttgacactgactacccgttccatatgccccgaaaacgaatgattaccctgcgattccttgcttcgtactttctggacctgaagattcaacgggaaacccatgacaggattgacgatgcccgcacagacctttcagctgtaccgaaagtatctgggagctaagcaaaaatgggcactgagncctgagtcttttccacaagggtgctcaaggggtctttatgnaggaagggncaggaaagatgggatgggaaggtggcctgaggcntttagggnccaaacaagtnccaagaatgtcaggtt

SEQ ID NO: 254853 - DNA, 604 bp, Homo Sapiens
tgaacatcaagaaccctattgacgcaagtgtcttgctggctgaagcctcgctggcacggaagcagcggaaaacacatactacctttattccactgatgctgaatgagatgccacagattggggacctggagggactggatgctgagttagtcacccttaatgaggaggaagcagagttacgcagtgatggtaccaagtctaccattaaaccaagccagatgtcagtagccaggattacctgtgttcggagccagagacccaatgagggtatcccctgcattgatgactacatctatacccacgagcaggtggtggattacttgactcaatactcgggtataaagcctggtgacctcgatgcctttactacaagcacctaacaactctcaagtctacctactgaaagcttcatattctcattgacattggagtcaagcatgtgggacatggcctgcagaaggacttgccggatcatcaaccggatggtgcccaaggaccaaggccttgacactgactacctgttccatatgccccgtcaaggggaaacccatgacagtattgaggatgcccgcacagtccttcagctgtaccggtatctgggctc

SEQ ID NO: 254854 - DNA, 633 bp, Homo Sapiens
  misc_feature (22)..(22): n is a, c, g, or t
  misc_feature (66)..(66): n is a, c, g, or t
  misc_feature (83)..(83): n is a, c, g, or t
  misc_feature (91)..(91): n is a, c, g, or t
  misc_feature (134)..(134): n is a, c, g, or t
  misc_feature (147)..(147): n is a, c, g, or t
gaactgggaaatggcttcctangttgcctataccttgtccacttccagtactggacgtgctcaggntctgggtcacagaatgngctataanttgaactggaacacagcagaattgtgccaaaggttcttagganccagattcatccnttcttcattctttgcaaaacagtggtacagacatggagtctagaattgacccagatggaaagtaattggtattcttaatatcctgggtgactaatatccaggcagagaagctcctggaaccataactgtaagttcctagctggctagggattgaagtcctggacaggtgacagaggatacccacagtagttcaagacttagcacaagtcacccaactgccttcagggataccctggaggggccagcaagtagagtgttggtggcccaagcaaaccagtgttgccaatacccattgccaaaagggcctttggatccctggacaaagcttggctgccggcttcatttattcctgctgatggctgagaagcatctgtcttccatcccacttgcctgtcccaagttttgttccattttttaaaaatttgttgtaaactgcatgttttataaaataaaaataaaatatcgtttgttatttatctcattaga

SEQ ID NO: 254855 - DNA, 432 bp, Homo Sapiens
  misc_feature (18)..(18): n is a, c, g, or t
  misc_feature (27)..(27): n is a, c, g, or t
aatgaaatctggcctccntaagaaacntttgcaaacaaattctgctgtgtccccagttcaattaattagcacccatctgtgacccctagacccctgagcacgtccagtactggaagtggacaaggtatagcccaacttaggaagccatctcccagttctggggctatagaacagtaaagggagagggccgtggttctttgggaagggtagtcagagcgccagcactgaggagaagacagctgcatctgtcagagacaaaaccaaaagcatgattcaagctgagtggagaaaaagcatcttctcatacttcctatgaaggaaaaatgcaagagaaaaaagggcatggaccttccctgaacattttagacttgggcaagaggaagttatagttaatggagagtttcgataaaatgtattttacctgtgccgaat

SEQ ID NO: 254856 - DNA, 881 bp, Homo Sapiens
  misc_feature (641)..(641): n is a, c, g, or t
  misc_feature (716)..(716): n is a, c, g, or t
  misc_feature (817)..(817): n is a, c, g, or t
  misc_feature (842)..(842): n is a, c, g, or t
ccagcacagcagagggagaagctgcgctcgctcaggcctgaggtcatggctgccacgcagcagtgcccagatttgaacccaggactcccttccacatctcccctgctatcgtgtacggattcgtggtagggtcgtagcctaccagcccattagctaggcaggcatcccgctggactggcctgccctgaggtgggactcacccgtcccgagcccacccatctacaggcatcgacatcctgtactcgggctcccagaaggccctgaacgcccctccagggacctcgctcatctccttcagtgacaaggccaagtggctggcccttctggggctgtgacgaccagcccaggatgtaccatcacacaatccccgtcatcagcctgtacagcctgagagagagcctggccctcattgcggaacagggcctggagaacagctggcgccagcaccgcgaggccgcggcgtatctgcatgggcgcctgcaggcactggggctgcagctcttcgtgaaggacccggcgctccggcttcccacagtcaccactgtggctgtacccgctggctatgactggagagacatcgtcagctacgtcatagaccacttcgacattgagatcatgggtggccttgggcccttcacggngaaggtgctgcggatcggcctgctgggctgcaatgccacccgcgagaatgtggaccgcgtgacggaggccctganggcggccctgcagcactgccccaagaagaagctgtgacctgcccactggcacacagctggcactggcacacacctgtcccatggcccaccctgaggatcangagcaaacagaccctgcagggcctncaggccctgggacagggccactgacccagcccggggggc

SEQ ID NO: 254857 - DNA, 1019 bp, Homo Sapiens
  misc_feature (14)..(14): n is a, c, g, or t
  misc_feature (17)..(17): n is a, c, g, or t
  misc_feature (33)..(33): n is a, c, g, or t
  misc_feature (53)..(53): n is a, c, g, or t
ggtcttcacgaggntgngcccagtcctgcagcnccatgagatacgcgcgcctncggtgtgcgccagctgtctccagcccctgtccgcaatgagggccaggctctctctcaggctgtacaggctgatgacggggattgtgtgatggtacatcctgggctggtcgtcacagccccagaagttggccagccacttgatgtccaggtagaaggagaagggcttcgtcttgcgggagtacatcttctttttggccttgtcactgaaggagatgagcgaggtccctggaggggcgttcagggccttctgggagcccgagtacaggatgtcgatgccttgccggtccatgtaaaggggggtcccgcccagggatgccaccgaatccaccaggagcaggcacttgtacctgtggcagagttccccgaagccatcaaggggctgcagcacgccggtggacgactccccgtgggttaagaacagcagcactggcttgtgctgggccaggccctcctccacctcctgcagtgtgtagtggcctccagggtccttggtcatcgggtgcactcgggctcctatgcgctccccgatgtccacggctcgctgcccccaaatgccattggccccaaccaggaaggagtccccaggctccagcacattgaccagggcggcctccagggcacagtgtcccgagccagagatgaccagtgtgagtgggttcctggtctggaacacgtactggatgccttccttgatctcgtccatgatctggtacatatccttgctcatggacccgatcatctgcagccccccggctgccatgatgcgaggaggcaggttggaaggaccaggccccagcaggagctggttggggatggagaggggcttgagcagggccttggggggggtcaccagcagcttgtgagaggccatggtccgcacccaacctgccgctcgggaacctggggctgcactggccttggccaaagcctggaatatttcccagcagggcggacacagaggtgaga

SEQ ID NO: 254858 - DNA, 1505 bp, Homo Sapiens
  misc_feature (388)..(388): n is a, c, g, or t
cgagcggcaggttgggtgcggaccatggcctctcacaagctgctggtgaccccccccaaggccctgctcaagcccctctccatccccaaccagctcctgctggggcctggtccttccaacctgcctcctcgcatcatggcagccggggggctgcatgatgatcgggtccatgagcaaggatatgtaccagatcatggacgagatcaaggaaggcatccagtacgtgttccagaccaggaacccactcacactggtcatctctggctcgggacactgtgccctggaggccgccctggtcaatgtgctggagcctggggactccttcctggttggggccaatggcatttgggggcagcgagccgtggacatcggggagcgcataggagcncgagtgcacccgatgaccaaggaccctggaggccactacacactgcaggaggtggaggagggcctggcccagcacaagccagtgctgctgttcttaacccacggggagtcgtccaccggcgtgctgcagccccttgatggcttcgggaactctgccacaggtacaagtgcctgctcctggtggattcggtggcatccctgggcgggaccccccttttacatggaccggcaaggcatcgacatcctgtactcgggctcccagaaggccctgaacgcccctccagggacctcgctcatctccttcagtgacaaggccaaaaagaagatgtactcccgcaagacgaagcccttctccttctacctggacatcaagtggctggccaacttctggggctgtgacgaccagcccaggatgtaccatcacacaatccccgtcatcagcctgtacagcctgagagagagcctggccctcattgcggaacagggcctggagaacagctggcgccagcaccgcgaggccgcggcgtatctgcatgggcgcctgcaggcactggggctgcagctcttcgtgaaggacccggcgctccggcttcccacagtcaccactgtggctgtacccgctggctatgactggagagacatcgtcagctacgtcatagaccacttcgacattgagatcatgggtggccttgggccctccacggggaaggtgctgcggatcggcctgctgggctgcaatgccacccgcgagaatgtggaccgcgtgacggaggccctgagggcggccctgcagcactgccccaagaagaagctgtgacctgcccactggcacacagctggcactggcacacacctgtcccatgcccaccctgagggatcaggagcaaacagaccctgcaaggtcctccaggcctggggacaggaaagccactgacccagcccgggaggcagaaccaggcagcctccctggccccaggcagcccttttccctccagtggcacctcctggaaacagtccacttgggcgcaaaacccagtgccttccaaatgagctgcagtccccaggccatgagcctcccgggaatgtttaataaagggcctggccacctctcctcaata

SEQ ID NO: 254859 - DNA, 916 bp, Homo Sapiens
aaacccaaagggggcctttggtccaagcacctagagggatataaaggccagcaacctggtttaaaaaaatgccacaatttacctcccccaaaaaagtggttaccttgccctttccaagttggttggacaaacacacatttgatattctcttatatgttatagtaatgtaacgtataaactcaagcctttttattctttgtgattaaatcctgttttaaaatgtcacaaaacaggaaccagcattctaattagatttactatatcaagatatggttcaaataggactactagagttcattgaacactaaaactatgaaacaattactttttatattaaaaagaccatggatttaacttatgaaaatccaaatgcaggatagtaatttttgtttacttttttaaccaaactgaatttttgaaagactattgcaggtgtttaaaaagaaagaaaagttgttttatctaatactgtaagtagttgtcatattctggaaaatttaatagttttagagttaagatatctcctctctttggttagggaagaagaaagcccttcaccattgtggaatgatgccctggctttaaggtttagctccacatcatgcttctcttgagaattctatttggtagttacaattacagaaactgattagtttgtcagtttgcagatagatttagcacagtactcatcactcggatagattgagatgttctttcacatcagatgatctgtaacactgtaagatactgatctttacaactgtttaatcagttttatttttgtacagtattagtgacctaagttattttgctgtcccgtttttgtaaatcaaatgaaattataaaagaggattctgacagtaggtattttgtacatatgtatatatgttgtccaaataaaaataataaatgataa

SEQ ID NO: 254860 - DNA, 1286 bp, Homo Sapiens
  misc_feature (1210)..(1210): n is a, c, g, or t
  misc_feature (1238)..(1238): n is a, c, g, or t
  misc_feature (1248)..(1248): n is a, c, g, or t
gaagctgcaattaaaatgttggaggaaatacaaaagaagaatgaggagatgatggaacagaaagagaagagttatcaggaacatgtgaaacaattgactgagaagatggagagggacagggcccagttaatggcagagcaagagaagaccctcgctcttaaacttcaggaacaggaacgccttctcaaggagggattcgagaatgagagcaagagacttcaaaaagacatatgggatatccagatgagaagcaaatcattggagccaatatgtaacatactctaaaagtccaaggagcaaaatttgcctgtccagctccctctccccaagaaacaacatgaatgagcaacttcagagtgtcaaacaactgccattaaacttaactcaaaatcttataatcgatcgaaaaagataagaaaaagcatgtcgggccgccttcggccctcgaataagtttttctagacccttccgctgggcgccgcgggccacggaaggtcaaagggaatatgggccataggcgggttctcctaggccaattccggggcctgggacgagcgggctgggtatccttccccacataaacaaacggcccgggggtaaacctaatacgggctcctgagctgaacttctaagatgggcctaggcgcaggtgcagtgaacgcgggaccgcgtggaacggggacacccatagaagagggcgtcggagaaggcgaaaagtctaagagccactgcgggtgagaagctgcccaggccgagaccggtggtaggaaggaatcatctcaaaacaattatcgcaagaagaattggggcgagctgtagagatagatgcgcggtccaggagattagcattctaggagccggagaagtgaagtgccgcaatcatccgccctcataggtgtgcatgactccgtagcatgtgacgcccagcagctatgcgcaccggcttaaacgtgacgacccgcattatctaatcgtattgtacgcatcatacgttgacgaagcggatttcgacgtagaacgggagttttggagtatcaagatcctatggtaccgcagtctatgagagggcaaccgccgggaagagcacacttagagcgcaccgcattagaggtgtaaggtgagaatccacgagtgcacatcacgaatgacgtgagcgagacactagagatacaccacagacaggacggagaatatatacacatcactacancgtgcgcggctgagacgcccgtattgcncgcggtgtcnagtgtatattacgcgtcgactcacatgaagcacgagat

SEQ ID NO: 254861 - DNA, 395 bp, Homo Sapiens
  misc_feature (69)..(91): n is a, c, g, or t
gggaatgctggtactgttagaaagtattagtgaaagaattagtttgggaaggagaaagtagtgatgagnnnnnnnnnnnnnnnnnnnnnnnggatgagttgataagctggtacaaagtcaaggtgtatttggggtgcagctgaggctgcagacttgcaggttggtatagaaattaaagctagttgagatttaagaatgttttattagagttcaagctttaggaaaggccaagattgccaaggattagagtagggtaaagggtcaagccaggaccttaggcaataccacctgcatttagataacagaaggaagtctgaagaggatgattggttttagagattagaccattctgaggatattattttctaatcaaaaagaagagaaaggtttgaatc

SEQ ID NO: 254862 - DNA, 555 bp, Homo Sapiens
ccaataaacaaagttttctcgcttctgccacaatagtaaaaccattctgatcttgacaagataatggtgtcgttgacttggcttttttcttgtccgtttggaaagaattggccaagaatataattggactgttatgaccaataaaaacgaagtttaggtcaagtcttgtcaggatagcctgactaaaaacatctggctccttaatttaaaatagttcagacaaccagattcttgctgtgttttatgttaggttaacacgctgaactttaagaagctgtagactgcagtttgttgttatgagacctgctagctttgaagcctttcaatttctgtacaaagaatgattcgagaacttctgcacactggtaaaatggggagtcacttggattgtagtaacgacagtatcaaaaattttggtcatatctgccacaaattccgtcagcttttcataatatcgtctttgtactcgttcttcccggtggcaaggttcataggtttcttaataacaccataataatctggtgcatcattagggtctactggtttcaggaaagg

SEQ ID NO: 254863 - DNA, 904 bp, Homo Sapiens
  misc_feature (16)..(16): n is a, c, g, or t
  misc_feature (47)..(47): n is a, c, g, or t
  misc_feature (56)..(56): n is a, c, g, or t
  misc_feature (62)..(62): n is a, c, g, or t
  misc_feature (71)..(71): n is a, c, g, or t
  misc_feature (82)..(82): n is a, c, g, or t
  misc_feature (109)..(109): n is a, c, g, or t
  misc_feature (121)..(121): n is a, c, g, or t
  misc_feature (128)..(128): n is a, c, g, or t
  misc_feature (138)..(138): n is a, c, g, or t
  misc_feature (161)..(193): n is a, c, g, or t
gcttccattccaccangtatttccggatccccatccatccttttggntttttaccngcatcngccatctcngaagttggggncagtgctattatgtgccagggaaaccncgaaatttaggngaaaatnaatattttanaggggaggattcatccttgaccnnnnnnnnnnnnnnnnnnnnnnnnnnnnnnnnntttatgtttttatactgtattcccaaagaatgcttatatactgtaataattcttaaagaaaatacatcaatgctggacatttaaaaatattcttttacatatatccactagataaagcttggtaattttgttactaagatctgatatataattattattgctatccatctgacctatcattttctgcaatagatgttatagcaatttcaagatccagccacaatgttttcaatcctgccctgattctgatgttaagaatggagtttctgacaagttcgctcaaagaaccccaaccacccaatacctacacatacacttctagaatagctaaatagactttctgatttaattacctaagacactaaatctgatcaaagacaaagcagccacatagcatgaaattagaggcattgtatctcagagtagcaagccctagagtccatgaaaaggatttgcttctctactggggacattatttgcacactgttgccccagatctagaaaattattttcttgttatatgttactgccttttcatacctaaggttcacatcaccattccaaaatttatacaaataatctttggcttgtacatgaggaatgtttaccaacatcagactcatggacccctgaacaatctcagcttcaagttttccagaggttcaagaaccccatttccccactgatatgttaaaaatctctcagtgtgat

SEQ ID NO: 254864 - DNA, 1505 bp, Homo Sapiens
ccgtcctgaggcgcgcccgccccggggtaagctcgcgccgccgcgtcagctcagcgctgggtctctcggtcccgcagccgtgaggaggacggtctgcatactcgctgcccgccggctccctcccccgcgtccctgcgaccgccgcggcgaagatggcctcaggagtgcaagtagctgatgaagtatgtcgcattttttatgacatgaaagttcgtaaatgctccacaccagaagaaatcaagaaaagaaagaaggctgtcattttttgtctcagtgcagacaaaaagtgcatcattgtagaagaaggcaaagagatcttggttggagatgttggtgtaaccataactgatcctttcaagcattttgtgggaatgcttcctgaaaaagattgtcgctatgctttgtatgatgcaagctttgaaacaaaagaatccagaaaagaagagttgatgttttttttgtgggcaccagaactagcacctctgaaaagtaaaatgatctatgcaagctccaaggatgcaattaaaaagaaatttcaaggcataaaacatgaatgtcaagcaaatggaccagaagatctcaatcgggcttgtattgctgaaaagttaggtggatccttaattgtagcctttgaaggatgccctgtgtagattattcagtgccacaaattgaaagcttccatgtttaatgttatcctcttgctatataaataaagcaaatatatttaggccagggtctcactgagggggagctgtcttgtcatcttttagagtaaactattctataaacatatgcaaacagccctaaataaatctaaagtctaaagttttattgatgtgaaattaaattcttattggccaaatgcctgttttgatgagttgatttataaagatttttgttaagctcaggattttaaattacacagttcacaaacagtaaaggccatgtgaagagaattattacatctttattaacctcagcatttactttgtttcttttgcttaggaaattgctcataatctggttataattttggtccaaattctttattcttccttgagctaagcagaataatggaatataatatgtcttcataatataacaacactaatacactaatagtaagattaagttaggcagtcttctaccaaatgtgtaatggagattgcctcaaaattgtgtccacataatccacgctcatcttgcaaagcgctatttcaggcacatcattggaatacaggaagtagccctgcacctgccagtgagctcgccattcactgattggaagagtgacctggcatcttggaaatcattgtgtgtcttcaggagaatgtgcagtgtcttgtaacaactaattataatgcaaattagggctacattgtaatctgctttgttaatgaaaatgataaaacagaatattgacaagctaggacacctgtggtatctttaattgtatctccttcagaagtttgcttcttatggtataataaagtatggaagaatac

SEQ ID NO: 254865 - DNA, 661 bp, Homo Sapiens
  misc_feature (29)..(29): n is a, c, g, or t
  misc_feature (89)..(89): n is a, c, g, or t
ggctcctcactctgcttgttagggcctcncaagcattgtgaaaatagttaggtccagttaacctctcttcccagtctcaggtacgtctntgtaaccagtgtgaaacttgactaatccagaagtgaacagatccactaaaccacactacagttgagaatttggggcagagtttaaattaccagtctctgtttatactaaaccaataaatgtttaataaaaaataacagtttcttacatttagggagatgtctagtgttcttataaaattactgagtataaatttctatagaatgacatttaaaacctctatagaatgggaaatcacaaagcagaaaacatgtaacatctgttctggtgttcctgggattctgagccaaatcccactgctcttacacgccttagacataatgcaaaaagggaacttaaaaaatagcttaacaaacagtttctcaaaaatacacagatattcctgtgtccccaaagcaatggaagaacaatcagatcatacggtctgttccaagctatgaaaaagcctttggctgtcactgtcatcttgaagaaagatcactgaagggaaagtagagccgtaaaagaatttcagagcatgggacagaaggtgttcctgggtgtctggctactgtctcatgtttcttcacattcc

SEQ ID NO: 254866 - DNA, 675 bp, Homo Sapiens
ccaactcgatcccctcggagccaggtgtgtgttgagattcaggatttttcagttgcaaaggcaatatgatctctactccacagggcacacggcaccctcagtgctcagcacagcagtgtgcagcagcctggttaacttttctgcagggaagtatgtgaacgttcacaccaagcgtgtcagtcatgtctgtaagtcatctcccaccaacacaggtcaggttttcctgcccaatgagcttggggatggcttgactttggagctctttggatctgtggattttggaattttggatttctgatacccgtttgatcaaagaggcaaccgaggtctaacgggtcaagtgactttcccatatccgtgaaggtcatgaaaagcagggccaggatggtggcctggggtgccttgaatgataagctgggcccttcactgtgcaggcccctctccttcagtccactctgccactgctgtctgccacaccctgctctgatagctcctctctgccaggcttttccctcacatcctcaactcagccaagagctggtttcttccagagagccctgctgtgcagtcagttattggacttctctttttgtgcatgtttgttttcagggtttagctgatcaaagtggtatcgttgtaacaggcagctctaaatagaagtcttcagaaggccca

SEQ ID NO: 254867 - DNA, 463 bp, Homo Sapiens
  misc_feature (412)..(412): n is a, c, g, or t
agagagccaatggactgtatataaatgctgcgtttgtttggagagggtgtctttctgtaaggatcactgaagaactgttcaaagtcttggggagcctcagggtgggaggtgatccaatctgatggagaatgcaaggtaatgggtccaaagagatcactggctggctggaaggcttcattcattaaacgctgttccccagcatctaattcctcatactgtgacacaagcactggattctttgagatgacagctatttttagtgtctgttcggaataccgtactatttgcatcttgattaggaaggaaggctcccatggaagcttttaactcacaaggacagacatgtctgggcctggccagaaggaagttgtggagtgtgccttcatctttatattaacgaaggcagtgaganaagtcaggaggcctccccttgcctcccaagcctaatctagggaagccgcga

SEQ ID NO: 254868 - DNA, 1966 bp, Homo Sapiens
  misc_feature (185)..(203): n is a, c, g, or t
  misc_feature (217)..(217): n is a, c, g, or t
  misc_feature (325)..(333): n is a, c, g, or t
ctcgtgccgagaaaaaattaattaagatgtatttaacctttaagtatagaatgattgtataaattagatttcaactgaaaggacaattagcgattcagagaaagctcctagaaatagactgaaaacaaagccatacatagagtaagaaatagaacctatggaacttccatttttctaactatagnnnnnnnnnnnnnnnnnnncccagttgttaaanaaaaaacaactcacagtttcaatattttctgaaccaaaaatcagaacacatggtttgtgtcaaagggtttttctgtgctacgtctgggagtgctgacctaagtgacannnnnnnnnaatgccaaatacagtaatctccaagcttttaatggcttatgccaagatgacagaatatgtgaaatctgattgtcccagagttacactctgcactccaaagctacaacagtgccacagctgagaggtttccctatacttcctactactgtgacaatttagcaatccttcaaatggaaaattcctaattacacgagacaatggtcctacagtaggcccgtgcggaataagttccctcgttggaaaaatgctagcatgaatagtttgataaatgcaatccatcagcaaaggagagcaagcaggcagagactgtgccaagcagaaactcattcgcatcaagttttccaataagtttccttcccccagtcccttttcttcaatcctgcttttaagccaggccccagggtaagtctggtagaacactgagcaggaaagcttggaagggttctacaccacttcaaaaatacctttgcttaaaaacacttatatagccagtgattagcaattaaaatgtgaaaataatcaactactcagtagttaaattctgctaattatcaaaagtcatagtctactgggatcagcagcattacaaaaggaagtcatatcgcatttcttaagctttttctgaatggtttaacaggtctctttcagtgttaattgcacttaaaacatctgctttttttcatttaatctctgaaatctgttcattttttccctccatttataaaaaggggtcaatttatcatttgctctatagctatttgaattcgaaaaagattccacaaaatttgagttgcacacaggcgctttctgaagcagattaaacttgtccttgtgacacttcagagcttggactgcagtgacttcaggtgcttgtaagattcgtggacctctgctttgttcagtggggagttcttagcccactcaaacaagttttcatacacattcccatcatagcggccaagcacagagccaagtgtcacatcctgaaaatcaaatgcatcaaccaaagcaacagcatctgagcgaatcagagtgagtaactcctttacacgctggtttacttgtgtaatctgaggctctgtcatgatgctcccctgaaggaaatcccccgcgttctgactgattccatacagagaatacagcagacataaactccttaagacagcttgaatggctttatcttgaattttgaggagtttttctgaaaagagcttaactaccacatagtggcaatgtgcctcacttgctcgaacaaggtcaacagaagttaggttccaagctacctccttgctttttctgtgaatcacttctttttgaaggttttttgcagcaatttctactaatctggctgcacggagtttatatgcttcggttaggctttcggggctgttgatatccaccatggttggccagactgctacctgctgtggctggatgcgctgactgggcaggtcgttcaaataggacaccatgccacacaccaactttcctgagtgcacctgatcataacttttcatcaggaacctagccgtctggagcatcatgacagtgttttctccctcaaaggtacagcttggggtgaaattgacataaatatttggaagaccactgcaatgagaatagccatgcccac

SEQ ID NO: 254869 - DNA, 1357 bp, Homo Sapiens
  misc_feature (857)..(857): n is a, c, g, or t
gtgagacccagccctcatcctgagcacctccacatcctccacgttctgctcatcattctctgtctcatccatcatcatgtgtgtccacgactgtctccatggtcccgcaaaaggactctcaggaccaaagctttcatgtaaactgtgcaccaagcaggaaatgaaaatgtcttgtgttacctgaaaacactgtgcacatctgtgtcttgtttggaatattgtccatagtccaatcctatgtgtttgttcaaagccagcagtcctcctctgtgaccaatgtcttgatgcatgcactgttccccctgtgcagccgctgagcgaggagatgctccttgggccctttgagtgcagtcctgatcagagccgtggtcctttggggtgaactaccttggttcccccactgatcacaaaaacatggtgggtccatgggcagagcccaagggaattcggtgtgcaccagggttgaccccagaggattgctgccccatcagtgctccctcacatgtcagtaccttcctagggccaagcccagcactgcttgaggaaaacaagcattcacaacttgtgtttggtttttacatctaacctcatcttcttcacccatatggcaatgccatcatctcctgccttcctcccagggccctctctgctctgcgtgtcacctgtgcttcgggcccttcccacaggacatttctctaagagaacaaagtgctatgtgaagagtaagtcaacctgcctgacatttggagtgttccccttccactgagggcagtcgatagagctgtattaagccacttaaaatgtgcacttttgacaaaggcaagcacttgtgggtttttgtgttgtgtttcattcangtcttacgaatacttttgccctttgattaaagactccagttaaaaaaaattttaatgaagaaagtggaaaacaaggaagtcaaagcaaggaaactatgtaacatgtaggaagtaggaagtaaattatagtgatgtaatcttgaattgtgactggtcttgaatttaataatctgtagggtaattagtaacatgtgttaagtattttcataagtatttcaaattggagcttcatggcagaaggcaaacccatcaacaaaaattgtcccttaaacaaaaattaaaatcctcaatccagctatgttatattgaaaaaatagagcctgagggatctttactagctataaagatacagaactctttcccttttgaaattaacctctcactataccagtataattgagttttcagtgtggcagtcattatccaggtaatccaagatattttcattgttcttgggtgaggagacacacatgaccctatatcttgactacagtcggggg

SEQ ID NO: 254870 - DNA, 637 bp, Homo Sapiens
  misc_feature (26)..(26): n is a, c, g, or t
  misc_feature (87)..(87): n is a, c, g, or t
  misc_feature (243)..(243): n is a, c, g, or t
  misc_feature (305)..(305): n is a, c, g, or t
tagattccaatggaaagcctttagancatctaagggtgggggaaggtgcaaactttagcttatcaggcccttctgctcgaagcgaanccttatttctcagtaggtaatctctaatacaagcagagtgccctctgaagcctcctcgctggtatctcagtgcctggacaaagggggacacaccacagcacaaacacgtggcacagactcaatcccaactcacagccagtcaacgagcctctggcnccttcctctgggtcctgatacagagctggcagcgagggcctctgaagaggttacagggagcncaagggagtgtcaggtagaggcagcaccaggtcccgaagggacagatgagggatccctagtaaacagctcgtggaccccttgcaaatggaagactgtatttaaatgcatattgctttagctgggcagtctccaggaaggagctgattgttagtagaggaattgttatgcaaataattttccctgcagtttctactcttatctattttctcccatggaggagaaatagaaatgattcctttcctgactgtagtcaagatttagggtcatgtttgtttcctcaaccaagaattcaatggtcttggttcatggattgggggcaggtacatccaag

SEQ ID NO: 254871 - DNA, 705 bp, Homo Sapiens
aacccttctgctattcagccccctctgctcaaagcggaaccttttttctcaggaggtaatctctaataaccaagcagagcgccctctggagcctcctcgctggtatctcagtgcctggacagagggggacacaccacagcacaaacacgtggcacagactcaatcccaacacacagcccagtcaacgagcctctggccccttcctctgggtcctgatacagagctggcagcgagggcctctgaagaggttacagggagcccaagggagtgtcaggtagaggcagcacccaggtcccggagggacagatgagggatccctagtaaacagctcgtggacgcacttgactagcagttcgaaagcaaaaagagattcggattacaagagacttttcccttgcaaatggaagactgtatttaaatgcatattgctttagctgggcagtctccaggaaggagctgattgttagtagaggaattgttatgcaaataattttccctgcagtttctactcttatctattttctcccatggaggagaaatagaaatgattcctttcctgactgtagtcaagatttagggtcatgtttgtttcctcaaccaagaattcaatggtcttggttcatggattgggggcaggtacatccaagttctacgtgacagattttaaaatatcttggattacctggataatgactgccccactga

SEQ ID NO: 254872 - DNA, 407 bp, Homo Sapiens
caaggttggttccctcaaaccaaggaattcaatggtcttgggttcattggattgggggccaggtacatcccaagttctacgtgacagattttaaaatatcttggattacctggataatgactgccccactgaaaactcaattatactggtatagtgagaggttaatttcaaaaggttttgaaagagttctgtatctttataactagtaaagatccctcaggctctattttttcaatataacatagctggattgaggattttaatttttgtttaagggacaatttttgttgatgggtttgccttctgccatgaagctccaatttgaaatacttatgaaaatacttaacacatgttactaattaccctacagattattaaattcaagaacagttacaattcaagattac

SEQ ID NO: 254873 - DNA, 355 bp, Homo Sapiens
aacagccaaagtacacctaaagcatatctctgacactcccttccttcaacaaattgtagtgggtgatccttcattgtcaggagagctcaaaatcctaagaggcccttctgtttataactgattctcgaaaggtagacaaaattgcctctctctgtgcaaacagacatgcgcctttctctctctttctcctataacctggctttctcctttatggacaaggagatgcaaacatttgctttggggtttgaacattcactacgaaagtgactgggtaataagcaaactcattccaggctgtattaaaatgactgaggccatcacctgcagctaagaaatgtgagtgttttaaagtaag

SEQ ID NO: 254874 - DNA, 1163 bp, Homo Sapiens
  misc_feature (129)..(157): n is a, c, g, or t
gtcgaggccgctgaggcagtggaggctgaggctatgatggcggccatggcgacggctcgagtgcggatggggccgcggtgcgcccaggcgctctggcgcatgccgtggctgccggtgtttttgtcgttnnnnnnnnnnnnnnnnnnnnnnnnnnnnnagcagcaggtcccgctggtgctgtggtcgagtgaccgggacttgtgggctcctgcggccgacactcatgaaggccacatcaccagcgacttgcagctctctacctacttagatcccgccctggagctgggtcccaggaatgtgctgctgttcctgcaggacaagctgagcattgaggatttcacagcatatggcggtgtgtttggaaacaagcaggacagcgccttttctaacctagagaatgccctggacctggccccctcctcactggtgcttcctgccgtcgactggtatgcagtcagcactctgaccacttacctgcaggagaagctcggggccagccccttgcatgtggacctggccaccctgcgggagctgaagctcaatgccagcctccctgctctgctgctcattcgcctgccctacacagccagctctggtctgatggcacccagggaagtcctcacaggcaacgatgaggtcatcgggcaggtcctgagcacactcaagtccgaagatgtcccatacacagcggccctcacagcggtccgcccttccagggtggcccgtgatgtagccgtggtggccggagggctaggtcgccagctgctacaaaaacagccagtatcacctgtgatccatcctcctgggagttacaatgaaaccgcttccccgggatcctgttctgggcccaaaacttctctgtggcgtacaaggaccagtgggaggacctgactcccctcacctttggggtgcaggaactcaacctgactggctccttctggaatgactcctttgccaggctctcactgacctatgaacgactctttggtaccacagtgacattcaagttcattctggccaaccgcctctacccagtgtctgcccggcactggtttaccatggagcgcctcgaagtccacagcaatggctccgtcgcctacttcaatgctttccaggtcacaggggcccagcatctactccttccactgcgagtatgtcagcat

SEQ ID NO: 254875 - DNA, 1959 bp, Homo Sapiens
  misc_feature (1248)..(1248): n is a, c, g, or t
  misc_feature (1261)..(1276): n is a, c, g, or t
gtggagcgtcggggtacaaccatcaaaagcaccgaggcctgggtggcgaattcggcacgaggcctgactcccctcacctttggggtgcaggaactcaacctgactggctccttctggaatgactcctttgccaggctctcactgacctatgaacgactctttggtaccacagtgacattcaagttcattctggccaaccgcctctacccagtgtctgcccggcactggtttaccatggagcgcctcgaagtccacagcaatggctccgtcgcctacttcaatgcttcccaggtcacagggcccagcatctactccttccactgcgagtatgtcagcagcctgagcaagaagggtagtctcctcgtggcccgcacgcagccctctccctggcagatgatgcttcaggacttccagatccaggctttcaacgtaatgggggagcagttctcctacgccagcgactgtgccagcttcttctcccccggcatctggatggggctgctcacctccctgttcatgctcttcatcttcacctatggcctgcacatgatcctcagcctcaagaccatggatcgctttgatgaccacaagggccccactatttctttgacccagattgtgtgaccctgtgccagtgggggggtttgagggtgggacggtgtccgtgttgttgctttcccaccctgcagcgcactggactgaagagcttcccctcttcctactgcagcatgaactgcaagctcccctcagcccatcttgctccctcttcagcccgctgaggagctttcttgggctgcccccatctctcccaacaaggtgtacatattctgcgtagatgctagaccaaccagcttcccagggttcgtcgctgtgaggcgtaagggacatgaattctagggtctcctttctccttatttattcttgtggctacatcatccctggctgtggatagtgcttttgtgtagcaaatgctccctccttaaggttatagggctccctgagtttgggagtgtggaagtactacttaactgtctgtcctgcttggctgtcgttatcgttttctggtgatgttgtgctaacaataagaagtacacgggtttatttctgtggcctgagaaggaagggacctccacgacaggtgggctgggtgcgatcgccggctgtttggcatgttcccaccgggagtgccgggcaggagcatggggtgcttggttgtttccttcctaataaaataaacgcgggtcgtangaaccaacaaacnnnnnnnnnnnnnnnncctgtcggcccgcctcggcccctcgaaaaacctttctaaacccattcgttttgggcgcgccgcggcccagtaaggtaagttggaacatgggccaataccctgggttccctagggaagattcgtgggtcctatgacctagatgccttgggattcctcaccccatataaaaaaaaccgccccggggggtcaaacccgaagccggttctctgaaaacataatctcccagaaatgggagagattcctctgaagggcccttttcacttgcgcactcctaatccaacccaagggaaagtcccccaaggcgtcgaggcttccgaataaatctaaaaatgtaaccgccgcccccgtgcccctgtgcccacctttatatcccacacgtcacttggttgtgccaaattttccctttacaagactatctccgtgcgccgaacatttgggaaaacccccctttccaacaacccggcccattgcgatggaaacccctcgaaaacccccccgacggcggggcattccaagcgaaccctttgggtcacgcccttcggcagctaaataaaatacattttcggcccccacttggggtggcaaaaaaaccgggcgggccgccaaacacacacaattccgctctccactatattctgggcccaccgcgccttgtaaacaattcgcgaacacctgcgggtggc

SEQ ID NO: 254876 - DNA, 854 bp, Homo Sapiens
  misc_feature (307)..(369): n is a, c, g, or t
ctgtgccctgtgctaagaactctgatgtatccttatttagagcttaaaataaacctaagagggttaagtactattatgatttccattttacacgaaaggaaactgagctgcaaggtcacatagctagtaagggattgttctgggctgaagaaaaaggatgcatgggggggagtatcttgcccaaggtcacgttattagtaattagtggagtcagaattccaatgcaggttccttcacttcagctcttcttacctcagaaaacacacttggctggacccttccctggagttggatttagttggcttgnnnnnnnnnnnnnnnnnnnnnnnnnnnnnnnnnnnnnnnnnnnnnnnnnnnnnnnnnnnnnnngtttaccccatttttggagtaaaatgaattaccctccttaggaaatctggtcgctctatgtggccattcctttagttcctgcccctcctccacagaaacacaccattccaaatctggcagctaatttttcatggtctttgtttcttcaaaattattttcaggaagtcttggtgaatatatgttggggtataaacagaccacaaagaaagaccccataggggtattctgttgatggattttctgcacgatcttttctttttcattcttccattatacttcctggaggagggactacccctttgttcgtcatttagttccagctgggtaccaggttgggtatttggggaggtttacagattaataaaactagaccactaccctccaggagttttcaattttagaagggaagtatataaatgtaattctaggtttaattttctaaaagtcacttcagaggaatacaaagtattagggaattcagaggc

SEQ ID NO: 254877 - DNA, 1248 bp, Homo Sapiens
  misc_feature (179)..(179): n is a, c, g, or t
  misc_feature (213)..(213): n is a, c, g, or t
  misc_feature (288)..(288): n is a, c, g, or t
  misc_feature (728)..(776): n is a, c, g, or t
  misc_feature (929)..(929): n is a, c, g, or t
  misc_feature (1032)..(1066): n is a, c, g, or t
gggactcatgcataagggtatgaatcccagccaggacaagtgagttgaggcttgtgccacaaaaggtttgtccttggggaacaggcaggcctgcaggatcccccccatatcgattgggctgggagggctggccgtgagtccccactttctgctttccttgcccatgtgtcacccctttngcctccagcttgtccctctctcactttctatagntttgttggaccagatggtgaggaaaggaaaggcctcttcccttctagagggggctggctgggagtgagacctggnggcttggcctggggaacccaccacacagccccaaagtcaggaagcctggggaaaccagagctgagacctcttcaacagggtttctttgagatcctacacctccattgggccctttttcagtcttcaatgggggcccagttggctctagaaggagaagaggtgaagcaggatcctttgccctgggggagtctgagggcgcggtccttggactcattcaggccgtctttgtagttgggggagttccactgggcgatcccagcccctccccacccaccctctaatggacctcctcatagaagccccatttcacttttgttttatctacctcttagcaaaacaatagataaattaggtagtggcagctccacttgcttaggttagggggggaaaaagatttctttttccaaaggaaaaaaatattaccttgagaatactttccnnnnnnnnnnnnnnnnnnnnnnnnnnnnnnnnnnnnnnnnnnnnnnnnnaaaagggagacattttccagtgaccactggattgttttaatttcccaagcttttttttcccccataaataagtttcactcctttggcgattttccttcacttgtttaagataacgtgcctagctattcccaacaggtaacagctttcacagtnctgcccctggcctgtctcaccccatcccccaccctattcctgccagtgagtccttcctgtgcttctctcccttctcccctcccagccagctgacttcagtcannnnnnnnnnnnnnnnnnnnnnnnnnnnnnnnnnnaggaataaaggctttgttttggggatgcttaaatcttgactggcacttcccggctgtgggggctggggagccacttgtaacatttctgtgcagattttatgttagccactgctatgtaaaagcacgttcaaaatgaatttcagcagattatgtgttaccataatgaataaacgtcctctatc

SEQ ID NO: 254878 - DNA, 460 bp, Homo Sapiens
  misc_feature (17)..(17): n is a, c, g, or t
  misc_feature (26)..(26): n is a, c, g, or t
  misc_feature (39)..(39): n is a, c, g, or t
aaaagcccccaaaatcnggaaacccnggggaaaacccanaacctgaaaacctccttcaaacagggtttcctttgaagaacccctaaaccctcccattgggcccctttttcaagtccttccaatgggggccccagttggctctagaaggagaagaggtgaagcaggatcctttgccctgggggagtcctgagggcgcggtccttggactcattcaggccgtctttgtagttgggggagttccactgggcgatcccagcccctccccacccaccctctaatggacctcctcatagaagccccatttcacttttgttttatctacctcttagcaaaacaatagataaattaggtagtggcagctccacttgcttaggttagggggggaaaaagatttctttttccaaaggaaaaaaatattaccttgagaatactttccaaaaaataaaatttaaaatattat

SEQ ID NO: 254879 - DNA, 524 bp, Homo Sapiens
  misc_feature (289)..(352): n is a, c, g, or t
  misc_feature (409)..(409): n is a, c, g, or t
caggagagaacttgggggcaacagaggtggggcatggaccctcacccccacaatcctacaggggcctgaaccctcacaccttctgagggaggtctcctgcccccatggctgctttgcttcccacgcccagttcagatcgggacccaggtagcagacagagacctggccaacagcaagtgcccactcaccacagcaaggatttgtttctcatttctaccttggaccacagggatggggcagctgaaagaaagggctgtgtcagggtgtctttctcccttttctccctcannnnnnnnnnnnnnnnnnnnnnnnnnnnnnnnnnnnnnnnnnnnnnnnnnnnnnnnnnnnnnnnctgtctgtctcctatacctccccatctctcccttgcccctgccccatcttgcctttntctctttttcctccttttcctttcttattcctttgcctctcctcttcctgagccccacctgctcatctccctgccccaacatcctgtgccatccctgtggtgtgtatgggtcttg

SEQ ID NO: 254880 - DNA, 491 bp, Homo Sapiens
  misc_feature (221)..(221): n is a, c, g, or t
gggacacaggcctccccctacacatgtccctcacgtgcctgcatgacaacctctgggactacgccagtatctgcccactgcttcactcatctcctggtcaagggcgagatcccagaagtggcattccatgaagtgatcgtagtcatgcctcagaagcagtcccccctgtaaatagtccttggatattaccgtctggttgtcgtctgtcatctcctcctgtnctggcccgaggccgccccgtgactgtgaccgagggagggagggctgcctgatccctctcctcgcctgccttctggaagacttcagaagattgagcctcactggtgccaggaagccaaagcttactttgtagaactgacactaaactacccgaaggacttaggtgctttgtgtacttaaccccaggacctccttactttttaatataaagagtgatgttgtatttcgtgttctgcactttttaatataaagagtgatgttgttctttaaaa

SEQ ID NO: 254881 - DNA, 835 bp, Homo Sapiens
ctgcagtaactctcccggtttaaggtagcgaggcctgggtggcgaattcggcacgaggcgcagcgggtcctctctatctagctccagcctctcgcctgcgccccactccccgcgtcccgcgtcctagccgaccatggccgggcccctgcgcgccccgctgctcctgctggccatcctggccgtggccctggccgtgagccccgcggccggctccagtcccggcaagccgccgcgcctggtgggaggccccatggacgccagcgtggaggaggagggtgtgcggcgtgcactggactttgccgtcggcgagtacaacaaagccagcaacgacatgtaccacagccgcgcgctgcaggtggtgcgcgcccgcaagcagatcgtagctggggtgaactacttcttggacgtggagctgggccgaaccacgtgtaccaagacccagcccaacttggacaactgccccttccatgaccagccacatctgaaaaggaaagcattctgctctttccagatctacgctgtgccttggcagggcacaatgaccttgtcgaaatccacctgtcaggacgcctaggggtctgtaccgggctggcctgtgcctatcacctcttatgcacacctcccaccccctgtattcccacccctggactggtggcccctgccttggggaaggtctccccatgtgcctgcaccaggagacagacagagaaggcagcaggcggcctttgttgctcagcaaggggctctgccctccctccttccttcttgcttctcatagccccggtgtgcggtgcatacacccccacctcctgcaataaaatagtagcatcgcaaa

SEQ ID NO: 254882 - DNA, 842 bp, Homo Sapiens
  misc_feature (624)..(632): n is a, c, g, or t
ctctcaccccccatcccatccctcttggtagcgaggcctgggtggcgaattcggcacgagggcagcgggtcctctctatctagctccagcctctcgcctgcgccccactccccgcgtcccgcgtcctagccgaccatggccgggcccctgcgcgccccgctgctcctgctggccatcctggccgtggccctggccgtgagccccgcggccggctccagtcccggcaagccgccgcgcctggtgggaggccccatggacgccagcgtggaggaggagggtgtgcggcgtgcactggactttgccgtcggcgagtacaacaaagccagcaacgacatgtaccacagccgcgcgctgcaggtggtgcgcgcccgcaagcagatcgtagctggggtgaactacttcttggacgtggagctgggccgaaccacgtgtaccaagacccagcccaacttggacaactgccccttccatgaccagccacatctgaaaaggaaagcattctgctctttccagatctacgctgtgccttggcagggcacaatgaccttgtcgaaatccacctgtcaggacgcctaggggtctgtaccgggctggcctgtgcctatcacctcttatgcacacctnnnnnnnnntgtattcccacccctggactggtggcccctgccttggggaaggtctccccatgtgcctgcaccaggagacagacagagaagggcgcagggcgcctttgttgctccacaaggggctctgccctccttccttctttcttggttctcctagcccccggggggcgggtgatataccccccaccttcctggcattaaagttactgagcttcgggt

SEQ ID NO: 254883 - DNA, 1560 bp, Homo Sapiens
attgtagaactttgtgtgaggactttggttatccaaaatcacagaaatgaaccgttttgcagctgcgcagtctaaagggcaggccagtgtctggaagcagggcccacgtggcggtccgctggcaggctggtcctggggagcattctgcggacccggtcacgggcttggttagtcatgcgtacatgtgtgccttggggtgctctgcactccacggcccttctcagccacacttcccaccccagggggtgcccccaggctgatctcatttctgatgttgagggctgtttggctctgtctgtatagcttgtaacaggagccttgggctaggggctggggaaggaaagccgagctggcattcgttctctggactttttatgcctgccatacccgctaatgctcctcgaggtgcaggagcaggttgctgagccagtggctgccccgtgccctccttcccagcactatcatgtgtcacgtttcccggactctgcccctacatctcagctgaatctccagggaggctgcagagcatcgtggagaccactttctgcctcggcctttaaatgctgactcacctcctctcggaggaggcgtcctgtcttcacgggggggtcccggtggcctccagacgtagccatttcctgacatcaagatgttgaatgtaatctggtctgagctgggcctgtgggaggggccgcctgaggcctgtgcgctgttgtcctcgcagatgtacttatttttgttcatgatacgggcgttccgttccttaaagatgtatatattttcttactgtacataaagatgttccttaagtcgtacagaaggtggcgcggcaaagggcctcgtgcagtgtgttcagattgcccctggggatcttctgtgtcttcagcgcccagccctgcgtgttcctggtgaagcagtttcacatcagtctctccagatagcactacgatgtattccgcttctgaacaggatcccatgccagtgtggaacaccttcccaatcttagttcagaagtggcttgtatgacctgttcaggggtcacatgaggtctcgccagtttcctgggtcctcttcagaggccagaaagttctaagttctgagtccccggccagggtcccttaacacctcggcacagaggctgttggcaagtgtagaggctgcctctgtgtgtggtttaagtaaactggaaatgagacattgacgtgctgctcctccagaggtctgcacactccacttcacatgccgttgactctcacagtctaagacttcagggccgggacctttgtccagcctgcacagtagagtgaggctgcctctcccgccaggcattgggatcccatttagaaacggcattcacttcagaaggtactttttaactgctcagtttttgactattttaaatagtttgctgaaaactcctgataacacttgctacatatcatgttttaattgcttgtacagttaacctttaattttatttagtaaagtgtatcaaagtaggacttttttgaattgtaaataggtggttttattaaataaaagtcaatgtaaaattgttag

SEQ ID NO: 254884 - DNA, 1234 bp, Homo Sapiens
cccgaatagaaacgtgttcagttgatcatcaaatacttaaaggaccttgaaagcttgtctggctctaattaaagcacagctacttggtgatcttaacagaaacctgtcctctctcggagaagtgcaacctcttccactgcgctgacagcgtgggaagagggagaactacaggaaacaatgaagaagtcagaaggtgcctgtttacccaaacgtgtctgcagccatgttcctgcataccccggttagaagaaccgctgaagcactatgctatcagcttaaaatctaggtgactacaaaaccctggaaagtttggcacataaactacattaggcaagatcaaggatgacatttgttctttgattaatcattatcactgccattcaatgtgacctgccaaacatacacaacttacatctttacagcaatcctaaatcctaagatttagtgatgttagtatgcttaaagaacacaagccagttactaggctagttccaaaatctcagccagaaataatgtgttaacactggatttgccacatctagaagcacaatcactccagttatggtgtctaaacgaatgtctaaagttaggtgaatggaatgtaatcagactatactaaacttggttccaaaagttatagaagttgtaaagttagtctaaactaaagcacttaagtgaaaaagtgtaactgccatatcagaaagaagagctcccaccatgaaaatgtcactgaatgtattttttatttttgaaggtatttttaaaatctgggcacaccatatctatctgtaggacctgggtccaaaggtcctacataactgatatgaaccataattctccatattaacaaaggctcggaaattgaaaccaagatcacctaactcgctcactttggccaatatagtacgaatttcagcttctttacaagagaagagtcctgagatgttaatatgcagcaattctgctgatgtgcattttaactttatgcaccaaggaagaaaggctaaggaattcacaaaagtaaaatcaccccctgaaaaacagatgctggtgattggagaaaaaagagcagtagaattaaggtgttttataaaccagagagtgttttgtttctgataggtaaagggatttcttcatatgttattttaataaaagggaatttcataggtaaaaaccggacgcgtggtcgacgatatcccaggattccggccgaccgcctgcttatacccggctt

SEQ ID NO: 254885 - DNA, 770 bp, Homo Sapiens
  misc_feature (32)..(32): n is a, c, g, or t
  misc_feature (66)..(66): n is a, c, g, or t
gcctgttggtagcttcccatgccatccatganttaaacccagagaccagggaaagtgtaccgatgngaagaggcccagagggtgatggcctccctcctctcccttttgtcttattccctggagtgactccctcctcttatcagcagggatacaagcagtgcctggcagccttccctctctcccataatccactttcatatgctgcccattgaagaaaaagacagtagatggaatataactgatgtcaaaatactgtgtataaactgcagtttggtccacatctaccaggtatatagcagccattttacttaagtcagaagaggtcttagaaagaatatcatctagctgcagacagacaggatcttcatctctcccaaacctgagaaccaacaccttctcagcagtactttttatcgcctggtctacttcctttttgctagtcagcttgggcagtaggaagctcatcttgaaataacccaaatgtgaatcctcactgtcactccttactcgtccacgccgcctcactccctttcactttgtggctgtcagcaaccacttctcggaagagcccgggcgcggacagctcctttcatcagccccaagccggacaggaccctaagaccaagtcacccaggggctgttgcctagcaaccctcgtggccccgctagcgggaaggaaaccgaacagaaaacgcacaagcgcagaaaagaaactcctggccgtcggtcggcccccgctcaacagcccaataaacggaagagcttctccc

SEQ ID NO: 254886 - DNA, 585 bp, Homo Sapiens
gaaaaagcaaacggagtgtagttacacgataccttggtgttcagctggtaacactaactctgtaaaagagttgtaacaacttgatggttagtgaacacgtaacatcaaccgtcacaattgtttatacatagttggactttatagccgtgccctgcgcacacactaggtagaggccttggttcaatgatagccactcaattacatatgcagatcattagctaagtcatctagttacacgttggctccatcaggaatgttcctgttggtttcttttttgtagaagtatgcaacaatattgtcctcattagtgttaagcatatctaaggctgccttcactggagttacttaagtctcacagttcgtctacaaaaatatgactgagcagtaagtcctcaggaggaagatgctgtgcatggccttggtccagaatgagctagagctgtgatctgtactcttcgcaccatgttggaatattgtccacggtattgtaagctaagcccactctcctgtactggatcattggcgtcagcgcatatcgcgattgtgctctcgctcatgttccttcacgtcctggccaggccttcc

SEQ ID NO: 254887 - DNA, 763 bp, Homo Sapiens
  misc_feature (721)..(721): n is a, c, g, or t
gggctgcaggattcggcacgagaggaaactgaagctcaaagaggctcaatgactttcccaaggtggtcgtagtggtggagttggagtttgaacacaggcctgaccctagagtccacaccctgacccaatcaattatattgcatcttgggtccataaaccctaatccataatcccatcaagagtcccgttgttatagtcttcactcatagacttaagatgatcccatcaccagagaggtttctctaccattagcttccctcttccggccattcttcacaaagtcatttttctaaattctgtgtcacatacgatgatggcatttctggaaattccttcaggtgctctcaagccctgctgcagagatccttttcagagcacacactgttccagcccatctgtctcaccctctcctgttgtatccagctccacgacaaacttctgccttccccaacacctttgtgcctttgcatatggtgttttcttgcccattttctgctcgactcgcccctgattttcaagttcaagacttaactcagggttcaggtcttccaggaggccctacttatgtcgtcagtctggggaactctctcatgtgctcctataactgtgcggttacctctttcacagcccttttaaagttctatcttccctttcccaccttttttgaccttccactagaccatgagcacctgggcggaaagccatatatcttattaagctntatatctgctacctggccgagggcctaattcatagtggagaa

SEQ ID NO: 254888 - DNA, 1110 bp, Homo Sapiens
ggtatccattttggtacagtgtttgtttcctaatatttattaaccaccttataccaaatgtcttgcaaagaaatgttattaaaaccttgaatttttacaaatgtaaaaaacaaaaagtgtattaatgtatttgttcaggaaaagctacataccgaagggcttttgtatatgaattctgtggtggggagacccatttgtaatctatatggcagttccatctgggttttaagtttagatttcaccgtgtcttagtgcttcattctattggtttattggaacatgtaataaataggagtagtgatgtattaaaacacaagtattcattaatgttttatatcttcactaaaattctatagttatgaaactattttatcaatcaaggtgttatatttcagtcagaagtgaaaatttatgaagagtatttggaagtgtgtacagaaataaactagacttacaggtaggctagatcagaacgttaacatatgaacctgcagaaatctggtaagacttaaattcagtgtgaggaataactctagttctctcctatgagcatttcctaaaagccatctgatttggcattcttactggagctgcagacagaaatctacaaagacaaaagtaaacaaaattaagttattattccactgttaggaatggaaataaacttgtgaagtctgtttattttgaagtattggtgaactaggcttgctaattgataactgcagcagtttgtgtttactccagttcatcagcttaggtcatttgaaagatataagagcttaaggcaagaaagaaataacatggaattctatttgaaggacaacagaacattcttggaaaagcagctccagttggtttttcagctgtcaaacttgaatgtgtaagtccccacagagcatggacagtcggtgcagagttccaaggaaacaattattgcctgatgaccacttccattttgtatacactctttggttcgtataggccatattccaactggctttttagtaatagaaatcaagtatataatgtatcaaatacaattgaggttctaacctagtgtgttaatttatctgaatttggatttttaaaaagtaataaaaagttaaatgt

SEQ ID NO: 254889 - DNA, 345 bp, Homo Sapiens
ccgagtccatggaccattacgcagatggtcatcggcctcagtgagaatcaaggcattgccacctggggtatcgttgtcatggcagaccccaaagggaaggcctaccgcgttgtttgaaagtaccaccagtgaatctgtcttctgtctctgtccctttccccgtgacacacagagcaggcatggaatttaatgggtgttctggacagacacttgtacatggacagacatcactactgtggatactacaagactgaaaagaaaatcgtatgttgtcattctctggctatggagtgtttgtggccttcacagatttcacaggaaccaataaatccctcagagaagcta

SEQ ID NO: 254890 - DNA, 774 bp, Homo Sapiens
  misc_feature (632)..(648): n is a, c, g, or t
  misc_feature (650)..(654): n is a, c, g, or t
ggggcgtcgtttacgccagtttgaaccaaagacgcccaaggttgaggccgagttccagagcatggggtctcggttgtcccagccttttgagtcctatatcactgcgcctcccggtaccgccgccgcgcccgccaaacctgcgcccccagctacacccggagcgccgacctccccagcagaacaccgcctgttgaagacctgctggagctgtcgcgtgctttctgggttggggctgatgggggcgggcgggtacgtgtactgggtggcacggaagcccatgaagatgggataccccccgagtccatggaccattacgcagatggtcatcggcctcagcattgccacctggggtatcgttgtcatggcagaccccaaagggaaggcctaccgcgttgtttgaaagtaccaccagtgaatctgtcttctgtctctgtccctttccccgtgacacacagagcaggcatggaatttaatgggtgttctggacagacacttgtacatggacagacatcactactgtggatactacaagactgaaaagaaaatcgtatgttgtcattctctggctatggagtgtttgtggccttcacagatttcacaggaaccaataaatccctcagagaagtaaaaannnnnnnnnnnnnnnnnannnnnaaacatggtcggccgcctccggcccctcgagaagcctttctaggaccatttccttttgggcgccgcgggcccccagtagggtaagggggaacatgggtccatagcctggttttcctagac

SEQ ID NO: 254891 - DNA, 1028 bp, Homo Sapiens
  misc_feature (745)..(745): n is a, c, g, or t
  misc_feature (747)..(747): n is a, c, g, or t
  misc_feature (751)..(754): n is a, c, g, or t
  misc_feature (756)..(756): n is a, c, g, or t
  misc_feature (758)..(759): n is a, c, g, or t
  misc_feature (763)..(763): n is a, c, g, or t
  misc_feature (775)..(775): n is a, c, g, or t
  misc_feature (784)..(784): n is a, c, g, or t
  misc_feature (881)..(898): n is a, c, g, or t
accgagggcggttatcgctgcatctgtgccgaggctacaagcagatggaaggcatctgtgtgaaggagcagatcccagagtcagcaggcttcttctcagagatgacagaagacgagttggtggtgctgcagcagatgttctttggcatcatcatctgtgcactggccacgctggctgctaagggcgacttggtgttcaccgccatcttcattggggctgtggcggccatgactggctactggttgtcagagcgcagtgaccgtgtgctggagggcttcatcaagggcagataatcgcggccaccacctgtaggacctcctcccacccacgctgcccccagagcttgggctgccctcctgctggacactcaggacagcttggtttatttttgagagtggggtaagcacccctacctgccttacagagcagcccaggtacccaggcccgggcagacaaggcccctggggtaaaaagtagccctgaaggtggataccatgagctcttcacctggcggggactggcaggcttcacaatgtgtgaatttcaaaagtttttccttaatggtggctgctagagctttggcccctgcttaggattaggtggtcctcacaggggtggggccatcacagctccctcctgccagctgcatgctgccagttcctgttctgtgttcaccacatccccacaccccattgccacttatttattcatctcaggaaataaagaaaggtcttggaaagttatnanaatnnnnanannctgnaactcctcaaancccccccangcaatgtggatcttgtccaattcactgaaaaaaggtacaaatctattgtccaggtccgggacggctttctactccttcaaaattcctttggcttggnnnnnnnnnnnnnnnnnnaaaaaatttttaaaacattctttgtggcgggggggcccaaaaaggagggagaaagggggaaatattttcttctccaggaaaaatcccccccacaccctggtgcgtggaccctccccccaataaaaaaacc

SEQ ID NO: 254892 - DNA, 124 bp, Homo Sapiens
aaaataaatgtgataacagtccttgtaaatataaactcccttcttataaatgtgaccacatttgcattgtggcagcaccaagggtctttgaggaattcttggtaagataaaaatgtttaggctg

SEQ ID NO: 254893 - DNA, 381 bp, Homo Sapiens
cttcaatcatggacaccctccaactcagtcaccacctgggcccaaagtcagtattttatttctcattaagcatgggaggaaaggagataactgctcattaatacattggaatgaaatcttgtaaaaggtaagtctgacctgaagtagaaagccagccatttgggtgtcacctgattaaatactttcagtgaacgcttgctgctctatggctggaaggacacatccctgcttgtcttgcaagcagctgcaggaactggcttccctgtccctcttgccacatatttgtcctccccgtcaagcttccacatcaagcttcatccccacacagggctttggtctcgctcttgctctgccccagattccttgctcttgccttttttt

SEQ ID NO: 254894 - DNA, 307 bp, Homo Sapiens
gactgggtgaccccatctcaaagaagaaaagttaccagatgtcatgggtaaaggttggtcttcaagtggcctcataagttgtcttgcatttaaattcagggaattcattggaccaataggttacattttcgttccttttttggtttggttcatctgttaagcagtgggggcctaattactgctcctttgtaaaaacacattttcccaaagaacacttgaattaccgttcaaactggttgttgatgggtaataagggctgtgtttgctgccccaaaagggcttaacaatttaggcggatagtttactt

SEQ ID NO: 254895 - DNA, 610 bp, Homo Sapiens
  misc_feature (160)..(160): n is a, c, g, or t
aagcggcatggtgcatatgtccaataaatatcagctgtcattgtctgttgaataaatgaacaggtgggttggtggggctgggggcaaagagccacaagctgaggtggcttgtgtctgagaaggaaagggacccgctgttccctggggttcacgcttcctntcttgaggttgtgtcctccttccccacaccctgcaggcctgcccagctcttcgtggcaaagcgggccccagatgggtgtacttgtgtgtcagagtgccaagagggtctgggagctcctgctagggctatgtccccctcccctaggacagaacagctggcacagccctctttgcctcacataggcccaaaggttggatgggtggtagctgaaagaactgaccccctacccaggctgtactctggtgtggaagaagccttttctggggaatgaggtcactcactggaccttgagcaagtcacactgctgctgcaggcctcagcgtccttgtctgtaaaatgggatggtgtgtggaactggtgcatgccgagcggcagatgcaaggtgtgcacttggtgaatgggaagaagccttgcacagaacaccagtgggtcaaggacagcagaggcccg

SEQ ID NO: 254896 - DNA, 632 bp, Homo Sapiens
  misc_feature (20)..(20): n is a, c, g, or t
  misc_feature (48)..(48): n is a, c, g, or t
  misc_feature (65)..(65): n is a, c, g, or t
  misc_feature (70)..(70): n is a, c, g, or t
  misc_feature (142)..(142): n is a, c, g, or t
  misc_feature (611)..(611): n is a, c, g, or t
aacaagcacctggccacagnggaaccagacaaataaataccggctgtnaaaaaacaaaagggaanaaccnaagccgaaagcttggccatggtgcaaaatgtcccaataaatatcagctgtcattgtctgttgaaataaatgnaacaggtgggttggtggggctgggggccaaaaaccaacaaactgaagtggcttgtgtctgaaggaaggaaaggaacccgctgttccctggggttcaagcttccctttcttgaggttgtgtcctccttcccccacaccctgaaggcctgcccagctcttcgtggcaaagcgggccccagatgggtgtacttgtgtgtcagagtgccaagaggggctgggagctcctgctagggctatgtccccctcccctaggacagaacagctgggacagtttccctctttgccttcaggggcctccccaggtccagacagaacacacccagcttagttcctttcttttcacataggcccaaaggttggatgggtggtagctgaaagaactgattttccccctacccaggctgtactctggtgtgggaggagccttttctggggaatgaggtcactcactggaccttgagcaagtcacnactgctgctgcaggcctcagc

SEQ ID NO: 254897 - DNA, 457 bp, Homo Sapiens
  misc_feature (26)..(26): n is a, c, g, or t
  misc_feature (55)..(55): n is a, c, g, or t
  misc_feature (62)..(62): n is a, c, g, or t
  misc_feature (182)..(182): n is a, c, g, or t
aaagaaaaggaaagcgtgaaaccccnagggaaaaagggggtcccttcccctcctnaagacanaagccacctcaagcttgtggctcttggccccccagcccccaccaaccccacctgttcatttaattccaacagacaatgacagctgatatttaattggacatttgcacccatgccaagcantcggcttggattatcccatttgtttctcacagccggtatttattgtctgctcctctgtgccaggtgctgtgctctgggcaggggcactgcatgggctgcctgccctggtggagcttgtggtctgatgggtgaggctgacccaagcccaccccattgccaacagggccagggcaagagtacacacaggggcctcataccatatgtctaaatatttaaaagttatcaatcaagctaacaactgttaaataaaatatgttctattctcctactttgaa

SEQ ID NO: 254898 - DNA, 1823 bp, Homo Sapiens
  misc_feature (216)..(216): n is a, c, g, or t
cctccatgtactggaacgcccgggcgctcgctctgcctgtagacagaatgcagctcccaggccctggtctgcgctcatttcatcctctggcttcctcactgccctgtgactcccacctgctcaacctacgtacgctccaggctgaggaggacaccctaccctcggcggagaccgcactcatcttacaccgcaagggttttgactgcggctggaggnccaagaacttgggcttcaactgcaccacaagccaaggcaaggtagccctgggcagccttttccatggcctggatgtggtattccttcagccaacctccttgacgttactgtaccctctggcctccccgtccaacagcactgacgtctatttggagcccatggagattgctacctttcgcctccgcttgggttagggcttcttgtggcctgaagagaaagttcattcacagagactgcctcttaacatgaagatcattggacaagccacacgggtatcccatcccgatctgcctcccagaactgtgacacactgggctctgccctcattttctgtttattgctgctgctgtgttttcggcgcaacccacaaacccagtgatgggtaaatagggcagacgccagtgagatcagggagagaaggcccttggtcagagtgggcagtgccaggctctgctttgggttgtgagtggacacccaactgggcacaggctcaggcacccatcctttttccaaacagggatatagaagtggtggaagcagacagaagaggtaagggaggctaagtgggtaacagcccagcatcagggtcactgtggcaacagcaggctctaggggaatcctgtggttatgtagagactccatgtcctggtgtgatgagcaggatcagagtgactctgggaggacaggggtggggacccagagttagcagtggggatggagcagtagaaggaatcactgtttctcctaggagtctgaaggcctcgctgctttctgtgatggctttgcagtaagtgccgcctggcctgcatgcattggctaacaggctgcagaatggcaggaaggactcgctagagattgtcatggccagagatcataggtcacttcaggtagcaagacccctggcaaactgggcacttggcctatgtactgatttgtgggatggtggcaggggtgtggggtccttcaccctgcctgaattctctttggcttctgtgctctgtatgctgctgtccccaagagctctttcttattatggcagggagtggggattggtcctactttctttctctggaaaggaaagcctccaagactccatgtgcttgggcagcttgagaaggcgttcagcaccacgcctagcaggcagaccttgaagcctcacctttagtctatctgcagaggtattcagttcctggcacaggggactaggggcatgtagagtatatgaggaggcagtatggctgtgcaggagccttcatttcagcttcaattaatagggaagaatttatgatagctctatagatgctgaaaaggtatttcgtaagatttaaaatccatcccttattaaaactcttagtaaattaagtctggaaagaaacaccctaatctagataaaggtctgtttcagaaaccaacagtgatggcattctaaagagtcagacccacaggcattcccattaaagtcagaaactagccaagggcaagctattattcagcagtgtcccggcactactaacccctgcaacaagccagatgaggaacataaggaagaattataattgtcattatttgtagacaataaaactgcctacctgtaaaacctaagaatc

SEQ ID NO: 254899 - DNA, 987 bp, Homo Sapiens
  misc_feature (799)..(807): n is a, c, g, or t
  misc_feature (926)..(926): n is a, c, g, or t
taggtagcgaggcctgggtggcgaattcggcacgaggctgccaaatgtgggcatgtttgaccccagcttcagagtccctggcacccaggcagccagcaccagccaccagcctccgacccggattcagggagccccttcaagccactggctccctcagcagccccacttcccactgctgccagccctccccagtctccagcagaacctgcccatgccagctcagagatcttctgcagaaaccaacgagctgagggaagcccttctgaagatcttccctgactcagagcaaagactgaaaatagaccagatcttggtggcccacccatacatgaaagatctaaatgcgctttctgccatggtgttggattgaagattgtgctgagcgctgagcttgcgctcagggctggctgatcaaactcaagctcacacctgtacctgatgggaatgaacataatgtgaagaaacttatttcccagtgtaaacgcagttgtacagaaaaaaaatgttttgggtataaatctgggttttcaaaaccagcttttttctatatataaattatgctgctattacagatttaacattttctgttaaaggaaagtctacattttctgcctgttcagaactgtttaatagcagttactcttgagtgtatttacctttttatgttttttaaactattttccttaaagccgaaaatattgacaaatggatatggttagcctttataaataaataaaaagaaaagtgttggctttcctaagggaaaaaaacacacacaaaacccgagggactcatggcnnnnnnnnntgaaaaagaggcaaggggcacggggaattggaccggaggcggcggcggtgaggcgaggctgcccgtagggcagcgagggagacgagctggcgagaagtggcctagaaacggggaccgcncccgccagttggatgaggagaggccgcgcgggcaccgcgggaggattaatcgcaccgcgcc

SEQ ID NO: 254900 - DNA, 732 bp, Homo Sapiens
  misc_feature (106)..(106): n is a, c, g, or t
  misc_feature (123)..(123): n is a, c, g, or t
agcaatggctagttcttaaaaaatgatagccagaagcaatttccattctcttcctttcttcctgcaaactggtgatctttacaagttctctgtcattccataaganagctgaacagtggttanaacatccagtttgcttgaattcctgagtgattcagattccagtgagattgagggtcattcataacagttacaaggctggtgtggtaaagggagaacaaaaataaactgggtttctgcaggtaagtgagaagacaaaatgaagaggaataaggttgtaagccagtatgattaggcttgtgggtgctatgccttctgataataattatgaacagaaatagaagccaaaaagtaaacaacatgtaagttgtcaatctttgacagttgaggcagggagaaggaaggaaggatgacattacaccttatctctggtttactaggctggtgtgtgagaccatttgggtgaaatcgtattgaaatcattcattgctgaggtgatcagctttcttgcggtcctttctctgcactctattcaatgataaactccactggtttatacctcctggaaaacagttattcagaaacattataggagtagcattggtgagacagccaatggagaacatgtttccaggtagcctgaaacccagcagacaatgtagctgttgcctaacgaacacagaaatctacattgtatgccaggttcatgccccagacctggatgttcagctt

SEQ ID NO: 254901 - DNA, 381 bp, Homo Sapiens
cctcatcaccctccgcacggcacagcacagcgtctccccacaagcaaaagactgcggctcctctctctgcaggaaggtcagccatactcaggtggctgcgtcacgccagtcaccatggaaaccagggctgacaggaagatgcagccgcttccagcagggacctggcctgagggcaagggaggagcggcacggcggcggctgccttgcgcttccagctcgggccctgctcagaacaatatccaacctcggactggagtttaggctacagtgaaatggattacgttatgccgaaacagaaacatcaaactgccaacgtggggctaggcccttgagttcacacctccacaggggacacagcggaagcagagggattacctgctg

SEQ ID NO: 254902 - DNA, 381 bp, Homo Sapiens
cagtgaagtaaatgaacacgtgatcctgggggccactccaggacgccgggtggggtaacatcctctccagtgtagtccttcgggactccctgatagacatctgtgccattgggcctgttgatcacaattcctggagtgggattgtcttcagagtaagcaatgtcatcgtacatcatcacaacgatctgttcgtcaggaatcccattgcggtgaatgatctggtaggcatggcacgcgtccttgttggcattgaggatggaagaaggggccatgagccaacagctgcagacagtgtctaaaagctggtgcctataattataccagccatttgaacctgccacgatcaccacacagtgcgtgcctccatcttcaggatcatct

SEQ ID NO: 254903 - DNA, 1916 bp, Homo Sapiens
  misc_feature (1589)..(1589): n is a, c, g, or t
  misc_feature (1661)..(1661): n is a, c, g, or t
  misc_feature (1738)..(1738): n is a, c, g, or t
  misc_feature (1748)..(1748): n is a, c, g, or t
  misc_feature (1751)..(1751): n is a, c, g, or t
  misc_feature (1754)..(1754): n is a, c, g, or t
  misc_feature (1757)..(1757): n is a, c, g, or t
  misc_feature (1760)..(1760): n is a, c, g, or t
  misc_feature (1774)..(1774): n is a, c, g, or t
  misc_feature (1777)..(1777): n is a, c, g, or t
  misc_feature (1779)..(1779): n is a, c, g, or t
  misc_feature (1781)..(1781): n is a, c, g, or t
  misc_feature (1784)..(1787): n is a, c, g, or t
  misc_feature (1790)..(1790): n is a, c, g, or t
  misc_feature (1805)..(1806): n is a, c, g, or t
  misc_feature (1811)..(1812): n is a, c, g, or t
  misc_feature (1814)..(1814): n is a, c, g, or t
  misc_feature (1817)..(1819): n is a, c, g, or t
  misc_feature (1821)..(1821): n is a, c, g, or t
  misc_feature (1827)..(1827): n is a, c, g, or t
  misc_feature (1829)..(1829): n is a, c, g, or t
  misc_feature (1835)..(1835): n is a, c, g, or t
  misc_feature (1837)..(1837): n is a, c, g, or t
  misc_feature (1858)..(1858): n is a, c, g, or t
  misc_feature (1865)..(1865): n is a, c, g, or t
  misc_feature (1899)..(1899): n is a, c, g, or t
  misc_feature (1910)..(1910): n is a, c, g, or t
gtccggaattcccgggatgtttggtgtgaggctgcgagccgccgcgagttctcacggtcccgccggcgccaccaccgcggtcactcaccgccgccgccgccaccactgccaccacggtcgcctgccacaggtgtctgcaattgaactccaaggtgcagaatggtttggaaagtagctgtattcctcagtgtggccctgggcattggtgccgttcctatagatgatcctgaagatggaggcaagcactgggtggtgatcgtggcaggttcaaatggctggtataattataggcaccaggcagacgcgtgccatgcctaccagatcattcaccgcaatgggattcctgacgaacagatcgttgtgatgatgtacgatgacattgcttactctgaagacaatcccactccaggaattgtgatcaacaggcccaatggcacagatgtctatcagggagtcccgaaggactacactggagaggatgttaccccacaaaatttccttgctgtgttgagaggcgatgcagaagcagtgaagggcataggatccggcaaagtcctgaagagtggcccccaggatcacgtgttcatttacttcactgaccatggatctactggaatactggtttttcccaatgaagatcttcatgtaaaggacctgaatgagaccatccattacatgtacaaacacaaaatgtaccgaaagatggtgttctacattgaagcctgtgagtctgggtccatgatgaaccacctgccggataacatcaatgtttatgcaactactgctgccaaccccagagagtcgtcctacgcctgttactatgatgagaagaggtccacgtacctgggggactggtacagcgtcaactggatggaagactcggacgtggaagatctgactaaagagaccctgcacaagcagtaccacctggtaaaatcgcacaccaacaccagccacgtcatgcagtatggaaacaaaacaatctccaccatgaaagtgatgcagtttcagggtatgaaacgcaaagccagttctcccgtccccctacctccagtcacacaccttgacctcacccccagccctgatgtgcctctcaccatcatgaaaaggaaactgatgaacaccaatgatctggaggagtccaggcagctcacggaggagatccagcggcatctggatgccaggcacctcattgagaagtcagtgcgtaagatcgtctccttgctggcagcgtccgaggctgaggtggagcagctcctgtccgagagagccccgctcacggggcacagctgctacccagaggccctgctgcacttccggacccactgcttcaactggcactcccccacgtacgagtatgcgttgagacatttgtacgtgctggtcaacctttgtgagaagccgtatccgcttcacaggataaaattgtccatggaccacgtgtgccttggtcactactgaagagctgcctcctggaagcttttccaagtgtgagcgccccaccgactgtgtgctgatcagagactggagaggtggagtgagaagtctccgctgctcgggccctcctgggggagcccccgctccagggnctcgctccaggaccttcctcacaagatgacttgctcgctggtacctgcttccccagtcttttctgaaaaacnacaaattagggtgggaaaagctctgtattgagaagggtcatatttgctttctaggaggtttgttgttttgcctgttngttttgcggngcnggnagntcntgggggcttctgtngcncntntcnnnnggngtctttcttctgcgnntttgnngntgnnncntctttnantcttcngnatgcttttattgacgagggcngccagcnccccatggaaacctgtttttagaaaatatgatgntttttgattgnttttgt

SEQ ID NO: 254904 - DNA, 2032 bp, Homo Sapiens
agcaggctggtaccggtccggaattcccgggatccgacgtcgtgggtgtttggtgtgaggctgcgagccgccgcgagttctcacggtcccgccggcgccaccaccgcggtcactcaccgccgccgccgccaccactgccaccacggtcgcctgccacaggtgtctgcaattgaactccaaggtgcagaatggtttggaaagtagctgtattcctcagtgtggccctgggcattggtgccgttcctatagatgatcctgaagatggaggcaagcactgggtggtgatcgtggcaggttcaaatggctggtataattataggcaccaggcagacgcgtgccatgcctaccagatcattcaccgcaatgggattcctgacgaacagatcgttgcgatgatgtacgatgacattgcttactctgaaaacaatcccactccaagaattgtgatcaacaggcccaatggcacagatgtctatcagggagtcccgaagactacactggagaggatgttaccccacaaaatttccttgctgtgttgagaggcgatgcagaagcagtgaagggcataggatccggcaaagtcctgaagagtggcccccaggatcacgtgttcatttacttcactgaccatggatctactggaatactggtttttcccaatgaagatcttcatgtaaaggacctgaatgagaccatccattacatgtacaaacacaaaatgtaccgaaagatggtgttctacattgaagcctgtgagtctgggtccatgatgaaccacctgccggataacatcaatggtaggtggttggggcgccggcctcgacctgggctggcaacaggttgctcagacaccgctgacatggaactgagcattctcctttatgcaactactgctgccaaccccagagagtcgtcctacgcctgctactatgatgagaagaggtccacgtacctgggggactggtacagcgtcaactggatggaagactcggacgtggaagatctgactaaagagaccctgcacaagcagtaccacctggtaaaatcgcacaccaacaccagccacgtcatgcagtatggaaacaaaacaatctccaccatgaaagtgatgcagtttcagggtatgaaacgcaaagccagttctcccgtccccctacctccagtcacacaccttgacctcacccccagccctgatgtgcctctcaccatcatggagatccagcggcatctggatgccaggcacctcattgagaagtcagtgcgtaagatcgtctccttgctggcagcgtccgaggctgaggtggagcagctcctgtccgagagagccccgctcacggggcacagctgctacccagaggccctgctgcacttccggacccactgcttcaactgggcactcccccacgtacgagtatgcgttgagacatttgtacgtgctggtcaacctttgtgagaagccgtatccgcttcacaggataaaattgtccatggaccacgtgtgccttggtcactactgaagagctgcctcctggaagcttttccaagtgtgagcgccccaccgactgtgtgctgatcagagactggagaggtggagtgagaagtctccgctgctcgggccctcctggggagcccccgctccagggctcgctccaggaccttcttcacaagatgacttgctcgctgttacctgcttccccagtcttttctgaaaaactacaaattagggtgggaaaagctctgtattgagaagggtcatatttgctttctaggaggtttgttgttttgcctgttagttttgaggagcaggaagctcatgggggcttctgtagcccctctcaaaaggagtctttattctgagaatttgaagctgaaacctctttaaatcttcagaatgattttattgaagagggccgcaagccccaaatggaaaactgtttttagaaaatatgatgatttttgattgcttttgtatttaattctgcaggtgttcaagtcttaaaaaataaagatttataacagaacccaaaaaaaa

SEQ ID NO: 254905 - DNA, 994 bp, Homo Sapiens
  misc_feature (910)..(919): n is a, c, g, or t
tggtctcagaacgggagcggctccaggcagaactggaccacttacgaaagtgccttgccttgcctgcaatgcactggcctaggggctacctgaagggatatcccaggtgacggtttcccttgcactaggccgaacctatagtatagaaatattatctattttattaccttgaatatttaatatttttcactgggaggtttgaagcttacaaaatgagaatgtgccatgcatgaagcaaaggattccaggctccagaaaaaatgaatgaactcaccttgacgtcaatgcaattgaatcaccgttgtcattcagcgagcaaccaatgtaggattgcccacagttttttctttttaaaggtggttttcgcccttcctctcccacattatttcttaatctgaacatgaaggctccattagcaacactaaaacttgatcattaacagccccctgtgcatatgagtggatcaaaccggttctgttctttcttgtgttgccatgttactatgcctcaagcccagtttgcttttgccgcagcaatggggccagtctcattcctccccaggagtgaaacttgcttcagctgaaaaggttgggtgcattgtcagtaaaaagggcttatttgtttcattttactttcctgcaaaattttcttcaaagcaacaagtcctaggagcacacaaagcaacccaaaggcttttccctgggaaaagctctttcttacctaaagataaaaccaattcacaaactgaaggtagctttttattactccgtggggagcatgtacagagctctgtgtatacacagcttcacacccaccagattgttactacagtgggttgggttttcatacagacgtaaattttgagagaaaagtcaaaggtgcttcagccttgtactgtgtatatatattnnnnnnnnnncaaagttttgtatgtttttattactttaactattgttataaaaagcctgccatttttaatatgtggtttggggga

SEQ ID NO: 254906 - DNA, 893 bp, Homo Sapiens
taggctcagcactgatccagaagggcttcaagactgccccagatcagttcattggcatctttgctcaaaatagacctgagtgggtgattattgaacaaggatgctttgcttattcgatggtgatcgttccactttatgatacccttggaaatgaagccatcacgtacatagtcaacaaagctgaactctctctggtttttgttgacaagccagagaaggccaaactcttattagagggtgtagaaaataagttaataccaggccttaaaatcatagttgtcatggatgcctacggcagtgaactggtggaacgaggccagaggtgtggggtggaagtcaccagcatgaaggcgatggaggacctgggaagagccaacagacggaagcccaagcctccagcacctgaagatcttgcagtaatttgtttcacaagtggaactacaggcaaccccaaaggagcaatggtcactcaccgaaacatagtgagcgactgttcatcttttgtgaaagcaacagagaatacagtcaatccttgcccagatgatactttgatatctttcttgcctctcgcccatatgtttgagagagttgtagagtgtgtaatgctgtgtcatggagctcttcaacccactgtcttccccgtggttccaagactgctgaaccggatgtttgaccgaattttcggacaagcaaacaccacgctgaagcgatggctcttggacttcgcctccaagaggaaagaagcagagcttcgcagcggcatcatcagaaacaacagcctgtgggaccggctgatcttccacaaagtacagtcgagcctgggcggaagagtccggctgatggtgacaggagccgccccggtgtctgccactgtgctgacgttcctcagagca

SEQ ID NO: 254907 - DNA, 827 bp, Homo Sapiens
agtcaccatgctcggcccaacatccacatgtttaaagcaaaacctgtggacccatgacgttgatttgccctatcccagttatagttaccatcaagtcccactcggagaagagacttgttggtaaaacagttctatttttataatagtagaagaaattccagctagcaatgtaatcctctttcttaaatgtaattgtacaactaacagtcatcacacatatgagggtagccagcaacgtgagagacaaaattcaagattaagttccaaaatcaacatggaggacaatttagtaaagagactagacctcttttataaaattataattactatgtagcagaaaggagccaggacaagaatgaataaacagattacaaatattgttgctgaaataaaaatgttcaataggaggattaaagtccaaaaagaaaacttccccaatacaaaaagagatagaagacatagagaaccaattcagactattaggaatctagaaagaagaaaatggagaaggaaatgctatcatgtggaagaggatttcctagggatgaataaaattcattgaatgcccagcaacagtgactgacaaaatactcactaagatacttcatagtaatactgtatcatatcaaggagagggagaaagagtgtcagtgattttagagaagccaaagaaccatattttcagtgcagcctttagtacatggggagacacacacacaaagctatcatttgtttagctttgtgatggcggtattaggtttaggtggtttggtgtattctggactgcgactttctcctctttgcatcctgattatattctgtttgtt

SEQ ID NO: 254908 - DNA, 798 bp, Homo Sapiens
  misc_feature (646)..(646): n is a, c, g, or t
cagcgctgcacagtgtctcttgcacggtatcgagttgtagttaaagaagagatggatgcctccattaagaaaatgaaacaagcctttgctgaattggagagctgtttaatggatcgagaagtggcgttgcttgctgaaatggacaaagtgaaagctgaagcaatggaaattttgctcagccgacagcagcaattggttgagctcagagctgatatcaagcactttgttagtgaacgtaaatatgatgaggatctgggacgagtagcccggttcacctgtgatgtagagaccctaaagaagagcattgattcatttggacaagtgtctcatccaaagaacagctattcgaccagatcccgatggagctcagttacatctgtgtccttgagtagccccaagtgatgcctctgctgcttcctcttccacctgtgcctctcctcccagccttacaagtgctaacaagaaaaactttgcaccgggagagactcctgcagccatagcaaactccagtggccagccctaccagccacttcgggaggtattgccagggaacagacgaggaggacagggctatagccacaaggccaaaagtccaatgaccccatgaaccaagggcggcatgacagtatgggtcgttacagaaacnagctcgtggtattcatctggttccaggtatcagagtgctccatctcaggcaccaggaaacaccattgaaagaggccagactcactctgcagggaccaatggaactggagtcagcatggagcccagccctcccacgccgagccctatgcagtc

SEQ ID NO: 254909 - DNA, 240 bp, Homo Sapiens
agcatgagccaccacgcccgaccatatttatttttaaaagtaaatattaattctatgcgacacttgagcccatttcagtaccactgggagggccaggaaaggcaaagtagttacaagctaaaccctctttttatctgctttatatttcagggggtctcattgagattttggttaatgagtatgttctgatgcttaagtttgaagacttccagctggaagatgtgttctaaggtccttttg

SEQ ID NO: 254910 - DNA, 571 bp, Homo Sapiens
cccaccaagcctaggtttagctttagaatcatcctcaacattatttttcatttggatggaggtcaattttcagtccctgctgcagttatgagaaagttaagtcttctacacattgctcttcttcatgttctctgtgagcacacaggactctaatagtctggggtgaggacagcgtcagccctgaagttttgagcccattcctggaacacagtttgggaaagacaaaatctgcaggctggtgtgttggtattaggctctccaaagcctgagatccacaaggtcaaatattggaaacaggcatttcttaggcactatgaataatctttccactgacttctgaaagcctatatcagggatggaagcctagggtcattgaggcactgggacccaggttgagggcgaggtcaaggctgcttgtggtaaagctgggactagaacctcagtctgtgatctctaatccgttgagtcccctatcagaccaaattgatttttctttgataaagcattaacctactatttccccaatttcattttgaaatcatgggttgagtcatgaagaaggcaggtcatc

SEQ ID NO: 254911 - DNA, 798 bp, Homo Sapiens
ataataaaacactttaatccccaaatttaacaaatgaggaaaactaagagcaaagagttaagtggacttattccaaggttaacacagctggatacctaaatggccagaacttcggacaaaagccccaggtcttctgcttcccttgcatgctacacccaaagtccctgtatgaccattattaataaccaagttgaagcatttctttaattgtgaaattactttcacttctacagtggcatatctcagttgaaactaaaaaagtcagcatgttttttaatgaacaggtcctcttttgctcatgtttgcttagaagtgaaaataatactgctaatctcctggagaagataccttcaagggcagagaccacaactgcaaattgatgttccccaacagtactaggtagtgctgggcacacagtagatgtttgataaatacctgttgatcccatataaataaatacagtagactataattgaaaaggcaataattaggattatttaaaaatagaaaagtattcaagctaagtaattagtgataaagatgggcttgtttcctctgagtttatgatttcagtcagaatcttcaattctgtatgcttaaaaatgaactgatacttatgaagttcaatgtatttctaggatactgaactactacaaactgccaactttatattgtttacatcactcatcaatattgaaaagcataatattatgtgacattgtaaattataatccaatggatcccagctgaacagtcacttatttgaaacaatacaggaaaattatcatctattcctat

SEQ ID NO: 254912 - DNA, 415 bp, Homo Sapiens
gctatctctttagagcacaattaaagttgtacacgagggagaaaatagtacgtgtctaaagatgactttgatctatctataatgaaaggtatgggtgggtttgaattccttccacaggtaataagaggacaaagtacttaaccaattccacatacctctggtttgaatcacaaattcctgggtgactaaaataaattcctagagttaaaggtaaatggggaaggtgactaccagaaaataaacaccaactttattaatataatagcaacagaaagaggttccacatttctcaaaaggaaaataatatgagactagtgggctatgatgaagcctgtgaatagccagctactgtaccccactgtagctggacacagtgttaaacaagtaaatgcctttcgagaggcagagccctgtg

SEQ ID NO: 254913 - DNA, 670 bp, Homo Sapiens
gcgcaagaaatccgccacgagacatcccttagagggtggaatatcacccttacctcaacccaaagcaaactcctgaagtactgtaagtcaaaggacattgtcatgactgcatattctgccttggggtctgactcagacaaagactgggtgaaaaaaggaaacccagttctccaggaggatccaatactcaatgccattgctgaaaagcccaggcgaactccagcccaggttgccttgtgctaccagctgcagcgtggggtggtggtcctggtgaagagcttcagtgagaagagaatcaaagaaaactctccagggttttgacttctagctgacaccagaggacatgaaaaccacagatggcttgaacaagaatatacgccattagtaaatgtctatcctttctcatcacccagagtatccatttcttgaggaatataaagaaaagagtctgtggttgttccagagtttattgatttgggttgagatgaatagagaatatctcatggatgggaagttttctagtttattccagattgattagcctgctcagtcacaagttggcctaagaccccggatcagaaaataaaagtatctaaacctagttttctcttgattcccgcccccaccccacccccacaactgccaaaataaagatgtatttgaaataacc

SEQ ID NO: 254914 - DNA, 551 bp, Homo Sapiens
gcacgaggccaggcccgcctctcgtcccttctcttcccaggcccccccggcctgccacttcagtcaactccactgaggagactgccactacagttgttgctgctgcctcctccaccagcatccctagctcagaggccacgaccccaaccccaggagcctccccaccagcccctgaaatggaaaggcctccagctcctgagtcagtgggcacagaggagatgcctgaggatggagagcccgatgcagcagagttccgcccgcgccgcctgcagaagctggagtctcctgttgccccactgactattatcattcagaaattccaaacacaagaccacatgaaattctggaaaaaccttcccctccacagccaccacctcctcctcggtaccacaaactgtgattccaaagaagactggctcacctgaaattaaactaaaaataaccaaaactatccagaatggcagggaattgtttgagtcttccctttgtggagaccttttaaatgaagtacaggcaagtgagcacacgaaatcaaagcatgaaagcagaaa

SEQ ID NO: 254915 - DNA, 576 bp, Homo Sapiens
ctcaacgctggtcaagtatgcagagaagtggtctcagagcaggtttctgtatgtgacattcaacaagagcatcgcaaagcaggccgaacgcgtcttccccagcaacgtcatctgcaaaaccttccactccatggcctacgggcacatagggcggaagtaccagtcaaagaagaagttgaatctcttcaagttaacacccttcatggtcaactccgtccttgctgaagggaagggtggattcataagagccaagcttgtgtgtaagactctagaaaacttctttgcctcggctgacgaagagctgaccattgatcacgtgcctatttggtgtaagaacagccaaggacagagagtcatggttgagcagagtgaaaaactgaatggtgtccttgaagcgagccgcctctgggataacatgcggaagctgggggagtgcacagaagaggcgcaccagatgactcatgacggctacttgaaactctggcagctgagctagccttcgctggcctcttttgacgccatctttgtggatgatgcccaggactgcacaccatctatcatgaacatagttctgtc

SEQ ID NO: 254916 - DNA, 845 bp, Homo Sapiens
  misc_feature (393)..(394): n is a, c, g, or t
  misc_feature (413)..(413): n is a, c, g, or t
  misc_feature (418)..(418): n is a, c, g, or t
  misc_feature (423)..(423): n is a, c, g, or t
  misc_feature (489)..(489): n is a, c, g, or t
gcgccgcggcccgggtcacaatgctgccctcctcgacgcccgggcccgggcacgccacagagacctgcccggctccgcctggaccggagcgttctcccgcggccagggctccggcagctgcttctagcctgggaccggtctcaaccgccgggaggtgagcgacggcccagggggcgggcgcgaggcggcggcgcccggcgacccgggagaggcctgaccgccactccccgcgcagagcgccccggggcttggacatgagcgcccaggagcccccgcagggtcggagattccccattgaggccggagactcccgtggccttgccgccgcccccgagtcccaggacagcccggaggcggtagcgacggagcacaacccggtcaggtaggggccgnngcccacccccgcttcgccngtccngcggncccgcccttcgtcccacttggcgcccccagcagtcaggaccccgcatccacgtccggacccccggngaccccaggtgcactcccctgggtgcgccccacaggatgggccaagcccctgcctcagcggcccctgtcgcgcgtcaatttccccaggccgcttcgtcgctgccctggatgccactgcctgacgctgctgcacgtgcccatcgacgtctacctcgccatggggcgggagccccccggcccgcgccacgtgagtgcgcctgctccctgcggctccgcgggaggctgggcgggaaccaggcccccagcgggccaccacgctgagggcgcatgcgccgagcacgagacaatgatgcacattttaaaataaaagaatgatgcacattttaataaagcacagcacaaactgttctttccaa

SEQ ID NO: 254917 - DNA, 348 bp, Homo Sapiens
caagcagaagcatagcatcaagctcttcccttcaggctcttctgttcatatacttgcttgaataaattagttcgatcaactatatttcgaggtagattgattctgtctgccatggtagtgatttctttgaatgcattcatcattgcccgatcagaactgctcattgttctccgattctggtacttagaattgccaaattcgtcaaaacttgcagctcctgtgcccttgccaatcatggtagacaaagttgctttgtcattgctgaaagttcgccattcagatcccacatcaataacccggtcacctacaaccaagccacattcagcacagatcatatcaccggctctg

SEQ ID NO: 254918 - DNA, 1300 bp, Homo Sapiens
gggccacattcgcttcctgctttcggtgtgtctgttgtgtcttgttgcgggcaccgcagtcgccgtgaagatggcgtctaccagccgtttggatgctcttccaagagtcacatgtccaaaccatccagatgcgattttagtggaggactacagagccggtgatatgatctgtcctgaatgtggcttggttgtaggtgaccgggttattgatgtgggatctgaatggcgaactttcagcaatgacaaagcaacaaaagatccatctcgagttggagattctcagaatcctcttctgagtgatggagatttgtctaccatgattggcaagggcacaggagctgcaagttttgacgaatttggcaattctaagtaccagaatcggagaacaatgagcagttctgatcgggcaatgatgaatgcattcaaagaaatcactaccatggcagacagaatcaatctacctcgaaatatagttgatcgaacaaataatttattcaagcaagtatatgaacagaagagcctgaagggaagagctaatgatgctatagcttctgcttgtctctatattgcctgtagacaagaaggggttcctaggacatttaaagaaatatgtgccgtatcacgaatttctaagaaagaaattggtcggtgttttaaacttattttgaaagcgctagaaaccagtgtggatttgattacaactggggacttcatgtccaggttctgttccaacctttgtcttcctaaacaagtacagatggcagctacacatatagcccgtaaagctgtggaattggacttggttcctgggaggagccccatctctgtggcagcggcagctatttacatggcctcacaggcatcagctgaaaagaggacccaaaaagaaattggagatattgctggtgttgctgatgttacaatcagacagtcctatagactgatctatcctcgagccccagatctgtttcctacagacttcaaatttgacaccccagtggacaaactaccacagctataaattgaggcagctaacgtcaaattcttgaatacaaaactttgcctgttgtacatagcctatacaaaatgctgggttgagcctttcatgaggaaaaacaaaagacatggtacgcattccagggctgaatactattgcttggcattctgtatgtatatactagtgaaacatatttaatgatttaaatttcttatcaaatttcttttgtagcaatctaggaaactgtattttggaagatatttgaaattatgtaattcttgaataaaacatttttcaaaactc

SEQ ID NO: 254919 - DNA, 343 bp, Homo Sapiens
  misc_feature (163)..(163): n is a, c, g, or t
ctgttcccctacagaccttccaaatttgacaccccccaggggacaaacctacccacagcctataaattgaggccagcctaaccgtcaaattccttgaatacaaaactttgccctgttgtacatagccctatacaaaatgcctgggttgagcctttcatgaggnaaaacaaaagacatggtacgcattcccagggctgaatactattgcttggcattctgtatgtatatactagtgaaacatatttaatgatttaaatttcttatcaaatttcttttgtagcaatctaggaaactgtattttggaagatatttgaaattatgtaattcttgaataaaacatttt

SEQ ID NO: 254920 - DNA, 673 bp, Homo Sapiens
ataaggaatcactgaacctagtagttcttagacagcttggtttgagaatccttttgcggttaaaaattagggactgagccaggcgcagtagcatgcgcctgtagtcctagccacattggaggctgaggtaggaggatcccttgagtccacaagtttgagttcagccagagaccctatctcactatatatatgtatctcaaagacttcaatgggtttttgcttacatgggccagtaattgttgaacaaccagctatttgagaaaaagccctgattttgctgcttttcatggtgtaaatacttaaccatggctgagtttgagctatctgcatgacacctctaaacacagagttgggaatagatgtgccacaatccagctctggggaagctggtgcaatccctgccctagcacaccactggttttaagatagatatatcatatagatatttaccatttaccatattggaaagtaaaatggagaaaaatttaaaacacaagatacatgagcacacattccattagctattaaggtgatggacacggtgtccaaatgacacggtgtcatttaacttctggaaaacaacactgtgtactgagaacaagagaaagacaaatgacttttttaaattaagtttttaatttacaattgatgcataattttactttaaaaaaat

SEQ ID NO: 254921 - DNA, 899 bp, Homo Sapiens
  misc_feature (64)..(107): n is a, c, g, or t
gaactctttcttctctcccgggagccaatgagcttgggagaaagggcaagggggtacaagggannnnnnnnnnnnnnnnnnnnnnnnnnnnnnnnnnnnnnnnnnnntggggagagtgttatgtggtggatggggaacaatatatttaccttccacataagtttttattgataccaagatgaggtaaatagaactctggtgtggatctgtgggtttgagtccaataagctttctcttttacattcatcttatttaaatctttgctgtcacagtgaagaaataatttagaaaacttataaaagcaattgagtttaacacagattttattgccctatagacagttatgatgtgaacagtggatatcaatgaaacttcttaattatttgagtctgaaaatgcatatttaaaacattaaaagattgactccactttgtgccaagctctgcgggtaggcatatttcatatcttaaaaaggcttgtaattcattcagggaggcaaaagcaaaatctgtaattagaggttagccataatgttatgaaagtgccatgagaatagagagagagaataaaatcataaagatataaataaacgtatttgaactacaggtgatgtattgtcttaaattacttctatatcatatgccagagggccttcaatggaaaatcctaggtagaaagacactctttctatgttcctaccacttctgagtggacctgaataaacagatattactggtatattttttcctctgttccatattctacagagattagcttgccttcagcctgaccagttagacgacgcaggaggtctttgacttcattttttttccacacatccccactgtgccagagggaatttgtattttgtgctttatcaaagtactgctcaattgtgg

SEQ ID NO: 254922 - DNA, 573 bp, Homo Sapiens
agcccgtcatgcacttatcgggggcaggaagacaatggtatcctctgtgaagccctgggccttgcagaaggcggtgaatttctcctttaactcagccctgggggtctgggttcgtctgtagagggtggccatgcggaagtcctcgccagggcccttgctgccctggctgtacagcagcgcgtactggtcgtagtcggtctccaccactgacacggagtaggtgctgccccagtggggactccggtagctgtaggtcctgaggaaggtggaggtcaggttgaggccaccatccgtggcaggggccaccacagacttgcacatggacaacgccgccttcttctcccggagccagctcgagttggaggcgaggcccgcgctgaaccagcgccccaggaacttgtcctgctggaagttgggctgcacggagacctgggcctccggtgctgcctgcaggtcgcccagcacccccagcagggccagtcccatccacagcgtgtgatgagtagccattctcctgcagcagagcgggtgtccggggcctggtgccagtggtgtgggagagcgagggaggtg

SEQ ID NO: 254923 - DNA, 798 bp, Homo Sapiens
cacctccctcgctctcccacaccactggcaccaggccccggacacccgctctgctgcaggagaatggctactcatcacacactgtggatgggactggccctgctgggggtgctgggcgacctgcaggcagcaccggaggcccaggtctccgtgcagcccaacttccagcaggacaagttcctggggcgctggttcaacgcgggcctcgcctccaactcgagctggctccgggagaagaaggcggcgttgtccatgtgcaagtctgtggtggcccctgccacggatggtggctcaacctgaccttcacctttcctcaggaaaaacaagtgtgagacccgaaccatgctgctgcagcccgcggggtccctcggctcctacagctaccggagtccccactggggcagcacctactccgtgtcagtggtggagaccgactacgaccagtacgcgctgctgtacagccagggcagcaagggccctggcgaggacttccgcatggccaccctctacagccgaacccagacccccagggctgagttaaaggagaaattcaccgccttctgcaaggcccagggcttcacagaggataccattgtcttcctgccccaaaccgataagtgcatgacggaacaataggactccccagggctgaagctgggatcccggccagccaggtgacccccacgctctggatgtctctgctctgttccttccccgagcccctgccccgctccccgccaaagcaaccctgcccactcaggcttcatcctgcacaataaactccggaagcaagtcagt

SEQ ID NO: 254924 - DNA, 1495 bp, Homo Sapiens
  misc_feature (609)..(609): n is a, c, g, or t
  misc_feature (1423)..(1423): n is a, c, g, or t
cgagtctcaactaaaagggactcccggagctaggggtggggactcggcctcacacagtgagtgccggctattggacttttgtccagtgacagctgagacaacaaggaccacgggaggaggtgtaggagagaagcgccgcgaacagcgatcgcccagcaccaagtccgcttccaggctttcggtttctttgcctccatcttgggtgcgccttcccggcgtctaggggagcgaaggctgaggtggcagcggcaggagagtccggccgcgacaggacgaactcccccactggaaaggattctgaaagaaatgaagtcagccctcagaaatgaagttgactgcctgctggctttctgttgactggcccggagctgtactgcaagacccttgtgagcttccctagtctaagagtaggatgtctgctgaagtcatccatcaggttgaagaagcacttgatacagatgagaaggagatgctgctctttttgtgccgggatgttgctatagatgtggttccacctaatgtcagggaccttctggatattttacgggaaagaggtaagctgtctgtcggggacttgggctgaactgcttctacagagtgaggcgattngacctgctcaaacgtatcttgaagatggacagagtgctgatggcagagaatggtgaggatttggataaatctgatgtgtcctcattaattttcctcatgaaggattacatgggccgaggcaagataagcaaggagaagagtttcttggacctgtggttgagttggagaaactaaatctggttgccccagatcaactggatttattagaaaaatgcctaaagaacatccacagaatagacctgaagacaaaaatccagaagtacaagcagtctgttcaaggagcagggacaagttacaggaatgttctccaagcagcaatccaaaagagtctcaaggatccttcaaataacttcaggctccataatgggagaagtaaagaacaaagacttaaggaacagcttggcgctcaacaagaaccagtgaagaaatccattcaggaatcagaagcttttttgcctcagagcatacctgaagagagatacaagatgaagagcaagcccctaggaatctgcctgataatcgattgcattggcaatgagacagagcttcttcgagacaccttcacttccctgggctatgaagtccagaaattcttgcatctcagtatgcatggtatatcccagattcttggccaatttgcctgtatgcccgagcaccgagactacgacagctttgtgtgtgtcctggtgagccgaggaggctcccagagtgtgtatggtgtggatcagactcactcagggctccccctgcatcacatcaggaggatgttcatgggagattcatgcccttatctagcagggaagccaaagatgtnttttattcagaactatgtggtgtcagagggccagctggaggacagcagcctctttggaggtggatggggcca

SEQ ID NO: 254925 - DNA, 1368 bp, Homo Sapiens
gcaaggggctggtacggctccggaattcccgggatatcgtcgacccacggcgtcgaaagaatgtggggtttccttgcagatgagttcatctgtggtttcatttcctttacaatgtaggttttcttctctgtcttttggattagtctgtttttggttctgtctaccaaggatccctttctttagacttctatagatccctttctatagaacttaatctacttaagtcagggagaccacccagaaggaaagagcccatactttcaatcttaggcataagttagcttgataagattttcagaaaaattcccttttaaccacagaactcccccactggaaaggattctgaaagaaatgaagtcagccctcagaaatgaagttgactgcctgctggctttctgttgactggcccggagctgtactgcaagacccttgtgagcttccctagtctaagagtaggatgtctgctgaagtcatccatcaggttgaagaagcacttgatacagatgagaaggagatgctgctctttttgtgccgggatgttgctatagatgtggttccacctaatgtcagggaccttctggatattttacgggaaagaggtaagctgtctgtcggggacttggctgaactgctctacagagtgaggcgatttgacctgctcaaacgtatcttgaagatggacagaaaagctgtggagacccacctgctcaggaaccctcaccttgtttcggactatagagtgctgatggcagagattggtgaggatttggataaatctgatgtgtcctcattaattttcctcatgaaggattacatgggccgaggcaagataagcaaggagaagagtttcttggaccttgtggttgagttggagaaactaaatctggttgccccagatcaactggatttattagaaaaatgcctaaagaacatccacagaatagacctgaagacaaaaatccagaagtacaagcagtctggtggatggaatggaacctggatgaccaaagcctcctttagcttgtggctagaaatcgcgtccctttatattcttcatatcccagatctgccaactccatttgccctgtatattcatgatctctgcaaaatgctgccaagcaagttcttaacatttcagtcttcaagaaagaatctgggatctgcacaggctggcagagctatggacattcaggggttttgcatgtatgctgaaccctactgccttgctctagtatttggcctcacaaccactgtccaacttcgggtgatgtcacttgggtctcataccttccttgcatgtgtcccaagtttcacaaaacctccttatgaaaagagcacattcgatttcttccttataaaagggaccag

SEQ ID NO: 254926 - DNA, 539 bp, Homo Sapiens
attaggcgtgaagcggttcaacaggcagaggttctcggacgccctccggcgaagccacctgttgatgcttttgactttctgtccttgttcctcgtcccatctggagcatttccaattctggttttgcggagcagcaggtctgagcttgtccggcgagggtgggagttggtcccggcggagatccagtgggaagagccggcggctgcccgggcaactcccccactggaaaggattctgaaagaaatgaagtcagccctcagaaatgaagttgactgcctgctggctttctgttgactggcccggagctgtactgcaagacccttgtgagcttccctagtctaagagtaggatgtctgctgaagtcatccatcaggttgaagaagcacttgatacagatgagaaggagatgctgctcttcttgtgccgggatgttgctatagatgtggttccacctaatgtcagggaccttctggatattttacgggaaagaggtaagctgtctgtcggggacttggctgaactgctctacagagtgaggc

SEQ ID NO: 254927 - DNA, 1028 bp, Homo Sapiens
gctgggtggcgaattcggcacgaaggaaggctgaggtggcagcggcaggagagtccggccgcgacaggacgaactcccccactggaaaggattctgaaagaaatgaagtcagccctcagaaatgaagttgactgcctgctggctttctgttgactggcccggagctgtactgcaagacccttgtgagcttccctagtctaagagtaggatgtctgctgaagtcatccatcaggttgaagaagcacttgatacagatgagaaggagatgctgctctttttgtgccgggatgttgctatagatgtggttccacctaatgtcagggaccttctggatattttacgggaaagaggtaagctgtctgtcggggacttggctgaactgctctacagagtgaggcgatttgacctgctcaaacgtatcttgaagatggacagaaaagctgtggagacccacctgctcaggaaccctcaccttgtttcggactatagagtgctgatggcagagattggtgaggatttggataaatctgatgtgtcctcattaattttcctcatgaaggattacatgggccgaggcaagataagcaaggagaagagtttcttggaccttgtggttgagttggagaaactaaatctggttgccccagatcaactggatttattagaaaaatgcctaaagaacatccacagaatagacctgaagacaaaaatccagaagtacaagcagtctgttcaaggagcagggacaagttacaggaatgttctccaagcagcaatccaaaagagtctcaaggatccttcaaataacttcaggatgataacaccctatgcccattgtcctgatctgaaaattcttggaaattggtcccatgtgatttacatggaactgcctctacttaatcattctgaatggataaatcgtttcattttctaatggggtataatgtggtttagccctttcttggtgctggatgtttagatgcttttccatcttttggtactactaataatgctataaataaatatcc

SEQ ID NO: 254928 - DNA, 1171 bp, Homo Sapiens
tcagaattcatgtctctgagactgaccagtgaagccagcagagaggcctgtgcagggcgtctggaagttttttacaatggagcttggggcactgttggcaagagtagcatgtctgaaaccactgtgggtgtggtgtgcaggcagctgggctgtgcagacaaagggaaaatcaaccctgcatctttagacaaggccatgtccattcccatgtgggtggacaatgttcagtgtccaaaaggacctgacacgctgtggcagtgccatcatctccatgggagaaagaaactggccagcccctcggaggagacctggatcacatgtgacaacaagataagacttcaggaaggacccacttcctgttctggacgtgtggagatctggcatggaggttcctgggggacagtgtgtgatgactcttgggacttggacgatgctcaggtggtgtgtcaacaacttggctgtggtccagctttgaaagcattcaaagaagcagagtttggtcaggggactggaccgatatggctcaatgaagtgaagtgcaaagggaatgagtcttccttgtgggattgtcctgccagacgctggggccatagtgagtgtgggcacaaggaagacgctgcagtgaattgcacagatatttcagtgcagaaaaccccacaaaaagccacaacaggtcgctcatcccgtcagtcatcctttattgcagtcgggatccttggggttgttctgttggccattttcgtcgcattattcttcttgactaaaaagcgaagacagagacagcggcttgcagtttcctcaagaggagagaacttagtccaccaaattcaataccgggagatgaattcttgcctgaatgcagatgatctggacctaatgaattcctcaggaggccattctgagccacactgaaaaggaaaatgggaatttataacccagtgagttcagcctttaagataccttgatgaagacctggactattgaatggagcagaaattcacctctctcactgactattacagttgcatttttatggagttcttcttctcctaggattcctaagactgctgctgaatttataaaaattaagtttgtgaatgtgactacttagtggtgtatatgagactttcaagggaattaaataaataaataagaatgttattgatttgaa

SEQ ID NO: 254929 - DNA, 532 bp, Homo Sapiens
  misc_feature (48)..(48): n is a, c, g, or t
  misc_feature (162)..(162): n is a, c, g, or t
  misc_feature (456)..(456): n is a, c, g, or t
  misc_feature (502)..(502): n is a, c, g, or t
acgatggagcctgcgttaataatgatgaaacctgtgagcagcgagctnaccggattagtttagggccaagatgcatcaaagctttcactgaatgttgtgtcgtcgcaagccagctccgtgctaatatctctcataaagacatgcaattgggaaggctacacnttgaagaccctgttaccagtaagcaagccagaaattcggagttattttccagaaagctggttgtgggaagttcatcttgttcccagaagaaaacagttgcagtttgccctacctgattctctaaccaccctgggaaattcaaggcgttggcatttcaaacactggtatatgtgttgctgatactgtcaaggcaaaggtgttcaaagatgtcttcctgggaaatgaatataccatattctgttgtacgaggagaacagatccaattggaaaggaactgtttacaactataggganttctggggatgcaggagtctcgccctgttcgcccaggctgggagtngcaatgggggaagatcttcggggttcactg

SEQ ID NO: 254930 - DNA, 912 bp, Homo Sapiens
aacctcgggttgcccaggtaggccgggcgtgccccacccctgaggcgggcggaacgacttcttcgcccgatgatgcgagcaaagccaaaggtcacacaagcttcaccttgaggaaatgggtctgctgatgccagcaacacgtttttctggtttcaagtcacagtggacaatgttcttgaagtgaaggtgtctcaaagccaccaggatctgggtgatgaggaacttggtgaggcgctcaggcagccggcccttctcactggacaggatcatctccaacatgtccccatgcagcttctccatcaccacaaacactttctcaggcgtctcgaacatgcactccaggttcacgatcccgggatgccgcaggctctgcagaatggccacttcattccggagctggctctcctgcttggtagggaagcgcagtttgtcaatgaccttaactgccacgtcccggcctgtcttccggtgttttcctccatagaccactccaaactgccctgagcccagcacttcgtcagggaagatctggtagacagtggcaatgtccacattctcttggatctgactgttggacacagagatgctcagagaagcttgtctgtggggcgcgtggcctggggcgctgggtgcgtcctgaaggatgacgggcatcagggcctggcggatggctgtctcccagccccgggcggcctcagccccctgcccacttggcccacccggagtcccgccaggcatctcgcccacgaagtaggtggcattggcagtgacgatctcaaagcagtgtgggttggtgcccggcggcacaaggctgaagttctgggcggactccaccgtgaggatttctgacagcggaatttccttatagtatctgttggtcgtgttgttccctcgtgccgaattcgccaccca

SEQ ID NO: 254931 - DNA, 386 bp, Homo Sapiens
gacgaggggattaatcaaaacctatgatgagggattctttcttatagagagatttcaaatttttttctgtcacatgcctatggacacggagtatttgtgactaccgcaatctaagctcaaagtgtaaggcgtccttgaactcctgaggggatacacagaccgggtgcgggtctagagaatgggtgggtttattccaggtcaagcttatcttgagggtgcattcctttatggtgcccactaaaagtgggggtaggttataaagggtctttgataaactgatactttggtggcctcttatattcgcgggtatgcttttgatttggtgatgccaccagtgtagcttatattcatagagcctttttcctggaatggcgtgacagttgggc

SEQ ID NO: 254932 - DNA, 847 bp, Homo Sapiens
aatgtactacagtagagtctatagtttacacttttaatcacagattggaattcattctccctactcccctacttcccacatgtggcagttattacttcaaaattaatgacattcactcatgttatactaccacagatccttaaatagagtacatactgcataattactaacagagccagtcttctctatttgttgtcacatatttcatataagcatttgacttaaagtacaaatagaaatactacatcccataattgtaaacattcaccaggagcttccatagtacagtaagtaacagaggtggcccaagagtcagtcaagtgttcttcactcactggatactgctgagattaggaaaactgttttgaaggcaaattatcctaagtcttacttgtatttctataaggatgcagttctggatatatactttcagttgaaaacacctgaaagtcattctatagtctacattaagcaccactttcacttacctgaaatattttgagttaaattcagcagtatgtacggttgttaatatcagaaattaagaataactgtgggtctcaagttcccttttgtggatacatacagagtactgagttcccactgatgctaataggaaccgctcatgcataccaagggtagtaactcccccagggccacatgcaacccccaagtctgaggcacaactattacttctgccagtggatgctatacaagcatatttaaggctgtatttggctataaagagttcaacctactctttaatattctttctatgtagatcacatacacaattcaaaattttataggacaggtgaaaagtctccaaacactttttaaatacccc

SEQ ID NO: 254933 - DNA, 994 bp, Homo Sapiens
  misc_feature (952)..(952): n is a, c, g, or t
  misc_feature (971)..(971): n is a, c, g, or t
gaacaaaatattgcccctcgcagcaggggaggttactgtataggcccatatccctttagggggggccttaatggaaaagctgtcttttcccacacggaatgccccttattaataaaaaaattcccctggcccatctaatgctgaagtcatccgcccaggatggtacgggaaattgagtggctaatgtggagaaaacgcaggcagaaaaacaggggagccaaaacgaaaggctctcttggtttgagcctgtccaagcagccacgactccttatcaggtgaacacagttcgtcagttggccacctatgaaaaaagaatgaaaccaactccgcggagagcgtggcacggctctgcgctcccctccctgcctacccagcgccttccacgcgggacactccccgccgcgctccgctccagacccgcgcggcctcgccggctcagcagcactcgcagccggcgatccgctggtgcagctccacgatccgcctgcccatccgcgccgcctccgcagccttcctctctgcttcggcgcacagccgagccacccgctcctcagcctccgcacgcgggcggggtgctggggcccgggcgccccgctcctctgcctccacctcactcttgatggcgtcgagcaggctctggatctccagcagcttcctgcgggcccgccagtgcgcccgggcgcgctcgcgctccagggaggccaggttctcgcggccggcgcggggcgcggggctcagcgggctgcccggctcctcgcggggctcccgcgcctcgtccgcgtccacgggccgcatcacgccgccgcctcttccagcccgcggggcacgccggggctgctcaccagcagcgagcgcggaagcctcgctgtcaccaacgaccagactagcaacaggttgccccaactttccgcagcgaggacgcctcgtgccgaattcgccacccaggcggcgnacgaggaggagagaggganatgagcgcgggcggccccccgcg

SEQ ID NO: 254934 - DNA, 981 bp, Homo Sapiens
gctgggtggcgaattcggcacgagggtcctcgctgcggaaagttggggcaacctgttgctagtctggtcgttggtgacagcgaggcttccgcgctccctgctggtgagcagccccggcgtgccccgcgggctggaagaggcggcggcgtgatgcggcccgtggacgcggacgaggcgcgggagccccgcgaggagccgggcagcccgctgagccccgcgccccgcgccggccgcgagaacctggcctccctggagcgcgagcgcgcccgggcgcactggcgggcccgcaggaagctgctggagatccagagcctgctcgacgccatcaagagtgaggtggaggcagaggagcggggcgcccgggccccagcaccccgcccgcgtgcggaggctgaggagcgggtggctcggctgtgcgccgaagcagagaggaaggctgcggaggcggcgcggatgggcaggcggatcgtggagctgcaccagcggatcgccggctgcgagtgctgctgagccggcgaggccgcgcgggtctggagcggagcgcggcggggagtgtcccgcgtggaaggcgctgggtggccaactgacgaactgtgttcacctgataaggagtcgtggctgcttggacaggctcaaaccaagagagcctttcgttttgtctccccctgtttttctgccctgcgttttctccacattagccactcaatttccagtacccatccctggcggggatgacttcagcattagatgggcaggtgtatttttttattaataggcgcatttcagtttggaaaagaccgcttttctttaatggtccccggtaaaggattttgccctatacagtaccgtacgctgctgtggggggcccttttttgttccccgcggacccttaattggaattttcaaaggcctggaaatattcctctgtgggggcttttgtcggtttgatctttcgccttcccgggaaatctggggagaacc

SEQ ID NO: 254935 - DNA, 1317 bp, Homo Sapiens
  misc_feature (841)..(887): n is a, c, g, or t
taggtagcgaggcctgggtggcgaattcggcacgaggccgaagcagagaggaaggctgcggaggcggcgcggatgggcaggcggatcgtggagctgcaccagcggatcgccggctgcgagtgctgctgagccggcgaggccgcgcgggtctggagcggagcgcggcggggagtgtcccgcgtggaaggcgctgggtaggcagggaggggagcgcagagccgtgccacgctctccgcggagttggtttcattcttttttcataggtggccaactgacgaactgtgttcacctgataaggagtcgtggctgcttggacaggctcaaaccaagagagcctttcgttttgtctcccctgtttttctgcctgcgttttctccacattagccactcaatttccagtaccatcctggcggatgacttcagcattagatggtcaggtgtatttttttattaataggcgcattcagtttggaaaagacagcttttcattaatgtcccacgtaaaggaatatggcctatacagtacgtacgctgctgcgtggtcatatttgttcctgtgatcttattgtattttcaaagtttggaagtatactcgtgtgctttgctgtttttttatgcttcctggaatttggggactcatgagagacttgaggttagagttctgcaagtgagaagacactacatggttgcagctgccacatgaagaacccaagctcctgtcaaagttgtgaatgcgactttggatgagattaagaaggcccagtggacggttggtcttgaagagtggcagtgtgtggatttgaggacctctgcagaccatcagatcaaaggagggagagcnnnnnnnnnnnnnnnnnnnnnnnnnnnnnnnnnnnnnnnnnnnnnnncttggaatgtaattttcctatggcatgttaactggtgcacatcgtgtaacctgtctggtgagcaacctacaattgggatgagttctaggtacatgtgtttgctgactttggggtaaacaactttgttataatacagtctctgccacagatgcatgtgacctcttcaggggcccagagtggctgaggaaggaaagcttcaagctggccatgggggtcccaaacagtcattccaggcttagatgatgactagcctaggtcatcagagcccagactccacagagactaaaatcagagctctgtcttgttatgataaatttcatttgcttggaaaaagaaatgctgaaagccagtgtttagaatctttgtgcagatgaccaaagcaattgacttggccaagaaaaggtaaggtaaataaacatttttcaaaatg

SEQ ID NO: 254936 - DNA, 362 bp, Homo Sapiens
tctattacgaactaggtgtccaaattatcgaagtgtgcctggcgctgaagcatcggaatggaggtgagggtggctaggtcctgtgaactggactctggacttctctgagagggagaaaaccgtgattatcgtttccatcctgcagtctacaggcctctaaggacttgagagacatcttagctgtttcatgcagttgaatccatggcaagtctccatggccaagggtaaatagaattacctgaacgattgtctctgttctccgatctttggccaggaaggtctagtccctagtcagtacaggagtgattttctcattagtaactatagtcctgcactgtctctccgacgtatgggatgccctg

SEQ ID NO: 254937 - DNA, 541 bp, Homo Sapiens
  misc_feature (231)..(239): n is a, c, g, or t
aagcacgttaaatggtgtgaattgaagttacagaaaaaaaacttaaaaccatttacaaatcatcatcaactataaatagacacggccttgatgtcaaaaggacatttatagtttttcaaagatgatactgcttttgtttttagattttcgtagctctctgttgacaggcctagcaaggtctcagaatccatttctcatattatggtcagttatttcataaggagagtgttnnnnnnnnnttaggaactagaatgttatttgctacttgtaggccactggaattgtaatgactgtcaacttatttaaagtgggtaatctccttttctgatttctgttccctgtctccaaacaggtctgataactttggaggaactacatcaacaggtgttgaagggaaggggcaagttcgcccaggatgtcagtcagtaggtcgtgtcttccaatccctctggaggacagaaagaggtcgttaaaattcagatggatctccctctttcctactcatcatgcataggcgagcaaaagaaatctgtatgtttgc

SEQ ID NO: 254938 - DNA, 833 bp, Homo Sapiens
  misc_feature (249)..(307): n is a, c, g, or t
ggtgaggggaacaaaaggaccgggccgggaaaattaaaaaaggaagagaggcaataaaatgcagagcggatgctgtcagaacgccgatgtaagagggacgcgcacggggggactagaaagggaatacggagggggaaaaaacgagggggaacacaaggagacgggggtggggagaaggcattacgccgcgcgcggagtgcacgcaatttttcggggaggtcccaatgggccgcgaagggaaccgtggtnnnnnnnnnnnnnnnnnnnnnnnnnnnnnnnnnnnnnnnnnnnnnnnnnnnnnnnnnnncgtccccggagggagaaatatggccccgttgacggggtaaaccaccggaaatgaaggggagatgcttcccagggggggtaagaaggcctacccattaccgaaggtttggagggcccaaggcacacttcaaataatctgggccacccagtttcataggaggaagtcccgagcgcccagcatctcagaccaaaagccttttccagaggccagcggatccaccccaatggttgcacacatgtccgggaactgcacacggaactcaggattcttccggatctcctgcttgtgcttgctggcaaattcctccaggttggtcttgaacatgtccaactgctttgacatctgggccagctggtcctcagccaagacagtccctcgctccttatacttggcctctgcaagtttcttcttggcaatggcgccagctcccaccccgcgccggtgcatccccaccctgggcccgcgggccgcccggctgccgggaccccgggtctccacgtcccggactccgccgccggctcccccc

SEQ ID NO: 254939 - DNA, 317 bp, Homo Sapiens
cagaaaaaccaaagtgaaatctatgtctggggaagctcaatattaaccacagtgagtaaaatgtatgcacagttctcagtcataaacagtgccaacagaccgctactcaatttctgaagaatagttttaaaaaatctgtttttcatcactctgctaatgtccaataaaaactaataatctgaactaaaaatgtcaaaccagaagaaaaaaggaaggtagagaaaaaattataaaggcctggctaggttataaacagagtaagataacgaagttttgacctggtcactagctgaaataatataagggctgagcatccc

SEQ ID NO: 254940 - DNA, 362 bp, Homo Sapiens
ggctgcccggtctaccccacacactgcctctgccccactgcccggcccaggctgctgagggccccctccttcccaccctgctgccaccttctccacctctccccacccacactagatgattctttcctctgctgtcatagagcctgcggctgagtgctctgatacagatcctggtgatttgtttatcatccgacttcttcccctcctatatcaaggagggaactttcctctctctgatgcctccgtctctaagcctggagcatccccagcacataactggcttacagatgttcgaaagagttgaatcatacctatttcctcttctttttcacattggggaggcctcgtctgttgcctgcagg

SEQ ID NO: 254941 - DNA, 847 bp, Homo Sapiens
  misc_feature (223)..(223): n is a, c, g, or t
  misc_feature (456)..(464): n is a, c, g, or t
  misc_feature (681)..(682): n is a, c, g, or t
  misc_feature (684)..(685): n is a, c, g, or t
  misc_feature (687)..(687): n is a, c, g, or t
aaaccccggaggtggtaattagaaatcctaaaggttgctattccaaaagttccacccttcagccctctgaggtgaatcaagattctccaggacaaggagttttttatttcacagcatctccacaaggccactgtgggtgatgtgcaccttctgtattaccaagaattttcttatggaaggagggttcctctgcagaacaactacagagtattttcacttaacnctccaacagttgtgataaatctggtcatatcctcagtctcccaaggggctcaggggcccacaaggcaggaacatcctttgggggtttgtgctgctgtcatacggttcctgtgttcagtccctagctaccatgtgtttcaggggcttaatacactccgatgctggtgtgtcctcttagttctaatccttgaaaaagagaaaaaccaggcagtgacacttagaagtaggctggtnnnnnnnnncacaatcacattttctcctttctgcaaagaaaggacaactcaaaacagccactccctttcttttctctaatgattcaaaataccagaacagggctcacttggctgttttgaattgggaaagaaagaggtgaaagcggggagaaagagaaaacacataacctctaggtaggtagtactgtttccaactgtctacgttccagtgcagaatctttgctanngnnanatttggcaatagtgtgcacaggaaaactgaatcaaacctggaacatcactgctttcttgaaatggaactgacaagcaattaactggagaataagtgaggggaatggagcagtagtattctttaacttaatttgccatttaagagagcacttggaatctga

SEQ ID NO: 254942 - DNA, 376 bp, Homo Sapiens
gagccacaggtgtatttgcctctataccgggaatcctggcagccacgaagaaagtcagatacatgggagaatgccatgctcttggttggtaatcctagactaacttcatgttaaatgatttctttggagatgagttcacccctgctatttctgagtgaatagttctctcaatgcaaaacattttattaaaattattaatgtcattctaattaagtacttaagatccaatctcctcaaacttaataaatggctctctgatatatgtacatggtaaatagtggcttctggccatcttcccaagtcaatatcatccactgtcatctgacctcacaagaaataaaaacaaggcaagctgctttattaaatctgcatgtac

SEQ ID NO: 254943 - DNA, 888 bp, Homo Sapiens
  misc_feature (675)..(675): n is a, c, g, or t
  misc_feature (679)..(679): n is a, c, g, or t
tcatggaacgccaagaggagtctctgtccgcgcggccggccctggagaccgaggggctgcgcttcctgcacaccacggtgggctccctgctggccacctatggctggtacatcgtcttcagctgcatccttctctacgtggtctttcagaagctttccgcccggctaagagccttgaggcagaggcagctggaccgagctgcggctgctgtggaacctgatgttgttgttaaacgacaagaagctttagcagctgctcgactgaaaatgcaagaagaactaaatgcgcaagttgaaaagcataaggaaaaactgaaacaacttgaagaagaaaaaaggagacagaagattgaaatgtgggacagcatgcaagaaggaaaaagttacaaaggaaatgcaaagaagccccaggaggaagacagtcctgggccttccacttcatctgtcctgaaacggaaatcggacagaaagcctttgcggggaggaggttataacccgttgtctggtgaaggaggcggagcttgctcctggagacctggacgcagaggccccgtcatctggcggatgaggctaagaatcttgttagtgtcacttttgacattagcaagatgaacccttaaccctcgattcaattgccttacgcacgcttttcacagtgactagccaaagggaaggntggngtttgatttctgtttcctaactacacctgcatatgtcaggggctccagtcagcaaaaaggtatagatgttgcccttctaggcattgaggtccattgggtcacatttctacttggaaaacagtgaattgcattcatttgattttcatggttaaattggctaattgggtaaggtaaaaggccctcctagaatgattagccaatccttggaa

SEQ ID NO: 254944 - DNA, 395 bp, Homo Sapiens
ggggacttcacctttgtctcctcagcagacgcggaagatctcagtggttcaatagcatccccagatgtcaaattaaatcttggtggagattttatcaaagaatctacagctactacatttctgagacaaagaggttatggctggcttctggaagttgaagatgatgatcctgaagataacaagccactcttggaagaattggacattgatctaaaggatatttactacgtgagagacaatcctgacttttggggtcctctggctggtggtcttttcttttccatgatatcattatatggacagtttagggtggtctcatggattataaccatttggatatttggttcactaacaattttcttactggccagagttcttggtggaggttgcattgg

SEQ ID NO: 254945 - DNA, 1417 bp, Homo Sapiens
  misc_feature (477)..(485): n is a, c, g, or t
  misc_feature (958)..(958): n is a, c, g, or t
  misc_feature (983)..(983): n is a, c, g, or t
tttacgggtatggagatcgtaccaggatttcaagcatgtgagatttaaacctatatgccgtgtgtaaaccaaggtaagttttaaaataaaagattaatggcccaattaaggtttgtgcatcagattaaaagatcctaatggttaatcagaaatatattttgtggagtaagaattatggtcacaaaatatataggtataaaatataataatatatctgcaggattctgtgatgctggagaaaacattttgaagaaaaaattgcacttgtgattatcaagatattggcagaagttacccttaagtgaaatataattaccaatccaggtgcttttggcacaagtttttaggtgaatatcgacacaatcttgaaaaccacaatgctttttgtattttattcactggaatatggagaatcaaacagaatgtaaaattctgacccaaaaatcccagataactgcaattgcttaattaaatacnnnnnnnnnttgttttaaaaagcgcttagacttccctttccatctggaacatgtaaaattttgcagcaacaggttttctccaattccttcagcaagaattcccagcctacacacaaatttaacaccatctttttctattcatgtataacttggatcacacaccagtatataacgacaaaaaataaatgtataataaaaagattggataaatcagaagaggctttttggtcttgaattcttcacccactaacaatgaagcagcactgtaggcagcccaaaacacaccaaacagttttataagtgtagacaccacttcaaatgatccaaccaccaaaagtacaggggctattacaatgagaggaagtaatgaatatcctataactccaaggacttggccatatgcaacttctccaccaagaactctggccagtaagaaaattgttagtgaaccaaatatccaaatgggtataatccatgagganacacaagatgtggctgggtaacctncaggatcatcatcttcaacttccagaagccagccataacctctttgtctcagaaatgtagtagctgtagattctttgataaaatctccaccaagatttaatttgacatctggggatgctattgaaccactgagatcttccgcgtctgctgaggagacaaaggtgaagtccccgttagtgggggcataggccgggggcgggcccggaggctgcatctcgcggcgactcccaaccggccgcggtagaagaggctgcggctgggcccagaccccgaggcggccgcggcggcgacccgcacgctcgccctacggtgcggcctacgagtctcgacgtgcaagctgcgagcgaggccagaaacgggcacagcgggccgctgagctgccccgagactaccccaccaaagtcttcttggtggcgaccacccaagcaccacga

SEQ ID NO: 254946 - DNA, 804 bp, Homo Sapiens
  misc_feature (726)..(726): n is a, c, g, or t
  misc_feature (747)..(747): n is a, c, g, or t
  misc_feature (768)..(768): n is a, c, g, or t
cagcaagacctgttataactcagtgaacattgcctttctaattgatggctccagcagtgttggagatagcaatttccgcctcatgcttgaatttgtttccaacatagccaagacttttgaaatctcggacattggtgccaagatagctgctgtacagtttacttatgatcagcgcacggagttcagtttcactgactatagcaccaaagagaatgtcctagctgtcatcagaaacatccgctatatgagtggtggaacagctactggtgatgccatttccttcactgttagtgtgtttggccctataagggagagccccaacaagaacttcctagtaattgtcacagatgggcagtcctatgatgatgtccggccctgcagctgctgcacatgatgcaggaatcactatcttctctgttggtgtggcttgggcacctctggatgacctgaaagatatggcttctaaaccgaagcagtctcatgctttcttcacaagagagttcacaggattagaatcaattgtttctgatgtcatcagaggcatttgtagagatttcttagaatcccagcaataatggtaacattttgacaactgaaagaataagtacaaggggatccagtgtgtaaattgtattctcataatactgaaatgctttacatactagaatcagatacaaaactattaagtatgtcaacagccatttaggcaaataagcactcctttanagccgctgcgttctggttacnatttacagtgtacattgttanaacactgctgggcttcataatcatggctcttagaac

SEQ ID NO: 254947 - DNA, 481 bp, Homo Sapiens
gctgaggccgatcatgacagggtagccaacccttgcaattctgacagcttcttctgcatccttgactactccatcaaagccagggattgtattaacctctgctttcttagctaataatttgctttcaatcttgtcgcccatggcttgaatagcatgtgtgtcagctgaaaggaatccataacctggatgtacagcttgggccctggcttaatggcttccatgatggcatccatgttgaggtagcttttactggtgggagctgggccaacacagacagcctcatccgccattttcacatgaacagaactagcatcaacatcactgtggatggcaactgtcttaatgcccatcttcttgcaagttctaataacccgacatgcaatttctcctctattagcaacaagaattttatcaaaagttttttcattaggatcatatcccactgaaccaagattacgggacaccattaagcactgtcttg

SEQ ID NO: 254948 - DNA, 487 bp, Homo Sapiens
ttctctggaacatttgctgaagcatctggcctcacggactctgaggaggaattgggaaattgggtctcttttgaagtgcagagggaactgagacgccagcttaaattgggctcttgcagagagttacagaaatagtttcgatgagctagtgacacatcctaaagatgcaaagatcctcctgtgcgcagtagccttgacaagggccacctcttcacaggatgcagtctgtctgtgcaccaaactcttcaccaaatagaacacttgtgtctctctgtggaatgggggttttcttgtgccttgcttgctttcatagccttccattttattgcatggctgccttgatgtaacataattctctgtccccaagatttagaaaattcctcttcgttcaccttggctcatggtcttccagggtttttatcctggctgtctatgaactagggttttctcctgccttaggaaaaatactgcatcttctggaatgatt

SEQ ID NO: 254949 - DNA, 1019 bp, Homo Sapiens
  misc_feature (34)..(34): n is a, c, g, or t
aaaatgcatcctgtgaaagaggtggccccttgtncaaagctaactgccgcccaggaggatctttgcatctttaaggatgtgtcactaagctccatcgaaactatttctgtaactctctgcaagagccaatttaagctggcgtctcagttccctctgcactcaaaagagaccaatttccaattcctcctcagagtccgtgagaccagatgctacagcaaatgttccagagaaatgaacctagaaaatgatcccggggtgctcttgcgggggaacacaggactcctcagctctatctctgtggctttaacatacatcagtttcagggtgagtgctaccattgccccccgagagtgtttctgatgggacatgctttcctgatagcacaggggatcttgggggacagaaggttcccagtaaggctagggggcacgtgacagattgagagtgtgatcatgtttccaggtgagaccctattgcatctggcagcccgaattgggcaacaattcctgcaaataagaagccactgctcttgttaggtaggtcatcgtcccataagccccactcggagcgctgtcataaaagaagtggcagattcctgtggcttggtctttctccagggtgtccatggcaccaattgacacctggtcctgcaagaacagctgactggccatctgcacgatctggtccacgtggatgatgcccccgatgctggtcatctccgtgtccgagagcagcgtcagcaccatgatggcttccaccagcagctgccggtactcgggctgcggcacgcggttcagcaccgattcgacatggacagcaaacttgatctcatgcggggtcatctctcgagtcgtcgaggatgggaggacataaccatcgatggagagaccgtggcacttctggaggatcttccacaccctcttggtagaatcccacgggactctgtttgatggcccaatccagcttcttctaggcgcaaatggacctggcgactcacccaaccgatgtgaatgtcctcc

SEQ ID NO: 254950 - DNA, 861 bp, Homo Sapiens
  misc_feature (821)..(821): n is a, c, g, or t
  misc_feature (825)..(825): n is a, c, g, or t
ccatggtatccctgtgacagtatttcccaaaagggaatataaggataaaccagaagccatgccgctccaaagtaatacattccaagaagggacagaagtcaaggtgtgaagcaaatgggtgctgttccccgatgaccccttctccctgtccccgcatccccgagctgagcttggctgaaagcctgtggacttcccaaacccacccacctctcttccatgaaggagcaccttatcctccccctttgtttatcagggacacatataaccaatcaatacctcagccacctcctcggaaaattaagcgacccaaacgaaaaatgtacagggaagaacccacttcaataatgaatgctattaaactacgacccaggcaagttctgtgtgataaatgtaaaaacagtgttgttgctgaaaaaaaggaaattagaaaaggtagtagtgcaactgactcttctaaatatgaagataaaaaacggagaaatgaaagtgtaactactgtgaacaaaaaactgaaaactgaccataaagtggatgggaaaaaccaaaatgaaagccagaaaagaaatgctgtggttaaggtttcaaatattgctcacagcagaggcagagtagtaaaagtttctgctcaggcaaatacatcaaaagctcagttaagtactaaaaaagttcttcagagtaagaacatggatcatgcgaaaagctcggaagggtaaaaaatgccaaaaaaaaggcacaaaagaagcaaaaatgaacctctacttccaaaaatgcacattcagtccatttcacacgtcgatatcagaatcctaagctaagttccntttncacacccggttcgcttccacaagaggtacaggttgg

SEQ ID NO: 254951 - DNA, 1387 bp, Homo Sapiens
tggtacggtccggaattacgggatatcgtcgacccacgcgtcgcagtctttaagagccaagtgggggccccttttccgaagccacttccaggccaaggcagtcgccaggcttcttgtccccaccttctgaaccttcttcaaacagtagtacaagctcccctcagccagcctgcctgcccagcgaggcccccaggttcaaggtgttggcgggggcggagggcaggggaacgggatccttctcccgctgcccaccaacaccaacacacacacacctctaagctgctggccgaagatgtcaccaaggccaaagacacagtattatgaaggtttggaaacccctctcctcacctcccaccgtgaccttgggcaaaccctggctcggagcccaggcagaggcagctcagagtggaggctctaggcaggtttgacaaaggtcagtaatacggtttcccctggggttgaccagatgttccaaaatatctgcatccacctggagatgcagctaagtgggtccttatgtacacaccacgttcacacacacacagagggaccacgtgtgcacgcatgaccgtgtgggtggcggcgtttgctgtgaaccacgctcaggccacacagagacacatacttggtttctcgggactgagacccaggcctggcaggaccgtgcctacagatactgcaaacgttcctacagcctagaggtgcgtatacacacccaagtacacgcagccaggcattcaggggtgtgtttgccacatggagcatcccttcctggtcttgccaggcacctgcacagagcgtctccagccccatctcctaacgggggctgggggtaagagaaatctaactgcgctcccccaacccctcgccctgccatcttccccttcaagcctgctaagttatcccagggcctgtgcgtggtgggaaaaagccagccttggcccttgcagcctccacctcggccgctgggggaccaacaggttgcttacagctttgcaccccggcatcagcacaggggtccctgccccaccctacggcagctcaggcagtgttttcctgtgaggactcccccatcagtggaccagagggagaagcccgatgccccatccccgggctttacccgtaacgcacaggacacgtgtgcaattcataggaacggaccaaatcgccctcatgagtgccacctggtacaggtaaggtggcgctcacgtctctgtcctgcagcccatcgtggagccacagatagttctcccggtctcactcccagttcatgttgactttcggtagctctcgcatgcagttctattatacagccgtctacaagcgatgctttagtggcctaacctcatgtgatatacagctatttctagcagtcaggcagctctgc

SEQ ID NO: 254952 - DNA, 1609 bp, Homo Sapiens
  misc_feature (1043)..(1118): n is a, c, g, or t
agaactgggataaagattattctgttcaacaatcttggacaactctttttattatctttctacagtaaacaaagtataatcccaaagttctgcagatatttaattgggaaaagacacaaccctacagtcagttgggaaagactacctttagaagagaaaaatgaattgtttgggaagaaatacattaacagaactgtatttctaacgcatttactttttaagccatcaaatgttctcatttgagccacgtgttctgtgcacattcagagaaccttttgaaaatgaattaagtctttgccttctttagtctgttgataaactcttgagaatgctgaggaaatctccagaaaacccagtatgttttctcttggggaacgaattgcagagcctcttgccaattaccattgtttttcagacataacaaaatacgtatcatttgatctaaggtgagatttttgttaccaatttcccattgtaaatatttatctaatggaaggcattcagttgccaggttcagccgttttgccttggctagggatgtgcctggctgcatactcttatcaacaaaagacccaattacataaactttgtcatgcctgaaagtagtcataacattgggagaatctgcagttaaatagataatactgtcctttggaaataaatctacatgagacttttctgttgatgttaaaagcaatttgtcccatttttcttgataccgtttaactaactctctgtgcaaagcaccatctatttttagattgcagaaataaatatggaaaggatcaacatttcttctgttccatccttcactttctaaaagctgggaaacagtattctgcaattcttttcgtttcatataattttcgtaagccatgtcaaaaaccaaaggttgtccaaactgcatggcctgggcacccttccagcccattgctatgtccatattcctatcccaaagtcgtaaaaatagaaagtttttctgtttatcttcctcagtggtttctagcagcttgatattttttgcttcttcccttgctgctgcnnnnnnnnnnnnnnnnnnnnnnnnnnnnnnnnnnnnnnnnnnnnnnnnnnnnnnnnnnnnnnnnnnnnnnnnnnnngctgtgttagaaacacattccataagggttttgagctcttcttcagtgatgtgttctggtacttctctgccaagcaatctccacatctcaatgaactctctggtggcagctagaggatcttcatccttactgcttgagattgttgaaacacattcttcttgcacactagatttcatggtagttttccacttatccaactctagctcttcagaagggggtgtactctcatttttaggataagtaacagctggtattttggaagacatgtatctctgcaaaattgttaagttatttctcttcctatgaagggtaaatggcaccaaaaacctggtgaaaggtctgaagaaattgacactaacactcattttgaggaaagcagccatgtaacaaaaccccaggagtgcagagatagtggttcccgctggcgcaaagaacagggaccctggaggacgaaggactccgacgtacggacgcccagggatccgcgccga

SEQ ID NO: 254953 - DNA, 1430 bp, Homo Sapiens
  misc_feature (884)..(1010): n is a, c, g, or t
  misc_feature (1035)..(1035): n is a, c, g, or t
  misc_feature (1039)..(1041): n is a, c, g, or t
  misc_feature (1173)..(1181): n is a, c, g, or t
  misc_feature (1193)..(1201): n is a, c, g, or t
  misc_feature (1340)..(1349): n is a, c, g, or t
acaccctccgcctggacgcagcagccaccgccgcgtccctctctccacgaggctgccggcttaggacccccagctccgacatgtcgccctctggtcgcctgtgtcttctcaccatcgttggcctgattctccccaccagaggacagacgttgaaagataccacgtccagttcttcagcagactcaactatcatggacattcaggtcccgacacgagccccagatgcagtctacacagaactccagcccacctctccaaccccaacctggcctgctgatgaaacaccacaaccccagacccagacccagcaactggaaggaacggatgggcctctagtgacagatccagagacacacaagagcaccaaagcagctcatcccactgatgacaccacgacgctctctgagagaccatccccaagcacagacgtccagacagacccccagaccctcaagccatctggttttcatgaggatgaccccttcttctatgatgaacacaccctccggaaacgggggctgttggtcgcagctgtgctgttcatcacaggcatcatcatcctcaccagtggcaagtgcaggcagctgtcccggttatgccggaatcattgcaggtgagtccatcagaaacaggagctgacaacctgctgggcacccgaagaccaagccccctgccagctcaccgtgcccagcctcctgcatcccctcgaagagcctggccagagagggaagacacagatgatgaagctggagccagggctgccggtccgagtctcctacctcccccaaccctgcccgcccctgaaggctacctggcgccttgggggctgtccctcaagttatctcctctgctaagacaaaaagtaaagcactgtggtctttgcnnnnnnnnnnnnnnnnnnnnnnnnnnnnnnnnnnnnnnnnnnnnnnnnnnnnnnnnnnnnnnnnnnnnnnnnnnnnnnnnnnnnnnnnnnnnnnnnnnnnnnnnnnnnnnnnnnnnnnnnnnnnnnngaataaatgagaattttattaatantttnnncccgtggggggcgccgccctgcccccaaaaaattttcaaaaaccatctttgtttggcgcccggggcgccggagatctcccccacagaaaaaatgccttgtatccaagagaatgccgtgggccagaaacaaannnnnnnnnatttcccacccnnnnnnnnngccgtccccccgggaaacaaacaacggggttgcaaacaaaaactcccaaaagggggcctccccgaagcgaacaacctctgggggcccgaacaaaaggggggacctccacgaaaaaacctcttaagtgaaagcatttggnnnnnnnnnntccgggcccgcatatttacaaaaacgcggggagactactattcccggaaatatttttcccgccggacaacggaaagcccct

SEQ ID NO: 254954 - DNA, 992 bp, Homo Sapiens
gatttcacggaaatgaaagtggaagcaaacagcctgcgagcagagcctcctgaggtgtatttcgggtcttgctggggctgagagagaccacagccctttggggggtacaaacaagagttcagttgctgtgaattctgccactgtgcccagctctgaagcctcagctcttgccaaacagacccgagacccatgtcagccccactggatgccgccctccacgcccttcaggaggagcaggccagactcaagatgaggctgtgggacctgcagcagctgagaaaggagctcggggactcccccaaagacaaggtcccattttcagtgcccaagatccccctggtattccgaggacacacccagcaggacccggaagtgcctaagtctttagtttccaatttgcggatccactgccctctgcttgcgggctctgctctgatcacctttgatgaccccaaagtggctgagcaggtgctgcaacaaaaggagcacacgatcaacatggaggagtgccggctgcgggtgcaggtccagcccttggagctgcccatggtcaccaccatccaggtgatggtgtccagccagttgagtggccggagggtgttggtcactggatttcctgccagcctcaggctgagtgaggaggagctgctggacaagctagagatcttctttggcaagactaggaacggaggtggcgatgtggacgttcgggagctactgccagggagtgtcatgctggggtttgctagggatggagtggctcagcgtctgtgccaaatcggccagttcacagtgccactgggtgggcagcaagtccctctgagagtctctccgtatgtgaatggggagatccagaaggctgagatcaggtcgcagccagttccccgctcggtactggtgctcaacattcctgatatcttggatggcccggagctgcatgacgtcctggagatccacttccagaagcccacccgcggggggcggggaaggaa

SEQ ID NO: 254955 - DNA, 685 bp, Homo Sapiens
ataccaggagctggaacgacgatgcggcgcctgatcccgcccttccgcgaggcttcggccaagctaaccacgctggtggatgccgacgccgaggccttcaccgcctacctggaagcaatgaggctccccaagaacacacctgaggaaaaggacaggcgcacggcggccctacaggagggtctgaggcgggcagtctctgtgccgctgacgctggcggagacggtggcctcgctgtggccggccctgcaggaactggcccggtgtgggaacctggcctgccggtcagacctccaggtggcggccaaagccctggagatgggcgtgtttggcgcatatttcaacgtgctcatcaacctgagggacatcacagacgaggcatttaaggaccagatccaccatcgtgtttccagcctcctgcaggaagccaagacccaggctgcactggtgctggactgcttggagacccggcaggagtgacggtgcgggaggcctctccgggctctgtggcccctccctcgcccatccccagagggcagagctgtgacctcggtggggacacagcttgttcatgtggggcccggaggataggtgggcaggcagcggggcatcgcctgggaatggaggcgctggcagggacagaaggcccctagtcccatgtgacctccagtaaagttttggcaccgaa

SEQ ID NO: 254956 - DNA, 1791 bp, Homo Sapiens
  misc_feature (1281)..(1281): n is a, c, g, or t
  misc_feature (1516)..(1516): n is a, c, g, or t
atggagcatctggatcaaggtgctggccatgtcccagctggtggaatgcgtccccaacttttcggaggggaagaaccaggaggtgatcgacgccatctctggagccatcacacagaccccgggctgcgtgctgctggatgtggacgcatgcccttccaccaaccgcaccgtgtacaccttcgtggggccgccggagtgcgtggtggagggggccctcaacgctgcccgggtagcttcccgacttatcgacatgagcaggcaccaaggagagcacccccgcatgggggccctagacgtctgccccttcatccccgtgaggggcgtcagcgtggatgagtgtgtgctctgcgcccaggcctttggccagaggctggcagaggagctggacgtgccagtttacctgtacggcgaggcagccaggatggacagtcgccggaccctgccggccatccgggccggggagtacgaggccctccctaagaagctccagcaggccgactgggcgcccgactttggtcccagctcctttgtccccagttggggggccacggccacgggggcgaggaagttcctcattgcttttaacatcaacctgctcggcacaaaggagcaagcccaccgcatcgcgctcaacctgcgggagcagggccgcgggaaggaccagccaggacgtctgaagaaagttcagggcattggctggtacctggatgagaagaacctggctcaggtgtccaccaatcttctggactttgaggtcacggcactgcacacggtctacgaggagacctgccgagaagcacaggagctgagcctcccagtggtgggctcacagctggtgggcctggtgcccctgaaggctctgctggatgcggccgccttctactgcgagaaggagaacctcttcatcctggaggaggagcagcggatcaggctggtggtgagccggctgggcctggactccctgtgccccttcagccctaaggagcggatcatcgagtacctggtccctgagcgcgggcctgagcgaggcctgggcagcaagtccctgcgcgccttcgtgggggaggtgggtgcccgctctgcggcccccgggggcggctcggtggccgcggccgctgcggccatgggtgcggcgctgggctccatggtgggcctcatgacctacgggcggcgccaattccagtccctggacacgacgatgcggcgcctgatcccgcccttccgcgaggcttcggccaagctaaccacgctggtggatgccgacgccgaggccttcaccgnctacctggaagcaatgaggctccccaagaacacacctgaggtgccgctgacgctggcggagacggtggcctcgctgtggccggccctgcaggaactggccccgtgtggaaacctggcctgccggtcagacctccaggtggcggccaaagccctggagatgggtgtgtttggcgcatatttcaacgtgcttcatcaacctgagggacatcacagacgaggcatttaaggaccagcnctcctgcaggaagccaagacccaggctgcactggtgctggactgctgggagacccggcaggagtgacggtgcgggagcctctccggctctgtggcccctccctcgcccatccccagagggcagagctgtgacctcggtggggacacagcttgttcatgtggggccggagggtaggtgggcaggcagcgggcatcgcctgggaatggaggcgctggcagggacagaaggcccctagtcccatgtgacctccagtaaagttttggcaccaaaaaaaa

SEQ ID NO: 254957 - DNA, 422 bp, Homo Sapiens
  misc_feature (335)..(335): n is a, c, g, or t
atgcggcgcctgatcccgcccttccgcgagcttcggcaagctaaccacgctggtggatgccgacgccgaggccttcaccgcctacctggaagcaatgaggctccccaagaacacacctgaggaaaaggacaggcgcacggcggccctacaggagggtctgaggcgggcagtctctgtgccgctgacgctggcggagacggtggcctcgctgtggccggccctgcaggaactggcccggtgtgggaacctggcctgccggtcagacctccaggtggcggccaaagccctggagatgggtgtgtttggcgcatatttcaacgtgctcatcaacctgnagggaacatcacagacgaggcattttaaggaaccagcctcctgcaggaagccaagacccaggctgcacttggtgcttggacttcttt

SEQ ID NO: 254958 - DNA, 521 bp, Homo Sapiens
  misc_feature (262)..(262): n is a, c, g, or t
agtcttgaccgcagcccagttcccacaccggccagttcctcaggccgcccacagcgagcccaccgtctccgccagcgtcagcggcacagagactgcccgcctcagaccctcctgtaagggccccgtgcgcctgtccttttcctcagggtgtgttcttgggaaccctcattccttcctgcccataaagagacagaaccactgggccgaggaaccgtaggggaagcagcccatgccctctgagctcccaacaaggggctgtaancaaggagcatgtccccaggcagggacccagttctctgggaaccaagcttctgttgggcccagtggtttatagcccttggcatcaggcttggtggaggagcagggtagggggggtcggggcacacagcagatggtcagagacccggggatgtgagaagcaggtagttccctcagggcccttattctcagctaaagagcctgaggcccaggaggtcccctgagccctcagaacctgtaggcaggagtggctctgggcctgt

SEQ ID NO: 254959 - DNA, 313 bp, Homo Sapiens
  misc_feature (199)..(199): n is a, c, g, or t
  misc_feature (219)..(219): n is a, c, g, or t
  misc_feature (259)..(259): n is a, c, g, or t
gacatcacagacgaggcatttaaggaccagatccaccatcgtgtttcccagcctcctgcaggaaaccaaaaccccaggctgcactggtgctggactgcttggagacccggcaggagtgacgaaaccccagggacagcaggaccttcgacgctggaaggatagcctcgcttcccaggtgcagctcccggcaggtctgganagttccacagagcacggtantggccctgtcctcagttcccgtccacccttcaaccagtgnctcctgggagacttttcctccctgcctcagctccctgcccagccagcctcctgt

SEQ ID NO: 254960 - DNA, 717 bp, Homo Sapiens
ctctgtgatacccaataactccttcacctaagccctgttgttgattttgaagtgcttcctaggccagtgattttagcttctgccagctgcttttgccagtagattaacgtgtttttatttttcaaactccgtgtttcctaacgtggagtgtatgggtctaagagagcctgctgtcctccctgccttccaccttggagaggaggctggacgcatcagcagtggccagggcaggtcgcaaaatctcccagcctagagaccacacctgaaacggctgaagccagcttgcacaagggctgctgtccctctgcggcaggcagagctggtggggggcaggggtcacagagcagtcatagacaccatggaccagggcaggagaagggccagatggccacatgggccacaacagggcccttgtcccttagagcactggggggtccatggcctgggaggggcatggcaggggctggcatcccctgtagagcccagaggggccacccagggcagtgacattcccagatatgttgggctcacctcatccttgctgtgagactggagttccatggggacatgaagtcagtacaccgcagagctgctcagctgctctacctctcgctgacttttttgttgcacatatacattttctttcaattagcatttatttcagcttttatttaagctttttgacagtacatgtaaaatatatgattataaccattt

SEQ ID NO: 254961 - DNA, 634 bp, Homo Sapiens
gggctgcaggattcggcacgagaaaagataggaatgctcagccaagtcccagctccttctaagcctgggctcaagtgtcctggctcttcctgccttgaacttgattctcctaagctgatatttggaactttttagtccagaaactatagaccagggttttgcaacactgctaccataaatccttcctggattttatctgccagtagccacagataccactgctagctgttacatagaggatgtgtgtttaaacctccttctcaaggtaaaattctaaaaatcttttcagatgctgaagaaggaagaagcaattccatggcctggaactttagcaattgttcattcctatattgcctacaaagcagcaaaagaagaagagaaacagaagttacttaaatggagttcagatttcaagaacgagaacaactagagcgcagtcgatacataggtgcagagacctaggcctttccaatatacgtaacagtacgtgtgggccccaagctgtatcgggtccttctgttgattaacgtgattaactagggctgcagtttgccatccagttagagttcagacctcaggtacaggcggccagttggtaggtggtgccttacccaagctatgtctcctcttggct

SEQ ID NO: 254962 - DNA, 985 bp, Homo Sapiens
tgagactgcatagggctcggcgtggaggtggcggcattggcagggggggtgcagtccgggccattggagatggccccacagtggcctcagagtctacaggtttggagaggtcgatgccgtggatgaggcgaatcagctgttttaccttctccagggagctgtgcatctccttctgccgggccaggatggtgttcttcatttccatgcatttacttatggaattgctgagctgtttcaccttttgctctagttgttctcgttcttgttttaaatctgaactccatttaagtaacttctgtttctcttcttcttttgctgctttgtaggcaatataggaatgaacaattgctaaagttccaggccatggaattgcttcttccttcttcagcatctggtcctgacatctggggacagatccacatgcccttgggaattgttttcagaggggggtctaagcagtccaaatgatatacacgggaacatgtgtcgcacatcagtaactggccactttttctgcaaacgctgcaaaaatcctcatgaatatcaccctctcttccgggtcccagggtgcattgtgctgtttaggtatgtcactgcactcttcttacgctctggctcaaagactgctccactgtagaccggatttgctgttgttcttctttttcgctcttgccgtcttgctttggatttcttctagatggtcatgtgttaccaaccctagagacaccatgaaggcaagtttctgagggttctcctcccgttttggtttgggtgcagcaggtggggtgatggtgcggctctctgtttgtttctcatctgtttctgtgtgagatttaactgtctgtttttcaagacttggcttgctaagctgtacagtttgaggtccagcgagtctggtccctggagtagctatcacaatgctggtgagctgggccatggggaacgttttggctatggttgcagtctgcccattgacgacacggac

SEQ ID NO: 254963 - DNA, 393 bp, Homo Sapiens
  misc_feature (51)..(64): n is a, c, g, or t
gatcataccacttcattccggcctgggtggacagagcaggactctgtctcnnnnnnnnnnnnnnggaaaactctgtgatggacatttgtttagtaaatcccttcagtatttatccctcctttccccacagcagctttctttcctgtcaactagaaaggagcaggatgtaataaatacattttggtgtgactaggccacaccaactcttaatcatctcccattttccttagacatttaaatttcaaggcaggtaccctctgtgtactcagaaatttgaagaagttatttggtttttccaaaatgcacactgcgggttattgatttgttctttacaactattgttctcatatttctcacactaaataaatctctatgagagcttcttgacttggc

SEQ ID NO: 254964 - DNA, 459 bp, Homo Sapiens
attccttggctcacagcaccttcctctatcttcagtgctagtgtgtagcatcttctctctgactccgcttccccctgctgctgtcacgtggccttctgctcttctgtctggaatctccctctgcctctctcttagaatgacactgaggatggcgtttagggcccacccagatcatccagaatgatctccccacctcaagatccttaacttcatcacatctgcagtataagataacatctttttttggcatataagatagcattcacaggttccaggggctaggacctgggtatcttttggaggaccacgatgctgcccatcacagggattatgtgttttctttgtagcctcacaagctagtacagcacctgtgactgggtaagccagtgacatagcgaatgaatcaataaatagtgttgtattagtctgttctcatgctgctaataaagatatacccca

SEQ ID NO: 254965 - DNA, 377 bp, Homo Sapiens
ccaggctctggaaacttctgcctgtatgattaagttcctcattgttaaattcgaaaatacattcggtatttatttgacctcttggtggtaatatagcgtaagagcacagactctggagccaaactgcctaggttcaaatcttagctctattactttctaactctgtgactttgggcaaatgacttaactctctcatgcctcaaagcagaatcctttgtaaggtttatttatatagtggtgtaaagagtacttacttcaaaagctttggtcagtgtgagaaataagctcctaatgaaaatcacttgaaatctgcctaagtttcattctgcctttgatggctccttacatctccctacttcaggcttcctccctaatat

SEQ ID NO: 254966 - DNA, 376 bp, Homo Sapiens
cctgataaagagtggttatatacgtaaatgtccttggtaggaaacatttctgaagtattcaggggataaagacagtggggtgggggaaagaggaggagagagagaaagacacgaaaaagtaagtgtgggaacagttaacatttgaggaatgtgggtgaagggcaggtgggtattcttattcttaaaacttcctgaaattatgtcgaaataagtcaaaaggaaaatgtaaattctaagatctcttgggatagttatggtttcatccatatatagcattattataaaacagatctgagaattataaacaccaaattagattagattgttgttacctctggtgagcgaggggaatgaggttggggaaggaagtttcaac

SEQ ID NO: 254967 - DNA, 626 bp, Homo Sapiens
  misc_feature (50)..(50): n is a, c, g, or t
  misc_feature (55)..(55): n is a, c, g, or t
ccacagcgaacaagtagcctcaaggtcggcaagaagcacgcaaatgcagnacagntgtgtgattatatcaagtgtatgcatgatcttggctttgttaaaagaaacgattcgcagcagtcgcaaacagtcaggttgccctgcaaatgtgagtacatgccacagtcgtagtagaaatccttggtaacacgtcgcttcagtaacttccagtcttctttaaactttgggttgaagaaaacatacaggactggattcaggcaagcaggcaatggaaaaaatatcagagtaacagacttcattatttcggggctgatagagattgcagtgatcaatggtgcaaatgaaaaaaacgccacagggcagaaaaagatgcaattggtgaagattagccaagcgacatgcttaatcatgctagattgtgagttttctgagaggtcctctttttccaagttgcagtatagcttagtgtagataacggccattaataaaaatgctagtgagtttaatagcactaacgttacagtgaatcctaatgatggcgtttcacctgtaggaaatggcaaacaaaggggtgatgcagaatattcccctctatggaaaaggggaaaacagcctgctactgtagcacc

SEQ ID NO: 254968 - DNA, 394 bp, Homo Sapiens
tgtagaccccgggctgcacgagtatcgcacgagatcacacttgtgccaacttgattcatattgggcattactaacaacccctgggcaaggtaaataggttgaacaatcaataacattatccctgcctgcatacatgtgaacaaaagctatagaggacatgcaaattctacagtcattcctcatatgctttagacagagtgcagctactggaatcttccagatttcagtgttttaaaatcagagctctgaatacacgtgacaggagcacagagctctaatgtccacaggatgttgtagggtagggtctctcagtaaatcaagtcccttacctatgttctgacactgaggctcttggagctatgggttagaaatccaggaggcaatgtctttattt

SEQ ID NO: 254969 - DNA, 829 bp, Homo Sapiens
  misc_feature (11)..(11): n is a, c, g, or t
  misc_feature (533)..(533): n is a, c, g, or t
ttggccctcgnggcccagttttcggcacgagagtaatgaagcacatgtgaataaccccttccatcccattcacagcatcgcactcccagtccttaaggcaaagggaggcagtgctgaagcattggtggtgcagtgtaaagagacaagacctgatcatctgatcacacttgtgccaacttgattcatattgggcattactaacaacccctggtcaaggtaaataggttgaacaatcaataacattatccctgcctgcatacatgtgaacaaaagctatagaggacatgcaaattctacagtcattcctcatatgctttagacagagtgcagctactggaatcttccagatttcagtgttttaaaatcagagctctgaatacacaaaaggaaagagaaatggagcagctgacatattttaagctcacagtgatactcagtgacagggagcacagagctctaatgtccacaggatgttgtagggtagggtctctcagtaaatcaagtcccttacctatgtcctgacactgaggcgncttggagctatgggttagaaatcccaggaggcaatatgtctttattctaatgaagtcctcatcttgcactcagaggcccactagtttgcccttctatatattaagtaaaacccagagaaattaagaggatgatggcttctttctgtcacatgggtgctaaaccttttacaaacacttgatacttctatagagggaccaaggacctcaagtcctgggcagtctccttactgtgctactcactactgtctcaacactgtagtgagtctgtctttaacacatttccttccaataaagat

SEQ ID NO: 254970 - DNA, 578 bp, Homo Sapiens
  misc_feature (341)..(341): n is a, c, g, or t
  misc_feature (353)..(353): n is a, c, g, or t
  misc_feature (448)..(448): n is a, c, g, or t
  misc_feature (482)..(482): n is a, c, g, or t
  misc_feature (504)..(504): n is a, c, g, or t
  misc_feature (527)..(527): n is a, c, g, or t
  misc_feature (551)..(551): n is a, c, g, or t
cattgcctgcttgcctgaatccagtcctgtatgttttcttcaacccaaagtttaaagaagactggaagttactgaagcgacgtgttaccaagaaaagtggatcagtttcagtttccatcagtagccaaggtggttgtctggaacaggatttctactacgactgtggcatgtactcacatttgcagggcaacctgactgtttggcgactgctgcgaatccgtttcctttaacaaagccagtatcatgcaaacacttgataaaatcacacagctgtcctgcattggcagtggcttcttgccaaagacctgagggctactggtccgactgtggcacacagtgcncccacctctganttatgcagatgaagaaagattcctttgtctcagacagttctgaccagggtgcaggcctgtggacgaagcctgcttctaccagaagtagaggaatncccttgggtgcgctatgcttacaatttaccaagngttaaagactgaactactgtgngtttaaccgttttccccgtcaancaaaattcagtgttttattagagntaaccctattcttcatcttttcatctt

SEQ ID NO: 254971 - DNA, 1828 bp, Homo Sapiens
  misc_feature (186)..(186): n is a, c, g, or t
  misc_feature (412)..(412): n is a, c, g, or t
  misc_feature (489)..(489): n is a, c, g, or t
  misc_feature (522)..(522): n is a, c, g, or t
  misc_feature (583)..(583): n is a, c, g, or t
  misc_feature (600)..(600): n is a, c, g, or t
  misc_feature (611)..(611): n is a, c, g, or t
  misc_feature (626)..(626): n is a, c, g, or t
  misc_feature (629)..(629): n is a, c, g, or t
  misc_feature (634)..(634): n is a, c, g, or t
  misc_feature (640)..(640): n is a, c, g, or t
  misc_feature (643)..(643): n is a, c, g, or t
  misc_feature (652)..(652): n is a, c, g, or t
  misc_feature (656)..(657): n is a, c, g, or t
  misc_feature (670)..(670): n is a, c, g, or t
  misc_feature (686)..(686): n is a, c, g, or t
gcagaaagagccgtaagttctctcgcctctcctgtctccgccgtcgccgccacccacccaaagttggtgatgacagtgacctgagtgaaggctttgaatcggactcaagccatgactcagcccgggccagtgagggctcagacagtggctctgacaagagtcttgaaggtgggggaacggcctttnatgctgaaacagactcggaaatgaatagccaggagtcccgatcagacttggaagatatggaggaagaggaggggacacggtcaccaaccctggagccccctcggggcagatcagaggctcccgattccctcaatggcccactgggcccagtgaggctagcattgccagcaatctacaagccatgtccacccagattgttccagactaagcgctgcttccgactggnccccacctttagcaacctgctcctccagcccaccaccaaccctcatacctcggccagccacaggccttgcgtcaatngggatgtagacaagccttcagagccagcctctnaggagggctctgagtcggaggggagtgagtccagtggacgctcctgtcggaatgagcgcanattccaggagaagcttnaggtccttatngccgaagtctgcttnctnctgtnaaagtnttnctttacttncttnngaccaaccccganctcatcatcgtgtgtncgcagagctctcaaagtctgtggaaccgcctgtctgtgttgctgaatctgttgcctgctgctggtgaactccaggagtctggcctggccttgtgtcctgaggtccaagatcttcttgaaggttgtgaactgcctgacctcccctctagccttctgctcccagaggacatggctcttcgtaacctgcccccgctccgagctgcccacagacgctttaactttgacacggatcggcccctgctcagcaccttagaggagtcagtggtgcgcatctgctgcatccgcagctttggtcatttcatcgcccgcctgcaaggcagcatcctgcagttcaacccagaggttggcatcttcgtcagcattgcccagtctgagcaggagagcctgctgcagcaggcccaggcacagttccgaatggcacaggaggaagctcgtcggaacaggctcatgagagacatggctcagctacgacttcagctcgaagtgtctcagctggagggcagcctgcagcagcccaaggcccagtcagccatgtctccctacctcgtccctcagctcccctgctgtctccaggggcaggtggtaggcatgggtacctgcatttcactggaatgggttcttggatctctgaggggaaagaacagcaaaagaggccccttcttcctcacccaagatgcagggtggtttggggccaggagttttggaccctctaggtcttgggggaagagctgggtaatacctggtgtctgagtgattctctgcagacccttcccctcctcaaggatcacccatcctcctttcagccccctttatggggaccaggcagctctggagccagccacaggggctgttagagaagcaaggcctggagtggcctgcaccgagtagcagggtcagggttcgtgtgctcctcctcctgctgcaggggctgcacatcccattgccccacttctgctttgtgtctccctctgtctagcttccagggcagggagcaggccccacctagggctgcaggcagtctggcctgtgccagcacggtctcctgtgcccaccagccccacaggtgctgtgctttgtgctcttggctgctgtgctgggacagaatgggatgccaggaagagaagaaagggggtgcagttctga

SEQ ID NO: 254972 - DNA, 669 bp, Homo Sapiens
tccaagcactttcctcgctttcctaacgtcttggcaacaaagggaccccaccctcccagccggctcctgggccctccctgcagcttctgagcagctaggcctccctcctgtgtgcgtgcatgagtctgcgtgtggtggggtgactacaggtgctggtcctggctgccagggagggcaggagagatctggagtcagccccactgcagggcctgggggtcagtatcaaccaatttccttccactgcttgtagaagtccagaacattcttgatgtccacactggcgtgggcagcggcctgcagggctgcctgcatggggcctgaaagcacgctggggttgtccagtggaaggcctgtgatgatggtcaccatgccactcggatcctcctcacctgccccctgggccagagtcagctgtttgcagctgtctaggatcttatagagagtccaggcatctgcatcctgcctcttcagcttatgccgctcaaagctctttcccacctctttctggcagcgaatgtacctgtttccttttttaaactctgcctccaggtaccgaatcccatcccgggccctgggtgttccttcttcagcaaatccaggccatcgatcactgtccttgggatgatgacaatgaagcggccactggtggccagttggcggatgacaggg

SEQ ID NO: 254973 - DNA, 1418 bp, Homo Sapiens
  misc_feature (904)..(1126): n is a, c, g, or t
  misc_feature (1296)..(1296): n is a, c, g, or t
aaggtagcgaggcctgggtggcgaattcggcacgaggcagactcatgcacgcacacaggagggaggcctagctgctcagaggctgcaccgagtagcagggtcagggttcgtgtgctcctcctcctgctgcaggggctgcacatcccattgccccacttctgctttgtgtctccctctgtctagcttccagggcagggagcaggccccacctagggctgcaggcagtctggcctgtgccagcacggtctcctgtgcccaccagccccacaggtgctgtgctttgtgctcttggctgctgtgctgggacagaatgggatgccaggaagagaagaaagggggtgcagtctgaggccaccaccccccttcctatctaagggagggctgaagacaaggggccggcattcagtgggcagcagaaaggagaggccccttgaagctgctcagtcagaggcccccgtccctccttttgccttccgcaggactgaagacctgaaggggctggcttttggagtgttgaggtgaatatctgggagcagagatcatgaatagctcagggcagtgaatggcgcaccaagagcagggctgtgtgtgggaggctgcagccaggattgcctcagctcctccccctcaggctgggaggatagcacaggctaggggctcggggtggagggtctcagctctgctgcccccaccccagtactagcctagcttcccaagctgtggcttagaggatagttggcttcctgcctctctcctctaaaatagcaagtctgggaaatcctggggtgagtggagtcaccccactcccagttgctggcagagactgagactaaagcatcacttaataaaccccccaagcccaaacaacgcgaccttatacatccctcactcgcgcccgttcgcnnnnnnnnnnnnnnnnnnnnnnnnnnnnnnnnnnnnnnnnnnnnnnnnnnnnnnnnnnnnnnnnnnnnnnnnnnnnnnnnnnnnnnnnnnnnnnnnnnnnnnnnnnnnnnnnnnnnnnnnnnnnnnnnnnnnnnnnnnnnnnnnnnnnnnnnnnnnnnnnnnnnnnnnnnnnnnnnnnnnnnnnnnnnnnnnnnnnnnnnnnnnnnnnnnnnnnnnnnnnnnntcctcccctagcgctacgcgaacgtccttgcttccgccgcgcccgcccgccgttcgcgtgcccgcctcttcctggcccgttcccatgttcgcgccctcggccgtcagctatgcctccctcgacccgcgtaacgtcctcccgccccgtcgggtccgccgtatactcgcctnacctcgcgcccctcccgccccacgagattgcgctgccagctcccgcaccctgcgatattgcgcagctcccgcgcacgccctgatctccgctacatgccccctctgctccccgttctcctccg

SEQ ID NO: 254974 - DNA, 694 bp, Homo Sapiens
tggccttgccttcccacttcctaacaagtcaacaagatgccttttgtctccctaaagttcctatcctaaggtatctgtggcacgaactgagtttaggatggtctctcgatatgccacctggagaggcccgagataggtctccagtccatattccctcttgattcgatcatgaataatctctatatgtaactcccccataccacacagaacagtttgtccagagtcaggatctagcctcactttcaaactgggatcttcacgctgaagacatttcaacgcatgttccaaatctggctgcttagacagtgatgggggttctatggtacagaagaaaacaggttctggaatctccactccagccaataaaagtctctctgcttcattgttttgtctgtgcttcttttctccctcccgttcggctctacgagctgcagctaatgcactggacttggatgagacaatggtgtctccagtggcagtatgtttaagcccaacagtcaaagcaatgttaccagcagtcaatgaagggatttctacatgttggtcagcaaacggcaaaagcagacgacttattctctccgtgcagtttccattaatattatgaatggccaactggggttttatagtgcctgagtaaatgcgcataaaaaccagtggtcctcgctgcttgtcatggagaactttaaatgccaat

SEQ ID NO: 254975 - DNA, 1685 bp, Homo Sapiens
  misc_feature (533)..(815): n is a, c, g, or t
  misc_feature (1267)..(1275): n is a, c, g, or t
  misc_feature (1590)..(1590): n is a, c, g, or t
  misc_feature (1595)..(1595): n is a, c, g, or t
ccaggattatcagaattccaattcaacccaagttttgaccggtgttacagacatgcaaaatatcctttcaatggcacgaatttttaaggaaatcagctaccctatattaatcagatgttttaggtcaaaccaagttttccatcttgggctcaggaaaatagtattaactcattgagtctccttccccccaggaatgtggggaatggcagaaccagaaagagctatcactccttaaattcttttatgcaagtgttactccaacacttattttacttggtttacttggaatgtatgagaggaaactgatgttttttacaatggccaactgtatgtctaaattttcagttctcctttttgtgagtttcctgccagaaatccttgttaaaggatcagcgggtgttcaccccgaagttcttgctgttttcagtgtcctactgcagacaggtttaaaaagccaactgaacagcagcagaatgaagtatttttgaggtctattcaaaaatgtacagtcccaccactcactagaacaagtnnnnnnnnnnnnnnnnnnnnnnnnnnnnnnnnnnnnnnnnnnnnnnnnnnnnnnnnnnnnnnnnnnnnnnnnnnnnnnnnnnnnnnnnnnnnnnnnnnnnnnnnnnnnnnnnnnnnnnnnnnnnnnnnnnnnnnnnnnnnnnnnnnnnnnnnnnnnnnnnnnnnnnnnnnnnnnnnnnnnnnnnnnnnnnnnnnnnnnnnnnnnnnnnnnnnnnnnnnnnnnnnnnnnnnnnnnnnnnnnnnnnnnnnnnnnnnnnnnnnnnnnnnnnnnnnnnnnnnnnnnnggaacttgtaatctcattgttttctaaataatgtttcatttttcttcagtgttgaaaatagttgatttacttaagaatggcatgatcatgatgttccaagattctgattagtttctttcaaagcattctgcgcctcttcaatgcccacactgctgagcactataataatagatgttgttaggccaaaggatgtcagatgtaaagtatgttctctagccccactcttagaaatgttttatcaatgactcagtccacttgattttcaaaaagtcaatgccatcccattaaacaagtaaccccttaggtacagaataattaattcctgcctgagtcactttaacagccttctatagagtgacatagtcttgctttttttcacaagcaatagctgaaaagaacaaatctcaactgtaagaactgtcagtacattgtagggataaagcactttttgnnnnnnnnntctctggcatgtattagacagactgaacatgagatagggttggggtgggctgagccttttggtgtcattaactgaatacacaagaatgaacctctcatcagatatcaggaatccatgtcatgcaagtactacaataagataacagtaaattcaggaatgttactggggaaaaggaagatagcctcactgagaatttaatcatttaacattacaacacctttcacattggttcaacaaggtaaaactgtaagaatcagattaggctcaaactggcaagaagccatctaaatctttctttttagtggatctttttcnttttntgtccatagcgccgtctgcgctgtttataaaggtgccgaaaatcttatgtataaacctaaaaatatcattataaggataaatctgaagaa

SEQ ID NO: 254976 - DNA, 1254 bp, Homo Sapiens
  misc_feature (79)..(337): n is a, c, g, or t
  misc_feature (344)..(380): n is a, c, g, or t
ggcaatttagtatatagaccgttgtttaaaaagcaggctgtaccggccggaattcccgggatatcgtcgaccacgcgtnnnnnnnnnnnnnnnnnnnnnnnnnnnnnnnnnnnnnnnnnnnnnnnnnnnnnnnnnnnnnnnnnnnnnnnnnnnnnnnnnnnnnnnnnnnnnnnnnnnnnnnnnnnnnnnnnnnnnnnnnnnnnnnnnnnnnnnnnnnnnnnnnnnnnnnnnnnnnnnnnnnnnnnnnnnnnnnnnnnnnnnnnnnnnnnnnnnnnnnnnnnnnnnnnnnnnnnnnnnnnnnnnnnnnnnnnnnnnnnnnnnnnnnnnnnnnnnnnnnccaaacnnnnnnnnnnnnnnnnnnnnnnnnnnnnnnnnnnnnngaggtccaaatggtagcagggatccaaagggaacacagtatgtaggtcaaactggcagtaacagtgtacagcctttgacaaactagaaatattagagtaggccaaacacacctccaaactgtaaggctgtgcacaaacataaaaaatggcagccttccatctcctgcactggctgagtccatttacttgtgtacttgttctagtgagtggtgggactgtacatttttgaatagacctcaaaaatacttcattctgctgctgttcagttggctttttaaacctgtctgcagtaggacactgaaaacagcaagaacttcggggtgaacacccgctgatcctttaacaaggatttctggcaggaaactcacaaaaaggagaactgaaaatttagacatacagttggccattggaaaaaacatcagtttcctctcatacattccaagtaaaccaagtaaaataaagtgttggagtaacacttgcataaaagaatttaaggagtgatagctctttctggtctgcccatccccaacattcctgggggaaaggagactcaatgagttaatactatttcactgagcccaagatggaaacttggtttgacctaaaacatctgattaatataggctagctgatttcttaaaaattcgttgcattgaaggatattttgcatgtctgtaacacctgtcaatacttgtttgtattgatttctgatattcttgcagctgactacgtgtaattgggcagatcagctttgcagtagattatgctgcatcctcgtggcaaaattctgtattcttagtgattgttacaaacccctttattgctgtctgagaaagtgaaagattgtgtatttctattaaaacatttaaattaa

SEQ ID NO: 254977 - DNA, 628 bp, Homo Sapiens
  misc_feature (13)..(13): n is a, c, g, or t
  misc_feature (37)..(37): n is a, c, g, or t
  misc_feature (48)..(48): n is a, c, g, or t
  misc_feature (93)..(93): n is a, c, g, or t
  misc_feature (104)..(104): n is a, c, g, or t
ctctacctcaaanccagaggtcctgaccaactgaacnctgtactctcntgtcttgtacagtggcagtcaggacaaaatccccacatcaccatnatattcaaagntcagtttgggggaagacaaatatctgtagatgagaaaacatgaatatttcaggatgtaggaatcagctttaatgaaaataattgtagagggtctaaatgttgtccagaaggccagtacctctccaaattctgacctcttttggactctttccacattccccaatttatttctcaatctgattgggtgggattaactctagtgaggtacaagtgcagttatctaaaggtaaaatgttatcttttcttcttttaatacaaatattttagtgtaatccttttatttacagaatcaattgcaaaagtatatcatcacatttagtccaaatgcaactaatgataattagatttagatattgctttgtaaacttgccatacttctgtaaaataaagctatccaattcagttatgaaagagttaactgtctgtgttcatgatagttaccagaaatggcaaacagagaaacatttatagtgcgcatatagaatttttttgaagattcttatcagcggctatggtgaataaac

SEQ ID NO: 254978 - DNA, 561 bp, Homo Sapiens
  misc_feature (405)..(405): n is a, c, g, or t
gctcgcggccggctatgcccatcagttccagctcctccttctggatttctcgtttgtagtttcctgtgtccctgcctgtctccacttcacagtaagctcacgccatatagccgcactgcgttggcgagctcatggcacgtggccacaccgcgtcagcgccgactccacggtggctgcgtcacggctcacgtgcactgtgaggacactggggttgctatagacagtgctggggcaaccctgtgcctacacaaaatattctaataagaaacaagactttccatcaactagcggtgatatgttaatacgtctgcagcactcagaggcctgacagagagcagacacgggacagtgacagctgcagccgaatcaggtggtaaaacccatgggtgcagggacacagggttngggcgggcccagccgcaataggtactcagttctgtgaggaggggagggacatgtttaaccacgaaagggccaccactgcaggacagaaacagagggcctttgctgcagagaactggagatgggctgagaagcctcagccacccacaggcagaggga

SEQ ID NO: 254979 - DNA, 445 bp, Homo Sapiens
gggaggagttgccaaaagaaatacctaagcaggaccacattcacagagtgaccgccttggtgaatgggaacatagaacagatgggaaatggattccaggatcttcaagatgacagcagtgaggagcaaagtgacattgttcaagaagaagacaggccagtctgaagaagaggatggtccatggttgtcttgctctgaaagcttggagagctacattgaagacgagctcttcattcagctttgactccacctgcacccctggcgggggcttgcactaacaatgtttgggtctcagcaaaaaacaaaaccaagcacacacatctttccttccatgtattgaaaaacattggttggatgttgctctaagttttcccaatgatgtttaatcctggctttatccaggttgatctactgtgatagatgctgatttagagggcagaggtcgg

SEQ ID NO: 254980 - DNA, 713 bp, Homo Sapiens
  misc_feature (323)..(376): n is a, c, g, or t
  misc_feature (414)..(444): n is a, c, g, or t
  misc_feature (636)..(668): n is a, c, g, or t
tggtaccggtccggaatctttgggatatcgtcgacccacgcgtccggtcctgatggcagctgtgcagagtgggggtgaggaggccaacttactgcttcctgaactgggcagtgccttctatgacatggccagtggctttacagtgggtaccctgtcagaaaccagcactgggggccctgccacccccacatggaaggagtgtcctatctgtaaggagcgctttcctgctgagagtgacaaggatgccctggaggaccacatggatggacacttctttttcagcacccaggaccccttcacctttgagtgatcttactccctcnnnnnnnnnnnnnnnnnnnnnnnnnnnnnnnnnnnnnnnnnnnnnnnnnnnnnnttaggtttcatgcccattttctatcacactgggctccnnnnnnnnnnnnnnnnnnnnnnnnnnnnnnntgtgccctgttttcatcccaagatttctcacttcatcctctcctacctggctcttttgtcccagggaggggtcctgttcggaagcagtggctgaatttatcccctgaaagtggttttggaggaaccgggatggaggaggccttcccctgtgggaatagaatcgtccactcctagccctggttgcttctgatnnnnnnnnnnnnnnnnnnnnnnnnnnnnnnnnntcccttgtctgatgccccaagccaattcctggggcacctaacctc

SEQ ID NO: 254981 - DNA, 751 bp, Homo Sapiens
  misc_feature (18)..(18): n is a, c, g, or t
  misc_feature (26)..(26): n is a, c, g, or t
  misc_feature (83)..(103): n is a, c, g, or t
  misc_feature (722)..(722): n is a, c, g, or t
ttccttaagggaaacaanaatatccngggaacccccaatgtgaatagaaaaaagggccatgaaaaccctaaatgttatgccannnnnnnnnnnnnnnnnnnnnccatgaatgtgttatttgtgccatgtaacgagggagtaagatcactcaaaggtgaaaggggtcccgggtgctgaaaaaaaaagtgtccatccatgtggtcctccagggcatccttgtcactctcagcaggaaagcgctccttacagataggacactccttccatgtgggggtggcagggcccccagtgctggtttctgacagggtacccactgtaaagccactaagagagacagaggggaaagggagagggtcggcgtgctctgttcccttcttgacttgcagacttcggagagcaggacccatgtgcctgggttcccaggttatcctgtgcctaatgcagcatcctggcctctcccacagcgtctttctccccacaatcctggaaggcttatttttccagttccccatgtcctctcttctttagtccctgctggtctctgcagtgcagagcccatcccccagcctcctgctctcctccctccatctccgtctgctgcctaatgaggctgaaaatgagtctgacatcgtccttcatcttcctgctccagccgagaaggatgacagcatcaccccctccctgccctgagcccatctcacatccagggcaaaaccggggantagatggatcaaatctctcttccctgtgg

SEQ ID NO: 254982 - DNA, 1097 bp, Homo Sapiens
cgtgcttaaaaaatttcaattctcggggtaaatcccagagtaaaagaaagggtggcctttacccgaactgccaagccttgggaagacagatgcgggtgtggaggtgtgggctaaaggtagtgactgtttgattttaaaaagtgtgactgtcagttgtatctgttgcttttctcaatgattcagggatacaaatgggcttctctcattcattaaaagaaaacgcgacatctttctaagattctctgtgggaaaatgactgtcaataaaatgcgggtttctgggccattcgtcttactttcattttttgattacaaatttctcttgacgcacacaattatgtctgctaatcctcttcttcctagagagagaaactgtgctccttcagtgttgctgccataaaggggtttggggaatcgattgtaaaagtcccaggttctaaattaactaaatgtgtacagaaatgaacgtgtaagtaatgtttctacaggtctttgcaacaaactgtcactttcgtctccagcagagggagctgtaggaatagtgcttccagatgtggtctcccgtgtggggcccagcaatgggggcccctgatgccaagagctctggaggttcttgaaagaggggacacgaaggaggagtgactgggaagcctcccatgccaaggaggtgggaggtgccctggaaatagctgcctcatgccacttaggccatgactggatttaatgtcagtggtgtgccacagtgcagaggctagacaactgaaaggggctaccaaggctgggaaaaaaatgcaattgttgctgtgagtgactttgaaagactctggtgccttgtggtgcccttctgaaattcaaacagtaatgcaaaagtgtctgcattagaatttacggtgtctaaaattcatgtttttaaaagagcttgcctacagatggtttccacacttggaaattgtgccctgcgagttgcatagctggaaagttcaatgctcagtcctaaccttgggctcccatttaaacattttggtggctctggtggaaatagagtttggaacggggttggagggccttttgcaaattttcactttgggggtaaaaggg

SEQ ID NO: 254983 - DNA, 2272 bp, Homo Sapiens
  misc_feature (579)..(587): n is a, c, g, or t
  misc_feature (2057)..(2142): n is a, c, g, or t
  misc_feature (2145)..(2150): n is a, c, g, or t
  misc_feature (2154)..(2156): n is a, c, g, or t
  misc_feature (2158)..(2158): n is a, c, g, or t
  misc_feature (2164)..(2182): n is a, c, g, or t
  misc_feature (2188)..(2189): n is a, c, g, or t
  misc_feature (2196)..(2196): n is a, c, g, or t
  misc_feature (2218)..(2218): n is a, c, g, or t
acctccctttctaactccgctgccgccatggctcctgtgaaaaagcttgtggtgaaggggggcaaaaaaaagaagcaagttctgaagttcactcttgattgcacccaccctgtagaagatggaatcatggatgctgccaattttgagcagtttttgcaagaaaggatcaaagtgaacggaaaagctgggaaccttggtggaggggtggtgaccatcgaaaggagcaagagcaagatcaccgtgacatccgaggtgcctttctccaaaaggtatttgaaatatctcaccaaaaaatatttgaagaagaataatctacgtgactggttgcgcgtagttgctaacagcaaagagagttacgaattacgttacttccagattaaccaggacgaagaagaggaggaagacgaggattaaatttcatttatctggaaaattttgtatgagttcttgaataaaacttgggaaccaaaatggtggtttatccttgtatctctgcagtgtggattgaacagaaaattggaaatcatagtcaaagggcttcccttggttcgccactcatttatttgtaacttgacttcnnnnnnnnnctgcttaaaaatttcaattctcgtggtaataccagagtagaaggagagggtgactttaccgaactgacagccattggggaggcagatgcgggtgtggaggtgtgggctgaaggtagtgactgtttgattttaaaaagtgtgactgtcagttgtatctgttgcttttctcaatgattcagggatacaaatgggcttctctcattcattaaaagaaaacgcgacatctttctaagattctctgtgggaaaatgactgtcaataaaatgcgggtttctgggccattcgtcttactttcattttttgattacaaatttctcttgacgcacacaattatgtctgctaatcctcttcttcctagagagagaaactgtgctccttcagtgttgctgccataaaggggtttggggaatcgattgtaaaagtcccaggttctaaattaactaaatgtgtacagaaatgaacgtgtaagtaatgtttctacaggtctttgcaacaaactgtcactttcgtctccagcagagggagctgtaggaatagtgcttccagatgtggtctccccgtgtggggcccagcaatgggggcccctgatgccaagagctctggaggttcttgaaagaggggacacgaaggaggagtgactgggaagcctcccatgccaaggaggtgggaggtgccctggaaatagctgcctcatgccacttaggccatgactggatttaatgtcagtggtgtgccacagtgcagaggctagacaactgaaaggggctaccaaggctgggaaaaaaatgcaattgttgctgtgagtgactttgaaagactctggtgccttgtggtgcccttctgaaattcaaacagtaatgcaaaagtgtctgcattagaatttacggtgtctaaaattcatgtttttaaaagagcttgcctacagatggtttccacacttgaaattgtgccctgcgagttgcatagctggaagttcaatgctcagtcctaccttggctcccattaaacatttggtgctctgtggattgagttgaacgtgttgaggctttgcaatttcacttgtgttaaaggctctggcatttttccatttctatgcaaatttctttgaagcagaattgcttgcatatttcttctctgccgtcacagaaagcagagtttctttcaaacttcactgaggcatcagttgctctttggcaatgtcccttaaccatgattattaactaagtttgtggcttgagtttacaaattctacttgttgcattgatgttcccatgtagtaagtcatttttagtttggttgtgaaaaaaccctgggctgaagttggcatttcagttaaaagaaaaaaagaaactagtcccagatttgaaaacttgtaataaaattgaaactcactggttttctatgtctttttgaactcttgtaatcgagttttgatcatattttctattaaagtggctaacacctggctannnnnnnnnnnnnnnnnnnnnnnnnnnnnnnnnnnnnnnnnnnnnnnnnnnnnnnnnnnnnnnnnnnnnnnnnnnnnnnnnnnnnnttnnnnnnacannnanaacccnnnnnnnnnnnnnnnnnnncattcnnttttggncccccggccccacaaaaaaaantgttcctgggcccaatacctgtttctcaaaaaaaattccctgagactcttattt

SEQ ID NO: 254984 - DNA, 811 bp, Homo Sapiens
gtagcgaggcctgggtggcgaattcggcacgaggcttgattgcacccaccctgtagaagatggaatcatggatgctgccaattttgagcagtttttgcaagaaaggatcaaagtgaacggaaaagctgggaaccttggtggaggggtggtgaccatcgaaaggagcaagagcaagatcaccgtgacatccgaggtgcctttctccaaaaggtatttgaaatatctcaccaaaaaatatttgaagaagaataatctacgtgactggttgcgcgtagttgctaacagcaaagagagttacgaattacgttacttccagattaaccaggacgaagaagaggaggaagacgaggattaaatttcatttatctggaaaattttgtatgagttcttgaataaaacttgggaaccaaaatggtggtttatccttgtatctctgcagtgtggattgaacagaaaattggaaatcatagtcaaagggcttcccttggttcgccactcatttatttgtaacttgacttcttttttttcctgcttaaaaatttcaattctcgtggtaataccagagtagaaggagagggtgactttaccgaactgacagccattggggaggcagatgcgggtgtggaggtgtgggctgaaggtagtgactgtttgattttaaaaagtgtgactgtcagttgtatctgttgcttttctcaatgattcagggatacaaatgggcttctctcattcattaaaaagaaacgcgacatctttctaagattctctgtgggaaaatgactgtcaataaaatgccgggtttcctggggcc

SEQ ID NO: 254985 - DNA, 471 bp, Homo Sapiens
ggatttcaaacaagttgtgaaggtaccaaaaaccacaataaaagttaatatatataaaaactactagaacaaaaaagcttgaaggtgtgggggtggaggtgtgggctgaaggtagtgactgtttgattttaaaaagtgtgactgtcagttgtatctgttgcttttctcaatgattcagggatacaaatgggcttctctcattcattaaaagaaaacgcgacatctttctaagattctctgtgggaaaatgactgtcaataaaatgcgggtttctgggccattcgtcttactttcattttttgattacaaatttctcttgacgcacacaattatgtctgctaatcctcttcttcctagagagagaaactgtgctccttcagtgttgctgccataaaggggtttggggaatcgattgtaaaagtcccaggttctaaattaactaaatgtgtacagaaatgaacgtgaaaaaaa

SEQ ID NO: 254986 - DNA, 750 bp, Homo Sapiens
  misc_feature (501)..(623): n is a, c, g, or t
  misc_feature (696)..(696): n is a, c, g, or t
ggggcgggctctttgcgtctgcgtagttcgctcacctccctttctaactccgctgccgccatggctcctgtgaaaaagcttgtggtgaaggggggcaaaaaaaagaagcaagttctgaagttcactcttgattgcacccaccctgtagaagatggaatcatggatgctgccaattttgagcagtttttgcaagaaaggatcaaagtgaacggaaaagctgggaaccttggtggaggggtggtgaccatcgaaaggagcaagagcaagatcaccgtgacatccgaggtgcctttctccaaaaggtatttgaaatatctcaccaaaaaatatttgaagaagaataatctacgtgactggttgcgcgtagttgctaacagcaaagagagttacgaattacgttacttccagattaaccaggacgaagaagaggaggaagacgaggattaaatttcatttatctggaaaattttgtatgagttcttgaataaaacttgggaaccnnnnnnnnnnnnnnnnnnnnnnnnnnnnnnnnnnnnnnnnnnnnnnnnnnnnnnnnnnnnnnnnnnnnnnnnnnnnnnnnnnnnnnnnnnnnnnnnnnnnnnnnnnnnnnnnnnnnnnnnnnnaaaatttgggggggcgcttgggcccttaaaaaaattttataacacttttttttggggcgccgcgcgccccccnggggggaagggaacaggggcccaaaagcggtttccccaaagaaaaccccggggg

SEQ ID NO: 254987 - DNA, 1104 bp, Homo Sapiens
  misc_feature (452)..(452): n is a, c, g, or t
  misc_feature (458)..(508): n is a, c, g, or t
  misc_feature (648)..(648): n is a, c, g, or t
  misc_feature (799)..(847): n is a, c, g, or t
  misc_feature (888)..(900): n is a, c, g, or t
ggggccctttctaactccgctgccgccatggctcctgtgaaaaagcttgtggtgaaggggggcaaaaaaaagaagcaagttctgaagttcactcttgattgcacccaccctgtagaagatggaatcatggatgctgccaattttgagcagtttttgcaagaaaggatcaaagtgaacggaaaagctgggaaccttggtggaggggtggtgaccatcgaaaggagcaagagcaagatcaccgtgacatccgaggtatttgaaatatctcaccaaaaaatatttgaagaagaataatctacgtgactggttgcgcgtagttgctaacagcaaagagggttacgaatgtacgttacttccagattaaccaggacgaagaagaggaggaagacgaggattaaatttcatttatctggaaaattttgtatgagttcttgaataaaacttgggaaccncaaagnnnnnnnnnnnnnnnnnnnnnnnnnnnnnnnnnnnnnnnnnnnnnnnnnnntgtcggggcggcctcgggccctcaaaaaaattttctaagaccaattggttgtggagagaagggaacaagtgggtcgggcgcccccgggcccctagaaagattttttagaaaaatctttgtttggggccggggcgcccganattcgtaacgggaaaataggcccccccgggcggtctcccaggggagatctctggaacaaggaccaaaggggggtggtcttccccgcccatataaaaagaaccctccgcgggggggaagccccgaggggttttgttacaaatatcccaaatnnnnnnnnnnnnnnnnnnnnnnnnnnnnnnnnnnnnnnnnnnnnnnnnnagttccactggagaggcttctcgagcccgaaaattgtgggnnnnnnnnnnnnngggccgtctttttgaggagaaaccggggggtgggaaatattcgttaaaatccacttctcccgggcggcgcacgcggtggagacccccactaaaaaaattcggggcgccaggggtggaaaaacactaggggagtcggcccacaaagggagggaatcttcccacgcaccccgttggggcccccccaccctgtggaggagaaataat

SEQ ID NO: 254988 - DNA, 962 bp, Homo Sapiens
ctgggtggaaattcggacgaggggctggcggagcagaacggattgcagggtcagccatgtcatctgagcctcccccaccaccacagccccccacccatcaagcttcagtcgggctgctggacacccctcggagccgtgagcgctcaccatcccctctgcgcggcaacgtggtcccaagcccactgcccactcgccggacgaggaccttctcggcgacggtgcgggcttcacagggccccgtctacaaaggagtctgcaaatgcttctgccggtccaagggccatggcttcattaccccagctgatggcggccccgacatcttcctgcacatctctgatgtggaaggggagtatgtcccagtggaaggcgacgaggtcacctataaaatgtgctccatcccacccaagaatgagaagctgcaggccgtggaggtcgtcatcactcacctggcaccaggcaccaagcatgagacctggtctggacatgtcatcagctcctaggagatggtggaagcaccccttgtcctgtgcttgtgggagactttgcggggaggaggcagcagacactggagatgacattcttccacacgagacggggcttcagccgggcatggtccctctcaagtatctcctggaggaaggggtatggggggcaggtgtggggtgtggggtgttcccggccatcagcacagcctatgaccattgcaacaacctctcaccatctgaagagcattaaaagcatttaaaaagggacacaaaacactcaactctacactcacgcctcgaggcttccctgtcggggcgcgggaaaaagaggtatcgcaatgggcccatgggtcttcggcgcgttcccctgacgcaaccttcctatggtacaagagggccaactccgcggcgggcccccggatgagacccggcgcgggacagggtggacacccggcggcgcgcaaccagcgggggaac

SEQ ID NO: 254989 - DNA, 627 bp, Homo Sapiens
  misc_feature (32)..(32): n is a, c, g, or t
  misc_feature (39)..(39): n is a, c, g, or t
  misc_feature (61)..(61): n is a, c, g, or t
  misc_feature (67)..(67): n is a, c, g, or t
  misc_feature (72)..(72): n is a, c, g, or t
  misc_feature (75)..(75): n is a, c, g, or t
  misc_feature (77)..(77): n is a, c, g, or t
  misc_feature (79)..(79): n is a, c, g, or t
  misc_feature (131)..(132): n is a, c, g, or t
  misc_feature (136)..(136): n is a, c, g, or t
  misc_feature (145)..(145): n is a, c, g, or t
  misc_feature (171)..(171): n is a, c, g, or t
gagcaaagatcagtcccatccagactgaaagnatggtgnaataatcaaaataattcatacngatggncggtnagnangnaggcacagtgtgcgaccagctctgagtcactgctgtgtctccctggggcggnnacgnagatcgcgnaggtcggtcgggttcttcggggagancagcagcgtcagggctccaagtgcaagttcacagcagggcaagcctagttcagcaccaggtgcttcctctggccaatcctccctagccttgagctcccggaggtggcgcaggcctgtgccagctgagcagggttgtagaagggcatggccccgctgggagggccccctgcagcagggaggtcgccaggagcctgattaaaatgctggctcacttcacgtgataatgaactcattgaactacagcgcgaaagcttgggctctggggcaggctctggattggccaggcccctagctgctgcaggcccttccctgccagtcccgtctggaagctgtggttcttctgcatctggggttggcacgaacaagttagaaggaattgggagtggcgcgagtggagcgacaaagtccgcaggagcgagagccggctcgctccgctgggtcccgcttgggttcagg

SEQ ID NO: 254990 - DNA, 903 bp, Homo Sapiens
  misc_feature (307)..(307): n is a, c, g, or t
  misc_feature (457)..(457): n is a, c, g, or t
  misc_feature (483)..(483): n is a, c, g, or t
  misc_feature (498)..(498): n is a, c, g, or t
  misc_feature (500)..(500): n is a, c, g, or t
cctgaacccaagcgggacccagcggagcgagccggctctcgctcctgcggactttgtcgctccactcgcgccactcccaattccttctaacttgttcgtgccaaccccagatgcagaagaaccacagcttccagacgggactggcagggaagggcctgcagcagctaggggcctggccaatccagagcctgccccagagcccaagctttcgcgctgtagttcaatgagttcattatcacgtgaagtgagccagcattttaatcaggctcctggcgacctccctgctgcagggggccctcccagcggngccatgcccttctacaaccctgctcagctggcacaggcctgcgccaccttcgggagctcaaggctagggaggattggccagaggaagcacctggggctgaactaggcttgccctgctgtgaacttgcacttggagccctgacgctgctgntctccccgaagaacccgaccgacctncgcgatctccgtccngnccccagggagacacagcagtgactcagagctggtcgcacactgtgcctccctcctcaaccgcccatcgtaatgaattattttgaaaattaattccaccatcctttcagaatctggatggaaagactgaatctttgactcagaattgtttgccgcctggtcatttaagaatgttcattcattgaagccggagctgtctctgccacaggagagccacatggtcggtagtaaccagggcctctccaagcccagctgtgagtcactgcccagtgagtcccgcgcttcctttaaggtgctgggagcaaagagagggtgactgaggcagaccccaacccctgctctgcaccatctgggccctcgccgtgtttgaacctggctgaatgagtggagggcgctgtgttctca

SEQ ID NO: 254991 - DNA, 1084 bp, Homo Sapiens
acacaaaatcacccatggtcctcatcaggcccacagaaaagtaaagtgaggctggaagcgtctttgcaacaggaaagaaattcactgcaagtaaactaaggcctctctaaaaaaccgtgaactaatgccgaaggaaaccccacggctcctcggaggcgctgattgagaacacagcgccctccactcattcagccaggttcaaacacggcgagggcccagatggtgcagagcaggggttggggtctgcctcagtcaccctctctttgctcccagcaccttaaaggaagcgcgggactcactgggcagtgactcacagctgggcttggagaggccctggttactaccgaccatgtggctctcctgtggcagagacagctccggcttcaatgaatgaacattcttaaatgaccaggaatactatatccttaaatcatcctaaatgactaagaaagtcacatcattcttttcggcaaacaattctgagtcaaagattcagtctttccatccagaatctgaaaggatggtggaattaattttcaaaataattcattacgatgggcggtgaggagggaggcacagtgtgcgaccagctctgagtcactgctgtgtctccctgggggcgggacggagatcgcggaggtcggtcgggttcttcggggagaacagcagcgtcagggctccaagtgcaagttcacagcagggcaagcctagttcagcaccaggtgcttcctctggccaatcctccctagccttgagctcccggaggtggcgcaggcctgtgccagctgagcagggttgtagaagggcatggccccgctgggagggccccctgcagcagggaggtcgccaggagcctctcctccctgggaaccctcaggcctggaggaggggagttcagagccagggagtgacgctgcagagcttaaaaccttgggctctggggcaggctctggattggccaggcccctagctgctgcaggcccttccctgccagtcccgtctggaagctgtggttcttctgcatctggggttggcacgaacaagttagaaggaattgggcctcgtgccgaattcgccacccagc

SEQ ID NO: 254992 - DNA, 955 bp, Homo Sapiens
ggcctgggtggcgaattcggcacgaggaaaaaatcttttcctgggagtctacaaatttggaaatgaaaaaacccagacatcagatgtttttattttatattattattatagaaggtggtaccattatcaattatgtgaagggacatgcagacaccccagcttttgagggtgctgggggtaggactgaggcagccccactgggaaccagactgcagcctggcccatggctgttttcccaaggatcagttcctggagggaagggctctggccctgactccgctgtgtcccgagcacacgtgctgaccgcagcccgccgccctgtagttcttggctgggtctggaggtgtctgtggagcaccctgccctcaccacaggagcgtgagccacttctgcagtccaagctgaacatgggaaacaacctgaaaagcaggcaggcctcccggtcagggagcctctgctgtgctggcttcccatgaccacctcctcctgctgaaatattactgcttgaatctggagcagattgcgggtttataaaactgctttttatctgagaacaaacgggtttggaaattagtcgtcttttttccccactcccagagctgctcaaatcattccaccggccccctcggcttgggacagggtagtgtaactcccgatcccagggcctagccctgacacaggtggcttcccgtatcccggtggggaaaacgccctgccaccagcggggcttgagctggcctgtgtccctccactgcctgcaccacccacctccaaagtgcagtgctgggcaagggcagctcaagaagacaggacccagccgcttggcaagacatcagacacacccaacccaaaggcgtggaccccaggcccggcccgtggtacccagcaggtggcactgcagctccccgctcctgcaggtccagcgtcctcacaggaacaccggggcctgtgctcc

SEQ ID NO: 254993 - DNA, 394 bp, Homo Sapiens
  misc_feature (17)..(17): n is a, c, g, or t
  misc_feature (36)..(36): n is a, c, g, or t
  misc_feature (43)..(43): n is a, c, g, or t
  misc_feature (51)..(51): n is a, c, g, or t
  misc_feature (63)..(63): n is a, c, g, or t
  misc_feature (84)..(84): n is a, c, g, or t
  misc_feature (93)..(93): n is a, c, g, or t
  misc_feature (122)..(122): n is a, c, g, or t
cccccctacaaaccccntcctaattcccctacttgncccatcnatcaaccnggtcatgtttcncccttttatccattatgtatnccttaaagncttgcctcacattacttaaaattgagatnggttaggcatctatcccaatctcccatgcccagtaattctacagaaacagattaggttagctagataagcatgtttacaattaaatttatgctgtatccttctaatcaccactttctcatcaaaatgcttacaaatcatctgcatcattgtccattctttaaaaatgtataaacccatctctactaaaaatacaaaattagctggtcatgatggcgcacgcctgtaatcccagctgttcaggaggctgaagcagaagaattgcttgaacccc

SEQ ID NO: 254994 - DNA, 1940 bp, Homo Sapiens
  misc_feature (254)..(267): n is a, c, g, or t
  misc_feature (403)..(411): n is a, c, g, or t
  misc_feature (506)..(517): n is a, c, g, or t
  misc_feature (545)..(553): n is a, c, g, or t
  misc_feature (625)..(768): n is a, c, g, or t
cttccccacccctgttgtttttcttctgagcgggggggtggcgcattttatttgtgtacccggggtgtggtttgtgtagggcgcgcggtgttattattccctccccgggcgtggcaattgtattttttccacccccaccgcgcgcttccccatgtgggtgggtggtcacgcgacgcgcgcggggcgcggattcctggttatgtacagacacacccgccgctagagattaagagagggttcatgcaaacagcccnnnnnnnnnnnnnntggctgtatgtggttttattgtcccccgctcttttgggagagacgtccctgttggaggagggggcgccgttatattttggtaatttggaggcccccctggcggggcgccctcttcgaataaagactcccgggtatnnnnnnnnngggttttttctctttgggggggattccccaccgcccgcttggtcccccgcgccgcttgttttattaggggggaagtccgcgcgctttttttttannnnnnnnnnnncgtggggaacagaacaattggccaaaannnnnnnnnggggcgcggggccgccgccccaaaaagaaattttttaaaacttttcctggggcggcgggcccgccgcgaagnnnnnnnnnnnnnnnnnnnnnnnnnnnnnnnnnnnnnnnnnnnnnnnnnnnnnnnnnnnnnnnnnnnnnnnnnnnnnnnnnnnnnnnnnnnnnnnnnnnnnnnnnnnnnnnnnnnnnnnnnnnnnnnnnnnnnnnnnnnnnnnncaacagccattttactcttctttaattctaccgtctttgggcatacatctcatttgctgtggaagaaggtctgacagcagggctgacagcaccgattcataacacattcttttcatcatacaaagagtaagaccctagaataatgggaccatctgctaccacgacagagctgccttactggctgtagaaaaagactgcttgtgtgggagagaagaatgaggacagaggaggcatctggggcaagtgagcgtacaagtatgtctacaaattcagaatttggtggaaaatccaaatttgacttcaacatgatagagaattgatgagaaatagctgtactgtttccaaaatttactgaatttggaacctgaggttaaaacttttaggataaagcaacctcaggttcagactggccttgggaagaaatggcaatcacagacggtaatgagtgtcagtgcttgagaagaagaattgccaaaggcaatctacatatttgacttgactcaaagagaggggaaaacaagtctcatttaaaaaggatgagtctgcagcaaaaaatcaaagggaagctggaacccctgcccacctctccattccccattctgctgctggtgcctgctcttcctcacagtacctcctgaaaagttcagaattcagttaatacagaattattgggttgattttcaacgtgtagtttaagatgaagagttccgtttggtttaaaccacttcacctaacctcttggtaacggtagtcctgagagttcgcagtgtcagtgaaatcgtcctgtgaccacgcgtcaagctgctgatggggcacagcaacttccgggcctatcatatctccttgacctcgtccctcaaatctggtagtttctgcaccgagggacacagtccactgcgatgaagtatgttcaaaatcgttttctataggcacctccttccaaagtccaatagtgcaaggtggtcaggaagacttggaaggaagctgcaaaagtccagccgggaatcttgactttgttagatgtggacacaggaaaatcacctttgtcctccccagattttgttatagtcaaagaagaaacatccatgggattctaaccgcaaatatgctagatataaaattgatggaatgctaattggtccataaaaggctgtacaagataatctgtggca

SEQ ID NO: 254995 - DNA, 1079 bp, Homo Sapiens
tggagcccggccccgacggccccgccgcctccggccccgccgccatccgcgagggctggttccgcgagacctgcagcctgtggcccggccaggccctgtcgctgcaggtggagcagctgctccaccaccggcgctcgcgctaccaggacatcctcgtcttccgcagtaagacctatggcaacgtgctggtgttggacggtgtcatccagtgcacggagagagacgagttctcctaccaggagatgatcgccaacctgcctctctgcagccaccccaacccgcgaaaggtgctgatcatcgggggcggagatggaggtgtcctgcgggaggtggtgaagcacccctccgtggagtccgtggtccagtgtgagatcgacgaggatgtcatccaagtctccaagaagttcctgccaggcatggccattggctactctagctcgaagctgaccctacatgtgggtgacggttttgagttcatgaaacagaatcaggatgccttcgacgtgatcatcactgactcctcagaccccatgggcccccgccgaaagtctcttcaaggagtcctattacccgctcatgaagacagccctcaaggaagatggggctcctctgctgccagggcgagtgccagtggctgcacctggacctcatcaaggagatgcggcagttctgccagtccctgttccccgtggtggcctatgcctactgacatcccactaccccagcggcagatcggcttcatgctgtgcaaggaaagaacccgagcacgaacttcaggagcggtgcagcgctggacacagcagcaggtggcgcagatgcagctgaagtactaccactccgaggtggacgggacgcctttgtgctggcccgagttgccgaagggcctgaatgatggagctgagccaggggcacatgatgccccaggactcggactggagacctcggtgggtcggacctcagccgggggacctgggggctgcccacacacagtgtaagccacaagggccgcgccatgagagagaagggagactcgggaccacacaaaacgagggggggactgtgtgcccccacacagtttt

SEQ ID NO: 254996 - DNA, 626 bp, Homo Sapiens
gcaggcaatctccggcacgtaggagaaggctctgccacagtgacgaaggagtgagaccctagtggcgagtatccacacactcgggtgcgtcgtaactgctagagcgctgatacagatgcctgttacgagtgagatgtcggtgctgagactctaccaggcaccagtggacattatctccaagaaggtagcgacgagtcacgttcacacgctgctcattctggaccaagcccttgccgaccaagtttctcctgatgacttcctcgacagacttttttttctagacaacctgtaagacttaactaacccagtgaaagcagacttggaaatgcttaagactaatgacgacagtactgttgcatacatggtcaaacaagagaccaagcaggacaatcctgatatagccgaagtgctactagatgacctaacgaatgaactccatatgatgattgagacagtagctaacaatgaccagatggcctcaacatattgtgagtgcagggcactgcttttcaagccaaatttttatagaccattacagagggagttttatcaaacgaacaccaaggcatagtgggtataccccgaggttgctcattttcaacttttctcggaggtatcccttggct

SEQ ID NO: 254997 - DNA, 639 bp, Homo Sapiens
  misc_feature (450)..(450): n is a, c, g, or t
agttgcactgtagcctcggcagtgaaccgggaggtactaccaggtcgccgtcgttgctccgctcgctctgagagagcatggccctgagaggcgtctccgtgcggctgctgagccgcggacccggcctgcacgtccttcgcacgtgggtctcgtcggcggcgcagaccgagaaaggcgggagaacacagagccaactggctaagtgtaaggacctctggtcgcaccgtgtgtctgctgcccctgttcagctgtctgtctgccgcaggtcgactctgtcccagaatccgagagctgcccgagcggagtggcagggtcgaggccagggtcagaggcactaaggcagtgagtgcgctgcgcctgcggcgccggagaaaagtcacctgatcagtctcgcttgcagctcgcactagccggggggcgacatgggtgttggggggtagggctgatganggtccgagaagggagggcacagtgatcttgcggactggaccgaggcgaattccccttcccagcctcgcgtcccgagtttgactggcaggacccgctggtgctggaggagcagctgaccacagatgagatcctcatcagggacaccttccgcacctactgccaggagagactcatgcctcgcatcctgtt

SEQ ID NO: 254998 - DNA, 635 bp, Homo Sapiens
  misc_feature (563)..(563): n is a, c, g, or t
tatagtttattgaacagccacacccattcctttacacatgatctatggcagagttgaatagttgcaacagacactatgtggcctgcaaaatcggaaatatttactgtctggccttttacaggtttgccagcccctgatctagaccagcagctcatctgatagaggcagaggtggccttaaagatgtggccttcttcattttctgttggtttggtttcgtttctatgagagatttcctctgatagctctgctttccccagcacttactctctgagcttttaaatgttctctctgggagcttcatataagctcggtgacatttgagccacagtttttagatcagcacctggaatacatgacacattcttactgaggtcatccagcactgccatggtggctgcccagtcttctggccagtgtgccaggcacatatccctgtcacacaggttccaagaaacacatacgcagccatgcatagaccaacagatttaatattatatttgcagttttcagcgatgcagaatgagctgcaattgtgttttaaggagaagccaaatggggatnggttgtccctgcaacatgggtgccactcctggggccatgttgcaagcctcagttggacactccttccataag

SEQ ID NO: 254999 - DNA, 1101 bp, Homo Sapiens
  misc_feature (1091)..(1091): n is a, c, g, or t
atcagagagcgccggaagcggtccgagaatgaagagtgtgatctaccatgcattgtctcagaaagaggcgaatgactccgatgtccagccttcaggagcacagcgggccgaggccttcgtgagggccttcctgaagcgcagcacgccccgcatgagcccgcaggcccgcgaggaccagctgcagcgcaaggcggtggtcctggagtacttcacccgccacaagcgcaaggagaagaagaagaaagccaaaggcctctctgccaggcaaaggagggagctgcggctctttgacattaaaccagagcagcagagatacagccttttcctccctctccatgaactctggaaacagtacatcagggacctgtgcagtgggctcaagccagacacgcagccacagatgattcaggccaagctcttaaaggcagatcttcacggggctattatttcagtgacaaaatccaaatgcccctcttatgtgggtattacaggaatccttctacaggaaacaaagcacattttcaaaattatcaccaaagaagaccgcctgaaagttatccccaagctaaactgcgtgttcactgtggaaaccgatggctttatttcctacatttacgggagcaaattccagcttcggtcaagtgaacggtctgcgaagaagttcaaagcgaagggaacgattgacctgtgaattctttgccgtctaaggcagttgtttatgacagctgaaaactggacactccctaaatgtccacctttcagtgaagagatagttaagccaattccatttatagacccaccctcccagcccagtgacgctccgagttgaggatgttgaacaacatgggaaggtcgcagcgtactaagtgaagaagtcagaggacagaggaatttctctttctaggagattttcattttgtgtgacccccatggggaggaacagactggcaggaagcacaccggggttaacactggttgacttgaataggattattcgatttttaaaaatacttttccatgttttctgagtgctctatgataaatcagttgcatctgtgataatacagtacatatgtggacataaacagggntcaaataaag

SEQ ID NO: 255000 - DNA, 1428 bp, Homo Sapiens
ggggcaacaagaggggtcaagtgacacaaccagctgactcccgtagaggaagacactgtggaggccagttctggagctattgcagcctcggttgcccggccggggacccgagccgaaaagttatcgtcagaatgtcgggcaaagaccgaattgaaatctttccctcgcgaatggcacagaccatcatgaaggctcgtttaaagggagcacagacaggtcgaaacctcctgaagaaaaaatctgatgccttaactcttcgatttcgacagatcctaaagaagataatagagactaaaatgttgatgggcgaagtgatgagagaagctgccttttcactagctgaagccaagttcacagcaggtgacttcagcactacagttatccaaaatgtcaataaagcgcaagtgaagattcgagcgaagaaagataatgtagcaggtgttactttgccagtatttgaacattaccatgaaggaactgacagttatgaactgactggtttagccagaggtggggaacagttggctaaattaaagaggaattatgccaaagcagtggaactactggtggaactagcttctctgcagacttcttttgttactttggatgaagctattaagataaccaacaggcgtgtaaatgccattgaacatgtcatcattccccggattgaacgtactcttgcttatatcatcacagagctggatgagagagagcgagaagagttctataggttaaagaaaatacaagagaagaaaaagattctaaaggaaaaatctgagaaggacttggagcaaaggagagcagctggagaggtgttggagcctgctaatcttctggctgaagagaaggacgaggatcttctatttgaataatctttcctgttctggttctttgagaaaccctaacactggcttcattttaattcacagtgtgtaggtttgatttgtgtggctattgattttttggcctaagaatttcactggttgtaaaatttacctagatgtctatttatgggattacttttgcagaatcataatttagcaacccatttatccatggatgaaaagagatctgtaaaacctgcccaggaaccttacagaatttactttgcagaagcgttatcatactccatttacatctgtgttacacgtgatctgcttaccaagcatattaggaaatacctcttaggaagcattagcggtctcaggccaattactgtggagcagctttcattcctacccacttgcaaaccttggcgctgttgtctgagattgctgcagccattcttgttaccatggtacttctcaaactttgtgaaaacctgcacttttccttgcatgacaggttcctgtcttgtctgtcatgggagccattctgccaatttaaatgcgactgtggtataaacagtaaaatgatttatgtagt

SEQ ID NO: 255001 - DNA, 379 bp, Homo Sapiens
gaaggtggctgtgatgagagtgttggggttgggatatttttcttcctgtgttttcttttttgatctgaggataaagctctgaggcgacagcggctgcggagaccctgcccgaagcgccctcccctcccttgagaagccgcgggcagacagacggacctcggaccgagcaacgggtgcgggcccgccccggacgcgtcgcctgggcagcagccggggaccgcgggctctcgcctttctgccgacttcttccaattctcatcttcttttattttttggacaggaccgcggtgggtggagcacaggtggagagaaatcgggacttggcattttctccctctctctctcctaatttgttggaggccgccagcccttcccttgg

SEQ ID NO: 255002 - DNA, 371 bp, Homo Sapiens
cgccatcaggcccgagatagcggcgaggtccgctttcagtgtatgggtttccctgccaaacggttctgcttggtgccatccatggagggcgtgcgctgggccttttcctgcggcacttggctgccgagccgagccgaatggctgctggcagtgcgatcgattcagcccgaggagaaggagcgcattggccagttcgtctttgcccgggacgctaaggcagccatggctggtcgtctgatgataaggaaattagttgcagagaaattgaatatcccttggaatcatattcgtttgcaaagaactgcaaaaggcatctctcatcaaggagactatgcagtgcttgctgctgaacctgagctgcaagttggaat

SEQ ID NO: 255003 - DNA, 1164 bp, Homo Sapiens
ggggcacggacgccgggaagaagggggtggggccacgtttgcgtccgcgccatcaggcccgagatagcggcgaggtccgctttcagtgtatggttttccctgccaaacggttctgcttggtgccatccatggagggcgtgcgctgggccttttcctgcggcacttggctgccgagccgagccgaatggctgtctggcagtgcgatcgattcagcccgaggagaaggagcgcattggccagttcgtctttgcccgggacgctaaggcagccatggctggttcgtctgatgataaggaaattagttgcagagaaattgaatatcccttggaatcatattcgtttgcaaagaactgcaaaaggaaaaccagttcttgcaaaggactcatcgaatccttacccgaatttcaactttaacatctctcatcaaggagactatgcagtgcttgctgctgaacctgagctgcaagttggaattgatataatgaagactagttttccaggtcgtggttcaattccagaattctttcatattatgaaaagaaagtttaccaacaaagaatggggaaacaatcagaaagctttaaggatgagtggactcagctggatatgttttataggaattggggcacttaaagaaagcttcataaaagccattggtggttggactaagatttgaattgcaacggcctggaatttggatctatccccattaaacttgggatataggccaagtttataaaagaaacacgtttattcctggatggagaggaagaaaaagaatggggcatttgaggaaagcaaaatagatgagcaccattttgttgcagttgctcttaggaaaccccgatggatctagacatcaggatgttccatctcaggatgattccaaaccaacccagaggcaatttactattctcaactttaatgatttaatgtcatctgccgttcccatgacacctgaagatccttcattttgggactgtttttgcttcacagaagaaattccaatacgaaatggtacaaagtcatgatgattccctgagtaacaaagggaaatgaaaactgtttgtgatcttccgtattcactgaaaaataaatgcttgtttagtatcaaattttatttcacgaaagtttttttaaagaacagaaacttttcccaattaa

SEQ ID NO: 255004 - DNA, 950 bp, Homo Sapiens
  misc_feature (143)..(143): n is a, c, g, or t
atgcccggacagaggatcgcctcgctggcctactctctcctcccgtacggcgccggaatcccagctccacttaccaggccgcggctaccccgccgtcccccccgactcccgccaccccgctctctcaggctcttcaggatccnaagtccgtaggccctttaaggggtctagttgccgtttgcgaggcccctgggacctttggtcccagacagcggggatccagatggcttccgtgcggatccgagaggccaaggagggagactgtggagatatcctgaggctgattcgggagctagccgaattcgaaaaactctcggatcaggtgaagatcagtgaagaagccctgagagcagatggctttggagacaatcctttctatcactgtttggtagcagagattcttccagcgcccgggaagctactggggccctgcgtggtgggctatgggatatactatttcatctacagtacatggaagggacgcaccatttatctggaggatatctatgtgatgccggaatatcggggtcaagggattggttccaaaataatcaaaaaggtggctgaggtggccttggataagggctgctcccaattccgcctggccgtcctggactggaaccagagggccatggacttgtacaaggccctaggagcccaagatctgacggaagctgagggctggcacttcttctgctttcaaggagaggcaacgagaaagttggcaggaaagtgacgccatccctaggaggatctctgtcttgagtttctccttccccatcagctgaagcactcttcagagactacgtccacagacactgatgctgaggcctccctggaggaaggagggttaggggtgcctatcctcaagtattggaagagcagaattgagggagagacctttcttccttgttgagggtgaaaaataaataagaattacatgtaaaaaa

SEQ ID NO: 255005 - DNA, 809 bp, Homo Sapiens
  misc_feature (727)..(727): n is a, c, g, or t
  misc_feature (787)..(788): n is a, c, g, or t
ggggtggggctatgcccggacagaggatcgcctcgctggcctactctctcctcccgtacggcgccggaatcccagctccacttaccaggccgcggctaccccgccgtcccccccgactcccgccaccccgctctctcaggctcttcaggatccaagtccgtaggccctttaaggggtctagttgccgtttgcgaggccctgggactttggtcccagacagcggggatccggatggcttccgtgcggatccgagaggccaaggagggagactgtggagatatcctgaggctgattcgggtgaagactgcaggccggagctagccgaattcgaaaaactctcggatcaggtgaagatcagtgaagaagccctgagagcagatggctttggagacaatcctttctatcactgtttggtagcagagattcttccagcgcccgggaagctactggggccctgcgtggtgggctatgggatatactatttcatctacagtacatggaagggacgcaccatttatctggaggatatctatgtgatgccggaatatcggggtcaagggattggttccaaaataatcaaaaaggtggctgaggtggccttggataagggctgctcccaattccgcctggccgtcctggactggaaccagagggccatggacttgtacaaggccctaggagcccaagatctgacgggaagctgaggggctggcactttcttctgctntcaagggagaggggccacgagaaagtttggcagggaaaagtgacggccactcccctaggnnaggatctcctgttctttgagt

SEQ ID NO: 255006 - DNA, 1455 bp, Homo Sapiens
  misc_feature (11)..(14): n is a, c, g, or t
  misc_feature (38)..(38): n is a, c, g, or t
  misc_feature (130)..(263): n is a, c, g, or t
  misc_feature (408)..(422): n is a, c, g, or t
aaagtattcannnntattaggatagtacactttaacanattacaagttacaaagcctaagaaaaagcaagcaacaagtcaataaaatcacaactcagaattctaacattttcagatggtatatgtgtggnnnnnnnnnnnnnnnnnnnnnnnnnnnnnnnnnnnnnnnnnnnnnnnnnnnnnnnnnnnnnnnnnnnnnnnnnnnnnnnnnnnnnnnnnnnnnnnnnnnnnnnnnnnnnnnnnnnnnnnnnnnnnnnnnnnnnntgaatcaaacattttaaacagactattttagatgtttatttaatactgaaatgttgtcaactatcataaagtatttctctgcatcacaaaaattccatatattaaggatttacacaatccaggaaaaaaaatttttagaaactgnnnnnnnnnnnnnnnagcctgagcagaaaaatctaaaaaggctctccaaaatcttgagtggaagtatcatactctgcaatgaaatgcttgagttcttcaacacaccgctcacctatttcatgtaaattctgcctcaatgcaaactgtatagacttttctaatgaaggatctttttcaatcagcattttcaccaccatcccgaaagtttcacagtcttgtcggtaaacctgttcaatctctttggtttttgatgctattgctttagagcgagtggttagctgactatcttcaaataattctatcccatgtgttgtgtttgactcaggttcctctggctggtcagtaaacaatgggtgctgtgggatcccgcctcatactcaggaaatttcagggcaagttactttcatctgatttctctaagcttttcagcagcccacttgcttgcagcctcagcaagttccttttcagttagcctactgggtttgtctaacacctttgatgaagaaactgctgaaccacttgagggtgaagtatctcttgatgttttcaaagactggacaggcctctctttatctctttcaggatttccttcattctgccgtttgtaggaggcaccaggacgcacggactttctatgttgagactgatggaaagagtatgatttgctcctttctggagagtagcttctgctactgacactggaaccagatctgctgtgtggagaatcctttcggccaacaggtgattctctgaaaaaagtattgtcccttttataaggagaccgctctctcgcataatgggaagagtagaaactttttcttctaaagccatctctcatgtccctgtattcaggttgcctgcttgcagaatgatcgtctcttgtccatctataaccagattcatcactgggaagacttcgaggaggtgctcgttctctcggaattctttcatattcatatcgtccctcagaccacatttcgtctcttctgtaagccacgactctggccctccgggagaccccgtaaatgcagccgtccgctggccgccg

SEQ ID NO: 255007 - DNA, 1455 bp, Homo Sapiens
  misc_feature (190)..(202): n is a, c, g, or t
  misc_feature (374)..(384): n is a, c, g, or t
  misc_feature (524)..(598): n is a, c, g, or t
  misc_feature (613)..(615): n is a, c, g, or t
  misc_feature (625)..(625): n is a, c, g, or t
  misc_feature (632)..(632): n is a, c, g, or t
  misc_feature (643)..(748): n is a, c, g, or t
  misc_feature (750)..(752): n is a, c, g, or t
cggcgcccgttgttttgtcactgaggggcgggagaatattatttattatctcggcgcggagagtaagagaataagagggggtggggtcttgctccctcgcagtgtgcggctaaatgcgagggcccccccgggttttgggtgcgggcgcctcccctccggcggcggcggcggttttttgtggagggttttnnnnnnnnnnnnngcctaggtaaagataagacggcgggcgggggcgggggttattgttttttgtagagccactgcggggggtgtgcccccgtggtgtaaagagcggaaaaaaataggctcaacaaacacccccgctgtgggttgtttttgttttacaagccgtgtggggccccggcgggcccggnnnnnnnnnnngtcggggagagaggaaccccccgcttgtttggggggccgtgtgtgttttttggggagaaggcgggtaaacccgccgcgtccccctcctttcaggcgcgccggccgcccccgaccccgatttttgggattactgttttttnnnnnnnnnnnnnnnnnnnnnnnnnnnnnnnnnnnnnnnnnnnnnnnnnnnnnnnnnnnnnnnnnnnnnnnnnnnttgctccctggcctnnnttctcctttntcctccncgtggcccccnnnnnnnnnnnnnnnnnnnnnnnnnnnnnnnnnnnnnnnnnnnnnnnnnnnnnnnnnnnnnnnnnnnnnnnnnnnnnnnnnnnnnnnnnnnnnnnnnnnnnnnnnntnnngtacgttgaacgtttattacaactaattggcgatgtgataagacagtgctcacgtggcctgaatgttggtcacaatcacaacaaagcttaatccagcccagcatatataagtgaaaatataaaccatgaagacatgtttagatatgtataagtacttagaaaagtgacgctgaacaattacatagctttaaaaaatatagagccatctaatgccattttacctcattcaactcttttttgtaagaaatgtgtctttttaaatttttataagacttctgttaactaggcagtgccatggaaagaaaggaagctgctgtaaagtgtgcagcacttctaagtggagggaagcaaaataaatttagctttaacaagtaccccagagggaacattcgtgctttaaacaatgactttacacataatactgtgaagagagcaacacgttttttgtaagatactgttatgaagaattcctggcaaattaccattctcactttattttggggcatcaaaaacaactaagtatttgattatgaccacaaaaaattcatctcaggagtcaaatgtgccttggccttaaaaattatgtgcttactattgtgaaacaatcctgtttctcatcccagattcagaatgcctaagaaataatttttagtgtaagaagtatcactccaatttagtcattaaaaataatctgtagtccttt

SEQ ID NO: 255008 - DNA, 796 bp, Homo Sapiens
gggagagccggagtaacgggactcccagctgcgcgtcgcagtcccgacgcgagaagggctggagtcggcgtccagcctagagcccccggtgggagccaggccgggacgcgtgcaccatgccctacctgctcatcagcacccagatccgcatggaggtgggccccactatggtgggcgatgaacagtcggatccagagctgatgcagcatctgggggcttcaaagagaagagccttgggaaacaacttttatgaatactacgtcgatgaccctccccgcatagtcctggacaagctggaacgcaggggcttccgtgtgctgagcatgacgggggtgggccagacgctggtgtggtgtctgcacaaggagtgaccttctcatgctgatttgcagacggggcacccctgtggaggggctgctgtgggccctgacctccaagctcctgcctcaccgtctgccttgctcctctcttcccaaatcatcaccgccatgggcccagccccaaagggcagtgaatggccttctctgaaaccctgcgtcaagcagtgggagagggcagtgcccggtgccctggtgctcccagctgccctcctgcttcgggcctgggccgagggccttgtgtaggccatgttcctcgggcagctgccccgggccggagctgggcactccagcggccctggcgcgtggctcctgcataactagccccaagccaataaagggggctgtgcgtggccccatttacttttcgcgaccaccgagcggtgtccttgtgcgggccgccttccggcccttcgaaa

SEQ ID NO: 255009 - DNA, 573 bp, Homo Sapiens
tagtgtttaataatgcaataaaatgtagaaatatgtaaatttacatattacaatgaatcaataaggagtcaaaatccagtgacacactcataaaaactccatatatcatcctcagaataatcagtttctgtacaaagatttacagatgtccaagtatgtagtttttcctcagtgtgctacagaatttaaaggttctgctcgaatattccccaaatcaagcgcagaatctgtttcttcatcgatttctccaatgactgcaacgttgtcacctcttacaatgtataatcctagtaccacttgttctaccccctgtgaagagctgaatactcgttcatggctttcatccaaaatcaaattaatggtctggtcaaaacctttcagtgttcccacaatcattctcccatctgatgtaataacggcaacagttcggttgatgtagttctccaaagcggacgtcatgctgttcggcccggcggttccgggtaacgcagcggtgcggacagcaagcagaactgaaagggcgcgccagaacccggcagcggatagcgcctgcgggtcgcagcaaatatcttt

SEQ ID NO: 255010 - DNA, 474 bp, Homo Sapiens
gacgggaatttgatggaaaaccaggacttgctgggctcgccaacacctccacctccccctccacaccagaggcatctgcacctccactgcccagcaaaactccgcctcctccccctccaaagacaactcgcaagcagacatcggtggactccgggatcgttcagtgacgtcgcaaggctctctggaaagagtgtgctgcccctccccatctccatgccctctccttctgtgtcccctgagtctgctgtttacctcattgggcctgtgatgttaacatttcgtgcgactgctttttcttcaaaggagttcagttctcaccatggagtgagtggcctttagcgtcatggagcaaggtgggtctgggaggtagatatgggtccgggatgtgctatcgtagttatcagagttgggggcctctgagtgtgtctggctctgagagagtctgagtcttgcccaaacattctttctttttgg

SEQ ID NO: 255011 - DNA, 433 bp, Homo Sapiens
cgaccgccagcgcgaccatgtcccatcactgggggtacggcaaacacaacggacctgagcactggcataaggacttccccattgccaagggagagcgccagtcccctgttgacatcgacactcatacagccaagtatgacccttccctgaagcccctgtctgtttcctatgatcaagcaacttccctgaggatcctcaacaatggtcatgctttcaacgtggagtttgatgactctcaggacaaagcagtgctcaagggaggacccctggatggcacttacagattgattcagtttcactttcactggggttcacttgatggacaaggttcagagcatactgtggataattttgggaaagctgtgcagcaacctgatggactggccgttctaggtatttttttgaaggttggcagcgctaaaccgggccttca

SEQ ID NO: 255012 - DNA, 1594 bp, Homo Sapiens
ggtgagtaggtgagtttattaggacttacacacacagtgcaggcgcccaagccgccgccgccagatcggtgccgattcctgccctgccccgaccgccagcgcgaccatgtcccatcactgggggtacggcaaacacaacggacctgagcactggcataaggacttccccattgccaagggagagcgccagtcccctgttgacatcgacactcatacagccaagtatgacccttccctgaagcccctgtctgtttcctatgatcaagcaacttccctgaggatcctcaacaatggtcatgctttcaacgtggagtttgatgactctcaggacaaagcagtgctcaagggaggacccctggatggcacttacagattgattcagtttcactttcactggggttcacttgatggacaaggttcagagcatactgtggataaaaagaaatatgctgcagaacttcacttggttcactggaacaccaaatatggggattttgggaaagctgtgcagcaacctgatggactggccgttctaggtatttttttgaaggttggcagcgctaaaccgggccttcagaaagttgttgatgtgctggattccattaaaacaaagggcaagagtgctgacttcactaacttcgatcctcgtggcctccttcctgaatccctggattactggacctacccaggctcactgaccacccctcctcttctggaatgtgtgacctggattgtgctcaaggaacccatcagcgtcagcagcgagcaggtgttgaaattccgtaaacttaacttcaatggggagggtgaacccgaagaactgatggtggacaactggcgcccagctcagccactgaagaacaggcaaatcaaagcttccttcaaataagatggtcccatagtctgtatccaaataatgaatcttcgggtgtttccctttagctaagcacagatctaccttggtgatttggaccctggttgctttgtgtctagttttctagacccttcatctcttacttgatagacttactaataaaatgtgaagactagaccaattgtcatgcttgacacaactgctgtggctggttggtgctttgtttatggtagtagtttttctgtaacacagaatataggataagaaataagaataaagtaccttgactttgttcacagcatgtagggtgatgagcactcacaattgttgactaaaatgctgcttttaaaacataggaaagtagaatggttgagtgcaaatccatagcacaagataaattgagctagttaaggcaaatcaggtaaaatagtcatgattctatgtaatgtaaaccagaaaaaataaatgttcatgatttcaagatgttatattaaagaaaaactttaaaaattattatatatttatagcaaagttatcttaaatatgaattctgttgtaatttaatgacttttgaattacagagatataaatgaagtattatctgtaaaaattgttataattagagttgtgatacagagtatatttccattcagacaatatatcataacttaataaatattgtattttagatatattctctaataaaattcagaattctaa

SEQ ID NO: 255013 - DNA, 864 bp, Homo Sapiens
cctatggtggctgaggaagaagcagcagcagcaggatggtgaagtagtaaactgggggaggcagggcacagggagatgctcaggggccagtccctgtgtctctggtgcccagcgagctgagcaccagtgggtgaccggggagaaacagggcagactgggtaagggagcagggcttactgagcagtgggttgcaggaggaggagctgggcagggcctacaccagggaggagtggaggacgaggtaactcagcagcaatgtcaccttgtagcctatgcgctcaatggcccggaggggcagcaaccccccgcacacgtcagccaacagcagtgcctctgcaggcaccaagagagcgatgatggacttgagcgccgtgttcttcagcctcagctggaagggggcctggcctttggccgtgcatcctcactcccacccgcctccagcagccctctgtcggcctcctcccgacttgactcaccgtcacctggaagcagggcaccagctgctggggtgggacttgggtcttcagatcataaactacgtattccctcttgacactcacaatctcgttcaccacgtgggcctggaactctaactccatcgctgaggggtgggaatgagaactatgaaccaggaaggagagatcccagctgccaagtctgggggtagcagactggagcccaggggtgatggagacttttgatggcttttggcagggacagacttggacacaaaaccgatccatagaagggcttcccaaaccttgttttgcaacatcccaaattgtctccagttgaaggaaggcctttatcagattcatagatgagctttcattgtaaaaataaatgtactttgcaccacttcaa

SEQ ID NO: 255014 - DNA, 377 bp, Homo Sapiens
gctgcaggcggcagtggcggcgactgcagcagcgaaggggaatgggggcggcggcgggagggccgcggccggggacgccagcggcacgcggaagaagaagggcccggggcccctggccacggcgtacctggtcatctacaatgtggtgatgacagccgggtggctggttatagcggttggtctggtccgagcatacctggctaagggtagctaccatagcctttattattcaattggcctttgaaattctttcaaactggagccttattggaggaattggtccatcttctgttgtcctgacttctttccaggtgatgtcaagagtttttctaatatgggcagtaacacatagcgtcgaggtgtgtttatatagcctt

SEQ ID NO: 255015 - DNA, 360 bp, Homo Sapiens
gcgctcgtggacgccgtgcagcaggtgcgccatggggcccggagaagacggccacgtcctcaccgccgtgggtctcgtggcgcaggggcacagcagactgcgcctggtagttgttgtgagcatagtccaccatggagacattctctcgttcaccgcccaccaccttgtagccaggcccattgccatacaggatgccagtgaagggcttcttgtctgtgtcactcagcatgggggccagaccaaagatagagttgccacggggggtgtatccaccaaatgtgaagacgtgggaatggtccgcagtgaccacggtcagagtgtcttccgaggaggtcaagctgcctgccccttcatggtgcc

SEQ ID NO: 255016 - DNA, 353 bp, Homo Sapiens
caaggagcaagccaggaacaactgctgactataggatcacagctttaatatgaagaccaacatctttaccatatttaacacctctcgtaagttcatgctgagaggctcgaataccagacaaagatgctgcttgtgatagaagtgcctgaagagtctcagacaatgaaatttgtcatcaggatcagcatcattaagttttttcaagaactctaattcttttaaaccagtcttttgcatgagctcattgtttctgatgatcttcacagccacttcttggttggctcttgcattatctctggctcgtacaacattactgaatacaccttgcccagtgtagccatacacattgtaac

SEQ ID NO: 255017 - DNA, 1824 bp, Homo Sapiens
  misc_feature (840)..(840): n is a, c, g, or t
  misc_feature (1109)..(1247): n is a, c, g, or t
  misc_feature (1253)..(1257): n is a, c, g, or t
  misc_feature (1377)..(1386): n is a, c, g, or t
  misc_feature (1663)..(1672): n is a, c, g, or t
aaaaaaaacgcaggcaaacctgaggtcctcagaatggcgggcacaggtttggtggctggagaggttgtggtggatgcgctgccgtattttgatcaaggttatgaagcccctggtgtgcgggaagcggctgcagcgctggtggaggaggaaactcgcagataccgacctactaagaactacctgagctacctgacagccccggattattctgcctttgaaactgacataatgagaaatgaatttgaaagactggctgctcgacaaccaattgaattgctcagtatgaaacgatatgagcttccagccccctcctctggtcaaaaaaatgacattactgcatggcaagaatgtgtaaacaattctatggcccagttagagcatcaagcagttagaattgagaatctggaactaatgtcacagcatggatgtaatgcctggaaagtatacaatgaaaatctagttcatatgattgaacacgcacagaaggaacttcagaagttaagaaaacatattcaagatttaaactggcagagaaagaacatgcaactcacagctggatctaaattgagagaaatggagtcaaattgggtatccctggtcagtaagaattatgagattgaacggactattgttcagctagaaaatgaaatctatcaaattaagcagcaacatgggagaggcaaaccaaagaaaacatcccggcaaagacttctgaaaagaccatttagcaggtagaagaaaagttgggctttcacaaaaggcatctgaacttttaatgaactttgaaggacaacagcatcttcccaaaaccattgatgtttaagtgtttagaaatcatanaaggtgtaagctgctgtggtaattctatttgtatatctcaacagaattaaaatgtctagcttggtggtatttttatagccataaaagaaaatctttaggctttcaaaataaggatgactttagaataatattgtgtcatagaattaattttcagccatgtggaccatattttgtatccaaggatccttatttaaagctttcaacatgtacaggaagttggaaatttttggtttatgactttgtctaataaagagatagttctaaacacnnnnnnnnnnnnnnnnnnnnnnnnnnnnnnnnnnnnnnnnnnnnnnnnnnnnnnnnnnnnnnnnnnnnnnnnnnnnnnnnnnnnnnnnnnnnnnnnnnnnnnnnnnnnnnnnnnnnnnnnnnnnnnnnnnnnnnnnnnnggaaannnnngggggcccgggggccccccggaaaatggactaaggggcggggttgggaacccggcacacacagacacgggggccacccggacccggcccgggacattcccacaacgaaattcccgggggnnnnnnnnnnggcgccctattactcgaaaaatccccccgcgccgccgcgagttcccctcttcccgcgccggaccctcggccccttgagcggcccctctcccgcgcgggagtttgtatatggccattgccggggccgtggcgcgaaaaccgtttcctgcaatgggggatctgtcgcgccccgcggcactcttcaagccgggtatataaaaaaccgtgctcacaaggtgtgggccactgcaactcttcgcacacggtgccgcaccacaaaccggccccgcgactaaatnnnnnnnnnntttgtccgccggcgccttcaggtgggaatctttggggcgggcttgaaccccatttttctccctggcgagcttacaacaggtacaccttcggcgccatcccccctcccccgggagaccgcggccccagttctccggaagcggtacttcccccc

SEQ ID NO: 255018 - DNA, 855 bp, Homo Sapiens
  misc_feature (52)..(52): n is a, c, g, or t
  misc_feature (77)..(77): n is a, c, g, or t
aactgcaaagaagtatgtatagaaatgagaactttatccaggcaaccatggnattcaagagttggcttgtgtattgnagccagggaatatcaagtaattgacatgttacttgtctgtcaatagggataagtatataacgaaaacatttaatatccatacccccctcaaaaagccctttattcccaagtagcaactagtgtaaattaacaattcctttctacccttcctttgctagaaatacttatgcataactaaaacactcaagtcactgaagggaacaaatccttttactgtcacttgaatctaaaaacactcattttgtaatttgggcgaagtagctctcaaatataatgcatttttttctatcctatatatatacttgggtaaaatcggaaggtgagtgcttaggcagaaataagtaactattaaaccagtgggagcaaagttcagttgggcaatactctttatgatactgacaagtgaaggcttattagttccaaaagtgctggctttatttctgtagtcacagagtagtctaaaggtaaggcttacccagctcttggctcccaagttaatgttatttattcagtatgccagatttttctcaaggtgcattagctactcaggataattttactggtgggaactgagattttctagacgcctaaattaactgccaattctggtttatcttagggacatgctcattgaaacagtattctcactcagcttgaatactaaattttgttcccttattgttaaagtgatgaatatgtttgtacaatgaagacaactttcttttggctttttaggctacagcttcagcatgagaattatactttgacacagaaaatc

SEQ ID NO: 255019 - DNA, 2770 bp, Homo Sapiens
  misc_feature (74)..(75): n is a, c, g, or t
  misc_feature (114)..(114): n is a, c, g, or t
  misc_feature (119)..(122): n is a, c, g, or t
  misc_feature (146)..(148): n is a, c, g, or t
  misc_feature (157)..(157): n is a, c, g, or t
  misc_feature (162)..(164): n is a, c, g, or t
  misc_feature (212)..(212): n is a, c, g, or t
  misc_feature (219)..(219): n is a, c, g, or t
  misc_feature (222)..(222): n is a, c, g, or t
  misc_feature (247)..(247): n is a, c, g, or t
  misc_feature (249)..(251): n is a, c, g, or t
  misc_feature (259)..(259): n is a, c, g, or t
  misc_feature (273)..(273): n is a, c, g, or t
  misc_feature (309)..(351): n is a, c, g, or t
  misc_feature (2139)..(2219): n is a, c, g, or t
  misc_feature (2244)..(2434): n is a, c, g, or t
gggatagcggcggcacagccccagccctcagagagacagcagaaagggagggagggagggtgctggggggacanngccccaccattcctaccgctatgggcccaacctcccacncccannnnccctccatcggccggggctaggannnccccaaatnccgtnnnccccttggcaccgacaccccgacagagacagatacacagccatccgcnaccaccnctnccgcagcctggctggggagggggcnannnccccaggncccctacccctctnaggtggccataattgatttttggccaggggcatggnnnnnnnnnnnnnnnnnnnnnnnnnnnnnnnnnnnnnnnnnnnccaccctgtggttctgcagccccagtgccaagtacttcttcaagatggccttctacaatggctggatcctcttcctggctgtgctcgccatccctgtgtgtgccgtgcgaagacgcaacgtcgagaacatgaagatcttgcgtctaatgctgctccacatcaaatacctgtacgggatccgagtggaggtgcgaggggctcaccacttccctccctcgcagccctatgttgttgtctccaaccaccagagctctctcgatctgcttgggatgatggaggtactgccaggccgctgtgtgcccattgccaagcgcgagctactgtgggctggctctgccgggctggcctgctggctggcaggagtcatcttcatcgaccggaagcgcacgggggatgccatcagtgtcatgtctgaggtcgcccagaccctgctcacccaggacgtgagggtctgggtgtttcctgagggaacgagaaaccacaatggctccatgctgcccttcaaacgtggcgccttccatcttgcagtgcaggcccaggttcccattgtccccatagtcatgtcctcctaccaagacttctactgcaagaaggagcgtcgcttcacctcgggacaatgtcaggtgcgggtgctgcccccagtgcccacggaagggctgacaccagatgacgtcccagctctggctgacagagtccggcactccatgctcactgttttccgggaaatctccactgatggccggggtggtggtgactatctgaagaagcctgggggcggtgggtgaaccctggctctgagctctcctcccatctgtccccatcttcctccccacacctacccacccagtgggccctgaagcagggccaaaccctcttccttgtctcccctctccccaccttattctcctctttggaatcttcaacttctgaagtgaatgtggatacagcgccactcctgccccctcttggccccatccatggactcttgcctcggtgcagtctccactcttgacccccacctcctactgtcttgtctgtgggacagttgcctccccctcatctccagtgactcagcctacacaagggaggggaacattccatccccagtggagtctcttcctatgtggtcttctctacccctctaccccacattggccagtggactcatccattctttggaacaaatcccccccactccaaagtccatggattcaatggactcatccatttgtgaggaggacttctcgccctctggctggaagctgatacctgaagcactcccaggctcatcatgggagctttcctcagcaccttcaccttccctcccagtgtagcctcctgtcagtgggggctggacccttctaattcagaggtctcatgcctgcccttgcccagatgcccagggtcgtgcactctctgggataccagttcagtctccacatttctggttttctgtccccatagtacagttcttcagtggacatgaccccacccagccccctgcagccctgctgcaccatctcaccagacacaaggggaagaagcagacatcaggtgctgcactcacttctgccccctggggagttggggaaaggaacgaaccctggctggaggggataggagggcttttaatttatttctttttctgttgaggcttccccctctctgagccagttttcatttcttcctggtggcattagccactccctgcctctaactccagacctgttcccacaactggggagggaggctgggagcaaaaggagagggtgggacccaggtttgcgnnnnnnnnnnnnnnnnnnnnnnnnnnnnnnnnnnnnnnnnnnnnnnnnnnnnnnnnnnnnnnnnnnnnnnnnnnnnnnnnnccccggagacgcttcgcggccgatnnnnnnnnnnnnnnnnnnnnnnnnnnnnnnnnnnnnnnnnnnnnnnnnnnnnnnnnnnnnnnnnnnnnnnnnnnnnnnnnnnnnnnnnnnnnnnnnnnnnnnnnnnnnnnnnnnnnnnnnnnnnnnnnnnnnnnnnnnnnnnnnnnnnnnnnnnnnnnnnnnnnnnnnnnnnnnnnnnnnnnnnnnnnnnnagccgcgaggtggggagaggacggtagggcgccgactgacggagccgggacgagcgcaggcagtgctatcgggactagccagcgcactgctctaatgcgaggggcctggggcgcacggggggcgccgggggcatgggtggcgagcaacgaggcggacgggaaacgggggggagacaggcggaggagggaggtgcagggcctacggggagtagcgacgggcgggagggagaccggtggcgcgggggggcgactagagggatgggcggatgaagatggtcgtcttcgcaacggcgaggcgggcccccgcggcctgtgccgggtggtgcgaggctggag

SEQ ID NO: 255020 - DNA, 423 bp, Homo Sapiens
ctgacctgtgagtcagtgggccagtcatgcatctatcatagcagggggcagagctggaggtgggttccctaagctcggggactcaatagaggaagtgacaggtattgagggagtctgtacttatagtcggagcaagcatgaggctaccaggccctatcaagctgagagaccaacttattaaatacaagttgagcatttgagatcagtagcacatgcagccgccagagggcagcacaaggacgtgcgtgggccagagccccttctcccatgttcccacatgccccatggaagccactggggccaggagcggtgagagactgagcaatcgtcccacactgtttatgttataagatggggctaacttctaacccttaggaccacctgtggtgtagagatagcagtgtggggggtggtggtttgtgt

SEQ ID NO: 255021 - DNA, 984 bp, Homo Sapiens
aaaacacctgagaaaaagaaaatgtaaactaaggaagggttttcccacttaatccaacccagatttctattcaacttaaaggatttaattggcatttgtgagaaataatagtacctgtgtcactgagttgattgatttgggacatagacggttgactttcccagacagcagcttagcggaaagcagcatcccgaagacggtgtcgcatgtcctgagcctgcttgtcacctgggcctcacggtttctcgtcagccccgtcactgatgggaagcagcactgaagtgtgagggcagaaaggacaccgctggagtcaggcgctcccctgcctgtgacccttttccaacaagctgatgctgagccagcggcctgctttgtccctcatactcctcccaacagtccaaacccctaccagacagaagccacgtcgcttctgcacacgtgtctgagagcgtctgccatagacgtctgtgcgtttccgtgaagcactgcgccctaaggacccaactctgactagcagctgcctcccactcccaaacactaaccccgctcaggagactcgcactgggtgtagactgcgtctttgcagagggagatgatagaggcttctgatgacgccagagctgtaagtgtcgtgacgagctgggcgcccagcccttcttaagctgttctgtttctgtggctttaactgacatatttctgtagcatctgccttcatctcatctcagcgtaatgaaatattaatgaaatcgctgaaaagctttgccttcgagaggccagaagcctcgcggaatgtctgcaagtccaaagacgcgtgtgggttgtgccctgaagtgccgtccagcaggcgcgttgcggcgggccggcctgtgcgtgtggcctttgccttcttccctttcttcctgttttctgtttttttaatttggggattgagaaagctgtacgattttgttaaagaaaaaaataaaccattttttaaagttgtaa

SEQ ID NO: 255022 - DNA, 445 bp, Homo Sapiens
  misc_feature (16)..(16): n is a, c, g, or t
  misc_feature (69)..(69): n is a, c, g, or t
  misc_feature (299)..(299): n is a, c, g, or t
actccgtctttgcaanaggggagaaggaaaagaggccttcctgaatgacgcccaaaagctgtaaagtgnccgtgaacgaagctgggcgccccagccccttccttaagctgttcctgtttcctgtggctttaactgacatatttctgtagcatctgccttcatctcatctcagcgtaatgaaatattaatgaaatcgctgaaaagctttgccttcgagaggccagaagcctcgcggaatgtctgcaagtccaaagacgcgtgtgggttgtgccctgaagtgccgtccagcaggcgcgttngcgcgggccggcctgtgcgtgtggcctttgccttcttccctttcttcctgttttctgtttttttaatttggggattgagaaagctgtaccgattttgttaaagaaaaaaataaaccattttttaaagttgtagcccttaaatatta

SEQ ID NO: 255023 - DNA, 510 bp, Homo Sapiens
  misc_feature (334)..(334): n is a, c, g, or t
  misc_feature (486)..(486): n is a, c, g, or t
  misc_feature (497)..(497): n is a, c, g, or t
aaaacacctgagaaaaagaaaatgtaaactaaggaagggttttcccacttaatccaacccagatttctattcaacttaaaggatttaattggcatttgtgagaaataatagtacctgtgtcactgagttgattgatttgggacatagacggttgactttcccagacagcagcttagcgcaaagcagcatcccgaagacggtgtcgcatgtcctgagcctgcttgtcacctggggcctcacggtttctcgtcagccccgtcactgatggggaagcagcactgaagtgtgagggcagaaaggacaccgctgggagtcaggcgctcccctgcctgtngacccttttccaacaagctgatgctgagccagcggcctggcttttgtcccctcataactcctgcccaacagttccaaacccctgaccagtacaggaagccacgtgcgcttctggcacaagtgtcttgaggagcgtcttgccattaggacgtnttgtggcgttntccgttgaaaggc

SEQ ID NO: 255024 - DNA, 612 bp, Homo Sapiens
agcaaataaaactggctcaccaaagctgtattatttttaaaaattcccacatcacaccattgtcgttctcccgctttcactgtggccactggatttgaaggagtctctttagaaaacggcgttgctgtagcatgtgtctctacacggctgatcttcgttgcaggcagtgcatatgtttcatcaacttcagatttggtactgaatgttgttagtgaagtttcatctttaacaactgccccatttgtactggatgattcagttttaatggtctgctgggttaccatagtttgtgtgctggaaacagtactggatacagatgtttcaggaattactgttcttacatccaggcaactacttagaacacctacatttgctgaagtgtgaggaccttcatttttccttagcatatccaccacatgactattatgattagaagcatttgatgccaaagatggatataaaatggcattagaatccgtcagtgctttaaagtctggtttgtttttcattgaagtttcttttgtggctggctgttcagtttttgtgctgtttattgtatcattgatactgttaggaacgatgttattactgccttgtctgtgagggtccatc

SEQ ID NO: 255025 - DNA, 746 bp, Homo Sapiens
  misc_feature (141)..(142): n is a, c, g, or t
aacgcaggctttcaacttctgagtcagcaaagatacgtccttgagtggaatcacaccatcatttcagcaaagatgaacagagtggggttctataaattgtaaatgtcttcagaatccttgacaatgccatagacggacacnncctgccttgaattctgagtatttcatctgggcatgacactgctgtttcagatacttcaagatagcactgatctctctatcgatcttctgggcatttcttgcagccactcagggaagatagaccagtcgccagaggggtcacaaggctcttgccctacaaagaagtctggaacaatggttgtgtatccatttcctgagatcatgtcagctatatatctggtattgggcaactgccagccaaatatatcttgaatgacaatcacagctttgcctgcatcaacgggggatttggtgacataagccttgatgtgctcgacttgaacttcacggcctagccctccatactcaagtctgtggccaatgtcacacggacaaggataagcttcgttagccattgcagagatttaagtcgggcttgtcccgcggcctgagactgcgctgcaccgcgcggaggccgaacccagaggaggcggcgtggcgccgggcgggcacgcgagagggacgtgcacgcggcgaccgagaacgcggggatcctgcgggaccagtggctccagtcgtagcctcctgggagagccaagcccggagggggcggagaggtggaggag

SEQ ID NO: 255026 - DNA, 767 bp, Homo Sapiens
caacaatacacacgccctggtaagccttcttcaaaatctgaacaaagcaaactacaacctgcccatcatggtgacagattcagggaaaccacccatgacgaatatcacagatctcagggtacaagtgtgctcctgcaggaattccaaagtggactgcaacgcggcgggggccctgcgcttcagcctgccctcagtcctgctcctcagcctcttcagcttagcttgtctgtgagaactcctgacgtctgaagcttgactcccaagtttccatagcaacaggggcctcaattgttccggttttttattttctttacaatttcacttagtctgtacttcatcattttgacagcatcttcctccctcctttaattaatggaatcttctgaattttccctgaatgtttaaagatcatgacatatgacttgatcttctgggagcaggaacaatgactactttttctggtgtgttaacatgtcgctagccagtgctccaggcacccagctttgtctgtgggttagtattggtgtatgtatgagtatctgtatgtatatatacacggtatttatagagagagactatcctggagaagcctcgttttgatgccattcttccttgcaaggttaagcaaggtgggtggaaactaagacacctgaaccctccagggcctcccgcatcaaggtcagcatgaggacagaccacagagctgtcacttttgctccgaagctacttctcccactgtcccgttcagtctgaatgctgccacaacc

SEQ ID NO: 255027 - DNA, 1707 bp, Homo Sapiens
gccgtgagttctggggaaatgctggcagaccaagggcgggacctcttgcccagaataatctctctctcctactaaggaacctataggttcactgaagtaatccattactttgaatcactctctcctttgccccacctttaaacacaaatccccatccctaatagttactggtgaacagatggactcatccctttcttatccgagaagccccatcacatgctatgtcctatcacatgctataccagaagctagggctgcagaggtggatgacgcccccagatccctgccccctaggggcttaagagtctagcaggggcacctgacccaagtaagtacaatgcagggtaaggctggctaaagagcacgtgaaaaggagctgggaacacagctggtcagcagagcttcagggagggctgaaggacaggctgcacacgaggcactcagaaaacagcagtgaaacagaaggcaggcagcaacggcagtggtactggacctggggaacaccaagttcaagctctatatacaacgaggacaaaaatgaaccaggctccctgaaagcagggaatctaacctgtgctacggcgccttcccagtccacgagggcgtgagagtacatacacatgcaagtgcactccagcgctcacccaagcaacacccttggagaaacacggactccaggcccaaatccagcctgagaccctcaaagggcagatccgctaacctcaagttttcagaagatctgaacccactgggggctcctgctcctctgcctgccccatgccagactaggattccagtgacataagcgccctctacagactcagaaggacagagaaggttctgctggaagtgggctcctcagcaaaccagcagataggggttcctttgatatttataccccaggttttttcactctcacgtgacatctatgtggggccaatgaagccaattcttcttttgtacatatgcagtcctgtaagaatgcattcaaacgggatccgctaattaggaattttctcctggaattctcaacagtctatggggccagaagctttccacaaaccagtgaaggtggcagcaaagaaagcctcttagacgaggagctggcagcagctgctatctagatagacagcaaaaaccaaccactaattcagcaaacacaacctcatacctaaccgcttccctttaaatggccttcggtgtgtgcgcacatgggcacgtgcggggagaaccatacttattcccctgttcccggcctaccacctctgctcccccttctcttctctaccatttaactgtctcctctgctttgtttcttatcactgctgctggtgtctagagccagccagcagtacctggcagacatcgcgaccctgcgggcagcgcttaggactgcacatttacatttcccaaatgatctgggtagatggggacaggtgaagacttggggaaacggaaatatacgaatgacatgagacatgccatatctagtgttcaatccatttcgactgggcacaggacagcagactgctgacagtgctatgtaagattatgagtgatcctccctctattttgcaaacagtctgtaagtaactgataaaactttaaaatatgcaaattttaaaattatatagtttgatttactcatcaaattatcatgtatgctgttatttaagtatgaataaaggcttttttaaattgggaaaa

SEQ ID NO: 255028 - DNA, 490 bp, Homo Sapiens
  misc_feature (18)..(18): n is a, c, g, or t
  misc_feature (30)..(30): n is a, c, g, or t
  misc_feature (53)..(53): n is a, c, g, or t
  misc_feature (81)..(81): n is a, c, g, or t
agttcccgggccctaccnaccctctgctcnccccctcctcctcctcctacccnttaaactgtctccctcctgcctttgttnccttatcactgcctgcctggtgtcctaaagcccagcccagcagtaccccggcagaacatccgccgacccgcgggcagccccttaggacctgccacatttacatttcccccaaatgatctgggtagatggggaccaggtgaagaccttggggaaacggaaatatacgaatgaccatgagacatgcatatcctagtgtcaatcccattcgactgggcacaggacagcagactgctgacagtgcctatgtaagattatgagtgatcctccctctattttgcaaacagtctgtaagtaactgataaaactttaaaatatgcaaattttaaaattatatagtttgatttactcatcaaattatcatgtatgctgttatttaagtatgaataaaggcttttttaaattgggaaaa

SEQ ID NO: 255029 - DNA, 1137 bp, Homo Sapiens
  misc_feature (1007)..(1007): n is a, c, g, or t
  misc_feature (1044)..(1046): n is a, c, g, or t
  misc_feature (1062)..(1062): n is a, c, g, or t
  misc_feature (1075)..(1075): n is a, c, g, or t
  misc_feature (1085)..(1085): n is a, c, g, or t
  misc_feature (1092)..(1093): n is a, c, g, or t
  misc_feature (1101)..(1101): n is a, c, g, or t
  misc_feature (1111)..(1111): n is a, c, g, or t
  misc_feature (1117)..(1117): n is a, c, g, or t
  misc_feature (1127)..(1127): n is a, c, g, or t
  misc_feature (1133)..(1133): n is a, c, g, or t
gatttccttctcctggaggcagatgttgcctctctctctcgctcggattggttcagtgcactctagaaacactgctgtggtggagaaactggaccccaggtctggagcgaattccagcctgcagggctgataagcgaggcattagtgagattgagagagactttaccccgccgtggtggttggagggcgcgcagtagagcagcagcacaggcgcgggtcccgggaggccggctctgctcgcgccgagatgtggaatctccttcacgaaaccgactcggctgtggccaccgcgcgccgcccgcgctggctgtgcgctggggcgctggtgctggcgggtggcttctttctcctcggcttcctcttcgggtggtttataaaatcctccaatgaagctactaacattactccaaagcataatatgaaagcatttttggatgaattgaaagctgagaacatcaagaagttcttatataattttacacagataccacatttagcaggaacagaacaaaactttcagcttgcaaagcaaattcaatcccagtggaaagaatttggcctggattctgttgagctagcacattatgatgtcctgttgtcctacccaaataagactcatcccaactacatctcaataattaatgaagatggaaatgagattttcaacacatcattatttgaaccacctcctccaggatatgaaaatgtttcggatattgtaccaccttttcagtgctttctctcctcaagggaatgccagagggcgatctagtggtatgttaactatgcacgaaactggaagacttcttttaaattggaaacgggacatgaaaatcaattgctctgggaaaattgtaattgccagatatgggaaagttttcagaggaaataaggttaaaaatgcccagctggcaggggccaaaggagtcattctctactccgaccctgctgactactttgctcctggggtgaagtcctatccagatggttggaatcttcctggaggntggtgtccagcgtggaaatatcctaaatctgaatggnnnaggagaaccctctcanacaggttacccancaaatgaatntcttatnngcgtgganttcagaggtnttggtntccaagtatnctgttntcca

SEQ ID NO: 255030 - DNA, 562 bp, Homo Sapiens
  misc_feature (499)..(499): n is a, c, g, or t
  misc_feature (502)..(502): n is a, c, g, or t
tttctcctaagcaaattgaaaaagcttcttgtgtactcaaaattgaacagagctaccttttgactaaaaatgtcatttttaatgagcagtattttctgaacacaaaattttgtacaagagtgtctccattgcattaatttaattttgttataattttttcccaatgaaaggaaaaaagtattttgtagctcctcttccttatgtaaattcttaacatatatttttgagaaatttgcattttttaaagtaaaattgttctctttggatacttacttttctttgttttcctcatttaaagagaatagggatatttctgtattatatatttactgtttcatccctcacctttggagtgaccatgaccttggcatgaaggagagaaacctctgctttccgcctattgcttccaggagttactaccttactggccttggagataatgctcttttgtgccaacctgaggataattttaacaaaatgtaaggccagtttcagaggntgntttgccccacagagagactaatcccaatacaagaatattgacaacaaaaggacaaagtag

SEQ ID NO: 255031 - DNA, 255 bp, Homo Sapiens
  misc_feature (75)..(83): n is a, c, g, or t
gggggattaaaaagtgaaacctctatatgcacgtgttatgtgcattttgcaggatgagactgagtgtaaaagaannnnnnnnnctcttcaagttgctttgtcttttccatcctcatcacaagcccttgtttgagtgtcttatccctgagcaatctttcgatggatggagatgatcattaggtacttttgtttcaacctttattcctgtaaatatttctgtgaaaactaggagaacagagatgagatttgacaaaa

SEQ ID NO: 255032 - DNA, 712 bp, Homo Sapiens
gacgtggacccagcagggggtgacttctctcttcattagccagggatgcttaaaaatttagaacagatttttaatttaaatttaatatattccattaattaccttattcatgtgcagaatacctatttatactgtgtaacaagttgttttggaaattttatgtaaaattaaaactatcagtattttacagatgttttaattagacattgttattaacaggaacagtgcagaaactagaatcaagccttataatatcttatagaccatgcatttttgaagttagtgtccactagggtcctattaactgtacatttgcaagatttcattatttttgcctctgacactatgggaaaaattttttagaagctattgggacagattcaagcttttatgcacttggttactacagctgtaaaatgaaatctcgtcttgtagcatggattattcttctcatgttaaacccaccaaaataaaggggactaaataggtaatgattttcctagtgcatttgcatactgtgataatcctgggccttgcaatagttctacagggctcttgggcattgaattattaggatgtaattgtacatcattgtagtgttcaccttattgaagctcactctgatgttaatgagcttcgggttttgatgcttgtttagagatcagcagtcttggatgggagggaacaaagctaaataaatgttagtttggtg

SEQ ID NO: 255033 - DNA, 1549 bp, Homo Sapiens
  misc_feature (1422)..(1494): n is a, c, g, or t
  misc_feature (1538)..(1538): n is a, c, g, or t
aatctcctgtcaccacagaccagcctatttcccctgagcctattactcaacccagttgcatcaagaggcagagagccgctgggaaccctggctccctcgcagctcccattgaccataagccttgctctgcacccttggaacctaaatcccaggcctcaaggaaccaaagatggggagcagtgagagcagctgaatcccttacagccattcctgagcctgcctctccccagcttcttgagacaccaattcatgcctcccagatccaaaaggtggaaccagcaggtagatctaggttcaccccggagctccagcctaaggcctctcaaagccgcaagaggtctttagctaccatggattcaccaccacatcaaaaacagccccaaagaggggaagtctcccagaagacagtgattatcaaggaagaggaagaagatactgcagagaagccagggaaggaagaggtgaggagagggttgggaccacaaagctgggaaaaatgacttcagggctctgaaactcccaccaagatttttctcaatctcaggatgtcgtgactccaaaaccaggcaagagaaagagagaccaggcagaggaggagcccaacagaataccaagccgcagcctccgacggaccaaacttaaccaagaatcaacagcccccaaagtgctcttcacaggagtggtggatgctcggggagagcgggctgtgctggcactggggggaagtctggctggttcagcggcagaggcttcccacctggtcactgatcgcatccgccggacagtcaagttcctgtgtgccctggggcggggaatccccattctgtccctggactggctgcatcagtcccgcaaggctggtttcttcttacccccggatgaatatgtggtgaccgaccctgagcaagagaagaactttggctttagccttcaagacgcactgagcagggctcgggagcgaaggctgctagagggctatgagatctatgtgacccctggagtccagccaccaccacctcagatgggagagattattagctgctgtggaggcacatacctacccagcatgcctcggtcctataagcctcagagagttgtgatcacatgccctcaggacttccctcattgctccattccactacgggttgggctgcccctcctctcgcctgagttcctgctgactggagtgctgaagcaggaagccaagccagaggcctttgtcctctcccctttggagatgtcatccacctgagaactccactacccttttccctcccagaccacgaattagaagatatgtggaagaaagaactcagggcgttagaaaggattggagtatattgatacaacttgtcctggaacatgggtgggaccagaaatctttatgaataaatgaaaagataagggatttggaagccacannnnnnnnnnnnnnnnnnnnnnnnnnnnnnnnnnnnnnnnnnnnnnnnnnnnnnnnnnnnnnnnnnnnnnnnngtatagattagggggatacaaggtttcttacatggcatgtattnaaatgggcctt

SEQ ID NO: 255034 - DNA, 242 bp, Homo Sapiens
gggaggccccccactgttacatctagataattcctgccattattatcatctaagtcagaggtcataacccttatctgaatagatgatcacagagaaggggaatcaacctcctttctcttccttttccaatagaaacccaatctcagtggcttccaggaagcccaaagcatcccacattgctgctacaacttctctactgcaaaaatatttcatctttcttgtgtcggcttctctttcggtac

SEQ ID NO: 255035 - DNA, 514 bp, Homo Sapiens
  misc_feature (386)..(386): n is a, c, g, or t
  misc_feature (393)..(393): n is a, c, g, or t
  misc_feature (428)..(428): n is a, c, g, or t
  misc_feature (500)..(500): n is a, c, g, or t
ctgaagaatagcatctttaatgagtgttctaatccttgtcatctgaagttttgaaatatattcaccagggtcagaacaatacagagatagtatttgtataatatagcttattttaaatttcatttaagccctctcatttctcctcccacagctgctgttttgttttgatgaaagagaaataaggaataaataaaaggtcaatgcttcaaactaatctacctgtgtactccctgaaaactctgggactgtatccacagaatagggaaaactattctcaaatgcacagtcactcatgcctcaggcatgaactgatgttctttcaaaagaaaaaagaacaggggcaaacttccagtcctatgtttgacacatactaaaaccccaaaggnggaggcnggatttgtatttggttctcaggccagggaaacccngggggcccccggcttaatggattccggttctaaccatttagggggggtccattctccccgccaggggtaggntttccggccggggt

SEQ ID NO: 255036 - DNA, 1417 bp, Homo Sapiens
  misc_feature (1037)..(1037): n is a, c, g, or t
tgaagctcacacctcccccgccccgggagggtttgcccgccactgtcgctgaatgattgcatcatcgaaagcagaaaaccacttttgcatccttcggcctctggcgtgcctgccatgacgtcatagctctgcggaggtggaagttggggagctttgaggacctcatggatcccagggggaccaagagaggagctgagaagacagaggtagctgagcctcggaacaaactacctcgtccagcaccttctctgcccacagaccctgccctctactctgggccctttcctttctaccggcgcccttcggaactgggctgcttctccctggatgctcaacgccagtaccatggagatgcccgagccctgcgctactatagcccaccccccactaacggtccaggccccaactttgacctcagagacggatacccggatcgataccagccccgggacgaggaggtccaggaaaggctggaccacctgctgtgctggctcctggaacaccgaggccggttggaggggggtccaggctggctggcagaggccatagtgacgtggcgggggcacctgacaaaactgctgacgacaccgtatgagcggcaggagggctggcagctggcagcctcccggttccagggaacactatacctgagtgaagtggagacaccgaacgctcgggcccagaggcttgctcggccaccgctcctccgggagcttatgtacatgggatacaaatttgagcagtacatgtgtgcagacaaacctggaagctccccagacccctctggggaggttaacaccaacgtggccttctgctctgtgctacgcagccgcctggggaagccaccctctgctcttctcaggggaggtagactgcacagacccccaagccccatccacacagcccccaacctgctatgtggagctcaagacctccaaggagatgcacagccctggccaatggaggagtttctacagacacaagctcctgaaatggtgggctcagtcattcctcccaggggtcccgaatgttgtggntggcttccgtaacccagacggttttgtctcttccctcaagacctttcctaccatgaagatgtttgaatatgtcaggaatgaccgtgacggctggaatccctctgtgtgcatgaacttctgtgccgccttccttagctttgcccagagcacggttgtccaggatgaccccaggctcgttcatctcttctcttgggagcctggcggcccagtcaccgtgtctgtacaccaagatgcaccttacgccttcctgcccatatggtatgtggaagctatgactcaggacctcccatcaccccccaagactccctctcccaaatagtaatgctttagagggaggcagtcatatctctgtgtgcagataataaaagcatatttctaag

SEQ ID NO: 255037 - DNA, 707 bp, Homo Sapiens
  misc_feature (134)..(195): n is a, c, g, or t
  misc_feature (238)..(291): n is a, c, g, or t
gtgaagtggtgacggaccgtgggaagggtgtggaggagaggaggcgaggggagagtgtgacgataggaggaggttgacgagagggtagtgtggcgggacggatgagtggaggagagtaagagagggtggggaannnnnnnnnnnnnnnnnnnnnnnnnnnnnnnnnnnnnnnnnnnnnnnnnnnnnnnnnnnnnnattggtgatgtggggtgagtaagtgtgaagtggatgaggcgcnnnnnnnnnnnnnnnnnnnnnnnnnnnnnnnnnnnnnnnnnnnnnnnnnnnnnnacgtaggggggggaagtagaagagtgagagatggggatgaggaggagtagtagaggtgcaggagatgtggagtgggtcaggctgtggtggagtggggtagcggggtggagaggcttgggagatgaggagtaggggtgtgttgggactcggtggggagctgggtgagagggatgcgctatggcggtggggcgtctggtgctgtacggataggtatggcggatgtgtgcttggggagctaggatcgcttggcgtggcggtgtctctcaggcggtgctgtcatggggatcgagatcgccgcgcgtcaacgtggtggcaggagcctcctctgacaacagacagaggcctcctcctaccctctcagacagcggcatcctcccccctcagacagaggcctcctccctcctcagacaggggac

SEQ ID NO: 255038 - DNA, 378 bp, Homo Sapiens
gtggtcattgctctgcagaactcaaaaagaaaattgtacttgttcatagacatttttaaagggttaatttattgttcagccttatcccttggcacgtaaacagactactagacttattgtaggttcgtttgagctttgtgttgtaaaattaaaaatgcttctgtaaagttttcaaggtagggagtgattttattattgtgtatatctaatatattaagtatgtgtgatactaaggtttgactgctataattatttgtactgttgatcacatgtacttaaaacatctgatactgtattctaagacaggttgtttttgcaattaaatttattttaataagacgatcatgaataaaactttaaattgatatttttattatt

SEQ ID NO: 255039 - DNA, 1555 bp, Homo Sapiens
  misc_feature (17)..(17): n is a, c, g, or t
  misc_feature (26)..(26): n is a, c, g, or t
aaccaaccacagaaccnggcgcctgnggagcaagtgggactgaggcccaggtgctaacacggggctggcagtgtcgagagaacgctctggaagctcctaacagacggctccgcgtgcggatgcacaggccctgacgggcactctgagctgggcagtctgacaccaagcagtaaggcctcccgggcagcgcacctcagtccacgagcacagcgggtggccctctggggggaggcagcacggggcgcagctcggcaggcgagcgggcgggatggatgaaacgcagcggcaccaggagccccaggctctcacaggtgccacccccgaccccaggattttcaaagggacaggatttcaaagtcttcatcttctgagtcgaagaatctttccagtcgctctacatcagaagaatctagggacaggttcaggacgtcggggcaggccagatgtgaaggctgctgctccaccagctcaaacatgggcagggcacctccgagcagagacagctttttgacttgctggcaccaatcattgaagtcatcttcagtcttacagaaaaaccccacagcgatggacgggtcaagctccgcgatgctcatgcggcacggcgggtgctggcagtggaagctctcgtccggggatgaagcagccatcagtgggctccacggctggctgcgtggtgtgggggtccaggtagatgagctcctcaccaacgtagccgatgaagtagtgggcgctgttgggcttccctccgatgacgcccagggactggggcatcatgaagcagtgcttcagcgtctccacgtaggcctcgttgatgtccgtgagccccaggcgcaggggaatgagaagtaccaggggtctccatggcgacggcctgttggtgacctcagctccggcagggaatccgttgcagtgccggtcggaatctgcaggaaacgcagtggcgcctgcacagggaacgctggtcctgcacaaccttctgatttcctccatcacaacagtgttgtccattgcaatgtggaccgccaaggagctccacgtatcgaagacagcaagcttcttcaggacctgggcgacagtgttgggcccgtaccactggcctatggacttgccttcgccaactcccatttgcgctatctggtgaatggagtagtaactgtccttcctgtcgatgaatgcgttgaggacgctgaagtagctgtctggctgcctcttcccttgtgtccacctccaatctcggcctaggtgccggcacaccagggcttgggcaaagatcgtctgtccacaccgcagcatgcagccccagcctgtgtccgaggtggggcctgtccccccaatggctggaaagtttttcctgtatgtaaaccaaagtctagatgccacatcagacaagatctcgtccttttctgtgaaaatgctgtattttctacccagtatccaaacgggctctgaggtctcaggaaaatcttcaaactcagcaaaccggagagtgtcgtaggtcagagtagctgcgtccatcttcccagtccggccgccgactgacccgagcggcgtc

SEQ ID NO: 255040 - DNA, 2364 bp, Homo Sapiens
  misc_feature (1738)..(1788): n is a, c, g, or t
  misc_feature (2117)..(2117): n is a, c, g, or t
  misc_feature (2153)..(2153): n is a, c, g, or t
  misc_feature (2174)..(2174): n is a, c, g, or t
  misc_feature (2322)..(2322): n is a, c, g, or t
  misc_feature (2330)..(2330): n is a, c, g, or t
  misc_feature (2339)..(2339): n is a, c, g, or t
  misc_feature (2348)..(2348): n is a, c, g, or t
cgcggcgtcccgtcgccgcgtcgcgttgctggcccgtcggagcgacgccgctcgggtcagtcggcggccggactgggaagatggacgcagctactctgacctacgacactctccggtttgctgagtttgaagattttcctgagacctcagagcccgtttggatactgggtagaaaatacagcattttcacagaaaaggacgagatcttgtctgatgtggcatctagactttggtttacatacaggaaaaactttccagccattggaggttgtcgggacatttcactctccagtaaatgtggcccttggcgttactgagtcctaagaggggggacaggccccacctcggacacaggctggggctgcatgctgcggtgtggacagatgatctttgcccaagccctggtgtgccggcacctaggccgagattggaggtggacacaaaggaagaggcagccagacagctacttcagcgtcctcaacgcattcatcgacaggaaggacagttactactccattcaccagatagcgcaaatgggagttggcgaaggcaagtccataggccagtggtacgggcccaacactgtcgcccaggtcctgaagaaggttgtgcaggaccagcgttccctgtgcaggcgccactgcgtttcctgcagattccgaccggcactgcaacggattccctgccggagctgaggtcaccaacaggccgtcgccatggagacccctggtacttctcattcccctgcgcctggggctcacggacatcaacgaggcctacgtggagacgctgaagcactgcttcatgatgccccagtccctgggcgtcatcggagggaagcccaacagcgcccactacttcatcggctacgttggtgaggagctcatctacctggacccccacaccacgcagccagccgtggagcccactgatggctgcttcatcccggacgagagcttccactgccagcacccgccgtgccgcatgagcatcgcggagcttgacccgtccatcgctgtggggtttttctgtaagactgaagatgacttcagtgattggtgccagcaagtcaaaaagctgtctctgcttggaggtgccctgcccatgtttgagctggtggagcagcagccttcacatctggcctgccccgacgtcctgaacctgtccctaggtgagagctgccaagtccaggtggggtccctcggaggtacgatctgtgcccttgcttccccagtcctggcccccttggttttgaccattaaggtgtgtgtgagcctgagccgtgagcacttggcagtggttcgcctgtgagaccaggtatggagtggagcgtcccctcctccaagcttgcgcccagcagcccaggacccacctcgtcttccccaccagcgctgcctgccggggcgctgtggagctgggcgtgctaccatggagtcctcaggggtctggagcagacagaacatgcaggctctgtggtgacgcagtcctgggtgggggactggttcacttgggcaccactggccatgggtggcgtagacccctcggaccatgggcagcgtgccgcaggagccggcctgggctcgtgcagtgaagtgagtggccgtgagcgcgtcctcctcatctctgtctccctgtggaaaactctacaaacaaggcaatggcaatggaaccactcctgatgaccacgagggtcagacgcgggacagaggcccctcaggcctgagattgtgccggccgnnnnnnnnnnnnnnnnnnnnnnnnnnnnnnnnnnnnnnnnnnnnnnnnnnnatattcgcaggtctgcacaacccccggacctgttcacacccgcatggggacagctgtctgtgggctgcagagcaggcactgctcagtctgccccacgccaagggcccttgactcacacccaggtggcccacccaagatgcctgatgcgctatgtcctgttccttctagattcttctgatgtagagcgactggaaagattcttcgactcagaagatgaagactttgaaatcctgtccctttgaaaatcctggggtcgggggtggcacctgtgagagcctggggctcctggtgccgctgcgtttcatccatcccgcccgctcgcctgccgnagtgcgccccgtgctgcctccccccagagggccacncgctgtgctcgtggactgagntgcgctgcccgggaggccttactgcttggtgtcagactgcccagctcagagtgcccgtcagggcctgtgcatccgcacgcggagccgtctgttaggagcttccagagcgttctctcgacactgccagccccgtgttagcacctgggcntcagtccnacttgctcnccaggcgcncggttctgtggttggt

SEQ ID NO: 255041 - DNA, 623 bp, Homo Sapiens
cagtgacagaagcaacaataattgtgaaaaatacttcagcagttatggactcatctgtcattcaaaggaaaaaagtagctgtcattggtggcggcttgattgtatcccaaggtattcccatgagagcaagaatgatccactctctttcaggaaaaaagtctgcaattccctatgggacaaagtctcagtatattctttctgtaagcagagaaaatctaaacaaggatctattgactgctgctgagaaataccccaatgtgaaaatgcactttaaccacaggctgttgaaatgtaatccagaggaaggaatgatcacagtgcttggatctgacaaagttcccaaagatgtcacttgtgacctcattgtaggatgtgatggagcctattcaactgtcagatctcacctgatgaagaaacctcgctttgattacagtcagcagtacattcctcatgggtacatggagttgactattccacctaagaacggagattatgccatggaacctaattatctgcatatttggcctagaaatacctttatgatgattgcacttcctaacatgaacaaatcattcacatgtactttgttcatgccctttgaagagtttgccattcctcttatt

SEQ ID NO: 255042 - DNA, 378 bp, Homo Sapiens
cagtgacagaagcaacaataattgtgaaaaatacttcagcagttatggactcatctgtcattcaaaggaaaaaagtagctgtcattggtggcggcttgattgtatcccaaggtattcccatgagagcaagaatgatccactctctttcaggaaaaaagtctgcaattccctatgggacaaagtctcagtatattctttctgtaagcagagaaaatctaaacaaggatctattgactgctgctgagaaataccccaatgtgacagtgcttggatctgacaaagttcccaaagatgtcacttgtgacctcattgtaggatgtgatggagcctattcaactgtcagatctcacctgatgaagaaacctcgctttgattaca

SEQ ID NO: 255043 - DNA, 886 bp, Homo Sapiens
  misc_feature (176)..(176): n is a, c, g, or t
agaaaattagggttccagggcataattctcccgttctagggtggaaatagttcatcttccaagttccccaggggggaatgtgcctgctggcctgttatccaaagcgagggttttctccatcaggttgagatttgacagttgaattaggcttcatccacatcctacaatgaggtccncaagtggacatctttggggaacttggtcagatccaaagcaccgggatcattccctcctctgggattacatttcaaccaagcctgtggtaaaagtgcatttcaccattggggtattttctcagcagcagtcaatagatccttgtttagattttctctgcttacagaaagaatatactgagactttgtcccataggggaattgcagacttttttcctgaaagagagtggatcattcttgctctcatgggaataccttgggatacaatctgatcttccaggccaacagctttcaaggcttgtcgtcctctatgagaaagggctaagttaatgcttcttccacgtgtgaaggtagccactcgagtatcttccctagcttcatatacatcaatctggaaattcctctttgcaagaaagcatgcttgtaatgaaccaaccaagccaccaccaatgacagctacttttttcctttgaatgacagatgagtccataactgctgaagtatttttcacaattattgttgcttctgtcactgagtgacactgatttctgtgtctcctacacactgatttctctgagtttttatactgccccaagcctagtgcattcatgagccagcggcaatgtttagtcagggctaatttcccttgacagtattaacccattagttggccaaagtacaatcagctcagctctaagaaaaaataaatcccc

SEQ ID NO: 255044 - DNA, 1204 bp, Homo Sapiens
aggagggcgcaggagggacgacagccagcggggtgcgtgcgctcttagagaaactttccctgtcaaaggctccggggggcgcgggtgtcccccgctttgccagagccctgttgcggccccgaaacttgtgcgcgcagccaaaactaacctcacgtgaagtgacggactgttctatgactgcaaagatggaaacgaccttctatgacgatgccctcaacgcctcgttcctcccgtccgagagcggaccttatggctacagtaaccccaagatcctgaaacagagcatgaccctgaacctggccgacccagtggggagcctgaagccgcacctccgcgccaagaactcggacctcctcacctcgcccgacgtggggctgctcaagctggcgtcgcccgagctggagcgcctgataatccagtccagcaacgggcacatcaccaccacgccgacccccacccagttcctgtgccccaagaacgtgacagatgagcaggagggcttcgccgagggcttcgtgcgcgccctggccgaactgcacagccagaacacgctgcccagcgtcacgtcggcggcgcagccggtcaacggggcaggcatggtggctcccgcggtagcctcggtggcagggggcagcggcagcggcggcttcagcgccagcctgcacagcgagccgccggtctacgcaaacctcagcaacttcaacccaggccgcgctgagcagcggcggcggggcgcccctcctacggcgcggccggcctggcctttcccgcgcaaccccagcagcagcagcagccgccgcaccacctgccccagcagatgcccgtgcagcacccgcggctgcaggccctgaaggaggagcctcagacagtgcccgagatgcccggcgagacaccgcccctgtcccccatcgacatggagtcccaggagcggatcaaggcggagaggaagcgcatgaggaaccgcatcgctgcctccaagtgccgaaaaaggaagctggagagaatcgcccggctggaggaaaaagtgaaaaccttgaaagctcagaactcggagctggcgtccacggccaacatgctcagggaacaggtggcacagcttaaacagaaagtcatgaaccacgttaacagtgggtgccaactcatgctaacgcagcagttgcaaacattttgaagagagaccgtcgggggctgaggggcaacgaag

SEQ ID NO: 255045 - DNA, 599 bp, Homo Sapiens
  misc_feature (497)..(497): n is a, c, g, or t
  misc_feature (509)..(509): n is a, c, g, or t
  misc_feature (565)..(565): n is a, c, g, or t
gtatcatgttaaagatgagcgggtggcagcgacagagccaaaatcagagctggaacctgaggagagagtgttcaagaaggaagtgtatcttcatacatcaccacacctgaaagcagatgtgcttttccagactgatccaactgcagagatggcagctgagtcattgcctttctccttcgggacactgtccagctgggagctggaagcctggtatgaggacctgcaagaggtcctgtcttcagatgaaaatgggggtacctatgtttcacctcctggaaatgaagaggaagaatcaaaaatcttcaccactcttgaccctgcttctctggcttggctgactgaggaggagccagaaccagcagaggtcacaagcacctcccagagccctcactctccagattccagtcagagctccctggctcaggaggaagaggaggaagaccaagggagaaccaggaaacggaaacagagtggtcattccccagcccgggctgganaagcagcgcatngaaggagaaagaacaggagaatgaaagggaaagtgggcacagttaggttgaagagnattgaacggcttcaagcagggaattcgagcgctt

SEQ ID NO: 255046 - DNA, 645 bp, Homo Sapiens
  misc_feature (517)..(517): n is a, c, g, or t
gtatactctgaacaaaatatgagtcattaatccctctaatggagggacctagaacagtgaaatagggaggacaggaaggagaatgatgctgaattgaactgggatcttcttgtctgtcaagcccttgaacagctttccctttaagcaacaaagatgacaagtttttgctattttggattagtgagagtgtacgaaatggtttccctttccttccaggcaaaaataccaacagaatctggcttcggaatgaaagtgctaatttcatttggtgactttcagatttgaaatacgggcttgaacaggcattgtgcattagtcagctgaggcagtggaggttatttttacgatgctaattattatttcctgacagtgatttactttatgttgtctactgtttacgcccccaaactagccattggtttaggaacagaattggttgggttgtcatgctcttttcaaagacaaatcttactattttatgcatagaaatactttcctgtaataaagaagaaagctntattgaagagaatcttgcatatgaaatgtaatctgggataaatattcaaaactaataaggttatattttagtctttgattttaaaggataattttctgacattctccacccttgctttatgtgcttgt

SEQ ID NO: 255047 - DNA, 687 bp, Homo Sapiens
  misc_feature (16)..(16): n is a, c, g, or t
  misc_feature (87)..(87): n is a, c, g, or t
cagcatgtcctctccntgtgaagtatccgggctcaggtctgcagggtcactctctggattctggctggggaagacagtggcacttgngggttcccagttcctggtctcaagcttcacttctggaattgccctgtctgtgctcctcagggatactgggcttcgggcctgaaagtgaagggttaacggaagcttggccgctccacattgaggagggcatgctggtgacaccttgggggccctcacccacagatggcgactcagggctgtgctccccccgctcttctggcccatctggaggggctggcaacacccctgggaggtctgggacggttggggtcttgacagggatcacgggtgtcttgatggggatgggaccagctccaatggttccccggcggacagaaggcttggtggaaggggtccgtcggatagttgcaacccctggagtgaccatagcaggtcccagggtggtggggaggccagcagttgaggctggacgcttggcttggaacatccgtcggtaggactggctgatgtcgctgtttcttggaatggtggaggacttgtcgaactcctgctgatctgcctcctggtcaccacttacagagaaataatcataatctgaaacttgggaagggatggtgtcctcagagcagcagggggtggttgtctgggtgctgtagccgc

SEQ ID NO: 255048 - DNA, 1778 bp, Homo Sapiens
  misc_feature (615)..(615): n is a, c, g, or t
  misc_feature (671)..(671): n is a, c, g, or t
  misc_feature (676)..(676): n is a, c, g, or t
  misc_feature (707)..(707): n is a, c, g, or t
  misc_feature (709)..(709): n is a, c, g, or t
  misc_feature (715)..(715): n is a, c, g, or t
  misc_feature (725)..(725): n is a, c, g, or t
  misc_feature (745)..(745): n is a, c, g, or t
  misc_feature (772)..(772): n is a, c, g, or t
  misc_feature (1194)..(1194): n is a, c, g, or t
atggaggagctgctgaggcgcgactgggctgcagctctgtcagggccacgggccactcggggggcgggtgcatcagccagggccggagctacgacacggatcaaggacgagtgttcgtgaaagtgaaccccaaggcggaggccagaagaatgtttgaaggtgagatggcaagtttaactgccatcctgaaaacaaacacggtgaaagtgcccaagcccatcaaggttctggatgccccaggcggcgggagcgtgctggtgatggagcacatggacatgaggcatctgagcagtcatgctgcaaagcttggagcccagctggccgatttacaccttgataacaaaaagcttggagagatgcgcctgaaggaggcgggcacagtggggaagaggaggtgggcaggaggaacggccctttgtggcccggtttggatttgacgtggtgacgtgctgtggatacctcccccaggtgaatgactggcaggaggactgggtcgtgttctatgcccggcagcgcattcagccccaaatggacatggtggagaaagagtctggggacagggaggccctccagcttttggtctgctctgcagttaaagatccccctgacctgtcncgtgacctggagatcatcccagccttacttccacggggacctcttggggtggaaangtagnagaggattcctctgggccggtgatttttgancnagcttntttgtagggncactcggaatatgagctggnaatagctggcatgtttgggggctttanagctccttttactccgcctaccacggcaaaatccccaaggccccaggattcgagaagcgccttcagttgtatcagctctttcactacttgaaccactggaatcattttggatcggggtacagaggatcctccctgaacatcatgaggaatctggtcaagtgagcgggccttactctggaaggaggcctcagaggtttctccacagtcctcttctgggcaaattcttgtttcttcacatgccggactagcttaagaccaatgcagtagcttatttccaagccttgcaaagtatataatatctaagaggaaaggttttgtcatcccagcgttgtcactttgtggggctttgtaggtagacggagccacacaacaggcagggtatgagcagagggatgtatggagtgtgggtgactctgagcctnactgctgctgcaaggtggggaaactgtaagtgaacccctgtgggtgcgggggagggtatccggtgcgcagggaggtggccagcgcccccgggcactgctgctcataggtacctttccactgcctcctccctgctctcctgtgcaggaatgtctctgagctgttcacgttgatgcttcttggttggcaagacttgggtgtagacatgaaaccatcttactaaaagcgtcttaaaatgaccaattccagaatcaagcgtattccgttttcttcctgcatgatccctgggccctcccgcaggctgagcaagtctgtaaactgattctgggagaaaccaagctgctggccgtagggtgtccttgggtacatccaggagtcttcattgcttctgttattaccccgtctcctctgccattttctacagcttgctgagttgtcattcctttgcaacattaaaatacatgctgaactcatatttttccttccttcactgttgtagtaaagagacatatttcatgaatggcattgatgctaataaatcctttgcacaaaaatttgaataaacttccagtggtttcgataatgt

SEQ ID NO: 255049 - DNA, 1282 bp, Homo Sapiens
  misc_feature (390)..(390): n is a, c, g, or t
  misc_feature (462)..(462): n is a, c, g, or t
  misc_feature (816)..(816): n is a, c, g, or t
  misc_feature (934)..(934): n is a, c, g, or t
  misc_feature (1195)..(1195): n is a, c, g, or t
  misc_feature (1200)..(1200): n is a, c, g, or t
  misc_feature (1221)..(1221): n is a, c, g, or t
  misc_feature (1260)..(1260): n is a, c, g, or t
agtcagcaaaattaaatctacagcaaaatttccagaacaaaaattgtttgctgccctgttgattaaatgtgttgtgcagctggaactcatccagactatcgacaacattgtcttcttcccagccacaagtaagaaagaagatgcagcttagctgcagcacagagagatgcggtggactttgatgttcgcgttgatactcaagaccaaggaatgtaccgctttttaacatcacaacaactttttaagctactggactgcttattagagtcacatagatttgccaaaggcaaatccaagcccaaccttctgaagcaggagaccagcagcctggcctgtgggctgcgcattctcttccggatgtacatggatgagagccgcgttagtgcctgngaggaggtccagcagaggcttttgaatgtctgcagtgaagcactaagttacttcctcactctaacatcaganagtcatcgagaagcctggactaacttactgcttttgtttctaactaaagttctaaagataagtgataataggtttaaagctcatgcatcattctactaccctctcttatgtgaaattatgcaatttgacttgattcctgaacttcgtgctgttcttagaagattttttctgcgaatcggagtagtttttcagatatcacaaccacctgaacaggaacttggaataaacaagcaatgatgggaacttaatatttttgttggcatttacatccctctgctctttaaaaggaccgctggagctgaggtttcctacctgaaaaatgatttctctggatttgcagtgtctgagttactnggtaaagatgcttagaagtcttactcaaacttgcaacactccagtcccttttagtgctggtggattttgtgtgttatattggcctcatgttgagcagaaagcctgtttaaacagtccncagctcatgctcacgggtccttccctgtcttccacggcaggaaaagccccacgtttttggcaggtgtggaagtgaaacttacccaaagaactatagatgtaaagattgaacttctacaagaagtacaactcaggagagctgtattttgaaggataaaatgtttataattggggagtggggagagaagaagaaattattgttcatggtaaaagatatttagcaactatggtattcttattccggaagatttttggcacactncaggnctatctggagattactgggtnaatcattcccgtggaaaaatgtacagagatggcaggtcngtaattataaaaatcttaattt

SEQ ID NO: 255050 - DNA, 881 bp, Homo Sapiens
  misc_feature (552)..(592): n is a, c, g, or t
  misc_feature (626)..(626): n is a, c, g, or t
taaagatgcttagaagtcttactcaaacttgcaacactccagtcccttttagtgctggtggattttgtgtgttatattggcctcatgttgagcagaaagcctgtttaaacagtgtcagctcatgctcacgggtccttccctgtcttccacggcaggaaaagccccacgtttttggcaggtgtggaagtgaaacttacccaaagaactatagatgtaaagattgaacttctacaagaagtacaactcaggagagctgtattttgaaggataaaatgtttataattggggagtggggagagaagaagaaattattgttcatggtaaaagatatttagcaactatggtattcttattctgaagatttttgcacactcagggctatctgagattactgggtaatcatcctgtgtaaaaatgtacagagatgcaggtctgtaatataaaaatcttaaaacattatatagttcttcctgcactgttttctttattttcttattcatttgctaaatacccataatattttgtcaaatgcactaaacatttgggtggacnnnnnnnnnnnnnnnnnnnnnnnnnnnnnnnnnnnnnnnnnggtaggtggtgatttgaggctgtacatgccaganctgtgtggcgcacttcacataggaaaaaggtgaaattcgtctgcggactctgccatatctctggacttagtggcataatgatgtctttgcgaactgcctcgaagacagtggcatctctttggggggcgtggagttacctgccagatccggggaatcaaataggggggggactaacgttcgtgtagacccccaggaatctcgatgggcttaacccaccccccgggtctccaaaacgtctggtcgcctccgggacgt

SEQ ID NO: 255051 - DNA, 907 bp, Homo Sapiens
  misc_feature (29)..(29): n is a, c, g, or t
  misc_feature (31)..(31): n is a, c, g, or t
  misc_feature (43)..(43): n is a, c, g, or t
  misc_feature (47)..(47): n is a, c, g, or t
  misc_feature (50)..(51): n is a, c, g, or t
  misc_feature (55)..(55): n is a, c, g, or t
  misc_feature (66)..(66): n is a, c, g, or t
  misc_feature (70)..(71): n is a, c, g, or t
  misc_feature (86)..(86): n is a, c, g, or t
  misc_feature (101)..(102): n is a, c, g, or t
  misc_feature (114)..(115): n is a, c, g, or t
  misc_feature (141)..(141): n is a, c, g, or t
  misc_feature (194)..(194): n is a, c, g, or t
cacaggtcctgagcctgagctgggtgagnanctctgggaacantccncannccanatcacccagcntgtnnttgcccagggccagntcccgcagcgagccnnggaggccacaannccgcacaggtcccggcagttgtctgntgtcacaccgcagctctccagcttgagcgcctccagctggcagggggagtccntcaggccctggcacagcacacggacgccagcctcattgatgtcgttgttgctaaccgtgagctccttgaagtccggcttggccctgagcacggaggccaggggctcgcagctggcagccgagaggctgcaatactccagctgcagcttttccaggcggcactgggggtccaggagtccttcgcagagcagctgcaggcccgcatcccccaagaggttgtcgctgaggtgcagctcctgcagggtgggcagggtgcgtagtgtgctggacaggaccccgcagccggcccccgtcaggcagcagttctggaggctcagcttctggatcttgcaggagggggtctgcaggccctggagcacgcaatgcacgccgacatcgcccagctcgttgctgcgcaggttgagctctgccagtgcagggttgactcgaagtgcagagctgatgtccttgcaccgtgcttccgtgaggccacagtcgtccagcctgaccacttggcactgctggagcagagggaggagctcggcccatctagcgtcgctcagctcctcacactggatgtccaggctctggatgtccaggctcatggtggaggtgaagagtggcctcgggacgactggcggacggtcgcgggcctggagacccagagcgagacggcctacttcgttctcgagccagcagaacgggttgaacgtgtcgacaacccacccgccagtc

SEQ ID NO: 255052 - DNA, 958 bp, Homo Sapiens
cggtaaaataccccatagcctcaccgtgcaacccccccacaccacggaggctgggtggcgaattcggcacgagggtgacatcagacaactgccgggacctgtgcggcattgtggcctccaaggcctcgctgcgggagctggccctgggcagcaacaagctgggtgatgtgggcatggcggagctgtgcccagggctgctccaccccagctccaggctcaggaccctgtggatctgggagtgtggcatcactgccaagggctgcggggatctgtgccgtgtcctcagggccaaggagagcctgaaggagctcagcctggccggcaacgagctggggggatgagggtgcccgactgctgtgtgagaccctgctggaacctggctgccagctggagtcgctgtgggtgaagtcctgcagcttcacagccgcctgctgctcccacttcagctcagtgctggcccagaacaggtttctcctggagctacagataagcaacaacaggctggaggatgcgggcgtgcgggagctgtgccagggcctgggccagcctggctctgtgctgcgggtgctctggttggccgactgcgatgtgagtgacagcagctgcagcagcctcgccgcaaccctgttggccaaccacagcctgcgtgagctggacctcagcaacaactgcctgggggacgccggcatcctgcagctggtggagagcgtcccggcagccgggctgcctcctggagcagctggtcctgtacgacatttactggtctgaggagatggaggaccggctgcaggccctggagaaggacaagccatccctgagggtcatctcctgaggctcttcctgctgctgctctccctggacgaccggcctcgaggcaaccctggggcccaccagcccctgccatgctctcaccctgcatatcctaggtttgaagagaaacgctcagatccgcttattt

SEQ ID NO: 255053 - DNA, 985 bp, Homo Sapiens
  misc_feature (455)..(481): n is a, c, g, or t
  misc_feature (485)..(581): n is a, c, g, or t
  misc_feature (642)..(719): n is a, c, g, or t
  misc_feature (761)..(773): n is a, c, g, or t
  misc_feature (946)..(946): n is a, c, g, or t
gattggcaggtccgcacgccccgcctcttccgcttctgtggtctgatcttcctgcggctgaaccgcccggctgagccgacattgccggcgtcttggcgattcggcccgacgagctccgctttcgctacagcatggtggcctactggagacaggctggactcagctacatccgatactcccagatctgtgcaaaagcagtgagagatgcactgaagacagaattcaaagcaaatgctgagaagacttctggcagcaacgtaaaaattgtgaaagtaaagaaggaataatctaccctgactaaagcttgaaatgctacatttccaaggtgaagatgtgtgggcacatgttatggcagattgaaaaggatctcattccatgggaaaagaaaaaatcctgtcttgttcataaattgacaatgtcaataaattgaaatatggttcactgttactcttggnnnnnnnnnnnnnnnnnnnnnnnnnnnggannnnnnnnnnnnnnnnnnnnnnnnnnnnnnnnnnnnnnnnnnnnnnnnnnnnnnnnnnnnnnnnnnnnnnnnnnnnnnnnnnnnnnnnnnnnnnnnncgcgagggagccccggggcgccgcccgccgcggcccggaccccgcccgccagcaaaggcgnnnnnnnnnnnnnnnnnnnnnnnnnnnnnnnnnnnnnnnnnnnnnnnnnnnnnnnnnnnnnnnnnnnnnnnnnnnnnnactagcgccaggctttcacgtctatgtccttggcggcgccgnnnnnnnnnnnnngacgaacgacgcgcctgcgccccgcacgtcgcgctgcgttccagtaccaccaccccgcccccggctcgccactgtgcgctctctctcgcccgccgccgagaatagtaagcgccccgcgcgcacaccccccccgcctgctgtcgctcgcaatctgtctacacgcgccgcgcgcngcgcgcacagaagtcttgtgtgcgcccgatccgcgcacc

SEQ ID NO: 255054 - DNA, 1103 bp, Homo Sapiens
  misc_feature (593)..(612): n is a, c, g, or t
  misc_feature (621)..(659): n is a, c, g, or t
  misc_feature (706)..(778): n is a, c, g, or t
  misc_feature (827)..(953): n is a, c, g, or t
cggcagtaactccacggtgttaggtagcgaggcctgggtggcgaattcggcacgaggctggagctacagataagcaacaacaggctggaggatgcgggcgtgcgggagctgtgccagggcctgggccagcctggctctgtgctgcgggtgctctggttggccgactgcgatgtgagtgacagcagctgcagcagcctcgccgcaaccctgttggccaaccacagcctgcgtgagctggacctcagcaacaactgcctgggggacgccggcatcctgcagctggtggagagcgtccggcagccgggctgcctcctggagcagctggtcctgtacgacatttactggtctgaggagatggaggaccggctgcaggccctggagaaggacaagccatccctgagggtcatctcctgaggctcttcctgctgctgctctccctggacgaccggcctcgaggcaaccctggggcccaccagcccctgccatgctctcaccctgcatatcctaggtttgaagagaaacgctcagatccgcttatttctgccagtatattttggacactttataatcattaaagcactttcttggcaggnnnnnnnnnnnnnnnnnnnnctcgaggcnnnnnnnnnnnnnnnnnnnnnnnnnnnnnnnnnnnnnnncatggtcatagctgtttcctgacccagctttcttgtacaaagtggtnnnnnnnnnnnnnnnnnnnnnnnnnnnnnnnnnnnnnnnnnnnnnnnnnnnnnnnnnnnnnnnnnnnnnnnnntgcagtacccgggaatttaacccgcctaatgagcgggcttttttttgtnnnnnnnnnnnnnnnnnnnnnnnnnnnnnnnnnnnnnnnnnnnnnnnnnnnnnnnnnnnnnnnnnnnnnnnnnnnnnnnnnnnnnnnnnnnnnnnnnnnnnnnnnnnnnnnnnnnnnnnnnnnnnnngtactgggctttcagcagaaacgcaaataccaaattacctgtttcttctaaagggtaacccgtaatttaaggcccccaaccttcaaaaaaactctgtaagcaaccgccctaaataacttcgccccctggcaaaatccctggttaaccaag

SEQ ID NO: 255055 - DNA, 876 bp, Homo Sapiens
cgtagcgaggcctgggtggcgaattcggcacgagggacacgttcaacccgttctgctggctcgagaacgaagtaggccgtctcgctctgggtctccaggcccgcgaccgtccgccagtcgtcccgagaatctccggcctgtgaaactgtgaggggattcggccaagacgtcctcttccctctgcctcccacccaggccactcttcacctccaccatgagcctggacatccagagcctggacatccagtgtgaggagctgagcgacgctagatgggccgagctcctccctctgctccagcagtgccaagtggtcaggctggacgactgtggcctcacggaagcacggtgcaaggacatcagctctgcacttcgagtcaaccctgcactggcagagctcaacctgcgcagcaacgagctgggcgatgtcggcgtgcattgcgtgctccagggcctgcagaccccctcctgcaagatccagaagctgagcctccagaactgctgcctgacgggggccggctgcggggtcctgtccagcacactacgcaccctgaccaccctgcaggagctgcacctcagcgacaacctcttgggggatgcgggcctgcagctgctctgcgaaggactcctggaaccccagtgccgcctggaaaagctgcagctggagtattgcagactctcggctgccagctgcgagcccctggcctccgtgctcagggccaagacggacttcaaggagctcacgggtagcaacaaggaacatcaatgagggctggcgtcccgtgtgctgttgccacagactgaaaggactaccccctagcagcttggaggcgctcaagctggagagctgccgtgtgacatcagaccactgcgggaaca

SEQ ID NO: 255056 - DNA, 921 bp, Homo Sapiens
  misc_feature (652)..(652): n is a, c, g, or t
taagagcgagcctgggtggcgaattcggcacgaggtctgggtctccaggcccgcgaccgtccgccagtcgtcccgaggcatgaagaactcttgactgacagaaacggagggtgtgtccaaagttttgaggacggccgagcggcgctccaaaacccgtcctcacagcctcgccccgttcgcctcagctacaacaaatcatcgtcaacctgttccaccttctccagtctggtagcaaaaaggggtgtctcagaatctccggcctgtgaaactgtgaggggattcggccaagacgtcctcttccctctgcctcccacccaggccactcttcacctccaccatgagcctggacatccagagcctggacatccagtgtgaggagctgagcgacgctagatggggccgagctcctccctctgctccagcagtgccaagtggtcaggctggacgactgtggccttcacggaagcacggtgcaaggacatcagctctgcacttcgagtcaaccctgcactggcagagctcaacctgcgcagcaacgagctgggcgatgtcggcgtgcattgcgtgctccagggcctgcagaccccctcctgcaagatccagaagctgagcctccagaactgtggcctgaacgggggccggctggcggggnccctgtccagcaaccctacgcaccctgccccacccggaaggaagctgcaccctcagcggacaaccctcttgcggggaatgcggggccttgcaagctggctctggcgaaaggaactccctggaaaccccccaagggccgcccttggaaaaaacgtgaggcacttggaagtttttggcgagaccctcttcggggactggcgagaactggacaagccccccttggcccctcccgggggcttcaagggggacaacacgccggggaccttggag

SEQ ID NO: 255057 - DNA, 1024 bp, Homo Sapiens
  misc_feature (1000)..(1000): n is a, c, g, or t
aattcggacgagggaacgttcacccgttctgctggctcgagaacgaagtaggccgtctcgctctgggtctccaggcccgcgaccgtccgccagtcgtcccgagaatctccggcctgtgaaactgtgaggggattcggccaagacgtcctcttccctctgcctcccacccaggccactcttcacctccaccatgagcctggacatccagagcctggacatccagtgtgaggagctgagcgacgctagatgggccgagctcctccctctgctccagcagtgccaagtggtcaggctggacgactgtggcctcacggaagcacggtgcaaggacatcagctctgcacttcgagtcaaccctgcactggcagagctcaacctgcgcagcaacgagctgggcgatgtcggcgtgcattgcgtgctccagggcctgcagaccccctcctgcaagatccagaagctgagcctccagaactgctgcctgacgggggccggctgcggggtcctgtccagcacactacgcaccctgcccaccctgcaggagctgcacctcagcgacaacctcttgggggatgcgggcctgcagctgctctgcgaaggactcctggacccccagtgccgcctggaaaaagctgcagctggagtattgcagcctctcggctgccagctgcgagcccctggccctccgggctcagggcccagcccggacttcaagggagctcaccgttagcaacaacgacatcaatggaggctgggcgtcccgggtgctgtgccaagggcctgaaagaactcccccctgccagctggaaggcgctcaaactgggaaaacctgcgggggtgaattcaataaacctggcggggacacggtggcggcattggtgggccctcaaagggccccgcttgcgggggaactgggtccccggggcatgaacaaaagtctggcgggcgatgagggtcatgctgcgtgagccctgcggccacacgaagagggtaacagacatgnctacgcgacgcccctgacggtgag

SEQ ID NO: 255058 - DNA, 1180 bp, Homo Sapiens
  misc_feature (159)..(168): n is a, c, g, or t
  misc_feature (268)..(277): n is a, c, g, or t
  misc_feature (411)..(509): n is a, c, g, or t
  misc_feature (565)..(575): n is a, c, g, or t
ggcccgccgtttttcccccgcgggggaaatattattttcccaaggggccaagggtctgggaaacccccggggaatttaaggttcaaaaaagccgttttggaggggttccagttggggaaaaaggttaataattttcaaccgttcttggaagaggtgcannnnnnnnnntaaattattttgaggtcccttggattccctttgatagatcccgttaaggcctccgaactccctttgggtttgtttaaaaacctcgggtgcccccgggcgnnnnnnnnnngtgggaattccagcccttttcctgggccgggttttcttgggaacagctttggccctgttccctttccttctgggcccgcgccccaaacgaaaggtttagaaaaattttcggggggcgaggcggccggcaagggnnnnnnnnnnnnnnnnnnnnnnnnnnnnnnnnnnnnnnnnnnnnnnnnnnnnnnnnnnnnnnnnnnnnnnnnnnnnnnnnnnnnnnnnnnnnnnnnnnnaacagtgaaccatatttcaatttattgacattgtcaatttatgaacaagacaggannnnnnnnnnncccatggaatgagatccttttcaatctgccataacatgtgcccacacatcttcaccttggaaatgtagcatttcaagctttagtcagggtctaggaggaaaaagaaaatgcaagttgctggctagttctctgtgttttcttaaaaactcaacatgaatataagaaataacttccttatagtgaactgtataactgtggctatcattcacattgccgtggctcagatgtaaaaagtgctggttcaagtacacaggcttagtcaagcaggcattttcctgctgagtaaaagtaaacactctcccagaataaagaaactactttgcctttaaaagacactaacatctccttgtgctaatgaggtggggtctgtaaccctgaagggcataacagagaggggctaatgctttgtttaaggggatcggacactacttcctgacccccaggactttgcaaaatctcagcattagatgcagtctggcagctctgagccgagtgaggctaaatgattttctgttagcttactgttaaaacaaaacaacccaacataaaaccaggtctcattactcagaattatgagattagacagagagcccctagaaaaaggt

SEQ ID NO: 255059 - DNA, 584 bp, Homo Sapiens
ttgtgtatgaacgcagcggcggacctgtgaggggatccgacttgccggcagaacttacgctgcgggaccccgggcactgttgctgctgcgggagactgtgggctgtttagtgccatgcaccctttacagtgtgtcctccaagtgcagaggtctctggggtggggaccattggcctctgtgtcttggctgtcgctgaggatgtgcagggcacacagcagtctctctagtaccatgtgtcccagtccagagaggcaggaggatggagctcggaaggatttcagctccaggctggctgctggaccgacttttcaacattttttaaaaagtgcctcagctcctcaggagaagctgtcttcagaagtggaagacccacctccctatctcatgatggatgaacttcttggaaggcagagaaaagtctacctcgagacctatggctgccagatgaatgtgaatgacacagagatagcctggtccatcttacagaagagtggctacctgcggaccagtaacctccaagaagcagatgtgattctccttgtcacatgctctatcagggagaaagctgagcagaccatctggaa

SEQ ID NO: 255060 - DNA, 1670 bp, Homo Sapiens
  misc_feature (1502)..(1502): n is a, c, g, or t
  misc_feature (1511)..(1511): n is a, c, g, or t
  misc_feature (1516)..(1517): n is a, c, g, or t
  misc_feature (1526)..(1526): n is a, c, g, or t
  misc_feature (1543)..(1543): n is a, c, g, or t
gggaacgcagcggcggacctgtgaggggatccgacttgccggcagaacttacgctgcgggaccccgggcactgttgctgctgcgggaggcagatgtgattctccttgtcacgtgctctatcagggagaaggctgagcagaccatctggaaccgtttacatcagcttaaagccttgaagacaaggcggccccgctcccgggttcctctgaggattggaattctaggctgcatggctgagaggttgaaggaggagattctcaacagagagaaaatggtagatattttggctggtcctgatgcctaccgggaccttccccggctgctggctgttgctgagtcgggccagcaagctgccaacgtgctgctctctctggacgagacctatgctgatgtcatgccagtccagacaagcgccagtgccacgtctgcctttgtgtcaatcatgcgaggctgtgacaacatgtgtagctactgcattgttcctttcaccccggggcagggagaggagtcggcctattgcctccattctagaggaagtgaagaagctttctgagcaggggctgaaagaagtgacacttcttggtcagaatgttaatagttttcgggacaattcggaggtccagttcaacagtgcagtgcctaccaatctcagtcgtggctttaccaccaactataaaaccaagcaaggaggacttcgttttgctcatcttctggatcaggtctccagagtagatcctgaaatgaggatccgttttacctctccccaccccaaggattttcctgatgaggttctgcagctgattcatgagagagataacatctgtaaacagatccacctgccagcccagagtggaagcagccgtgtgttggaggccatgcggaggggatattcaagagaagcttatgtggagttagttcaccatattagagaatctattccaggtgtgagcctcagcagcgatttcattgctggcttttgtggtgagacggaggaagatcacgtccagacagtctctttgctccgggaagttcagtacaacatgggcttcctctttgcctacagcatgagacagaagacacgggcatatcataggctgaaggatgatgtcccggaagaggtaaaattaaggcgtttggaggaactcatcactatcttccgagaagaagcaacaaaagccaatcagaccctctgtgggctgtacccagttggtggctagtggaagggctcagtaaacgctctgccactgacctgtgtggcaggaatgatggaaaccttaaggtgatcttccctgatgcagagatggaggatgtcaataaccctgggctcagggtcagagcccagcctggggactatgtgctggtgaagatcacctcagccagttctcagacacttaggggacatgttctctgcaggaccactctgagggactcttctgcatattgctgacctgagaagatggcctcagagctgacttgggcaatccctccccaacaggaagggngagacattngcctnngccactgangaaacagggccatgaanggtgggagataaagctgcaagggggcgaaaacaccttttatgtcagtgggaaaacgtgttctctttaaagctggctatgtgaaacactttttacagtcaattaatttaccttaaactaagggttaaa

SEQ ID NO: 255061 - DNA, 617 bp, Homo Sapiens
ataatctggatgtcctggatgactatgctacacatattcctatagcagtgctctgatctgaaacaagcatcgattctttgggatcctctatctgctatgtagtgaagacagcacagattgaaagtgcgtaagagacacatactatgcttgatataaacaacagcctttgacatactgtgtaacactagaagagactattaaagaaaggcatacttagttaaataaatcagtatgacatgcacatactgcatcttgtcctggataatgatcgcatcagagacacagacaattagaattattccctagtatgaagcaatcatatgccatcttactaggctatatatatcagcctatcagatgacattcgagaactcaataggcgagccgctcactaaacaccactgagggacatctcattctgacgtaaaatgacacttcattatcaagtataaccctgtatgagagatgctataatgaaaggtcaggcgctatggttcatgcctgcgaagtcgaactattagaagcatatgcagagatatcatgctccgtcgctgccatgagatatgcttgaggatcatgacgctccgtttctacttggattcatgcatatccggccc

SEQ ID NO: 255062 - DNA, 1010 bp, Homo Sapiens
  misc_feature (7)..(7): n is a, c, g, or t
  misc_feature (20)..(20): n is a, c, g, or t
  misc_feature (24)..(24): n is a, c, g, or t
  misc_feature (26)..(26): n is a, c, g, or t
  misc_feature (30)..(30): n is a, c, g, or t
  misc_feature (40)..(40): n is a, c, g, or t
  misc_feature (42)..(42): n is a, c, g, or t
  misc_feature (44)..(44): n is a, c, g, or t
  misc_feature (46)..(46): n is a, c, g, or t
  misc_feature (53)..(53): n is a, c, g, or t
  misc_feature (55)..(55): n is a, c, g, or t
  misc_feature (75)..(75): n is a, c, g, or t
  misc_feature (79)..(79): n is a, c, g, or t
  misc_feature (84)..(84): n is a, c, g, or t
  misc_feature (88)..(88): n is a, c, g, or t
  misc_feature (97)..(97): n is a, c, g, or t
  misc_feature (120)..(120): n is a, c, g, or t
  misc_feature (134)..(134): n is a, c, g, or t
  misc_feature (207)..(207): n is a, c, g, or t
  misc_feature (252)..(252): n is a, c, g, or t
  misc_feature (402)..(402): n is a, c, g, or t
  misc_feature (413)..(466): n is a, c, g, or t
  misc_feature (470)..(480): n is a, c, g, or t
  misc_feature (855)..(880): n is a, c, g, or t
  misc_feature (939)..(939): n is a, c, g, or t
  misc_feature (948)..(948): n is a, c, g, or t
  misc_feature (972)..(972): n is a, c, g, or t
  misc_feature (995)..(1000): n is a, c, g, or t
gggtggngcccatcggcccncacncntggntcctttttgntntntngtttccngntgatgatcgctgccacctgngcanccccncccnccaacgagnagagaatgtgaagctggcccatntaagcacaaggagnagatctgagtgggcagggccatctccccactccgctgccctggccttgagcatccactgactgtccaagggcnactcccaagaagcccccttcacgatccaccctttcaggctaaggngctccctatctaccctcaccccacgagacagccccttcaggatttccactggaccttgcccaaatagcaccttaggccactgcccctaagctggggtggaacctgaatttgggtcaatacatccttttgtctcccaagggaagagaatgngcagcaggtannnnnnnnnnnnnnnnnnnnnnnnnnnnnnnnnnnnnnnnnnnnnnnnnnnnnntgtnnnnnnnnnnnttcccagatattcagggcaagggaccagtcggaagggattctggctattgggggagcccagagacaggggaaggcagcctgtccatctgtgcataaggagaggaaagttccagggtgtgtatgtttcaggggcttcacatggaggagctgcagatagatatgtgtttctgtgtatgtgtatgtctgcctttttttctaagtgggggcttctacaggcttttgggaagtagggtggatgtgggtagggctgggaggagggggccacagcttaggtttggagctctggatgtacatacataagtaggagcagggggacgagtttctgtcataatgcacgcatgaacggtggagcgaagtcaggtcataagtttcatnnnnnnnnnnnnnnnnnnnnnnnnnnaatgtatgtagcagatgttacagtcttagggatccgggatgggagaccccactttaganagggtcgtnactcctttaatcctctactcaacnaatgtactcttttacttttatannnnnnaaaataaaat

SEQ ID NO: 255063 - DNA, 1787 bp, Homo Sapiens
  misc_feature (1203)..(1270): n is a, c, g, or t
accgcctcccgccacccctgcccgcccgacagcgccgccgcctgccccgccatgggtcgacagaaggagctggtgtcccgctgcggggagatgctccacatccgctaccggctgctccgacaggcgctggccgagtgcctggggaccctcatcctcgtgatgtttggctgtggctccgtggcccaggttgtgctcagccggggcacccacggtggtttcctcaccatcaacctggcctttggctttgctgtcactctgggcatcctcatcgctggccaggtctctggggcccacctgaaccctgccgtgacctttgccatgtgcttcctggctcgtgagccctggatcaagctgcccatctacaccctggcacagacgctgggagccttcttgggtgctggaatagtttttgggctgtattatgatgcaatctggcacttcgccgacaaccagctttttgtttcgggccccaatggcacagccggcatctttgctacctacccctctggacacttggatatgatcaatggcttctttgaccagttcataggcacagcctcccttatcgtgtgtgtgctggccattgttgacccctacaacaaccccgtcccccgaggcctggaggccttcaccgtgggcctggtggtcctggtcattggcacctccatgggcttcaactccggctatgccgtcaaccctgcccgggactttggcccccgcctttttacagcccttgcgggctgggggctctgcagtcttcacgaccggccagcattggtggtgggtgcccatcgtgtccccactcctgggctccattgcgggtgtcttcgtgtaccagctgatgatcggctgccacctggagcagcccccaccctccaacgaggaagagaatgtgaagctggcccatgtgaagcacaaggagcagatctgagtgggcaggggccatctccccactccgctgccctggccttgagcatccactgactgtccaagggccactcccaagaagcccccttcacgatccaccctttcaggctaaggagctccctatctaccctcaccccacgagacagccccttcaggatttccactggaccttgcccaaatagcaccttaggccactgcccctaagctggggtggaaccggaatttgggtcaatacatccttttgtctcccaagggaagagaatgggcagcaggtannnnnnnnnnnnnnnnnnnnnnnnnnnnnnnnnnnnnnnnnnnnnnnnnnnnnnnnnnnnnnnnnnnnttcccagatattcagggcaagggaccagtcggaagggattctggctattgggggagcccagagacaggggaaggcagcctgtccatctgtgcataaggagaggaaagttccagggtgtgtatgtttcaggggcttcacatggaggagctgcagatagatatgtgtttctgtgtatgtgtatgtctgcctttttttctaagtgggggcttctacaggcttttgggaagtagggtggatgtgggtagggctgggaggagggggccacagcttaggtttggagctctggatgtacatacataagtaggagcagtgggacgtgtttctgtcataatgcaggcatgaagggtggagtgaagtcaggtcataagtttcatgtttgcttttgttttgttttgcttttaatgtatgtagcagatgttacagtcttagggatccgggatgggagaccccactttagaaagggtcgtcactcctttaatcctctactcaacaatgtactcttttacttttatattaa

SEQ ID NO: 255064 - DNA, 374 bp, Homo Sapiens
agtgaatggaatcgtgactctctcccgaacaaatatgtacctgagcaatggcagactgtgaaagagggtcgtggctgtagactggttgtacatgactcgaccataagcatgggtgacaattataaccttatgccctctttcaatcaggcactgagagagctggtaaatgtggctttccacgcctcccatatttgggtagaaaaagtcagataccatgcatatattatgggtacgggttctacatgtgtaaagacttccagggctaacccgagagagtgtagctgaggcacggtggccattcccagctcctcctctacaggccatgctgagacggtttagacatcagttcttagagcaacccagttaagagatgt

SEQ ID NO: 255065 - DNA, 775 bp, Homo Sapiens
  misc_feature (37)..(37): n is a, c, g, or t
  misc_feature (63)..(63): n is a, c, g, or t
  misc_feature (69)..(69): n is a, c, g, or t
  misc_feature (73)..(73): n is a, c, g, or t
aatgaatgagtgacccccgcacaggcgtcccaggccntgacttgaccaaggaaatcaaagtangttacnaccnctggcttcacatgaacctcaagactataatctaacggtatctaccatctccttactctcttaggaagtaaccaaattacagctaaattaatctcacaaagtgcaagaaaggctctgctagagtagtgtttgttctgtggcatagaaagaggagcatgcctcctccggcactggcataagaggccccacatgaagaactagctgcaagacagtgatccattaggtctgccaaaaagcagggggactcaaggttcagcctagaaagaggggtccctgccaagtctggcttttacctgtacccaggtcccaaacaaaccttgggtcccctaactgataaggctggagcacagcaccagtcatcaacagggccaaagtcgtcttagcgagtcagtgagcacctctaagccatgatttgtcaatgctcacatggatagtggtaaaggaataaagaagcctgggttttggaacagtacaaacattctttacctagtaagcagtgatcaaagttcttacctagggtaaatgatgaaaaaaataggtaatgaggtccccatacacccgtgcctgaagaatattagtcctaactttaaagcagtacaaaatggcttcttccacacaacaagggcaagctttatactaatgtttctcaaaaaccaattacatctccagctctagcctcaatttaataggttttttactttac

SEQ ID NO: 255066 - DNA, 832 bp, Homo Sapiens
  misc_feature (40)..(40): n is a, c, g, or t
  misc_feature (113)..(113): n is a, c, g, or t
  misc_feature (217)..(217): n is a, c, g, or t
  misc_feature (226)..(226): n is a, c, g, or t
tgactcgctaagacgactttggccctgttgatgactggtnctgtgtccagccttatcagttaggggacccaaggtttgtttgggacctgggtacaggtaaaagccagacttgnagggacccctctttctaggctgaaccttgagtccccctgctttttggcagacctaatggatcactgtcttgcagctagttcttcatgtggggcctcttaggcangtgccggangaggcatgctcctctttctatgccacagaacaaacactactctagcagagcctttcttgcactttaaagtgagattaactttagctgtaatttggttaaaaacttcctaagagagaaaattaagtctactgatttggtataggtaaatggacattaaacttttttaaagtaaaggagatggtagataccgttagattatagtcttgaggttcatgtgaagccagtggtgttaacttactttgatttccttgttcaggtcagggcctggaacgcctgtgcggggaggtcactcaattcaaaattttctgtatgaaagcatttttcaccaaaatgagcctcatccctttatgcaacacataaccttactgagggagggaaatacagaagccacctttttatttctcttcactgtgtacaagttcacttgttgtcttgaacactgtctcaaatacctgctttttgttttggatagtaccttgtctgtataagaagctggcctttccatagagaggccctggagtctaaaattatgagaacaattaatttatttgtgtcttctattatgatctcgttttgacaataaaaatccttactactttctcaaaa

SEQ ID NO: 255067 - DNA, 395 bp, Homo Sapiens
gagggggtgaggggtgacacccttggggagggggcctgcaaagggcactgcctgtggccacgtggtgtctgtgggaattggtcctggggactttgatgggtgtttgcggccccagttgccgccctgctccctcttccagggctcctggcttgggccccccgacccccctgctcagctcgggaaaatccccgtgcggctccagccccgggtcacgctcaggagcgatgagaggggcgccctggccacgcttcaggaaagcctgtgtctgcgcgcggggcaaggggctccacgacaaaaggacaagatttgacttaaattaagtttttcccttgaggatattttcattttctttaaaagaatataattttcttctgaaatacaaagcatcattattc

SEQ ID NO: 255068 - DNA, 715 bp, Homo Sapiens
  misc_feature (54)..(54): n is a, c, g, or t
  misc_feature (91)..(91): n is a, c, g, or t
  misc_feature (289)..(289): n is a, c, g, or t
  misc_feature (323)..(323): n is a, c, g, or t
atcgtccaagtagagaacaaccccaattaaagttcatttgctgtaattaaacancaaatatatgcttaagatctagagagacagacttaanatgcatagttagctacatgacttgggagctgattatctggtttctagattatgaagtcccgtgtatttgacttctgattaatctctccaatcagttatgagaaaaggaaaggtaggaaaaagacacagggaatatcttagaaattattagctgctcttacaagagtttaggtcagagatttaagagagatacaaccgncggctaaatgtagacttcattaaaaattaccaanacacagttgtatgctgatcatagagttttcaactatacatagaaccatcacattgtgttgaaataatactgtggtacacatctatattcttatatgcaaaggccagaaactgtctctggttgcacctatttacatctgtaaaagatgaagcagtagacctttctagaaagctggaaagggtatgtaagattatatattcacacacctatccatttattttacgaagactaactcttagaagactactcaagcagttacttaagtcaagctggtaattgattaggaagtaggcataagcatttaggccagaaaaaattggtcctatcaatatgagtattttactatgaatacattattttctatgaaaatatcttatgtatcttaggtaagtc

SEQ ID NO: 255069 - DNA, 478 bp, Homo Sapiens; identical to SEQ ID NO: 15163
  misc_feature (451)..(451): n is a, c, g, or t

SEQ ID NO: 255070 - DNA, 1307 bp, Homo Sapiens
aactagtggatcccccgggctgcaggattcggcacgaggacaaaggttgtctcaagtttgttgctcaaaccgagttctggagaacgccatcagctcgctgcttaaaattaaaccacaggttccattatgggtcgacttgatgggaaagtcatcatcctgacggccgctgctcaggggattggccaagcagctgccttagcttttgcaagagaaggtgccaaagtcatagccacagacattaatgagtccaaacttcaggaactggaaaagtacccgggtattcaaactcgtgtccttgatgtcacaaagaagaaacaaattgatcagtttgccagtgaagttgagagacttgatgttctctttaatgttgctggttttgtccatcatggaactgtcctggattgtgaggagaaagactgggacttctcgatgaatctcaatgtgcgcagcatgtacctgatgatcaaggcattccttcctaaaatgcttgctcagaaatctggcaatattatcaacatgtcttctgtggcttccagcgtcaaaggtgggtctgtctccttccgaggactgcgatgctcatacacgcacatcattaagagctctgcgtttgggaacaggcatagcagagattataatttcaagtattgaaatgatttcaaaactgcttttttcaaaattgggattaaggtccttaaccacagatcttttgctctcgatgtgagccagtggtaaaattaaattaaaatgtggggtatttttgccctcccttttattctttctaatggacatggaaatgaacatcaaactgggagaaagaaccatttaacatttaattaatttaaaatagtgtattgagcaccggtatgtgctctggccataaaagaattcacagtccaaaactaggagcaaggcagcaaacatcatcttctccagtgtgatgatatataacagaggtttgtacaaagcgctgtcaaaatacagggaaataactgcctgtgagtttgtggaatgcttcacaaagacagttgatctgagccatcagcaagaagtcaagttgaaggacaaggacagcagtgcaaaatgtggattatgtcacaatctggcatagttggatctgtgagtttaaaatgaaatagttactgctgagataccatttcttctctttgcaaggatacacatattcaacatacacaagagaggaatgtaaagaagtgcctaggcctcctgttttattgttttgttttgttattaatcttccttttcctttgggatctgcccaagggttttgggcaccggtgatggggacc

SEQ ID NO: 255071 - DNA, 739 bp, Homo Sapiens
gggaactgtcctggattgtgaggagaaagactggaacttctcgaggaatctcaatgtgcgcagcatgtacctgatgatcaaggcatcccttcctaaaatgcttgctcagaaatctggcaatattatcaacatgtcttctgtggcttccagcgtcaaaggagttgtgaacagatgtgtgtacagcacaaccaaggcagccgtgattggcctcacaaaatctgtggctgcagatttcatccagcagggcatcaggtgcaactgtgtgtgcccaggaacagttgatacgccatctctacaagaaagaatacaagccagaggaaatcctgaagaggcacggaatgatttcctgaagagacaaaagacgggaagattcgcaactgcagaagaaatagccatgctctgcgtgtatttggcttctgatgaatctgcttatgtaactggtaaccctgtcatcattgatggaggctggagcttgtgattttaggatctccatggtgggaaggaaggcaggcccttcctatccacagtgaacctggttacgaagaaaactcaccaatcatctccttcctgttaatcacatgttaatgaaaataagctctttttaatgatgtcactgtttgcaagagtctgattctttaagtatattaatctctttgtaatctcttctgaaatcattgtaaagaaataaaaatattgaactcatagcaggagaatagtttttaaaataaatctcgatttg

SEQ ID NO: 255072 - DNA, 716 bp, Homo Sapiens
  misc_feature (13)..(13): n is a, c, g, or t
  misc_feature (383)..(383): n is a, c, g, or t
  misc_feature (638)..(638): n is a, c, g, or t
attcggcacaggngagaactccatcagctcgctgcttaaaattaaaccacaggttccattatgggtcgacttgatgggaaagtcatcatcctgacggccgctgctcaggggattggccaagcagctgccttagcttttgcaagagaaggtgccaaagtcatagccacagacattaatgagtccaaacttcaggaactggaaaagtacccgggtattcaaactcgtgtccttgatgtcacaaagaagaaacaaattgatcagtttgccagtgaagttgagagacttgatgttctctttaatgttgctggttttgtccatcatggaactgtcctggattgtgaggagaaagactgggacttctcgatgaatctcaatgtgcgcanatgttacctgatgatcaaggcattccttcctaaaatgcttgctcagaaatctggcaatattatcaacatgtcttctgtggcttccagcgtcaaaggagttgtgaacagatgtgtgtacagcacaaccaagggcagccgtgattggcctcacaaaatctgtgggctgcagatttcattccaggcaggggcattcaggtgcaacttgtgtgtggcccagggaacagtttgatacggccatcttttacaaggaaaggnttacaaggccaggagggaaattcctggaaggagggcacgggaattgattttcccggaagggggacaaaaagaacgggg

SEQ ID NO: 255073 - DNA, 787 bp, Homo Sapiens
  misc_feature (617)..(618): n is a, c, g, or t
  misc_feature (683)..(733): n is a, c, g, or t
atggggtagagattgggttgtggcaaagaatagaggagccaggacacgtccgactgagagctgagatctgagcgaaaccttgaaaggtggtgtgagagtcagccaagtggatatttgggggaaaagttttccaagcaaagggaacagtgagagtcaaggtctccttggtgtgtggtactgcaaggagccctctgtggctgacgcggggtgaaccaagatgagagtaagtaggaaatgaagccaaagcatagtggtagccatatcgtggagggcatatgggccagttaaggactttagggagcctttgaaaggtttgagcagaggagggatataatcaacttccatttcaaatggagcccccaatctgctctgtgcaacagacactgggaagtgggaggtaggcatagaatcagaaaactaagagagggtatacagtaagctattgcaaaagatggcagcgattccatcgggatagcagtggggtggcagagaaatggaatggttagaatttgaatccgtttggaaggtagaccatcaaataggcagatcaaatatgagacaaacagaggagataaatatttctaattccagcttctagaagcttatgcagattattnntcaacacaacaatcctcatattttgatggttttctgaagtagttttttaaatattgaaatgaggnnnnnnnnnnnnnnnnnnnnnnnnnnnnnnnnnnnnnnnnnnnnnnnnnnncctgcaaactgtggcccttggccagcgacagaggaggaagtcaaagtttccacc

SEQ ID NO: 255074 - DNA, 363 bp, Homo Sapiens
ccgcgcgcggacctgcagccatggcagtcaccgaccaggcagcccgcaagaaggagcgcgtcctctgcctgttggacgtggacgggaccctcacgccggctcgccagatcgcagtggagggcggctctgactactgtaagaccgctgagcagctgactgacggagatgaagtcattgagaagattgattatgtgcttgccgagaacgggacggtgcaggataagcacggacgactgctctacaagcagaccatccagaaccacctgggcaaggagctgcagcaggacttgatcaactactgactcagctacatggccctgatcaggctgcccaagaagcgtggaaccttcatcggttccggtg

SEQ ID NO: 255075 - DNA, 1957 bp, Homo Sapiens
  misc_feature (135)..(135): n is a, c, g, or t
  misc_feature (163)..(163): n is a, c, g, or t
  misc_feature (1382)..(1452): n is a, c, g, or t
  misc_feature (1455)..(1458): n is a, c, g, or t
atggcagtcaccgcccaggcagcccgcagaaggagcgcgtcctctgcctgtttgacgtggacgggaccctcacgccggctcgccagaaaattgaccctgaggtggccgccttcctgcagaagctacgaagtagangtgcagatcggtgtggtgggcggctctnactactgtaagatcgctgagcagctgggtgacggggatgaagtcattgagaagtttgattatgtgtttgccgagaacgggacggtgcagtataagcacggacgactgctctccaagcagaccatccagaaccacctgggggaggagctgctgcaggacttgatcaacttctgcctcagctacatggccctgctcaggctgcccaagaagcggtgaggtcccaccagcctggtctccagaacctggggcctgagggaggagaagtgtgggtccctcagagggaacctggagatacttgggcccctgattttttgcggggagtgtggattcttgtcccctttgaagtcctaggaggctggggtcccaggtggggctagatttgaattcagggccgttctggttctctctggctccccgccctccctcaccaccagtggaaccttcatcgagttcccgaatggcatgctgaacatctcgcccatcggccggagctgcaccctggaggagaggatcgagttctccgaactggacaagaaagagaagatccgggagaagttcgtggaagccctgaaatttgacgtcttccccgagggctgggacaagcgctactgcctggatagcctggaccaggacagcttcgacaccatccacttctttgggaacgagactagccctggtgggaacgactttgagatctttgccgacccccggactgttggccacagcgtggtgtctcctcaggacacggtgcagcgatgccgggagattttcttcccagagacagctcatgaggcgtgaccggggcccacatctgtgtgtcgtgacttctgaagagtttggcctaggcctaaagagaggtcctggtgttggatagatgccagggcccctcctctggcccaggacgcctgctgcaagcccacccagatggggccagagtctgtgtggacaaccgtccccagccagtctgctcctagtggcactggcttcgtcctcccagggcccagagtgttccccatgctccacctggtggcccaggccacagctgctgcttgtatttcggtacagaagaggtttctttctgcaccaggaggaggcgtgctcaagtatcggtacgagatctagcctgccctgcctgcctgccctgggcgatgaggtacggtggggaaggtgcctattttagagaactttgtcacagtattaaagttcccagaacaaagtannnnnnnnnnnnnnnnnnnnnnnnnnnnnnnnnnnnnnnnnnnnnnnnnnnnnnnnnnnnnnnnnnnnnnnttnnnnccttgccggccgccctcggcaccctcaaaaagcttctctaaaccatttctttgggcccggcgggccccagtaggataggggaaactgtggccttacccgtgttccctagagaaacccgtggaaaggaactgagggctgtggatctcccaccattaaaaaaccgccccgggaggaaccgcaagcggttcttgaaacaatccccaaagtgagagttcctgagggcgctttactgtgaatcctttccaacgagaaagccccacgcgaagcctcgatatatcaaatttaccccccccggcctctgccaatttcattggaaggaacgtgtgggggaatttcctttaggggccttcccctggcccaaatttgggaacggcccctccccaagacgggccttggtagaaacccccgaattcgcccaacggggaattccggcccccttgggcgcccctttgcgttttataatttgttggccccttggggtggaaaacccggggggggc

SEQ ID NO: 255076 - DNA, 561 bp, Homo Sapiens
cttcgggactccgccccgcgcgcggacctgcagccatggcagtcaccgcccaggcagcccgcaggaaggagcgcgtcctctgcctgtttgacgtggacgggaccctcacgccggctcgccagaaaattgaccctgaggtggccgccttcctgcagaagctacgaagtagagtgcagatcggtgtggtgggcggctctgactactgtaagatcgctgagcagctgggtgacggggatgaagtcattgagaagtttgattatgtgtttgccgagaacgggacggtgcagtataagcacggacgactgctctccaagcagaccatccagaaccacctgggggaggagctgctgcaggacttgatcaacttctgcctcagctacatggccctgctcaggctgcccaagaagcgtggaaccttcatcgagttccggaatggcatgctgaacatctcgcccatcggccggagctgcaccctggaggagaggatcgagttctccgaactggacaagaaagagaagatccgggagaagttcgtggaagccctgaaaacagagttgctag

SEQ ID NO: 255077 - DNA, 722 bp, Homo Sapiens
  misc_feature (21)..(21): n is a, c, g, or t
  misc_feature (34)..(34): n is a, c, g, or t
cccacaaaaaggccaagctgntcaccccagggancatactggcacattccttctgcggcttgatactatctgttaattcccttcagccagggaccagtcactttagctattagcctgcaggtcatttagaagatttaagtaaatatctgatttgaggaacctgggataagagtccttttccataagagtatatatgactttttgtgcttcatcaaaacacgtgggggttggtgctttaatcttcttggctgtagattctcgagtgcggaagtcaatattgatttgtttagcagcatctgaatgcacaaatgctttatatatctcttctgctttacagggcaaaagatcagactctgttttcttatagtcttcacaagccagccagaactcaatattctcctcactgaattcagactttaggaaacttccaaagacattttgaccagtttggttggcaagaagtttttccagagattgagaccattgcattacttcagcagcagaaagtacatccttggacttggaagatttcattccagattccagatgtgggatcatagatctcaggtatgctttcatatccattccaaaagtctttggcctccttttttgcattttgtcgtctagaagtgaatgagtggttcctttcaattcctttgggttagcagagaagaacattcctggcattttgtctaactttggagtggagatggctgctgcgc

SEQ ID NO: 255078 - DNA, 1497 bp, Homo Sapiens
  misc_feature (1028)..(1028): n is a, c, g, or t
  misc_feature (1416)..(1444): n is a, c, g, or t
  misc_feature (1462)..(1462): n is a, c, g, or t
  misc_feature (1467)..(1467): n is a, c, g, or t
aaacggcgtggccgccatcttgcttgtgcccccgcttcgcgcgcgctccgttctccgtgacgcacacttccccctcccctccgccgcgcctgggcctctgcattgcccgactccgtaggagcgcgggggcggctcctgctcttcctggactcctgagcagagttgtcgagatgtccacagaaggaggatttggtggtactagcagcagtgatgcccagcaaagcctacagtcgttctggcctcgggtcatggaagaaatccggaatttaacagtgaaagacttccgagtgcaggaactcccactggctcgtattaagaagattatgaaactggatgaagatgtgaagatgatcagtgcagaagcgcctgtactctttgccaaggcagcccagatttttatcacagagttgactcttcgagcctggattcacacagaagataacaagcgccggactctacagagaaatgatatcgccatggcaattacaaaatttgatcagtttgattttctcatcgatattgttccaagagatgaactgaaacctccaaagcgtcaggaggaggtgcgccagtctgtaactcctgccgagccagtccagtactatttcacgctggctcagcaacccaccgctgtccaagtccagggccagcagcaaggccagcagaccaccagctccacgaccaccatccagcctgggcagatcatcatcgcacagcctcagcagggccagaccacacctgtgacaatgcaggttggagaaggtcagcaggtgcagattgtccaggctcagccacagggtcaagcccaacaggcccagagtggcaccggacagaccacgcaggtgaggcagcagatcatcactaacacaggagagacccagcagatcccggtgcagctgaatgccggccagccgcagtatatccgcttagcccagcctgtatcaggcacccaagttgtgcagggacagatccagacactcgccaccaatgcccaacaggggcaaagaaatgcaagtcaggggaagccncgaaggtgcctgaaagaaaccttacagataacacagacagaggtccagcaaggacagcagcagttcagccagttcacagatggacagcagctctaccagatccagcaagtcaccatgcctgcgggccaggacctcgcccagcccatgttcatccagtcagccaaccagccctccgacgggcaggccccccaggtgaccggcgactgagggcctgagctggcaaggccaaggacacccaacacaatttttgccatacagccccaggcaatgggcacagccttcctccccagaggacccggccgacctcagcgcctcctgcaggctaggacactggtgcactacaccccatgcctgggggccgagattctccagcagaaagatgcaatannnnnnnnnnnnnnnnnnnnnnnnnnnnnctctaaggaatcaatatnttcanatatgttgagtgtgtgtccaatgctatgaa

SEQ ID NO: 255079 - DNA, 822 bp, Homo Sapiens
  misc_feature (138)..(227): n is a, c, g, or t
ggtaccaggaacttcgtcacctccttgaatgctggcggttcatttcatgatcagtgttaagcattttcctccatgggaaggaagcatgggatatagaaaagcgaagggctgtcctttacaaattctggttctgcaacnnnnnnnnnnnnnnnnnnnnnnnnnnnnnnnnnnnnnnnnnnnnnnnnnnnnnnnnnnnnnnnnnnnnnnnnnnnnnnnnnnnnnnnnnnatctaccttcaggattgctgacagacagaatttgaaataaaatatgcaagttagctaatacaaaaagtagatgatccaaaaatggtagccactcacccttcacaaactgaagtccatggaccacggaagtcgagaattaatgtacacctgtatcatgtgtaggaaaccagaaatgtgttccttatttcttgttcccaaacaggattaactgtgaagactaatttataaatgtgaacctaagaaaactccacctctgaaggaaatcatttgaattttgtttttgtacgtaaagttaaccttccaattgtctgagctgtcgtcactgacttcatgacagtctggccctccagacaagagcagcgctggcatcgggcaggtgattcctgacacctgctgcctgcaggcattcactgaccaggcctttcctggaggaaacacccagggccgggcggctgctgtttccacacgtggactcggatctgctgtgacaccgtcagcccgacagtctctccatatgcagcctttcctctgtacttttctccatggttgaaataaaacagggtgactgggagttacttagaattcatgaagattt

SEQ ID NO: 255080 - DNA, 1420 bp, Homo Sapiens
  misc_feature (14)..(14): n is a, c, g, or t
  misc_feature (26)..(26): n is a, c, g, or t
  misc_feature (38)..(38): n is a, c, g, or t
  misc_feature (46)..(46): n is a, c, g, or t
  misc_feature (51)..(51): n is a, c, g, or t
  misc_feature (60)..(60): n is a, c, g, or t
  misc_feature (112)..(112): n is a, c, g, or t
agcagggggagctncccaagctgccnaagccccggccncccagccntcccngagtatccncactccctgaacccctactctctcctttttgcctccctcaagtttttaatcnaggctttcccctgggggacagcaagtctctgagcaaccagggagcagttgccctcaggcctgtgcccagcatgccctcccctttttatacgaatgttttctaccagtgtgcttgggtttgccatgatgcgaggctgagttgctgtagcgtcttgattctctccctgggtctgcgttccctcccctgggcctgactgagcctgctcattgtttttccctttattacacaggacagccaggggaggagggggcccagccctgggaggctggtgggaggcaggtgggaggcagggggcaggctgcggatgcatgaaataatgttggcattattttttaattttttaaaaaataaatggtatcttattttaattgtcctgttccttcccactccccgcctcctaggatgttagcccaagctcagggtaggcccagggggctgggagaaatgaagccacccatggggactggggaccaggggccttcagcatggcttctaggttccctcctccccctaccccatctcctacctccacagtacagactgtccccaacttaacagtggttcaacttaaaccatgtttcaactttacaattggtctgttggggtattaaatgaatttgtgacttaggatattttcatttatgatgggtttatcaggaagtaaccccatggtaagttgaggcatatctgtatatatttaaacctaattaattcttgagctgaaaataaataaaccaggatggcagggaccaacccctaatccctccccagcggcaagcccctcttttcagagtgggcagagggttgcctatggtgggcactaggaatgaggtcccctgcctcgatgcgggtcctaggagaaaaagtcctacttttctgggtccccaggtgcagcacctcccagagactgtttctcccatggcctcctgagtgatgggccctgcctccctgtgcctcatcctcaggctggttggagcagagggtgggcaggagccccagcacagactggggggtgctcacagcagggccaccttgatgcaggctggaatgttatccctggggtgtgcttggaccccacctgctttctttctctcctgcccctcccctactctcactgtaatttatggaccctgcccgcctgcgtgttgtgtgtatgtcctgtgccttttctcactattgtttgggtgtgggagggggtggtttttcactgaaaaggggggtacacctatagctttcttgatgttcaatcaatcagtcactgtgtcccagacatattcaataaacacagattggtaccacccaaaaaaa

SEQ ID NO: 255081 - DNA, 404 bp, Homo Sapiens
  misc_feature (21)..(21): n is a, c, g, or t
  misc_feature (34)..(34): n is a, c, g, or t
ggtggccccctgctgttaaancaacccccccaantctgtgcctggggctccttgccccaaccctctgctcccaaaccagcctgaaggatgaaggcaacagggaaggcaggcccccatcaactcaagaaggccaatgggagaaaaaaatctctgggaaggtgctgcaccctggggaccccagaaaagtaggactttttctccctaggacccgcatcgaggcaggggacctcattccctagtgcccaccataggcaaccctctgcccactctgaaaagaggggcttgccgctggggagggattaggggttggtccctgccatcctggtttatttattttcagctcaagaattaattaggtttaaatatatacagatatgcctcaacttaccatggggttacttcct

SEQ ID NO: 255082 - DNA, 859 bp, Homo Sapiens
gggcaaagtttttagttttttcccctttaagcttatgatggaagaacattttagcttctcatgtttatttttacatatttcaaatccctcattatgtcttgtaaacaagaggggctctagcacccggctttcaccgtagtatcgtaaggaactcaactaacccatagtgcaggtcaaggaaccaacaggcaggaggagaggagggtggggcaggacacagcagtgaaccaagagcggcagtggacagggtcgccactggctcgcaggagccttgggatatgctcctggcccagggacactaagatttaaccttctctagatgtctgaatacaagctgctcttcacctggtggtcaccgcacgacagcactttgctccacacagagagcggtcagtgggggctgctggaagcagagcttttgcatggggaacagtggtggaaggggcacggtggtgattcaaattgcagagcaggaagagggcatgctcaaggcacccagcggggccacgtcaatgctgcagatgccaagtgtgaccacctacccacagagggctcatgcaggcttgtatatgtgaacactcacttgagtcatgcctgtcaatctcttttgaggctaggtttataatcaacagggtaagccagaagggctacagaatttcccattctttgtctcacaaaaccactgaaatgcaaataacttgttttaggcttttcctatacacacagacacaagctaaaaagtcaaatacattaggcattgttgtattgtatccttcactgaagacgctaaagaaagaaaaactcccttgtcctcaatagcagcaagttacagaggacagtagaggtctgctcccaccaa

SEQ ID NO: 255083 - DNA, 585 bp, Homo Sapiens
  misc_feature (34)..(34): n is a, c, g, or t
  misc_feature (70)..(70): n is a, c, g, or t
gccaaatctggccaccatatgtaccgtgatggtntgcatggggtgggaggaccagcaatgctctgaacgnaggtgccccttgtgaaacccgctccttcctcttcatcaaatatgagatcatcaaatttgctactttccttcattaaattgttaaaggtatcttcatgttgtaatcgaactttccttctctcaaaatgaatccttttccaactggtttggctacaaatgtcaagaaagccacactaacaagcttctcaatgccagtgagcatatcctgtaccatgaccttgatactgatctccatgcttgtgctcaatgctctagtaacttgtgctttgatggtgataacttgtccaactctacctgtctcctcaaactgtatgtcatccactgaggctgtaacgcaggaaactccagcatgtttctcagccgccagacagccggtggtgtcgatccacttgagcagctgccccgcgctcagctcgccgcgcgcagtggcgtgcgccgcctggatggcttggctcatgaccacctcgccgggcgccggccgctacatgcacagggcgagagcgctaagcctgcggc

SEQ ID NO: 255084 - DNA, 776 bp, Homo Sapiens
  misc_feature (376)..(376): n is a, c, g, or t
caacctagactgattatttttaagtgtgaagcctgtctttctatttctgttctgcatttactttgtcataagctatcaagacaatgagttgcagtttcataagatcaatattcataattcagaataaagtattaaaactgtcatctcatttttatttttgaaccaaaatatttaaacattcaccttcaaacaaaaggacagattaatcctaaagtaagaaagtaaatgatttagaaatcattataaaaggcaacattttcctcagtcctttccttgacttcttgactatcccaagaactggatctcagtccctttctactttctcctcactggtcccaaaatcattaggccgaaggtcaaaaccaagaaccttgcnagaaatagtagccactgtctccatccacgccataatctggccaccaaatgtatttccgtgatggtttgcatggggtgggaggaccagttcaatgctctgaacggaggtgccccttgtggaaaccgctccttcctcttcatcaaaaatgagatctgaaaggtggatgtaaacattaatgatggtggagtgaaccataggccctggggctccagcttttccttcccggcagtacattcaactcggatttatagaaaaattaaagtgttctcaaagccttaagactgagaaaattgacaggttctacagagtgactcttatcttaatggtgaatatttgcaatgaattgggttaagataatcagaaagggccttttagagattgtattctagcctataaaata

SEQ ID NO: 255085 - DNA, 705 bp, Homo Sapiens
  misc_feature (179)..(207): n is a, c, g, or t
  misc_feature (391)..(496): n is a, c, g, or t
  misc_feature (581)..(637): n is a, c, g, or t
  misc_feature (654)..(663): n is a, c, g, or t
aaagaagactggtttgattatgtttctttgtatggttacactctatttacaagaagaatctgaagtgatttacagtaaaaatacataatgacaaataaagacattaagtaatccatgtaagaagggtagagcagaaattattttttaaataattaggcaacagagagagctcctgtctnnnnnnnnnnnnnnnnnnnnnnnnnnnnngccccaaaatgaaagggtctgggtgtgtattcacaggagcagcaagagagagagatctactaaataatactggtgaaaagaaagagttgaaccctagagataagggtgagcaataccagctttaaacaaaacaggaaatgaactggggtgaagattgtttctttggccagacacagtggctcgnnnnnnnnnnnnnnnnnnnnnnnnnnnnnnnnnnnnnnnnnnnnnnnnnnnnnnnnnnnnnnnnnnnnnnnnnnnnnnnnnnnnnnnnnnnnnnnnnnnnnnnnnncgttttaaaaattagccggacatggtggcacacagctatggtctcagctattcagggctgagatgggaggatcatctgagctcannnnnnnnnnnnnnnnnnnnnnnnnnnnnnnnnnnnnnnnnnnnnnnnnnnnnnnnngagtgagaccctgtctnnnnnnnnnngattgtatctttacatctgtatattaaaacagagcacggcat

SEQ ID NO: 255086 - DNA, 792 bp, Homo Sapiens
  misc_feature (36)..(36): n is a, c, g, or t
gaggcttgtcctcaagcctccagtcccaaaagcaanaaatgtgcccactggactccctgcccatctgccacatatgcctacaggttactcagcgaaggtgccagaagcaagtacgccaaaatctgctttgaggataacctacttatgggagaacagctgggaaatgttgccagaggaatacacattgccattgtcaactatgtaactgggaatgtgacagcaacacgatgttttgatatgtatgaaggtgataactctggaccgatgacaaagtttattcagagtgctgctccaaaatccctgctcttcatggtgacctatgacgacggaagcacaagactgaataacgatgccaagaatgccatagaagcacttggaagtaaagaaatcaggaacatgaaattcaggtctagctgggtatttattgcagcaaaaggcttggaactcccttccgaaattcagagagaaaagatcaaccactctgatgctaagaacaacagatattctggctggcctgcagagatccagatagaaggctgcatacccaaagaacgaagctgacactgcagggtcctgagtaaatgtgttctgtataaacaaatgcagctggaatcgctcaagaatcttatttttctaaatccaacagcccatatttgatgagtattttgggtttgttgtaaaccaatgaacatttgctagttgtatcaaatcttggtacgcagtatttttataccagtattttatgtagtgaagatgtcaattagcaggaaactaaaatgaatggaaattctt

SEQ ID NO: 255087 - DNA, 1267 bp, Homo Sapiens
  misc_feature (1172)..(1174): n is a, c, g, or t
  misc_feature (1190)..(1190): n is a, c, g, or t
  misc_feature (1193)..(1193): n is a, c, g, or t
ggaagcctaggagtccgccgcgggacggaggcctgggggaactgcgagttcatctttctgcagagggccactaggaacctcggattgcccacggaagccagccactttctttgacagtccagcccacctcctcttctgcccggagaagctccaggggctgcctttgtgatcacagcatcttcacaaggaccaaaggaaaataagatttctcgtaagaacaccgtgaccacatctttaaaatgacccatttcgtggctcccacaagatttacacctccacactgaggccggaagtggttttgcccctataaaacatggcgaaaagctctcttgtctccaaggaaacgccacgtaatgagtcaaagctgtggcgcacgcgcagaagtacaagctaccggaagtgatggcgcccctactaaagccttggggttagtacgcgtgcgcagcagtttcttccgacagttgtgttgtgccaatggtggagaagaaaacttcggttcgctcccaggaccccgggcagcggcgggtgctggaccgggctgcccggcagcgtcgcatcaaccggcagctggaggccctggagaatgacaacttccaggatgacccccacgcgggactccctcagctcggcaagagactgcctcagtttgatgacgatgcggacactggaaagaaaaagaagaaaacccgaggtgatcattttaaacttcgcttccgaaaaaactttcaggccctgttggaggagcagaacttgagtgtggccgagggccctaactacctgacggcctgtgcgggacccccatcgcggccccagcgccccttctgtgctgtctgtggcttcccatccccctacacctgtgtcagctgcggtgcccggtactgcactgtgcgctgtctggggacccaccaggagaccaggtgtctgaagtggactgtgtgagcctgggcattcccagagaggaagggccgctgtgcactgcccggccttcagaaagacagaatttcatcacccaatgcagggggagctcttcctggaccaagggaggagccgctcattcacccaacaaaactgtgtcttatctgccaggaaagaccagcctcactcctgggaactgtctggcaggtaggctgggccccccagtgctgttagaataaaaaagcctccgggccaannnaaataaattgcacaantanataaaacttgtgcggccggcttcggccccttcaaaagctttcttaaaaccattcgtttggcgccgcggggccca

SEQ ID NO: 255088 - DNA, 439 bp, Homo Sapiens
accccgggagccactgcccagggtgatggtggccagctcagggctttcctgcgggtgactgtcgcccagacaaggtgccatttcatgactaatcaggagccagcgggctcacccaggcacctgtctgccaggaggccacgtgtgtcctgcccacccagggggagctgtattttggcagcaccccacgcttgcttcccgagggcctcttggggcacctaagacagcaccccctctcaggggagaccatggtgccccggccgcacccccccaccctggtgccaccactgcaacttttgtattcacaggcatcccatctccatcacagataaaatcttaggagataaacacattcaaaaaggaatgagataaaaagaataaggcaataaatgttgattggaacctctcaagattacagaaaataatgagaatgaaattttaa

SEQ ID NO: 255089 - DNA, 844 bp, Homo Sapiens
  misc_feature (824)..(824): n is a, c, g, or t
gtaatgccctaggccatggcccacaggatgaaatcctaagtagtgctttcaaattgcgaattactcgaggagatattcagacattaaagaactatcactggctcaatgatgaagtcattaatttttacatgaatcttctggtggaaagaaataaaaagcaaggctatccagcacttcatgtattcagtactttcttctatcctaaattaaagtctgggggttaccaagcagtgaaacgatggaccaaaggggtaaatctctttgaacaagaaattattctggtgcctattcatcggaaggtacattggagcctggtggtgattgacctaagaaaaaagtgtcttaaatatctggattctatgggacaaaagggccacaggatctgtgagattctccttcagtatttacaggatgaaagtaagaccgaaatagtgatctgaatcttttagagtggacccatcacagcatgaaaccacacgagattcctcaacagctgaatgggagtgattgtggaatgtttacttgtaaatatgcagattatatttctagggacaaacctatcacatttactcagcaccagatgcctctcttccggaagaagatggtgtgggaaatccttcatcagcagttgctgtgagaaaactttgcctggtccctctagctgctggtggttctttcacagacatttccatatacctcatgcattgtgggttaaaaagtccctgcatcacttctgttctcacaggtactgagctgtcaaaagtgcatgaaggcctctcactgttactctagtcctgacttggggtgcagagagctgcttgcanttcctgtttgtaaaggctgt

SEQ ID NO: 255090 - DNA, 758 bp, Homo Sapiens
  misc_feature (20)..(20): n is a, c, g, or t
attggccctcgcggccaganttcggcacgagtcggcacgaggatttccagctcagcgatgcccccaggtccctgggagagctgcttctgggtggggggcctcattttgtggctcagcgttggaagttcaggggatgcacctcctaccccacagccaaagtgcgctgacttccagagcgccaacctttttgaaggcaccgatctcaaagtccagtttctcctctttgtcccttcgaatcctagctgtgggcagctagtagaaggaagcagtgacctccaaaactctgggttcaatgccactctgggaaccaaactaattatccatggattcagggttttaggaacaaagccttcctggattgacacattcattagaacccttctgcgtgcaacgaatgctaatgtgattgccgtggactggatttatgggtctacaggagtctacttctcagctgtgaaaaatgtgattaagttgagcctcgagatctcccttttcctcaataaactcctggtgctgggtgtgtcggaatcctcaatccacatcattggtgttagcctgggggcccacgttgggggcatggtgggacagctcttcggaggccagctgggacagatcacaggcctggaccctgctggacctgagtacacgagggccagtgtggaagagcgcttggatgctggagatgccctcttcgtggaagccatccacacagacaccgacaatttgggtattcggattcccgttggacatgtggacta

SEQ ID NO: 255091 - DNA, 996 bp, Homo Sapiens
  misc_feature (905)..(905): n is a, c, g, or t
  misc_feature (908)..(908): n is a, c, g, or t
tccgaggctcccccgccactctctctctgcccaggttctgctggtgggaagggatgggacccctctctgctgccccctcctcccctccacactgcccatctctgatgtctggccctggggaatggcaccagttccagcctgggaatcaactcagttcctgagtgcccatcccaccccgcggttgcctctcctcggcacccttgattgggttttgcactaaagaggtcagctgggccaatgatattgctccagaccgagtcctacccaccttcccccggaagtgtcccaagaggctccgaaggcctcccctccgagcccagctctcctgtctcctccacagccaggccctgcacgcccacctcctcggacacaggtgacagggttaccctccagtttgagctcatctgcacgagacacaggtagcttggggttgaagttaggactcctcctgggctggaggatttacctggtggggcacttccagactgtttctagcaatatacacacacgttctttcctgtgtcttcaccccaaaacttcagttgattctgacctgggaggatctggggaccagggggtcttgggctgccttgtgatacacagccccagccaccctgcacgggggctgcgagcaccagcaactttgatttatagaaggtggaaacccccatctgagtattttgggaggagcccccagccctcatccagctctggcacgctgatacctccaggtactcccctcactgtcaaagctggggctcagcctcttgtcatctggagctttgtgggcaaagctgagaagctgcaacccagatttcaacccagttggaacgaggcagtggccctgagccccttctccaggccaggtagaaaggacaaacttggtctctgcctcggggaagcangangagggctagaagccagtcccttcccacctgcccagagctccaagccagcacagaaattcctgaggccaacgtcaccgttagattgtgt

SEQ ID NO: 255092 - DNA, 645 bp, Homo Sapiens
  misc_feature (502)..(502): n is a, c, g, or t
tgaggaattcggcacgagcccgtcgccacgaggcccaggggcccgagtgccgagccctttgctccctcggccgcgcggggacagggctgctgagcagcctccgcctctcccggctgtgggggccccactgagtatgtcggaggagagcgacatggacaaagccatcaaggaaacttccattttagaagaatacagtatcaattggactcagaagctgggagctggaattagtggtccagttagagtctgtgtaaagaaatctactcaagaacggtttgcgctgaaaattcttcttgatcgtccgctagaaatgaggtacgtctgcacatgatgtgtgccacacacccaaacatagttcagattattgaagtgtttgctaacagtgtccagtttccccatgagtccagccctagggcccgactcttaattgtaatggagatgatggaagggggagagctatttcacagaatcagccagcaccggcactttacagagaaagcangccagccaagtaacaaagcaaatagctttggctctgcggcactgtcacttggttttggatgccccactggtgggtgactttggatttggccagtgacccagtgacttgatgacaccccagtttacccctttatatgtagcccc

SEQ ID NO: 255093 - DNA, 1367 bp, Homo Sapiens
  misc_feature (218)..(218): n is a, c, g, or t
  misc_feature (366)..(366): n is a, c, g, or t
aaggggtccaagcattcccacaagcaaggaaaaaagcttgccatagcaaagagcatctacatactcaagttaagttgggggcgaagtgggccaagtctgcaaagactcctagctctgggcccagtgcagctcatcagggctctttctggcctccagtgagcaagcaagtgggcccagctcagcagttacttcagcctcacccagatgctttgccagcngcgtcagcacacgggcacccagtgccacccaacatcgcaggtccaggtgccgctcggttactgaagggtgtgaagcccgggggtagtcatccagcccagagggtagggtcttggggttcagtaaggttggtaaggcagggtcccgtcnccgccagcggtaagatagtgccagtgggcctgcctggctctgatggagccaggaaaaccaggcatgcaggcggggcaaggcctttcggaggaaagccaagtcgtcagggtcaccaacctctagcatatgggctacaggcaaaagtagggttggggggttggcgtggactgctcgttgtactaggaattctggaggcacccgggctcgggcctcatcccccagtatctgctccctcccaatccagccatcagcatttagcagccccaagccagtggccaagggcttcccgggtgagggagggatcccaccgctgaaccaccagctggtgaaagccttcatcccaaaggaagcctcgtgggaagaatgaccgggagggcactgctgtaaaaagaggtacgggtggaaagagggctgggtccaccttctgctcagacccttccaccccgatgtctggcaataccagcccttgtccgtagaagtagccaattccaccaaggaggccgctgagggcagcctgacccaaaacctgctcgccagagctcaggcccttctccttcagctggaaggtcttctcaaagcgctctctaaagccttcagcatggctctccagggcctgggtcagtagactgcctgccagtcttggcagggcttgatttcctcctgcctgggcactgcctgattcaaacacaaactctatggaaatgggaattttcagggtcacctgctgtatcaagaactgcccctgcccttgcccacttggacctctgtcctcccacttcagggatcctggcaagccgaggtagcgttcaggggaggcccctgggggccgatgctgaaaccagctatttaggcgactctttaccatctctgtcagcaggggcagtcctgggttggaggtccagaagacattgtagcttgaaggggagaagataaataggaaatattattcaagagaaggcagtgggcattataaagagaaatacaaagtgttcaggagtcag

SEQ ID NO: 255094 - DNA, 1013 bp, Homo Sapiens
cattaattttttaatgataaaccatgacaaaggattttacgtttataaaattatgacagaagccatgtgcattatcctttacggacgcagcctagctctacagcaatcatcctgaaataagcatacctaatttcaagcaattgttgtattttcatgactgaccttaactgtactttttctagcaagagatgctttattctgcagcatgaacagatttaaaatggctggtgttaaatatcagctcctaataagatgtggactgaaaacactatcacaacactatgagaagcccctagcactggttaacgctttcctagcctagtctctggatttggggagcttgtcttcagtggctgagactgtgagctgggagcagttctctcagctggagagactcgggatggggtaacctggggaccagtctagcccctgcaccctcttccctgcctctgctccttgggagcgggtggagagacacccatgtggctccccttagggccagcaccaagcaccacgctctcatcctgcaagtcggcgcacacagtggatgaaggcaggagacccagaaagcagtgcagtgcagctctaataaaggccttatttttcttatgtaaatcatctttttacatttgtttgtaaacatgtttaaagaacgaacctagtgggacatttttagactttgatgctctagccattttggattgtgtaagttgcagatgtggcttttactttttaaatggcatattaacaagccagcaaagtgtgtcagaccatggcgtggtatttattgtgcagcagatccagagacagaggcagcctgtcttttcagttggtttctgcttttaatttacttgtacaattcattgttactgttctgtttttctattaatcttttgtcaacttcctgattatgtaacaaagtatgtacagtctacttttgaactatttttatcacagtattatttattgctttctttcaataaagtactgaagcattttccactgccaatgaa

SEQ ID NO: 255095 - DNA, 870 bp, Homo Sapiens
ggggccgcagccggtcgtaaccaagttgtgtcctgtcagccgctgtccccttcgccgcgatgccgctggagaacctggaggaggagggtctgcccaagaaccccgacttgcgtatcgcgcagctgcgcttcctgctcagcctgcccgagcaccgcggagacgctgccgtgcgcgacgagctgatggcggccgtccgcgataacaacatggctccttactatgaagccttgtgcaaatccctcgactggcagatagacgtggacctactcaataaaatgaagaaggcaaatgaagatgagttgaagcgtttggatgaggagctggaagatgcagagaagaatctaggagagagcgaaattcgcgatgcaatgatggcaaaggccgagtacctctgccggataggtgacaaagagggagctctgacagcctttcgcaagacatatgacaaaactgtggccctgggtcaccgattggatattgtattctatctccttaggattggcttattttatatggataatgatctcatcacacgaaacacagaaaaggccaaaagcttaatagaagaaggaggagactgggacaggagaaaccgcctaaaagtgtatcagggttctttattgtgtggctattcgtgatttcaaacaggcagcttgaactccttccttgaacactggttttcaacattttacaatcctatgaaacttattggaattataaaaaccttttgtggacctattacctggtcttatgggccaagaaatggaattggccctttagaaaaagaaaccaggattccttcctggggaaaaaaggggctctctttaaaaaggaaggccacgaagaatttctctttggaaaatgtggttt

SEQ ID NO: 255096 - DNA, 375 bp, Homo Sapiens
gaaagcgcacctcatggtgcagcctctggggttccacgcgcctgactgtggcaaagaggggtttgtggatctcccagaatatccctttggtaagctcaggtgcatagtagaggtccttgtatttctcgtgacaaaatccaaatggctataataaattgtggcccagttttacaataagagactgcatatgacaaaacattcagagttaaccaaaaatgagctatcagaagaatgcatcatctaaagtttatagtttttttaattggaaaaactgctcattagagcatccatcatttgtgagaacagtaacagtgctgttctattgtgattcaggactggagtccagagttgccaccagatgggatattcatggat

SEQ ID NO: 255097 - DNA, 874 bp, Homo Sapiens; identical to SEQ ID NO: 82632
  misc_feature (563)..(563): n is a, c, g, or t

SEQ ID NO: 255098 - DNA, 1243 bp, Homo Sapiens
  misc_feature (1196)..(1196): n is a, c, g, or t
  misc_feature (1233)..(1233): n is a, c, g, or t
gatagcggacccaagatggcgaccgagttggagtacgagtctgtgctgtgtgtgaagccagacgtcagcgtctaccggattccgccccgggcctccaaccgcggttacagggcctctgactggaaattagaccagcctgattggactggtcgcctccgaatcacttcaaaagggaagactgcctatatcaaactcgaggataaagtttcaggggagctctttgctcaggcaccagtagaacaatatcctggtattgctgtggagacggtgacagattctagccgctactttgtaatccggatccaggatggtactgggcgcagtgctttcattggcattggcttcacagatcggggagatgccttcgactttaatgtctccttgcaggatcacttcaagtgggtaaagcaggaatctgagatttccaaggaatctcaagaaatggatgctcgtcctaagttggatctgggcttcaaggaaggacaaaccatcaagttgtgtatcgggaacattacaaacaagaaaggaggtgcttctaagcccaggactgcaaggggtgggggtctgagcttactcccacccccgccaggaggcaaagtcactattcccccaccatcctcctcagttgccatcagcaatcatgtcaccccaccacgccattccgaaatctaaccatggcaggcagtgatgcagatatccttttagattcggattctcctgctcctgtcacgacaccagcaccaactccagtttctgtaagcaatgacttgtggggagacttcagcactgcctccagctctgttccaaaccaggcaccacagccatccaactgggtccagttctgaatggcattggcaggacattaaggacagacttgaggaataaaaatgaccttgagggcaccaatctgtgagggaagttaggaacccatttcctccccagaaccagaatgactggacaatctttttcataacttctccatcacattcaagctggtttatgtcactcccctgtgttgttacttgtacagccaagaaagtatctgttatctcctgcgtagtaccaaggtaggggactagtggatcttattatagttttggctgactatgcagggcttaaaaaggccagcgtctgtttgaggggggaatgacctctaacatctgtaaaaatttgttctcatcttttaattttctttnaacttatttcaaaattcatctcatgacccttgtgtgncctctttgtg

SEQ ID NO: 255099 - DNA, 767 bp, Homo Sapiens
tatgaatatgtggttgacccatcctgtcaaatgtaccaacattttcgaaagaattcattcaaatctcttatgccaacagaaaagttccttcttgtttaatatctctttacctcagtcctacattttgattctctggaggagattttagcttgtcttaaaaagccaaatttggagtcatcaagcctgctgaacctgatggggcagctttttgaacagccttctggaagtaagaacttcagttgaaaagccctttgatcgcttcagcccgggacatgcccttcagatggcttattctcagtaaagctttatgtagactgtgacactgtatatgtgtgactcgtacaactttgacgtgtttctgaagtggtttaatcgtatttgttattagcttctttgtggaaatgcaatttttatactaaaaacattgcttatttgcaatgcaatatgttataaatttgttgtttatattactggtattagtcttagcctaatgaacctaattatttttctttctgtattctttgcttcctcaaatagcatctgcagcaattggaatgagaaatccagatatgtgtttcaagtagtacattgcctgaatcacaaatcacttgatcacagtattgtatataatccctgatcctatttgtttcattttattgtaaattcccatttgcatcaaaacctaatgatagtgattggtaagtaaaaacaaatggtgtattgcttttcatacaagtgttttcacaaaagccatttgcctaggcagc

SEQ ID NO: 255100 - DNA, 1937 bp, Homo Sapiens
  misc_feature (57)..(67): n is a, c, g, or t
  misc_feature (157)..(166): n is a, c, g, or t
  misc_feature (227)..(314): n is a, c, g, or t
  misc_feature (339)..(349): n is a, c, g, or t
  misc_feature (372)..(389): n is a, c, g, or t
  misc_feature (409)..(521): n is a, c, g, or t
ccccccccttttcccgggggggaaaatatttttcgccaaggggttaaagtgttttannnnnnnnnnngatttagggtcccccaggcggcctttaatttatttccatctccgcgagaatcccttataaaattccccccaaacccccacgaaagccccnnnnnnnnnnttaattaaaatgagggtcccccggggtcctttttttatggtccgaaaaaacccccaaactnnnnnnnnnnnnnnnnnnnnnnnnnnnnnnnnnnnnnnnnnnnnnnnnnnnnnnnnnnnnnnnnnnnnnnnnnnnnnnnnnnnnnnnnggggaccgggggggccccggttccnnnnnnnnnnngggccccgcccccaaaaaaatgnnnnnnnnnnnnnnnnnnggggcggggggggccgcaannnnnnnnnnnnnnnnnnnnnnnnnnnnnnnnnnnnnnnnnnnnnnnnnnnnnnnnnnnnnnnnnnnnnnnnnnnnnnnnnnnnnnnnnnnnnnnnnnnnnnnnnnnnnnnnncccggaaaaccattttaattataatagcttacacaggctgcagagagggagacgcagagccggacctgacgggctgtgctttcaaaactgtgcagtctccttcctggctctgaacaggttagcaagagttccaagaggcctcaggcctcctaaccacaaaggcagagaagttagccccagaaagctgacagctgaaggcggggaggctgagagtgcttggtgtttgacagatgagtgttgtggtgggaggagtatggagtcacacagaggctccacccagcaaggcctctggccagggagctatgtttaaggctggggtcaggcagagagtgggagccgcaggggagagaagtctggaccggcaagccccaagggaaggacaaaggcactggggcagatgtgaccgtggacaaccgcagtgcaggcagggcccctacaacgctacagcaagcaaggccgtccacgaagctccctgagctacattctaacagaatgtggatgtggggctgggtcagcatgtggccccaccatctttagctcagtggcagttctgacagcttgggtggcaaggaatcccatttaccctgcagcggcagcccccgctggtgtctcctgggcccccagggccccagcgtgggcccttggtgacccagcagatctcggtgttggcagacggtgcagcggatccagtcgcagccgtccttcttctgtaccacgatctggcactgggggcagcgcatggcctcgccctgctgcagcatcaccttcagcatctctgtcgtctgccgggcagccacatcgttctgagcccgcagggccaggtcctcctgatactccttgcagttcatctgctcatggatggccttgcagagcaggcagttgacgtggaaacacacagggcaggtgaactcattgacatcatcctcaaagaagcaccatcccttgcaatctggggtcttgcaatggtagctgaaggcactgcggttttcagcaatggagatgcccaggtctagaaatcgctggtaatcctcaggggtcaggagcgccttgatctccctctccagcagcttgcccgagcacgagtaggtgttgtcaatgaaggggcaggagacctccgcctcctggctgttgcggatggtgccctgcaggcactccctaggggaggggaggggaaaagagttaggatcataggaacccccttcactggggactccatccctcacatggcaaggcctgaccccaggggcctcactcagtcaccccaggtggacttctcctcaatatctccttccttcccatccctctcaccaacccatcaccaaggcctccaccctgcctccatactgccgctctgattctctggtccaggccccacatcccccacctgggtgactccaggagcctcctcgctgggct

SEQ ID NO: 255101 - DNA, 1643 bp, Homo Sapiens
  misc_feature (799)..(811): n is a, c, g, or t
  misc_feature (1142)..(1142): n is a, c, g, or t
ggcctgggtggcgaattcggacgagggtggcgcccagagcttcgctcttgctgctcccctgaggtgaactgaagccagcagccccgcatcatgtcaaagctcggccgggccgcccggggcctcaggaagcccgagagaggcgtttccatcaaccagttttgcaaggagttcaatgagaggacaaaggacatcaaggaaggcattcctctgcctaccaagattttagtgaagcctgacaggacatttgaaattaagattggacagcccactgtttcctacttcctgaaggcagcagctgggattgaaaagggggcccggcaaacagggaaagaggtggcaggcctggtgaccttgaagcatgtgtatgagattgcccgcatcaaagctcaggatgaggcatttgccctgcaggatgtacccctgtcgtctgttgtccgctccatcatcgggtctgcccgttctctgggcattcgcgtggtgaaggacctcagttcagaagagcttgcagctttccagaaggaacgagccatcttcctggctgctcagaaggaggcagatttggctgcccaagaagaagctgccaagaagtgacccttgccccaccaactcccagatttcaaaggaggtagttgcaaaagctgtgcccaaggggaggaaggaggtcacaccaatatgatgatggttttcatgactttgaatgatatatttttgtacatctagctgtatcgaggcatcaggcctgaataaacatcctttcgtaaacggaaggagaacgccgcgcttaacaagacgtgtcggnnnnnnnnnnnnntcttgagagacctgtaccgcccccactttcccttggtgagccccggctcccagtgaggggacggggtcaaccggggcccctacgtcttcgtttcccgcccggcggaacccgcggagcaccgcgacacaggggggcgtagggggagttccccagggccggaaaggccctgctcggcccgcggggcgcgccaccctcttatcgctggttttcttcacagaggagaggctcctgccccgagcgggggcacgttcctctccgcggcgaggctggcgttgtgcaccgccggggcgacacgtccgcgtatcttccaaacacccggcccgtgatctgncgccccctccacagcgcgcccccgcccttcttctcgctgctagtagttggcggaagagtgatgtgtcgtggcggggaccctgcggcagtctgacatgtggcctcccaacgatatattcttgtcccccggcgagtctgccctcgctcgtccctgtccggctccatctcttgtcacttgtgaagacatagggtcaggtgctgaccgaggctaactcggctatcggttctgggcggggagcaggcggatccgttggggtgtgggggaaggccgcgcgtccgtgtcgcgcgagcttaacaccaccctgcgcgcataatgtgacagcgcctccatagccgttttggacacttctctacagatagacgacggcgggggcaggactaaacactatatgactcccagaatagcaacggacgccgacgtctcgcgcgggcccgcgccctggcgctcggcgaacggcaaccgcaccccgggcgcgggcggagcggaggacaaggacgaata

SEQ ID NO: 255102 - DNA, 836 bp, Homo Sapiens
  misc_feature (558)..(558): n is a, c, g, or t
  misc_feature (638)..(638): n is a, c, g, or t
  misc_feature (726)..(726): n is a, c, g, or t
ggggtgaggacccttgacctctggcccaagatggtggcgcccagagcttcgctcttgctgctcccctgaggtgaactgaagccagcagccccgcatcatgtcaaagctcggccgggccgcccggggcctcaggaagcccgaggtcggcggtgtgatccgggcgatcgtgcgggcaggcctggccatgcccgggcccccactaggcccagtgctgggtcagagaggcgtttccatcaaccagttttgcaaggagttcaatgagaggacaaaggacatcaaggaaggcattcctctgcctaccaagattttagtgaagcctgacaggacatttgaaattaagattggacagcccactgtttcctacttcctgaaggcagcagctgggattgaaaagggggcccggcaaacagggaaagaggtggcaggcctggtgaccttgaagcatgtgtatgagattgcccgcatcaaagctcaggatgaggcatttgccctgcaggatgtacccctgtcgtctgttgtccgctccatcatcgggtctgcccgttctctgggcattcngcgtggtgaaggacctcagttcagaagagcttgcagctttccagaaggaacgagccatcttcctggctgctcagaaagangcagatttggctgcccaagaagaagctgcccagaagtgacccttgccccacaactcccgatttcaaaggaggtagttgcaaagcttgncccaagggggagggaaggaggtcacccaatatggatggaggggtttcatggacttgaaagaataaattttggaactcctagctggtattcgaggcatcagggcctgaaaa

SEQ ID NO: 255103 - DNA, 942 bp, Homo Sapiens
  misc_feature (289)..(289): n is a, c, g, or t
ttggtgtctctcgcttggcttgtgtgtctctggtcttgagtcgcctgcttgctttgtgattctcttttgctttgttttaacaaaggaatgttattcaggcctgatgcctcgactccagctagatgtactaaaagtagactcagtgcaaagtcatgaaaccatcatgatattggtggggacctcctgtccgtcccccttgggcacaagcttttgcaactacctcctgtgaaattctgggacttgttggggccaagggtcacttcttggcagcttcttcgtggcagccaantctgcctccttctgagcagccaggaagatggctcgttccttctggaaagctgcaagctcttctgaactgaggtccttcaccacgcgaatgcccagagaacgggcagacccgatgatggagcggacaacagacgacaggggtacatcctgcagggcaaatgcctcatcctgagctttgatgcgggcaatctcatacacatgcttcaaggtcaccaggcctgccacctctttccctgtttgccgggcccccttttcaatcccagctgctgccttcaggaagtaggaaacagtgggctgtccaatcttaatttcaaatgtcctgtcaggcttcactaaaatcttggtaggcagaggaatgccttccttgatgtcctttgtcctctcattgaactccttgcaaaactggttgatggaaacgcctctctgacccagcactgggcctagtgggggcccgggcatggccaggcctgcccgcacgatcgcccggattacaccgccgacctcgggcttcctgaggccccgggcggcccggccgagctttgacatgatgcggggctgctggcttcagttcacctcaggggagcagcaagagcgaagctcatgggcgacgcgtgggtcgacgatatcccgagattccggaccggtacagcctgc

SEQ ID NO: 255104 - DNA, 573 bp, Homo Sapiens
  misc_feature (307)..(307): n is a, c, g, or t
ttcaatgagaggacaaaggacatcaaggaaggcattcctctgcctacccaagattttagtgaagcctgaccaggacatttgaaattaagattggacagccccactgtttcctacttcctgaaggcagcagctgggattgaaacagggggcccggcaaacagggaaagagatgtgtatgagattgaccgcataaaaagctcaaggatggaggcatttgccctgcaggatgtacccctgtcagtctgttgtccgctccatcatcgggtctgcccgttctctgggcattcgcgtggtgaaggacctcagntcagaagagcttgcagctttccagaaggaacgagccatcttcctggctgctcagaaggaggcagatttggctgcccaagaagaagctgccaagaagtgacccttgccccaccaactcccagatttcaaaggaggtagttgcaaaagctgtgcccaaggggaggaaggaggtcacaccaatatgatgatggttttcatgactttgaatgatatatttttgtacatctagctgtatcgaggcatcaggcctgaataaacatcctttct

SEQ ID NO: 255105 - DNA, 1288 bp, Homo Sapiens
  misc_feature (1056)..(1181): n is a, c, g, or t
  misc_feature (1189)..(1203): n is a, c, g, or t
cctttctttaacccacagaactttgcacagccaccaactactatgaccaatagcagttcagctagcaatgatttaaaagatctttttgggtgaggtgtcttacttctattttgaaggattatttcagtttcaatcatgggtgagctgatttacatctttatatagttggcttggaggaagtacttctatgggaaagtgaacagttctgtgacaggaaacatctctgtccatgccagcatagtagttgtatggacttctaaccagttgagttttttaaagcattgaggattttctcctcttaccaactcctcttcaggtttttgaagacccagcccttcccaatctcaaagagaaaaaggaaactgagttatcttgaataacataactttttaatcaaatgtttattttggcttgtggatcttggtgttatttaaaaaattgaggtgatggtcattgcaagctcatctattaagtactatatggtacacagtctatgagtcattagtcttcattttaatatgtaaaaaatcttgatgctgtattgatttgtttgcatttaagatgacagtgagaaaatgataagcataaagagaagtatcaggttatttgctttttccaaacttttcagatgaactattgtttagtacagagactgagcaaatactacaaaattcaacttaaccttcatttcattggtttaaatgcgttattaaccatcttaagtgcaaactaatcattgtaaattatattttagcatggtctgcctcaaatagtaatgtatttttctgcattcacttggatatatttagaatcacttttttcctcctgtatcaaggaagaggtatgtgctgatttgtttggatatttgacaaggcactctgatgtgacttccctgactactaccttcatatttcatttcaaattcaaacttctgaggttgcagcatatatgaattgcattttcaaaagaagatttgtaagaattaaactatatttatgagtaaacttttgaggtttctgctgtattgtttcaaatgtaataaactttacttctgtnnnnnnnnnnnnnnnnnnnnnnnnnnnnnnnnnnnnnnnnnnnnnnnnnnnnnnnnnnnnnnnnnnnnnnnnnnnnnnnnnnnnnnnnnnnnnnnnnnnnnnnnnnnnnnnnnnnnnnnnnnnnnnctggccgnnnnnnnnnnnnnnnaaaaattttttaaaacctttttttgggcgcccggccccaaaaggaaaggaaacagggcaaaattttttccaaaaaaaacccgggc

SEQ ID NO: 255106 - DNA, 720 bp, Homo Sapiens
  misc_feature (11)..(11): n is a, c, g, or t
  misc_feature (22)..(22): n is a, c, g, or t
  misc_feature (39)..(39): n is a, c, g, or t
  misc_feature (73)..(73): n is a, c, g, or t
  misc_feature (79)..(79): n is a, c, g, or t
  misc_feature (255)..(255): n is a, c, g, or t
atggcttgccngttttctaccngggtagaccaaccttgnggtttttttccctttcttaaccaccaaattttanaaagtnggaaaccaaaccctagtggataaatgacatattttcaatatgagttctgtggcagtctcacatggaagtcaggagtaacagcctcaattcctaaatagctgtttaccactgcttttctgagcatatttaagtaatacagaatataaaggagcaaacaaaatatgaagtttataaangatttcaaacacttttctaaaaatatgaggcccatattttagaggtatttcattccttttctcaaacaatatggagatttataaatatgagaatatatagaaatacagaccttaataaatgaagtgttcttaaaaatttttatatggaaaaccagttagctttaatgccttcacaatttttatggatttatccagatcaaggacaactcatgtggcagctatccgaaaatcaggctaacaggaaccccaaaatttgaaaataggaataatattagcaagagaaaaacttcaattctatgtgacacaatagattaccaaagtgaattttacttacaattagctaagaaaaacaagaaagaccatctgaacttgcaacccagtggcttgacaaaagcaatccaaaactttaaagttggtaagccaaactaacaagggtgacttgaggctgggcacagtggctcatac

SEQ ID NO: 255107 - DNA, 1082 bp, Homo Sapiens
  misc_feature (17)..(17): n is a, c, g, or t
  misc_feature (878)..(878): n is a, c, g, or t
  misc_feature (947)..(947): n is a, c, g, or t
  misc_feature (1001)..(1031): n is a, c, g, or t
cccttccctcgaagaantgccgcgcgcggcgcgccactcccccaagccccgaggcctgggtggcgaattcggcacgagggcacagcgcaggcgctggcgcggagaggcgcaggcccaggtccactccccagctgtgaaaggaggagctctacggtgactttgaagacttggaaacaggggacatgcacaagggaaaatcgggccccgacactcagaatgaagatatagagaaacaaggaagaaattgaccccgacgaagaagaaagtgccaagaaaaagcatttggataagaagagaaaattgaaggagatgtttgatgcggaatatgatgaaggagaaagcacatattttgatgatcttaaaggagaaatgcagaaagaagcacagctgaatcacgtagaatttgaagatcaagatgatgaagccagagttcagtatgatggttttcgacctgggatgtacgtccgcgttgagattgaaaatgttccctgtgaatttgtgcagaactttgacccccattaccccattatcctgggtggcttgggcaacagcgagggaaatgttggacacgtgcagatgcgtctgaagaaacatcgctggtataagaaaatcctcaagtcccaagatccaatcatattttctgtagggtggaggaggtttcagaccatcctgctctattatattgaagaccacaatggaagacaaaggcttctaaagtataccccacagcacatgcattgtggagcagccttttggggtaaaatatgattacaataacttgcctattgccgagattaaactttacaggctgcgttattttagctttgtgcttttcctttcataaaattccactcctaaagatgtttctgttttctggnaccgggggaaagtgggtttggaagtatatatggtaaaatctatatcccaaaatctaaaatgtcccgtantccaggtatgtttaaactaaaaatctaaaatttttcctgggtttgcctaataannnnnnnnnnnnnnnnnnnnnnnnnnnnnnnaaggacccccttatcaacttcccacagggggaaaacctggggttttccttt

SEQ ID NO: 255108 - DNA, 722 bp, Homo Sapiens
tgtatgtccgcattgagattgaaaatgttacctgtgaatttgtgcagaactttgacagccatttctccattgtcctgggtggataaggcaacagtgagagaaatgttggctacgggaagatgcgtctgaagaaacatcgctggtataagaaaatcctcaagtcccgagatccaatcatattttctgtagggtggaggaggtttcagaccatcccactgtattatatcgaagaccacaatggaagacaaaggcttctaaagtataccccacagcacatgcattgcggagcagccttttggggccctatcactccacagggaactggtttcttggcaatacagtctgtcagtggcataatgcctgattttcggatagctgctacaggagttgtccttgatctggataaatccataaaaattgtgaagaaattaaagctaactggttttccatataaaattttcaagaacacttcatttattaagggaatgtttaattctgccttggaagtggccaaatttgaaggtgctgtgattcgaacagtcagtgggataagggggcagatcaagaaagcactccgagctccagaaagagcttttcagggccagctttgaaggataacctgctgatgaaccaaatttgcttcctgccgaacttggaatccctggttccatccaacggtcctattaacccaagtaaaatcttttgttaaaacccctgggggg

SEQ ID NO: 255109 - DNA, 587 bp, Homo Sapiens
  misc_feature (103)..(259): n is a, c, g, or t
  misc_feature (289)..(443): n is a, c, g, or t
ccgactcagcatatatacagcactcatcatagtcacaaacactctcaggagctccatctgtgagttgatactattaataatatattaactactcttcttcttnnnnnnnnnnnnnnnnnnnnnnnnnnnnnnnnnnnnnnnnnnnnnnnnnnnnnnnnnnnnnnnnnnnnnnnnnnnnnnnnnnnnnnnnnnnnnnnnnnnnnnnnnnnnnnnnnnnnnnnnnnnnnnnnnnnnnnnnnnnnnnnnnnnnnnnnnnnnnacattaattattttaatctttcaataagtnnnnnnnnnnnnnnnnnnnnnnnnnnnnnnnnnnnnnnnnnnnnnnnnnnnnnnnnnnnnnnnnnnnnnnnnnnnnnnnnnnnnnnnnnnnnnnnnnnnnnnnnnnnnnnnnnnnnnnnnnnnnnnnnnnnnnnnnnnnnnnnnnnnnnnnnnnnagctatgtgtctcataatggaacaatgcagacaggactggtgatatttaaaagctgactgagcttaaaatgtatgatatgccatactatagtcatcaacagccagaattcttaagccaagtaatgagaacatacgagaagatgg

SEQ ID NO: 255110 - DNA, 754 bp, Homo Sapiens
  misc_feature (65)..(65): n is a, c, g, or t
  misc_feature (141)..(141): n is a, c, g, or t
  misc_feature (303)..(303): n is a, c, g, or t
gccaatgtgacacatcatccaggcagaggagcacactctgggagaagaaagcagaatggccatgnagtcgtggcctcttctatctcagatatatcgggtctcctgaccattccctcgatcttctgtattgcgcatctattntgctgcggtattcaggcctcatcaacataagctgcgaagctgaaagcagagttcttcaggcctgccctgtgacactcaatcacagttgacgtcaggatgggtacaatgtgtgatggaaatttgctgatgttgttggccacccgaatgagcatgcgagccccntttcatgtgatctccatttttaacatgaatctttactagtatatagctgtgcagaatcatgaggttggtggccatctcggagggaattttgatcttctgggatttcagttctgcatacatactgaagagaacatcgtgtgcattccggtagttgcctgcagactgctcttctctggcaatgatgatggcagtctgggcagcttctcggtattgcttcagagccatgtacaagcggaacaggtacttggcatccttaggcatgccatcgttctcccccaggagatggtctatcagctgattggtcagcagttcatctttggcctgaccaacagtttcaattgccatttctattgccacattatcttccgagcttgggcatttcaggaagtgtttaagtgctcgtgaatattggccacacagcaagaagaattttccagcctgaagatatctc

SEQ ID NO: 255111 - DNA, 1141 bp, Homo Sapiens
tggcgggaagcgcacgcccggcggggaggggccgcagtgtgaaaaaacaactgatgtgaagaaaagtaaattctgtgaagctgatgtctccagtgaccttcgaaaagaagtagaaaatcattataagctttctttacctgaagatttctatcacttctggaagttctgtgaagaacttgatcctgaaaagccatctgattcactttctgcaagccttggacttcaattagttggtccttatgatatccttgctggaaaacataaaacgaagaaaaaatcaacaggcctgaattttaaccttcactggaggttttactatgatcctcctgagttccagaccattattattggagataataaaactcagtaccacatggggtatttcagggattctcctgatgaatttcctgtatatgttggtataaatgaagcaaagaaaaattgtataattgttccaaatggagataatgtatttgctgcagtcaaattatttttgacgaaaaaacttaaagaaataacggataaaaagaaaatcaatctcttgaaaaacatagatgaaaaactcacagaagcagccagagaattggggtactcgcttgaacagagaaccgtgaagatgaaacagagagataagaaagttgtgacaaagacctttcatggtgcaggcttggttgttccagtagataaaaatgatgttgggtaccgagagctccctgaaacagatgctgacctcaagagaatttgcaagacaatagttgaggctgcaagtgatgaggagagactaaaagcttttgctcccattcaggaaatgatgacttttgtgcagtttgctaatgatgaatgtgattatggcatggggcttgaattgggaatggatctcttttgctatggctcacattattttcataaagttgctggccagcttttacctcttgcatataatctgttgaagaggaatctgtttgcagaaattattgaggagcatctggcaaacagaagtcaagagaacatagaccaacttgctgcatgagtaaggtggctttgattggtgtacagtatttcaaaggactagtattaaacttgtgatttttgttttgtttttaaggaatacaaaaaataaacatttactaaaaacgttaaa

SEQ ID NO: 255112 - DNA, 530 bp, Homo Sapiens
gaaaggactttcaaagtgccctcacacttgtgttctcaacagaagtctcccttccccaggcaccttctcccagggcctctccagccctgaggtcccatctcctctggtcctcttgcagagagctgtgggaggacccctctgagttccggcctgagcggttcctcaccgccgatggcactgccattaacaagcccttgagtgaaaaagatgatgctgtttggcatgggaaagcgccggtgtatcggggaaagtccctggcaaagtgggagatcttcctcttccctggccatactgctacagcaactggagttcaacgtgccgccgggcgtgaaagtcgacctgaccccccatctacgggctgaccatgaagcacgcccgctgtgaacatgtcccaagcgcggctgcgcttctccatcaactgaagaagacaccaccattctgaggccagggagcgagtgggggccagacacggggactcagcccttgttctcttccttcctttttttaaaaaatagcagctttagccaatt

SEQ ID NO: 255113 - DNA, 476 bp, Homo Sapiens
tgaccaaggaaagagtgcttggccaggggaaggaagggcaactacttgtacagtggccttgactcggggctcaatgtgtgacaggtaaggaaagggcagcaggtgaagtccccagggctgaggttcttagcctggagtccagggatgggtttcattcagggagtccagtggctcctgaaattgcttggggtttttgagtctacgtcagttatctgttttcctagggaaggtccgtaaccttcatcagattttccaagggcttcgtgtctccaaagagctaagaagcactgctcagaaaggaaaatgaagcctgcaggtttcattcacatctggaagaaggttttgcctctagaaccaggtctgccaccaacttgctgtgttagcttagaccaatcacttcctgtctctgaactctagccaagtggtggaccaggcgggagcagagaagccagctctccacacaggcatcgtcctac

SEQ ID NO: 255114 - DNA, 1165 bp, Homo Sapiens
  misc_feature (114)..(114): n is a, c, g, or t
acacactccgtaaatggtagatacaattattaatattatttgcattcatcttctttgtgcagactacactgtgttgatcctcttaagtgtaacattcagcagcctgcccagctntaatttcactcacactagatcctctagaaagcaagtttgtgccattgctgcagggaccctggtagattacagtagatggcagttgacatagtgtaaatagtaagaagaagcaataacttccacagttcagcagcctgactacatgttggtctttcagtgcctcacatccaaggggagagagctaacacgcatctcactggttgctgaaggaggctgctgtgttatggatgaactggtcaaacctgaaaacaagattctggactacctcaccagcttttcgggaatcacgaagaagattcttaacccagtgccgaccaaactcaaagatgtacagaggcagttgcactgcttcctcctgatgctgtgttagtgggccactccttagatttggatctcagagcactgggcagaagatttaagctcaagttcttagccaaagttattttggggaaggatatacagtgtccagacagacttggtcatgatgccacagaagatgctagaacaatccttgaattggctcggtatttccttaagcatggcccaaaaaagattgcagaactaaatctagaagcactagctaatcaccaagaaatacaagcagcaggccaagagcctaaaaacacagcagaagtacttcagcacccaaacacaagtgttttagaatgcttggattcagtgggtcagaagcttcttttatttgacccgggagacagatgctggtgaacttccatcttccagaaattgtcaaactattaagtgtctttcaaataaagaggttcttgagcaggccagagtggaaatccccctgtttcccttcagcattgttcagttctcttttaaagccttttcacctgtcctcactgaggagatgaacaaaaggatgaggatcaagtggacagagatatcaactgtctatgctgggccatttagcaaaaattgcaatctcaaggctctgaagaggctgtttaaaagctttggcccagtccagtcaatgacttttgttcttgaaacccgtcagcctcatctctgtatacagtatgaagtccta

SEQ ID NO: 255115 - DNA, 1238 bp, Homo Sapiens
cgagcgtaaggtccagctggtcaccgacagggatcacttcatccgaaccctcagcctcaagccgctgctcttcgaaatccccggcttcctgactgatgaagagtgtcggctcatcatccatctggcgcagatgaaggggttacagcgcagccagatcctgcctactgaagagtatgaagaggcaatgagcactatgcaggtcagccagctggacctcttccggctgctggaccagaaccgtgatgggcaccttcagctccgtgaggttctggcccagactcgcctgggaaatggatggtggatgactccagagagcattcaggagatgtacgccgcgatcaaggctgaccctgatggtgacggagtgctgagtctgcaggagttctccaacatggaccttcgggacttccacaagtacatgaggagccacaaggcagagtccagtgagctggtgcggaacagccaccatacctggctctaccagggtgagggtgcccaccacatcatgcgtgccatccgccagagggtgctgcgcctcactcgcctgtcgcctgagatcgtggagctcagcgagccgctgcaggttgttcgatatggtgaggggggccactaccatgcccacgtggacagtgggcctgtgtacccagagaccatctgctcccataccaagctggtagccaacgagtctgtacccttcgagacctcctgccgctacatgacagtgctgttttatttgaacaacgtcactggtgggggcgagactgttttccctgtagcagataacagaacctacgatgaaatgagtctgattcaggatgacgtggacctccgtgacacacggaggcactgtggacaaggggaaacctgcgtgtcaagccccaacaggggcacagcagtctttctgggtacaactacctgcctgatgggcaagggttgggtggggtgacgtagacgactactcgctgcacgggggctgcctggtcacgcgcggcaccaagtggattgccaacaactggattaatgtggaccccagccgagcgcggcaagcgctgttccaacaggagatggcccgccttgccccgagaagggggcaccgactcacagcccgagtgggctctggaccgggcctaccgcgatgcgcgcgtggaactcttgagggagagttagccccggttccccagccgcggggtcgccagttgccccaagaatcagggggtccggggctgtcccttctgtcc

SEQ ID NO: 255116 - DNA, 987 bp, Homo Sapiens
  misc_feature (168)..(168): n is a, c, g, or t
  misc_feature (211)..(211): n is a, c, g, or t
ggttgttgcgcagcgtataaccaattatatagattcatgtatcattcacaaggtgaatcgcccgaaccacaaagaagaacgggcgttgcaggatatctttaccctgtgagtgttcgtcgccccccctggggcggtttttcaatgctagcgtgtttctttgggcccggngggcccccgctcccacccatccccgctccatcccggccccggncccctcggtccaaagctcttttgaaggcccagggcctgccccagcttggaggggccctgcagaagcttgcgggtccttgaggacacggctggcggtccctttccggagggtgctgcgaagcttgacgcatggtctccagacctttccaggggcttccagtgctcgcagcaagacggcaagcccccgtcccccctggctggagatgttcatgcagaagtacatgccgtaaatgatgtacacgtacagggtccccggcttcatgaacatgcctcggttgcggggggtctgccggccaccccttgagtgggcggcttcatcctctggccccaggtatgcctcggtctccacgatgcggcctcggagttctgtgccattaggaagtcgccggactaggacctgtcccagaaatgcccgggccagggggactgccggctggtcgaagaactccaaccccagtcgggtaaggtggccctttgggcttgagaaatagatgctgcggtatgggcccggagtggtgggcggtcccaagcagcgctccctggggcaaggtgcctgggctgcatcggacgagctgtgtggctgctctgcaggtgcctgggctgcgtcggacgagctgtgtggctgccctgctctagctggtcgctgcttcttttgccccatccgtcggcaaaactgggccccgctgcgcgcgggcatccggcggctcgggccggggcttcgtgggactcggaccccggcgcggagcccagcagccgccgaccacggaagcaccccta

SEQ ID NO: 255117 - DNA, 636 bp, Homo Sapiens
  misc_feature (370)..(420): n is a, c, g, or t
caggggcgccgcagccagcatggacgcggtcaggggctcctgtcctgggatgtgcacagccggctcctggacccgataggtgctatgtgctgctgaggaacatttgcacggcaggagcggccggcctggtgtacagcatcctaccccactgggtcctgtggtctgagtaccaatgttggctactctctgggtatgaggcaccgtgcgtggcacctgggtggaggcctgcctgacactgctgatgtgggccggggggcgccgacagagtcacaaatcagaggcatctttggtgatgactgctggtggctagctgcgtgtcttccattggctcaccactgtgcttggtactttacacacgtctcattcaggnnnnnnnnnnnnnnnnnnnnnnnnnnnnnnnnnnnnnnnnnnnnnnnnnnnttgggaagtggcagagccaggtttcatccctgtgttatgactgcctcacggggcccacaccaataggccagtttgagagtggaaggggctgggtcactcacaggaaggtctaggtggctggaatgtccacctgggggcaggctgggtgggtgtcactgggccacagccatagtatgcagcctgggctggaggctgcatgggaaaagaagacccaga

SEQ ID NO: 255118 - DNA, 552 bp, Homo Sapiens
  misc_feature (161)..(161): n is a, c, g, or t
  misc_feature (378)..(378): n is a, c, g, or t
ccccactgggtcctgtggtctaagtaccaatgttggctactctctgggtatgaggcaccgtgcgtggcacttgggtgaaggcctgcctcacactgctaatgtggcccggggggcgccaaggcacaacttggtgcccggaccattgaggcacctgaagggtnagccagcttgtggtgcagacaccacagagagagaaaagttgaatgaagtggtgggaataatcagggtggcacactgtgccttagaagcttccagggccaccaagagaatggaaagggaaactacaacattcacaacagaatataggagtcaattcacttagacccagaactacagaaagggggagtgtaggatatccacaatttcaaagacagctcngtgtctacctagagccccaaactgcataagcaccaggattgtacaccttagtccctcaagatagtttcaagtgagcgtgcaattcactcttacagaggagggcctttggtcaacaatatagccagaggaatttcaccttctcagctttgcaagaattttcagagtcactcgtgc

SEQ ID NO: 255119 - DNA, 928 bp, Homo Sapiens
  misc_feature (879)..(879): n is a, c, g, or t
gaaggagaggagtaggagaaagagaaggagctctgttggtaatggtgggaaaattagtcattgtgttttctcagtgagtacagaagctttactttaccatgactaaaaattggccttttcttctctgttgtatagaataatggtttacaggaaaaaatatgtgctatggaggggctgccacgtttcttctataacaagaaatctgatgtgggatttctgcctcctttccctaccctggatcccgaagagaaatgccaggcttatgaaagtaacagagaatcccttttaaatcactttttatatgaagttgccagaaggaacccatttgtcttcgcccctacacttctaactgttgctgttcattttgaggaggtggccaaatcatgttgtgaagaacaaaacaaagtcaactgccttcaaacaagggcaatacctgtcacacaatatttaaaagcattttcttcttatcaaaaacatgtctgtggggcacttttgaaatttggaaccaaagttgtacactttatatatattgcgatactcagtcaaaaattccccaagattgaatttaaggagcttatttctcttgtagaagatgtttcttccaactatgatggatgctgtgaaggggatgttgtgcagtgcatccgtgacacgagcaaggttatgaaccatatttgttcaaaacaagattctatctccagcaaaatcaaagagtgctgtgaaaagaaaataccagagcgcggccagtgcataattaactcaaacaaagatgatagaccaaaggatttatctctaagagaaggccttctttgcgaagtttacttttgaatactcaaggagacatccagacctgtctataccagagcttttaagaattgntaaatatacaaagatctcctgagaaattgctgcacacagaaaccctcca

SEQ ID NO: 255120 - DNA, 901 bp, Homo Sapiens
tcagagtccaaaaattggcaactgaagccagctgctggagatatgtaaagaagcttatctgatctccttgccttttctccctcatgcttctttgtctatttctggttcatcctacatgaacaagaaatgcacatgtagctaacagaccccgatattgttcctgtgtttttctgggtatcagccactccttatggggtggcaatgctgcatttgtgcttgcccttctcttgctgttcaatcagttttctagataaccaagaggcgcttaagtcctctgccttcctactcatgtattcagctgtctggaccacaaaggagggatgatggaacctctgaatgttgacagaaagaagaggggtaactccctggggactgaggtgggcagacagacctcagtgaccctttcaaataacctcaaaagaatattgctctactgagatatgatccacatacaaaccaagggtattgctacagcatttacgtgaacaaaaagcgatatgtttgtgatttcaaaaagatatataaagatgccctcccctttgtggcttatgtaagacctgaaacacaaactttagcaacaaaatgttgcgtagatataggagttatatacagtgtcagtgaagagagacctggacctcaacagaaggtaggttgggatttacaagggacaaaacacggttaccactaatagttttttcaaatactcgactttctatcacccaactttcaacatttcatgtttttttgatgcatgaaatactatcttctctttccagggaaggcttcctatctgtgtggtgatgaatcgcatttcctgagaacaaaataaaaggatttttctgtaactgtcacctgaaataatacattgcagcaagcaataaacacaacattttgtaaagtt

SEQ ID NO: 255121 - DNA, 1128 bp, Homo Sapiens
gcaaggttatgaaccatatttgttcaaaacaagattctatctccagcaaaatcaaagagtgctgtgaaaagaaaataccagagcgcggccagtgcataattaactcaaacaaagatgatagaccaaaggatttatctctaagagaaggaaaatttactgacagtgaaaatgtgtgtcaagaacgagatgctgacccagacaccttctttgcgaagtttacttttgaatactcaaggagacatccagacctgtctataccagagcttttaagaattgttcaaatatacaaagatctcctgagaaattgctgcaacacagaaaaccctccaggttgttaccgttacgcggaagacaaattcaatgagacaactgagaaaagcctcaagatggtacaacaagaatgtaaacatttccagaatttggggaaggatggtttgaaataccattacctcatcaggctcacgaagatagctccccaactctccactgaagaactggtgtctcttggcgagaaaatggtgacagctttcactacttgctgtacgctaagtgaagagtttgcctgtgttgataatttggcagatttagtttttggagagttatgtggagtaaatgaaaatcgaactatcaaccctgctgtggaccactgctgtaaaacaaactttgccttcagaaggccctgctttgagagtttgaaagctgataaaacatatgtgcctccacctttctctcaagatttatttacctttcacgcagacatgtgtcaatctcagaatgaggagcttcagaggaagacagacaggtttcttgtcaacttagtgaagctgaagcatgaactcacagatgaagagctgcagtctttgtttacaaatttcgcaaatgtagtggataagtgctgcaaagcagagagtcctgaagtctgctttaatgaagagagtccaaaaattggcaactgaagccagctgctggagatatgtaaagaaaaaagcaccaaagggaaggcttcctatctgtgtggtgatgaatcgcatttcctgagaacaaaataaaaggatttttctgtaactgtcacctgaaataatacattgcagcaagcaataaacacaacattttgtaaagttatttttc

SEQ ID NO: 255122 - DNA, 486 bp, Homo Sapiens
ctcgccaagagacaccagttcttcagtgaagagttgggaagctatcttcgtgagcctgatgaggtaatggtatttcaaaccatccttccccaaattctggaaatgtttacattcttgttgtaccatcttgaggcttttctcagttgtctcattgaatttgtcttccgcgtaacggtaacaacctgaagggttttctgtgttgcagcaatttctcaggagatctttgtatatttgaccaattcttaaaagctctggtatagacaggtctgaatgtctccttgagtattcaaaagtaaacctgcaatgtgtaaaattttgtatattagaaattagagaaagagcaaaaaacccaattccactattgtgtaatccagtcagatctaatactgactctgctttcaaaagctaattttctcctctgtcttggtcacagagtaatttaagagcacattttggctatagctcatttcacaaaagctctctcgt

SEQ ID NO: 255123 - DNA, 904 bp, Homo Sapiens
agagcgcggctgagcggccccgcagccaacccccgaggagcggccggctggcgtccgccgcgcccaggagttggggatgtcctacaaacccatcgcccctgctcccagcagcacccctggctccagcacccctgggccgggcaccccggtccctacaggaagcgtaccgtcgccgtcgggctcactgccaggagccggcgctcctttcagaccgctgtttaacgactttggaccgccttccatgggctacgtgcaggcgatgaagccacccggcgcccagggctcccagagcacctacacggacctgctgtcagtcatagaggagatgggcaaagagatccggcctacctatgctggcagcaagagcgccatggagcgcctgaagagaggtatcatccatgcccgggccctagtcagagagtgcctggcagagacagagcggaacgccgcacgtaacaggaagcgcctcggcctcagcgtctggacctatccggccactgcagagcacccgcttctccctggccttcatcccgagttgcactaaccatcctgggcttcctgtcctgtgtcccttggtgggtcccctccaggaaccaaggagtggccctccaggtggcagcactaaggacacccccccacaaacaagagttagcagcgaggtccccatgagtcccacccatgacctgccgacagtgttgcccaccggaacttttgtggcccctaccgctcagcccttcccagcacttctcccactttgtcccgagcctccttctcccccagcaggggcacaggcctggcacctccctgccttgtgtcctgagccatagtgactcttttatctgtgtgtcttttgctaaatatgccctttttatattaataaaagatgatttggagttgtgctctc

SEQ ID NO: 255124 - DNA, 365 bp, Homo Sapiens
gcttatattcactcaaaccagaatgtaattggatcgagcaaagctgaaaatcacatgagccgatgggcagcacatgacgtatttgagttgaagcagttttctcagctgcctgctaacatagctgtttgcagttctaagaaaacaatttgaagaaatggcctcttattttaactcgtcttctgtaaacgaatttgctaaacatataaccaatgccacatcagaagaacgacagaaaatgctaagagacttttatgcttctcaatatccagaggtaaaagaattttttgtggattctgtgtcacaattcaacaattcttcctttgagaaaggagagcagcgcacccggaagtctgatgagtctcttt

SEQ ID NO: 255125 - DNA, 616 bp, Homo Sapiens
gaaggggagggtgttcagaggcagcaccaccacacagtcacccctccctccctcttccccaccctccacctctcacgggccctgccccagaccctaagccccgtcccctaacccccagtcctcactgtcctgtgttcttaggcactgagggatctgagtaggtctgggatggacaggaaagggcaaagtagggcgtgtggtttccctgcccctgtccggaccgccgatcccaggtgcgtgtgtctctgtctctcctagcccctctctcacacatcacattcccatggtggcctcaagaaaggcccggaagcgccaggctggagataacagcctcttgcccgtcggccctgcgtcggccctggggtaccatgtggccacaactgctgtggccccctgtccccaagacacttccccttgtctccctggttgcctctcttgccccttgtcctgaagcccagcgacacagaagggggtggggcgggtctatggggagaaagggagcgaggtcagaggagggcatgggttggcagggtgggcgtttggggccctctatgctggcttttcaccccagaggacacaggcagcttccaaaatatatttatcttcttcacgggaa

SEQ ID NO: 255126 - DNA, 382 bp, Homo Sapiens
  misc_feature (247)..(247): n is a, c, g, or t
ccagggcccgaacgggccaaaaaagctgttaatcctccaaaccctggcgccttcccgggccctttccttgaaggcccacccatgggaaatgtgaatgtgtgaaaagaggggcctaggagagacagaagacacacgcaccctgggatcggcggtccggacaggggcagggaaaccacacgcccttactttgccctttcctgtccatcccagacctactcagatccctcagtgcctaagaaaacaggancagtaaggactgggggttaggggacggggcttaggggctgggacagggcccgtgagaggtggagggtgggaaagagggagggaggggtgactgtgtggtggtgctgcctctgaacaccctccccttccccagtct

SEQ ID NO: 255127 - DNA, 598 bp, Homo Sapiens
gcccttactacttacaaacctgtgtgaactactcgcagagaaatgcaaaggatggaaacacagttcatacacccccaaagtttatttattctaaattatgtcttgtggcatttaaaaactcatcccacatgggacaataaatctaaaaaagcaccaaaaaccaaaccacccagttccttttgactgtgagaagagggcataataatttagttgtaattacagagaactttatgtattatgaacaatcatccaatccttcacttaaagagtggcctactccttcacagggatgggctgggaatccatagccctccagccctatcatcgtcctgctactgcttgggagttaaaaaataccttctgatgttcacaaggtcagaataccttctgattgatttccactgaagcatcattaaatctaaatcgtggcattgctagcagcagaaagctgaatgtatcaatcaatcaatcaatcaaccaaccaaccgattactcactctgatataataagtcctgtgtattcattcacatgttccctttaaaaaaatccaatactttactttactttcgttgtcagtggaaagttgtttaaaatgag

SEQ ID NO: 255128 - DNA, 1393 bp, Homo Sapiens
agctttgcaatatggcggccgaggcggacggaccgcttaaacggctgctcgtgccgattcttttacctgagaaatgctacgaccaacttttcgttcagtgggacttgcttcacgtcccctgcctcaagattctcctcagcaaaggcctggggctgggcattgtggctggctcacttctagtaaagctgccccaggtgtttaaaatcctgggagccaagagtgctgaagggttgagtctccagtctgtaatgctggagctagtggcattgactgggaccatggtctacagcatcactaacaacttcccattcagctcttggggtgaagccttattcctgatgctccagacgatcaccatctgcttcctggtcatgcactacagaggacagactgtgaaaggtgtcgctttcctcgcttgctacggcctggtcctgctggtgcttctctcacctctgacgcccttgactgtagtcaccctgctccaggcctccaatgtgcctgctgtggtggtggggaggcttctccaggcagccaccaactaccacaacgggcacacaggccagctctcagccatcacagtcttcctgctgtttgggggctccctggcccgaatcttcacttccattcaggaaaccggagatcccctgatggctgggacctttgtggtctcctctctctgcaacggcctcatcgccgcccagctgctcttctactggaatgcaaagcctccccacaagcagaaaaaggcgcagtagagccagctactggagtcattccgtttccactcattcacccaacctcagggttctccccatctgagccagcctgctggtgtgacttactcatcctccattcctctgcacttgcagactttctgagccagggttttcttttagtggaaacaaatggttgatggatccagatccttagaaaaggagaggatgggggtagagtctcccaagccaaaattttgacatttgagtgctttcgtaagccctgtacatgtactattaattcagtcattcagccaagcctcctcctctaggcagcaatttccagctgtttaacactatcctggggcaaatgttttaccctgtcctccagcctccctgcttcccttctggccctggaagactgagtctggacggcagagtggagggactgggaggctgtggctgcctccctccctcagcccggctgggactgtctcccggaccccagtgctggggtgggggaagggggacggagaatgactcaggcagggccccagggtggggtgaggaggttcctgctctggcaggtctaggcggaagggagtggagatggggctggttcctgctgcagtgaggggaacagatgggacaataaagactggagactcaggtgaataata

SEQ ID NO: 255129 - DNA, 441 bp, Homo Sapiens
  misc_feature (55)..(55): n is a, c, g, or t
  misc_feature (332)..(332): n is a, c, g, or t
aaatgctttccgtaaaacccctgtaacatgtaactaattaaattcaagtcaattncaagccaaaagcctccctccctcctaagcaagcaaatttcccagctgtgtaaacactatccctgggcaaaatgttttacccctgtcctcccagcctccctgcttcccttctgccccctggaagactgagtctggacggcagagtggagggaccgggaggctgtggctgcctccctccctcagcccggctgggactgtctcccggaccccagtgctggggtgggggaagggggacggagaatgactcaggcagggccccagggtggggtgaggaggtncctgctctggcaggtctaggcggaagggagtggagatggggctggttcctgctgcagtgaggggaacagatgggacaataaagactggagactcagttgaataataaaa

SEQ ID NO: 255130 - DNA, 1065 bp, Homo Sapiens
ggacgcgtgggcgaggcgccaccgacgcggaagactataagccccagcgggcgacgaccgaacgcccccgggaacaccgggccccgagctcggtcccgcgcccgaggatcctccacggggctagatggctgcgtcgggggcgggagcggaggtgagcgggcgctagggccgcgagcccccgccggcccttcctccagcgccctgcggaccccgcagaaggcgctcgcctccctagcccgcaaaaacatatcgatttttctcgctgtggcaacggggacgtcctgatagatcctctgctccaataggcaactccggccttccctgccctgacctggaacctctgggagggctgcagagtaagtgccgcctctgcgctccgacggaggcacgaggcctgtggagtaggtccctctgttccgacaggtgcgacacttggcgctccatgcttgcgggtgccgggaggcctggcctcccccagggccgccacctctgctggttgctctgtgctttcaccttaaagctctgccaagcagaggctcccgtgcaggaagagaagctgtcagcaagcacctcaaatttgccatgctggctggtggaagagtttgtggtagcagaagagtgctctccatgctctaatttccgggctaaaactacccctgagtgtggtcccacaggatatgtagagaaaatcacatgcagctcatctaagagaaatgagttcaaaagctgccgctcagctttgatggaacaacgcttattttggaagttcgaaggggctgtcgtgtgtgtggccctgatcttcgcttgtcttgtcatcattcgtcagcgacaattggacagaaaggctctggaaaaggtccggaagcaaatcgagtccatatagctacattccacccttgtatcctgggtcttagagaccctatctcagacagtgaaagtgaaatggactgatttgcactcttggttctttggagccttgtggtggaatccccttttccccatcttcttctttcagatcattaatgagcagaataaaaagagtaaaatggtttccttcccttctgt

SEQ ID NO: 255131 - DNA, 773 bp, Homo Sapiens
  misc_feature (426)..(426): n is a, c, g, or t
  misc_feature (460)..(460): n is a, c, g, or t
  misc_feature (572)..(572): n is a, c, g, or t
  misc_feature (586)..(586): n is a, c, g, or t
  misc_feature (599)..(599): n is a, c, g, or t
  misc_feature (613)..(613): n is a, c, g, or t
  misc_feature (681)..(681): n is a, c, g, or t
  misc_feature (751)..(751): n is a, c, g, or t
tgcgctgacagacgcaagatggcggacagtgcggaactaaagcaaatggttatgagccttagagtgtctgaactccaagtactgttgggctacgccgcgagaaacaagcacggacgcaaacacgaacttctcacaaaagccctgcatttgctaaaggctggctgtagtcctgctgtgcaaatgaaaattaaggaactctataggcggcggttcccacagaaaatcatgacgcctgcagacttgtccatccccaacgtacattcaagtcctatgccagcaactttgtctccatctaccattccacaactcacttacgatggtcaccctgcatcatcgccattactccctgtttctcttctggggacctaaaacatgaactgggaacttcccacatctttacatcagcttcttcacccagtccatccnggatataaaactttcaaaaatttaccattttaangatttactggatgaactgatcccaccagtctagcagaaattatctgaatacacgaagattataggagtcattttcaaacaaccatcagacaacagtcagcgctttcgagaanacctgtttgcattngccttgacaccancacaggtgcagcanatcagtaagttcatggatatttctgggaccaaatgtgacttcacagtacaggtcccagtaaggtttgntatcagaaacacgtgtcacaggaggacaacttccacccaatctttgtgtggtgaatcaataccctgcagnctttcaaggtaactttcacttc

SEQ ID NO: 255132 - DNA, 1663 bp, Homo Sapiens
  misc_feature (23)..(24): n is a, c, g, or t
cacgtgggggtaggggagtggcnncacatgctcttgctgtgtacacacagtgaaggacctctcccgcagcaagcacatgcccacagcttgagcacactgtccatgcatctcctgtccccaacaggcagtcgtggcctttggggcctggcaagttccgagctggctacgccccatgcttctccagggtgctggcgacctggcaaggactagggcagtcccccactgcacccccagctcatgaggccaaacccagggcttcccactgcctggcagaggagccctctgtgaccgccaactctccttctgtggtccgggcaggatggtcttgcagccctcactagactgtcacagagcctggggctgggctgccagagcacaccactctggggcaggagctgctgctacctccaggagttctgcgtcatgggcgccactgcgggaggacacaggctgaggtggctgcagccacaggagggcccggtgccacagggggaggtggggcacagacataccctcggggcataggctgggcaccagcatgggactcagagggagcgcccaggagggactcctctctggctggaggcagaggcccctgtgggttggaaagtcagcttggagtggggctgggacaggtcctcacctcacagcctccccccagaaccactccgacctgagtgccaggagggcccctgtcaggccgtgggggcggtggcagcgcagccccggtctgctggatgaactgctgcaggttgcactgacggagctctcggttcagctcctccagctcctgagcctgagcctgcaaggctcgctctgctgcctccaggggccggctcaccagagccaggctgccctgcacctccgcactctgccgctcctgaacagccaggtcctggtgcaggcgctcagtggcagatgccataggtgaggggggcccaggggcctccgctgccagctgcagctcagcctccagggcacgggcctgagcgtccagggcctgcagccgggcggcatgctcagcagtggccgcacttagtgcctgcaggcgtgcctgtccctctcgctcccgggcctgctcccggcgcagctcttgctcccagaaggcctcatggcccagctcctcagcattcctctgcaccctgagctccaggccctgcaggtctgtgcagcagcctggtgtgggtgtcacaggggccgcaggcccagggcgtgagaggctgggggctggctcgggggtcagtgttttgcggggctcacagcccagcgcagcccgtggctttacagggaggctggcacgaattaggcagcgttccgggggtggacagctgtctgaggagggcctcccagctaggctgggccctgtgcgcctcaggacaaactggacatcgctggcaaactgtccgcaggtggcctgggcgcccactggacactcttgtggcagcaactgccgctccttctcccgaagccgctgcacaagcacaaagcggccagtctggcctattgcttgggctagtgcgatgaccacttcctggcaggtggtctgctctgagaccccacagaccacacgctggatgccatccacccacaccttcagctccatggccgccagtcccaacaacatgcctgtcctgggcgctcgccagcctggagacccgctccg

SEQ ID NO: 255133 - DNA, 1570 bp, Homo Sapiens
attcgtccttcctcagccgcgggtgatcgtagctcggaaatggcgggatttggtgctatggagaaatttttggtagaatataagagtgcagtggagaagaaactggcagagtacaaatgtaacaccaacacagcaattgaactaaaattagttcgttttcctgaagatcttgaaaatgacattagaactttctttcctgagtatacccatcaactctttggggatgatgaaactgcttttggttacaagggtctaaagatcctgttatactatattgctggtagcctgtcaacaatgttccgtgttgaatatgcatctaaagttgatgagaactttgactgtgtagaggcagatgatgttgagggcaaaattagacaaatcattccacctggattttgcacaaacacgaatgatttcctttctttactggaaaaggaagttgatttcaagccattcggaaccttacttcatacctactcagttctcagtccaacaggaggagaaaactttacctttcagatatataaggctgacatgacatgtagaggctttcgagaatatcatgaaaggcttcagacctttttgatgtggtttattgaaactgctagctttattgacgtggatgatgaaagatggcactactttctagtatttgagaagtataataaggatggagctacgctctttgcgaccgtaggctacatgacagtctataattactatgtgtacccagacaaaacccggccacgtgtaagtcagatgctgattttgactccatttcaaggtcaaggccatggtgctcaacttcttgaaacagttcatagatactacactgaatttcctacagttcttgatattacagcggaagatccatccaaaagctatgtgaaattacgagactttgtgcttgtgaagctttgtcaagatttgccctgtttttcccgggaaaaattaatgcaaggattcaatgaagatatggcgatagaggcacaacagaagttcaaaataaataagcaacacgctagaagggtttatgaaattcttcgactactggtaactgacatgagtgatgccgaacaatacagaagctacagactggatattaaaagaagactaattagcccatataagaaaaagcagagagatcttgctaagatgagaaaatgtctcagaccagaagaactgacaaaccagatgaaccaaatagaaataagcatgcaacatgaacagctggaagagagttttcaggaactagtggaagattaccggcgtgttattgaacgacttgctcaagagtaaagattatactgctctgtacaggaagcttgcaaattttctgtacaatgtgctgtgaaaaatctgatgactttaattttaaaatcttgtgacattttgcttatactaaaagttatctatctttagttgaatattttcttttggagagattgtatattttaaaatactgtttagagtttatgagcatatattgcatttaaagaaagataaagcttctgaaatactactgcaattgcttcccttcttaaacagtataataaaagcttagttgtgt

SEQ ID NO: 255134 - DNA, 1051 bp, Homo Sapiens
  misc_feature (723)..(727): n is a, c, g, or t
  misc_feature (729)..(729): n is a, c, g, or t
  misc_feature (731)..(736): n is a, c, g, or t
  misc_feature (738)..(740): n is a, c, g, or t
  misc_feature (743)..(754): n is a, c, g, or t
  misc_feature (756)..(756): n is a, c, g, or t
  misc_feature (758)..(784): n is a, c, g, or t
  misc_feature (792)..(792): n is a, c, g, or t
  misc_feature (839)..(839): n is a, c, g, or t
  misc_feature (841)..(843): n is a, c, g, or t
  misc_feature (910)..(981): n is a, c, g, or t
caccgccaggacccccctaaatgtgctctggggggactggccagcccagtccattgccaccaccactgccgcctgtgcttgctgcctgggggcctgacggttgacccgccactgctactgccatcaccaacaccacgcatactgcccagggactcatgaaaccacctgcctgcccatcccattgctgtcactgctggtacctgacatgagtgatgccgaacaatacagaagctacagactggatattaaaagaagactaattagcccatataagaaaaagcagagagatcttgctaagatgagaaaatgtctcagaccagaagaactgacaaaccagatgaaccaaatagaaataagcatgcaacatgaacagctggaagagagttttcaggaactagtggaagattaccggcgtgttattgaacgacttgctcaagagtaaagattatactgctctgtacaggaagcttgcaaattttctgtacaatgtgctgtgaaaaatctgatgactttaattttaaaatcttgtgacattttgcttatactaaaagttatctatctttagttgaatattttcttttggagagattgtatattttaaaatactgtttagagtttatgagcatatattgcatttaaagaaagataaagcttctgaaatactactgcaattgcttcccttcttaaacagtataataaatgcttagttgtgatatgttaaannnnnanannnnnnannnaannnnnnnnnnnnancnnnnnnnnnnnnnnnnnnnnnnnnnnncaaacaanaccaacccccacccaaggtaaaaaaccccaacccccaaccccaaaanannnctctttgtgggggccgccttcgggcccccttgaaaaaaacttttttaaaaaaccccttttttttttnnnnnnnnnnnnnnnnnnnnnnnnnnnnnnnnnnnnnnnnnnnnnnnnnnnnnnnnnnnnnnnnnnnnnnnntttcttcccacaaaaggagaaaaccccccgggggccataagaaaacaaaaagggggcctggtggggattt

SEQ ID NO: 255135 - DNA, 373 bp, Homo Sapiens
  misc_feature (261)..(278): n is a, c, g, or t
caggaaaaggaactgctttcgtgtgggaaagcaggaactgagttcattacatctttaatttggcagaaattagcctttctgtgaaccagatgtggtttggggcagatctgtagtaaacaatggtgattttatttatttttactctctggaaaaggagataatacaatcccagaaagtgaactcatatttctaaggttaagattcccttttattgcacctagaatagtgctatgcacagagcgggtgcttgagttgttgtcnnnnnnnnnnnnnnnnnnaaatgtaaactggtaaattttgtgcttatcttcaaggctggcttaagtataaaattgttttttaaacacttgaaaaattaaaggatttgttttat

SEQ ID NO: 255136 - DNA, 1646 bp, Homo Sapiens
  misc_feature (1329)..(1343): n is a, c, g, or t
ggacaggaagtagaatttattggtgactattaagagaaattggaccatcactcggcttaatggtgattttgctcagcttaatttaaagataaaatttcttgaagctggtatctatgaagttcccatcataatcacagattcgggtaatcctcccaaatcaaatatttccatcctgcgcgtgaaggtttgccagtgtgactccaacggggactgcacagatgtggacaggattgtgggtgcggggcttggcaccggtgccatcattgccatcctgctctgcatcatcatcctgcttatccttgtgctgatgtttgtggtatggatgaaacgccgggataaagaacgccaggccaaacaacttttaattgatccagaagatgatgtaagagataatattttaaaatatgatgaagaaggtggaggagaagaagaccaggactatgacttgagccagctgcagcagcctgacactgtggagcctgatgccatcaagcctgtgggaatccgacgaatggatgaaagacccatccacgccgagccccagtatccggtccgatctgcagccccacaccctggagacattggggacttcattaatgagggccttaaagcggctgaaaatgaccccacagctccaccatatgactccctgttagtgtttgactatgaaggcagtggctccactgctgggtccttgagctcccttaattcctcaagtagtggtggtgagcaggactatgattacctgaacgactgggggccacggttcaagaaactttctgacatgtatggtggaggtgatgactgaacttcagggtgaacttggtttttggacaagtacaaacaatttcaactgatattcccaaaaagcattcagaagctaggctttaactttgtagtctactagcacagtgcttgctggaggctttggcataggctgcaaaccaatttgggctcagagggaatatcagtgatccatactgtttggaaaaacactgagctcagttacacttgaattttacagtacagaagcactgggattttatgtgcctttttgtacctttttcagattggaattagttttctgtttaaggctttaatggtactgatttctgaaacgataagtaaaagacaaaatattttgtggtgggagcagtaagttaaaccatgatatgcttcaacacgcttttgttacattgcatttgcttttattaaaatacaaaattaaaccaaccaaaaaactcatggagcgattttattatcttgggggatgagaccatgagattggaaaatggaccttaattctagttttagaccttacctttggcnnnnnnnnnnnnnnncccctaaaattcttaaaacttacctcccctgggttgcaaataaaagggagttttcctaatcccccaatttggaacgaaaaattgcaatttttttcataaaacctaccaatggtttcaaccccattttcgggacctaaaccccactgttaccacctttttcaaatctccggagattttttcccccatttccctcggcacaaaataagcattgcgggacccttcaagggtctctattcggcccccacttctcataggcacaaattggccaaacaacttcttcaaaacatggcgggacgcgcttta

SEQ ID NO: 255137 - DNA, 931 bp, Homo Sapiens
gggcttcgtcccgcggagtccaggcttcaggctttcaccagttctcaggatgcccatagggatgggtgaagcctgcctggcctgtggtgctttccagtggccgtcatctcattagggccccacagtggcattaggatgcacctctcggcggtgttcaacgccctcctggtgtcggtgctggcagcggtcctgtggaagcatgtgcggctgcgtgagcatgcagccacactggaggaggagctggccctcagccgacaggccacagagccagccccagcactgaggatcgactacccgaaggcactgcagatcctgatggagggcggcacacacatggtgtgcacgggccgcacgcacacagaccgcatctgccgcttcaagtggctctgctactccaacgaggctgaggagttcatcttcttccatggcaacacctctgtcatgctgcccaacctgggctcccggcgcttccagccagccctgctcgacctatccaccgtggaggaccacaacactcagtacttcaacttcgtggagctgcctgctgctgccctgcgcttcatgcccaagccggtgttcgtgccagacgtggccctcatcgccaaccgcttcaaccccgacaacctcatgcacgtctttcatgacgacctgctgccactcttctacaccctgcggcagtttccccggcctggcccacgaggcacggctcttcttcatggagggctggggcgagggtgcacacttcgacctctacaagctgctcagcccaagcagcctctcctgcgggcacagctgaaaaccctgggccggctgctgtggctcccccatgcttttgtgggcctctccaaaacactacctggaaccagaatggcttttgtgcaaccccagggcccgaagggccaaaatcctcgtttcaggaattgaaatccgg

SEQ ID NO: 255138 - DNA, 616 bp, Homo Sapiens
taataaaaacctatatagtatgttctctcctccaaagttttaactctaaaaattggttcctaggtttaattgtacctttaatttgcttattcagtacttagaatttgtttaactggtacttttattattttttagtgaaagacttttgaaaagtgccctttccccttaagagacagttggaataccagttgactaatattacaagctcttgtagggggaaaaaggagcttattaaagttgtttactaaactttaggaaaagatgtcttgcatcagtcttactaggcataaaagtcacacttaatgactggaaaaaacttgcttattgcctttccctatataaatattaattgtctagaatgaaagctaatataggaacaagactcccaaatccatgaaaacgcttagtgaatatattcttaatcattaataaattagcccattatattttcatctgtatttgcctaaaaaatttatttgcatttatgcctttaaggatattttggatctttctaatctggtttatcaatgctacacggttttaatcaaacaagtgcgaactgtatttatttggcctgccagttgaggaaatgcacccttctggttttttttaacct

SEQ ID NO: 255139 - DNA, 1581 bp, Homo Sapiens
  misc_feature (842)..(842): n is a, c, g, or t
ctctgggggtggtcggcgcgcccctccccacctcgcgggggccgtgtgggcgtcgctcggtcgttggggtgccggggacgtcgtgatgagaacggcgtcccagagacgacggcgacagagccgggacacgtgacagtcacagggtcacattctgcggtccacgagtttgggaccgggctggtcacgtgacgcggtgggggcaccatggggtgatgtgagatgcgtgtctcggattacgtacaaatgacgtattcctaccccttttggcaaccagatttccgttggaagatgcaacggttccggtgacggtagcaagttctcgcgtccaggcatctccgcttccgctcggggcgcaacaacttccgactccaccttcccagcctcgggcaaggaagagacgcgaccatggggatgacagctcggacgaagaggacaaggagcgggtcgcgctggtggtgcacccgggcacggcacggctggggagcccggacgaggagttcttccacaaggtccggacaattcggcagactattgtcaaactggggaataaagtccaggagttggagaaacagcaggtcaccatcctggccacgccccttcccgaggagagcatgaagcaggagctgcagaacctgcgcgatgagatcaaacagctggggagggagatccgcttgcagctgaaggccatagagccccagaaggaggaagctgatgagaactataactccgtcaacacaagaatgagaaaaacccaggtggaattcaagaagtcaggaagaggaacttccttgggcaacactgaagaggaactcccctgcatggggtcctgtcccagcaattcngtggagctcatcaacaagtgcaattcaatgcagtccgaataccgggagaagaacgtggagcggattcggagcagctgaagatcacccaatgctgggatgatgtctgatgaggagttggagcagatgctggacagtgggcaaagcgaggtgtttgtgtccaatatcctgaaggacacgcaggtgactcgacaggccttaaatgagatctcggcccggcacagtgagatccagcagcttgaacgcagtattcgtgagctgcacgacatattcacttttctggctaccgaagtggagatgcagggggagatgatcaatcggattgagaagaacatcctgagctcagcggactacgtggaacgtgggcaggagcacgtcaagacggccctggagaaccagaagaaggcgaggaagaagaaagtcttgattgccatctgtgtgtccatcaccgtcgtcctcctagcagtcatcattggcgtcacagtggttggataatgtcgcacattgttggcactaggagcaccaggaacccagggcctggccttctctcccagcagcctggggggcagggcagagcctccagtcggaccccttcctcacactggcccctatgcagaagggcagacagttcttctggggttggcagctgctcattcatgatggcctcctccttcaggcctcaatgcctgggggaggcctgcactgtcctgattggccgggacacacggttttgtaaaaaatt

SEQ ID NO: 255140 - DNA, 581 bp, Homo Sapiens
  misc_feature (262)..(262): n is a, c, g, or t
  misc_feature (265)..(265): n is a, c, g, or t
  misc_feature (267)..(268): n is a, c, g, or t
  misc_feature (270)..(271): n is a, c, g, or t
  misc_feature (273)..(273): n is a, c, g, or t
  misc_feature (275)..(275): n is a, c, g, or t
  misc_feature (279)..(279): n is a, c, g, or t
  misc_feature (287)..(287): n is a, c, g, or t
aattttttacaaaaccgtgtgtcccggccaatcaggacagtgcaggcctcccccaggcattgaggcctgaaggaggaggccatcatgaatgagcagctgccaaccccagaagaactgtctgcccttctgcataggggccagtgtgaggaaggggtccgactggaggctctgcctgccccccaggctgctgggagagaaggccaggccctgggttcctggtgctcctagtgcctgtaaggaaaggagggagaacagggtctgnatnanngnngnanggcnggggcaanggcttggggcaggccagggggcagcccacaacatctcaaccaacaatgtgcgacattatccaaccactgtgacgccaatgatgactgctaggaggacgacggtgatggacacacagatggcaatcaagactttcttgttcctcgccttcttctggttctccagggccgtcttgacgtgctcctgcccacgttccacgtagtccgctgagctcaggatgttcttctcaatccgattgatcatctccccctgcatctccacttcggtagccagaaaagtgaatatgtcgtgcagct

SEQ ID NO: 255141 - DNA, 1059 bp, Homo Sapiens
  misc_feature (679)..(679): n is a, c, g, or t
  misc_feature (695)..(695): n is a, c, g, or t
  misc_feature (735)..(735): n is a, c, g, or t
  misc_feature (860)..(860): n is a, c, g, or t
  misc_feature (877)..(877): n is a, c, g, or t
  misc_feature (965)..(965): n is a, c, g, or t
  misc_feature (1025)..(1025): n is a, c, g, or t
ccacctgagggagcctgggcctctcaaggaaagtcccggggaagcctttaaggctctgtctgccgtggaagaggagtgtgacagcgtgggcagcggcgtgcaggtggtgattgaggagctgctgcagctgtgagcagcctcagtggggcctgggcctttgggctttccagcaactcagagggacatgcggctcccagggtgcacgctggctgtcagcgaggcggcccccctgctcaatcctctggtggatgattacgtggcctctgagggtgcagtacagagagttctggtccctgcttatgccaagcaactctcaccagccacacaactggcaatccagcgggcaaccccagagacaggaccagctgcgctggacagtgccttggaagagtcaggccctgtgagcactggggagctgagacactctctatggctgaccgtttccccatgcaggaccagaggaagtgggcagaagaactccaggcgcaagcgggatcttgtactctctaaactggtccacaatgtgcataaccacatcaccaatgacaagagattcaatgggtctgaaagcatcaagtcctcttggatatttcagtagtgaagtttcttctggaaaagctcaagcagagctggtgaccagtccccacaattacactgataaggagctcctgaacccccntaaagggcctgagganaaagaggagaagaaactccgaagtcgccgatatccgcttntttgcaaccgatccagtatcatgaggcattttggacctgaggaccaacgtctgtggaatgatgtgacagaggaactgatgtcagatgaagaagacaggtctaacgagcccaggggtgtgggtggnccggcccttccccgttncgggccccacggcctacaagagctctgttaacaccttggatgctaactctaagcatggcaccaaagccaaccgggtgtattggccctnctcagacagactgcttcttgtgaagcccaggttcttcaccagaactttcaatcctaattncaagagaggaagagagggagggatgagatgcact

SEQ ID NO: 255142 - DNA, 1092 bp, Homo Sapiens
ccgagaccgcggcggagctacggtccctgcagtgcctgctgctgaggaggccaccgaagctcggggacgcgaggagccggcgtggccctggaaaaacgccccgatccgcacgctggtgcagcgcatccaccagctgcaggctgagcgcgcgcagggcttccgccaactggaggagtgagtgggggcgcggaggggctcagggttcggtcccccgcccgctccgggcgtgggcgtgttctcggcgggcgtgcctggaggaggagctgggtccttgtgtggctgcagagtcagatggggcggggatttcggggcaccgggtcctcaccttcacgaaaaaggccccacagcacgtccccactacccgacgactcactcttcgtggcttctctctcctccccaagagcaggggtgggcctgtctcgcgttcccctgcgggagtcaggaagcgtccttcctacctaccagtcctcccctctggtgtctggggacacttcctgggggcctttcaggtggttggcgccggtgcagggcctgagagcctgggggcgcggcctcagggtccccacatgccgcagaggccaccgccagtacctgcgcagcggccctgactacgacttcgcgcgctaccggagcacagtgcacggggtgacccaggccttcgccgccgcctcgcgggaggtgctggcggtggaagcagagctgggcgggcctcgcaggcagccgctgctcgccggccacgtgcgcagcctgcaggagctggagcagacgcggctgggcacggtggccctgctgcagttgatggagacgccagagctggcggggcaggaggacgctgtacggatgcagcagctgaaaatgaaggtaattaaaaccatggaggcgatcagcgaggttctccaggaccttaggtttgatgcggaatctgccgagtgatggcggctccccagggatgcgccgagggagatgggaaacggggcggatggcgcccagcccagccctaactgccagctggctggggtcgcgccccactgcgctgctgaccttcctgcagttccagacacctcccacaataaaaaactcctccccctttaa

SEQ ID NO: 255143 - DNA, 733 bp, Homo Sapiens
cggcgctagagaccgacggccgccgtccgggcccggcggcgggacccacgcggctgaggctggtcagaatctcattttcagcttctgccagagccagcagcagctgggaaagaaggctgtgctctttgaagagagtcagccagcctgaaagagcacgatggatcttgatgtggttaacatgtttgtgattgcgggcggcacgctggccatcccaatcctggcatttgtggctgcatttcttctgtggccttcagcactgataagaatctattattggtactggcggaggacattgggcatgcaagtccgctatgttcaccatgaagactatcagttctgttattccttccggggcaggcctgggcacaaaccctccatcctcatgctccacggattctctgcccacaaggatatgtggctcagagtggtcaagttccttccaaagaacctgcactcggtctgcgtggacatgccaggacatgagggcaccacccgctcctccctggatgacctgtccatagatgggcaagttaagaggatacaccagcttgtagaatgcctgaagctgaacactgctgcttactacccatcggatgtctccagcctgtgtctcgtgtgtcctgctggcctgcagtactcaactgacgatcaatttgtacaacggctcatagaactgcagggctctgcccgcgcggagaggattccttgatcccgtctacccagagagatgagt

SEQ ID NO: 255144 - DNA, 740 bp, Homo Sapiens
  misc_feature (95)..(95): n is a, c, g, or t
  misc_feature (99)..(99): n is a, c, g, or t
agcctctgctggccagcttggtgctcacagctgctgggtaagctcttgcctaaggagctgtgggaagccaggctgatgccccagcaacctctccnccanactgtctttgaagaaagtagctttagaccggctaaaagctttaatccagagcctgccctactctgatagtaccagagtggagggcagaataccaaatgtccaggaaccaaaggcagggctgtggggacctgaagagcagcacagtggggcccgtgctgctgtgggagaaactgaggctgggagcctcagcagagaccggtgtcaagagtctctgggaactgcataggcctgaggaacatgcattttcaagttgtccattgatggtttcgtacctgaatttctcaccttttgtgaacatcttgggagggtgggggttttgcaggggtgttaaaagcaaggcttggagcccctttcctccagctggtggctccttctcagggcctggcctcattcaggccactttgtagagaaatgccctgacctcgcaggaaggatttccccacccccaagtggaaggaagaggacagtgtgggcaccagagggccctggaaacatcttaggggaaggaaaggaaaaggataaatttggagtggggggtctctaaacagattgcctggattccgttctttcctggggttctacagctgcctaagccctcaccttgggggaggatcaaagggaataaagagaactcttggctg

SEQ ID NO: 255145 - DNA, 366 bp, Homo Sapiens
aagagataatgacaatatgaccaataaggtcactttattagctttatatggatcttaaaaatattcatgttcagcacaagaaatgcctctcaacaccttaaaaaaaatagtaataatggagacagaaaaaactacatgtatatattgaggttagtctcctgtatttgaactaccccaatgtttcatctcagtagtgaaaactttgtaggaaaagttctatttatagaattactaagaagatccaaactataacataaggaagatacgattaagtgagctgagtgctagttataaaaaagggctctttgcaataaagctataaagacattggacaacgaagaaattcaaaaatgagctgcaactcag

SEQ ID NO: 255146 - DNA, 675 bp, Homo Sapiens; identical to SEQ ID NO: 3534
  misc_feature (463)..(542): n is a, c, g, or t

SEQ ID NO: 255147 - DNA, 778 bp, Homo Sapiens
gaaaaccagagatagagggaaagccagagagtgaaggagagccagggagtgaaacaagggctgcaggaaagcgcccagctgaggatgatgtacccaggaaagccaaaagaaaaactaataaggggctggctcattacctcaaggagtataaagaggccatacatgatatgaatttcagcaatgaggacatgataagagaatttgacaatatggctaaggtgcaggatgagaagagaaaaagcaaacagaaattgggggcgtttttgtggatgcaaagaaatttacaggaccccttctaccctagaggtccaagggaattcaggggtggctgcagggccccacgaagggacattgaagacattccttatgtgtagtgtccctggcaggcatttaccaggccatgtgctttaacgttacggtaatactttactttaggcatccctcctgttgctagcagccttttgacctatctgcaatgcagtgttctcagtaggaaatgttcatctgttacatggaaaaaatgttgatggtgcattgtaaaattaaaaaacacaacttgcagaaccaaatatatggcatcagtacatttttgtaaaactacaaagatacttacctagtaatatagtatagaaaacaattctgaaagctgtgtccactaaaagattaacagtggttatctctgggtgattttttctgttcttttttgttcatctgtccatttttctcctaaaaacagatttctttagtcataaaaataataaaatataaagtattggaa

SEQ ID NO: 255148 - DNA, 1385 bp, Homo Sapiens
  misc_feature (1255)..(1255): n is a, c, g, or t
  misc_feature (1308)..(1322): n is a, c, g, or t
tgtctctggagaagatgaagtagagcccttacacgatggagttgaagaggcagagaaaggacccagcagggtagaagaggctgagggacacacagaggtgacagaagcagagggatcccaggggactgctgaggctgacgggccaggagcatcttcaggggatgaggatgcctctggcagggcagcaagtccagagtcggcctccagcacccctgagtctctccaggccaggcgacatcatcagtttcttgagccagccccagcgcctggtgctgcagtcttatcttcagagcctgcagagcctctgttggtcaggcatccccctaggccccggaccaccgcccccaggccccggcaagatccccacaaggctggactgagccactatgtgaaactctttagcttctatgccaagatgcccatggagaggaaggctcttgagatggtggagaagtgcctagataaatatttccagcatctttgtgatgatctggaggtatttgctgctcatgctggccgcaagactgtgaagccagaggacctggagctgctgatgcggcggcagggcctggtcactgaccaagtctcactgcacgtgctagtggagcggcacctgcccctggagtaccggcagctgctcatcccctgtgcatacagtggcaactctgtcttccctgcccagtagtggccaggcttcaacactttccctgtccccacctggggactcttgcccccacatatttctccaggtctcctccccacccccccagcatcaataaagtgtcataaacggaaaacccaaacaccacccccctactacatccctgtcgggccgcctcggcccctcgaagaagcttttctaaaaccattccgttttggcggcccgggggccccagataggttaaggtgcacacctgggcccataagcgtgttttcccccaagggagaacccccgggggcccatggaccctaaggggccttggggcattttctctcccccaaaaataaacaaaaacaccccccgggggcgggcacaaccccggaaagcgggttccctgtgaaacaaaaattcccccgacaagggggagttttcctgggagggcgccctcttacctggggaactccccactcccacccgcgcggggttcccccaagagcgcgaagcccttccgagattattccaaaatttagatccgcccccccggcccccgtgcgcgcatttacaattgggccagaaaaaccaggagcggagaanaaattgccatataagagggcagttttcccgtgccccggaaatctggggaaaannnnnnnnnnnnnnnataaagcggcgtctattggtatgttacaccctgccgtaagttcgcggcccgcggccggtcaca

SEQ ID NO: 255149 - DNA, 650 bp, Homo Sapiens
  misc_feature (390)..(390): n is a, c, g, or t
  misc_feature (529)..(529): n is a, c, g, or t
  misc_feature (577)..(577): n is a, c, g, or t
  misc_feature (622)..(622): n is a, c, g, or t
ctggactcctggatctgggggcagtgggcactggggacctggactcgtaggtcctgactcccagcctcctcctcaggagcgcctggaccatgctgctgagcgcctactggcacggcctccacccgggctactacctgagcttcctgaccatcccgctgtgcctggctgccgagggccggctggagtcagccctgcgggggcggctgagcccagggggccagaaggcctgggactgggtgcactggttcctgaagatgcgcgcctatgactacatgtgcatgggcttcgtgctgctctccttggccgacacccttcggtactgggcctccatctacttctgtatccacttcctggccctggcagccctggggctggggctggctttaggtnggggcaagcccagccggcggaaggcagcatcccagcccaccagccttgcccccgagaagctccgggaggagtaagctgtcacgacgctccctctgccagctggtcccgggaattctgtgaaccaagctgctgtcttctncccaggagtccttaccttggagagggtcctggagagaatttcctcttncccagcttaataccctgcctgcaactgaagcagacccggggtgtncctccttgccctctgccagaagccacct

SEQ ID NO: 255150 - DNA, 2276 bp, Homo Sapiens
ctttccggagcccgtctgttccccttcgggtccaaagcttttggctcctccttgttccgagcccgaatgcccgccccttcacgtactcggagctcggatcccagtgtggacctggactcgaatcccgttgccgactcgcgctctcggcttctgctccggggcttcttccctgcccgcccggggccctgaccgtggcttcttccccggcctgatctgcgcagcccggcgggcgcccagaaggagcaggcggcgcgggggcgcgctgggcgggggaggcgtggccggagctgcggcggcaagcgggctgggactgctcggccgcctcctgcccggcgagcagctcagaccatgtcgcctgaagaatggacgtatctagtggttcttcttatctccatccccatcggcttcctctttaagaaagccggtcctgggctgaagagatggggagcagccgctgtgggcctggggctcaccctgttcacctgtggcccccacactttgcattctctggtcaccatcctcgggacctgggccctcattcaggcccagccctgctcctgccacgccctggctctggcctggactttctcctatctcctgttcttccgagccctcagcctcctgggcctgcccactcccacgcccttcaccaatgccgtccagctgctgctgacgctgaagctggtgggcctggccagtgaagtccaggacctgcatctggcccagaggaaggaaatggcctcaggcttcagcaaggggcccaccctggggctgctgcccgacgtgccctccctgatggagacactcagctacagctactgctacgtgggaatcatgacaggcccgttcttccgctaccgcacctacctggactggctggagcagcccttccccggggcagtgcccagcctgcggcccctgctgcgccgcgcctggccggcccgctcttcggcctgctgttcctgctctcctctcacctcttcccgctggaggccgtgcgcgaggacgccttctacgcccgcccgcgtgcccgcccgcctcttctacgatgatccccgtcttcttcgccttccgcatgcgcttctacgtggcctggattgccgccgagtgcggctgcattgccgccggctttggggcctaccccgtggccgccaaagcccgggccggaggcggccccaccctccaatgcccaccccccagcagtccggagaaggcggcttccttggagtatgactatgagaccatccgcaacatcgactgctacagcacagatttctgcgtgcgggtgcgcgatggcatgcggtactggaacatgacggtgcagtggtggctggcgcagtatatctacaagagcgcacctgcccgttcctatgtcctgcggagcgcctggaccatgctgctgagcgcctactggcacggcctccacccgggctactacctgagcttcctgaccatcccgctgtgcctggctgccgagggccggctggagtcagccctgcgggggcggctgagcccagggggccagaaggcctgggactgggtgcactggttcctgaagatgcgcgcctatgactacatgtgcatgggcttcgtgctgctctccttggccgacacccttcggtactgggcctccatctacttctgtatccacttcctggccctggcagccctggggctggggctggctttatgtgggggcagccccagccggcggaaggcagcatcccagcccaccagccttgccccggagaagctccgggaggagtaagctgtcacgacgctccctctgccagctggtcccgggaattctgtgaaccaggctgctgtctcctccccagaaagagcccttaccttggagagggtcctggagagaatttcctcttccccagctaaataccctgcctgcaactgaagcagacccgggggtgtcctccctgccctctgcccagaggccacctccaactcctaacaaattcaagtattgtcccagaccagaatcactgggcccctgggtcagctttcggggtatcccaaagagcatctgccacttcccccaaaaccggaagggggcccccgggggcagccgcggtattggagcaaaattcccctctccgttggcttccaacaatgtaggggggacgcagacctctgggggctagggcccctgggaaagcggggaaacgccccccttcccgtgtgggacgtatcaccctcccccgattttagccttgcatgggcgagcacacgattgtcgcaacacttggacaaagaaatgt

SEQ ID NO: 255151 - DNA, 1105 bp, Homo Sapiens
ccctaccggcggtgctccttgtttctcctttgcctccctggggtgtcgcttccttcgcctggagtgtcctcctctgtttgccggcatcctgctctcttcgatcttcccgccctcgtctttcccccccttgtatctactctcctgtacccctgcgctcacgtgtccctccgtccttttttcccccccttcatgtcgtccactcccccctggatgcaccgggactctccccgtcccatggtctgcacccctttagagactcctgtctttgggctcaacttagtgctatactatactggcccattgcctcctgatactcattgacagctacaaggaaatctcctaggatccgatgcaggacacagtcactctgattagccagtgcgttcctcagcaaagcaattccatcttcatatttctgttctctgctaagtagttctgcttttttcaccacagccttaatgtaatctggcctttgggtcagggctttatctaataatgttttggctttctcctgtgtcactgggtcttcaagacaaacggtggctaaaagggtaagggtctgtgcatttgctcccagagttttgtaaacgttgttagccattaccattgcttctcgaatactgttggaggctaagtaacattcgataagaccttcataacaatctaagcgacaaggtgcgagccgtatggcctcccgaaagtggattattgcttcttggactctgcccatgttcctaagtgctgctcccttaagtagcagagcttgaacactattactgttcagctgaatggccttggctcctaaatagagggcccgggagtagcgtttgctatagaagctgtgacagccagaaaccacccacggttctgcatgctgatcagagatattgaaaaggcggcatccaaggttctcaacatcctctagccgcccttctcgtgccagtaggtagccatatacatccattccttttatcagataaggatccaacatctgtgcctgttcaaacttgaggacagagtttttattgtctccagctctgaagtacagatctgccaagcttcccaataggtccacgttatctcgcaatacaggattttttctccc

SEQ ID NO: 255152 - DNA, 981 bp, Homo Sapiens
gccaggctccttctccccgtggcagagtacttctctggggtgcagctgcccccacacctttcaccctttgtgaccgagaaggaaggagattacgttccacctgagaagctgaagctgctggctctgcagcggggagaggacccaggaaacctgaatgagtcagaagaggaggaggaagaggacgacaacaacgaaggtgatggtgatgaagagggagaaaatgaggaggaggaggaagatgcagaggctggttcagaaaaggaggaagaggcccggctggcagccctggaagagcagaggatggacggggaagaagcccagggtgatggcaggcaccttgaagctggaggataagcagcggctggcccaggaggaggagagtgaggccaagcgcctggccattatgatgatgaagaagcgggagaagtacctgtaccagaagatcatgtttggcaagaggcgaaaaatccgagaggccaacaagctggcggagaagcggaaagcccacgatgaggcggtgaggtctgagaagaaggccaagaaggcaaggccggagtgagtgcctgcggcccctcacagggctgaggccagcccctagcagctggatgtggcagaggcaggccagaggacctaagtgtgatggaccagagtcacttctcctcctcctttctccagccagccctgacccctcatgctctctggctgggccagtgggcagccctcgcttcccttggatggagctgccctgctggtgcctggtcagagaagaggcctctgtgcccagcctgattctctgctcccaggagccagtgacatgaggtgcagaggcccacccagccccctacctactgcccccattcatcctggctttccacagccccctcccacacagttggacccgtgattctcagggtgctgtgatggggtgagggtagggggagcatttgttattaaatgacgtggacttttgtgccaattgaa

SEQ ID NO: 255153 - DNA, 869 bp, Homo Sapiens
  misc_feature (628)..(667): n is a, c, g, or t
ctccgacatcaggacctgagatgaccgctgtgtggcgctctctccctgggcagggtggatgccacaggcccctctggctcccaggtgctgcttctccacaggtgcggcctggcccggcctcctaaaggccacaccctccccacgcacttcccaggccagaatccaaacatcgggaaccctgttttcttctgggtgtgtctcacttagtcgtggttcttccccgagggtgcatgttgcaggagggagagggcagggaagactcacagcagagcaggagggggcctgcgcttctcggggtctgcaccccaggcacagcggtgtcaccccgcaggaccgcgggcctgccccaacccccagcattcccgggtgggcccagaccccatcaccaagactggccacccgctgcgtgtgtgtgcgcgcgcgtgtacgtgtggccccacatccgccgccttccacgctaggatgtaagaggtcgcctcctattgtacatttggggaaagccttgggtgtaaatcagtgtaaacttggaggagagatttttctatcatgtagagtaggtattttttatagattgaaggttgatcaattttttaatactttcaagagaaaactgtgtatacacatgaannnnnnnnnnnnnnnnnnnnnnnnnnnnnnnnnnnnnnnnaagactggcaccctgcctctctgtgcccaggcccagccctggtgacatggcaccactcagcagtgctgtcactgtaagcatggactcccaggagacagtgtgggaaacgctcctgctttaattccccgagaaacggctcttcctgcctggatgcaggagggcaggggccaccacagattaaagctgttactgcacacgcaaa

SEQ ID NO: 255154 - DNA, 360 bp, Homo Sapiens
cacccagggaatgcttaagccagcaatataaccttcaagggaaaaaataggtagcatatgtccagcgcgcctagatagcaagtttcaaaacaaggtaatgatgatgctttaactcaaatatgatgctgaagtattatacacaaacttacatctgtaataccatccaagtaaacagtaagagataagttaatgtttaaaaaatgaataactacatgggggtatcccttctgtctattataaaaattgtatactgaaaaatattgttagtatataggtttctgatttgaggccctgtttctcttaatctctataatctacctgagaaaccaattaatccacattcacttcggatgaatgaac

SEQ ID NO: 255155 - DNA, 882 bp, Homo Sapiens
ctggtctccgagtcactcatgtgcaaaattgcagattttggccttgctagagtaattgaagataatgagtacacagcaagggaaggtgctaagttccctattaagtggacggctccagaagcaatcaactttggatgtttcactattaagtctgatgtgtggtcctttggaatcctcctatacgaaattgtcacctatgggaaaattccctacccagggagaactaatgccgacgtgatgaccgccctgtcccagggctacaggatgccccgtgtggagaactgcccagatgagctctatgacattatgaaaatgtgctggaaagaaaaggcagaagagagaccaacgtttgactacttacagagcgtcctggatgatttctacacagccacggaagggcaataccagcagcagccttagagcacagggagacccgtccatttggcaggggtggctgcctcatttagagaggaaaagtaaccatcactggttgcacttatgatttcatgtgcggggatcatctgccgtgcctggatcctgaaatagaggctaaattactcaggaagaacaccctctaaatgggaaagtattctgtactcttagatggattctccactcagttgcaacttggacttgtcctcagcagctggtaatcttgctctgcttgacaacatctgagtgcagccgtttgagaagaaaacatctattctctccaaaaatgcacccaactagctctatgtttacaaatggacataggactcaaagtttcagagaccattgcaatgaatccccaataattgcagaactaaactcatttataaagctaaaataaccggatatatacatagcatgacatttctatgtgctttggcttacttgttt

SEQ ID NO: 255156 - DNA, 419 bp, Homo Sapiens
  misc_feature (62)..(62): n is a, c, g, or t
atcactggttgccaccttatggatttccatgtgccggggggatccatcctgcccgtgccccnggatccctgaaatagaggcctaaattacctcaggaagaacacccctctaaatgggaaagtattcctgtacctccttagatggattctcccactcagttgcaacttggacttgtcctcagcagctggtaatcttgctctgcttgacaacatctgagtgcagccgtttgagaagaaaacatctattctctccaaaaatgcacccaactagctctatgtttacaaatggacataggactcaaagtttcagagaccattgcaatgaatccccaataattgcagaactaaactcatttataaagctaaaataaccggatatatacatagcatgacatttctttgtgctttggcttacttaaa

SEQ ID NO: 255157 - DNA, 1940 bp, Homo Sapiens
  misc_feature (1052)..(1160): n is a, c, g, or t
  misc_feature (1470)..(1484): n is a, c, g, or t
  misc_feature (1921)..(1921): n is a, c, g, or t
acagcgaggtactgcagcttcctccacagccggctgtggagcagcaggacctggcccttctgcctgggcagcagaatatatattttacctatcagagacatctatttttctgggctccaacccaacatgccaccatgttgacataagttcctacctgactatgctttctctcctaggagctgtcctggtgggcccaggtccttgtatcatgccacggtcccaactacagggtcctagctgggggcctgggtgggccctgggctctgggccctgctgctctagccccagccaccagcctgtccctgttgtaaggaagccaggtcttctctcttcattcctcttaggagagtgccaaactcagggacccagcactgggctgggttgggagtagggtgtcccagtggggttggggtgagcaggctgctgggatcccatggcctgagcagagcatgtgggaactgttcagtggcctgtgaactgtcttccttgttctagccaggctgttcaagactgctctccatagcaaggttctagggctcttcgccttcagtgttgtggccctagctatgggcctaaattgggctctaggtctctgtccctggcgcttgaggctcagaagagcctctgtccagcccctcagtattaccatgtctccctctcaggggtagcagagacagggttgcttataggaagctggcaccactcagctcttcctgctactccagtttcctcagcctctgcaaggcactcagggtgggggacagcaggatcaagacaacccgttggagcccctgtgttccagaggacctgatgccaaggggtaatgggcccagcagtgcctctggagcccaggccccaacacagccccatggcctctgccagatggctttgaaaaaggtgatccaagcaggcccctttatctgtacatagtgactgagtggggggtgctggcaagtgtggcagctgcctctgggctgagcacagcttgacccctctagcccctgtaaatactggatcaatgaatgaataaaactctcctaagaatctcctgnnnnnnnnnnnnnnnnnnnnnnnnnnnnnnnnnnnnnnnnnnnnnnnnnnnnnnnnnnnnnnnnnnnnnnnnnnnnnnnnnnnnnnnnnnnnnnnnnnnnnnnnnnnnncccttgtgccccgccctcgcccctaaaaaaactttttaaaaccattcctttgggcgcgaggccccccttggggccccgaaccccgcccacaaatttttttccccaaaacaaatacccggccctgaacttccccccttgggtttccccaacaaaagtaaaacgcccctctgcggacaaacgcaagccttccttaacacaaaaatccccggggggggttctctccgcgggggtcaataatatgggcgcccttccctgccaaaacaccgcgtccccccgttccggaaaattctctgatccgcccacatggttnnnnnnnnnnnnnnngctgctttggtatcatcgcccgcccccccgaagaaaacccatgggtggggagaatacagctacgttatagcacgttattcttgttcgacgcgaaatactgccgccgcgctgctctctttaacaacaacccgccgttatccgcggcgagagaacagcgtgttggagacctcccctccgaacgcgacctagtcaccgcacgccaccgcctgtggtatgcgcccctccgccaacacaccacaactagtattttgcccgcaagaggcgaggcgcacaaacaccgcgcggcggcgcagaaagacacaactgtctctccatattgtgtgccggcgccctcgtctccataaataaaataccctcaggcggcacatagacaccacacccatagcgccgcctatgtccggctccaaccccacaaaaagtgaggcccgcctggctcnacaaagcgtgctttggggg

SEQ ID NO: 255158 - DNA, 1279 bp, Homo Sapiens
  misc_feature (1177)..(1177): n is a, c, g, or t
ccgaggcgagatggcggccaccgagggggtcgccgaggctgcgcaagggggcgagcccgggcagacggcgcaacccccgccccagacgcacccaccgccgccccagcagcagcacaaggaagagatggcggccgaggctggggaagccgcggcgtcccccatggacgacgggtttgtgagcctggactcgccctcctatgtcctgtacagggacagagcagaatgggctgatatagagccggtgccgcagaatgatggccccaatcccgaggtccacatcatttatagtgacaaatttagagatgtttatgattacttccgagctgtcctgcagcgtgatgaaagaagtgaacgagcttttaagctaacccgggatgctattgagttaaatgcagccaattatacagtgtggcatttccggagagttcttttgaagtcacttcagaaggatctacatgaggaaatgaactacatcactgcaataattgaggagcagcccaaaaactatcaagtttggcatcataggcgagtattagtggaatggctaagagatccatctcaggagcttgaatttattgctgatattcttaatcaggatgcaaagaattatcatgcctggcagcatcgacaatgggttattcaggaatttaaactttgggataatgagctgcagtatgtggaccaacttctgaaagaggatgtgagaaataactctgtctggaaccaaagatacttcgttatttctaacaccactggctacaatgatcgtgctgtattggagagagaagtccaatacactctggaaatgattaaactagtaccacataatgaaagtgcatggaactatttgaaagggattttgcaggatcgtggtctttccaaatatcctaatctgttaaatcaattacttgatttacaaccaagtcatagttccccctacctaattgcctttcttgtggatatctatgaagacatgctagaaaatcagtgtgacaataaggaagacattcttaataaagcattagagttatgtgaaatcctagctaaagaaaaggacactataagaaaggaatattggagatacattggaagatcccttcaaagcaaacacagcacagtgactcaccaacagatgtacagcaataacaccatccagaagaacttgatggagatgctnttatttgttattaagggaccctgcaggagtttcacacgagagtggtactatcctttgcctgaggtgtctgctgctacttagactagctctaagttgtgtctt

SEQ ID NO: 255159 - DNA, 612 bp, Homo Sapiens
cggcacgagggaaaaggacactataagaaaggaatattggagatacattggaagatcccttcaaagcaaacacagcacagaaaatgactcaccaacaaatgtacagcaataacaccatccagaagaacttgatggaatgcttttattttttattaagggaccctgcaggagtttcacacgagagtggtccttccctttgcctgtggtgtaaaagtgcatcacacaggtattgctttttaacaagaactgatgctccttgggtgctgctgctactcagactagctctaagtaatgtgattcttctaaagcaaagtcattggatgggaggaggaagaaaaagtcccataaaggaacttttgtagtcttatcaacatataatctaatcccttagcatcagctcctccctcagtggtacatgcgtcaagatttgtagcagtaataactgcaggtcacttgtatgtaatggatgtgaggtagccgaagtttggttcagtaagcagggaatacagtcgttccatcagagctggtctgcacactcacattatcttgctatcactgtaaccaactaatgccaaaagaaccggtttgtaataaaattatagctgtgtctct

SEQ ID NO: 255160 - DNA, 989 bp, Homo Sapiens
  misc_feature (178)..(178): n is a, c, g, or t
aaccaaggcaccacgcaagggccaagggaccctgtagaggttctaggtacgggaaagagagcccttcggtgatgcctgcgaagaaggttctgaaaggcacaagctctgtggcaaaacacacacatctggaagtgaaatacgagatcattaagcaagacaccaagctttctcaaaacanaatcaaacttaaaaactatgcaaataaccctgggtgcactggagtaggagtacactggagaagtctgtggaatgagctgcatcagctgagtcacagaggacgctggctgtgaagtcagcatccacacggtggctactgcagctaaagagaatgaagggagcgcgaggcctctccaaacagaggaggacggaaagggggccaaatgtgaaccacacctcttttattccaagaatgggaagcacattttcattggcttgaatgagaaagcttcatactccactctagctgcagtaatactgcatcccatccactcttcttctcttttttgactgaaactcttcaaagaactgctgaatgtcctctctcttaacaaccgtgccttcatcagcaaatctcttgagatagtctttaagttcagtcttcaaatcattgtattcacaaatgagttccacttgctggactctattcatgctgctaagggtatccattaggggatcgctcctgtcagtggcctgggcaatcttccctttgttttcataagccagaactgtgtcgtattcatctgtcaggaataagacatctagatctccatacattttcatacagtcttggcaggtacacaacttgctacgccagttcaggggccaataggtggcagtgtctttctttataagctgcttagctttaagctcctgaagtttgcagccagattttgattctgcgttgaggctttcattcttaaacactgtctggagatcagattcagaactagagccggcacatggttcactgttctgctctactttaacct

SEQ ID NO: 255161 - DNA, 1671 bp, Homo Sapiens
  misc_feature (162)..(162): n is a, c, g, or t
  misc_feature (200)..(200): n is a, c, g, or t
tgtcatattaaggtcttgccacctggaggcaaaaaaaaggccgggtccccattactagtttagaatatccctttcctaatattttttaaaagcaaacctatcaagcctggctttaaccccttaggaaaaaagacgtcccactttctgcaccagggcctctcnagcaccagaactgcctttccccagctgaggcctaaagngcagtagcccttctgcacagggcctaggggaaggttctcagcaggaggtgggtcagtccatatgccccagggagcagaagcagctccgtcgggcaggaagggtgatggtgagcagataggacaggacgcagtctccagaagtgctcaggggcaaggcaggggaatgtggtccctcctctgcccagaccctctgacctctgagcagggcctgtcatgcctctgggtgctagagcagagacccaggcagcagcagcatggggtggccaatggggcgggttccacaggatgggagatagggcctcccgtgccctgactccctgagggtctggtcagtcgcgatgggtagactggtggccgagctgccggtcatcgtaagtgctgtagcgcttgacgtggatgcggcggacacggtcccgcagttcaaaggtctcctcatcttcactgggggaagcctggctgcggctacggcttgtggcctccaacaaggagttgtcggggacgcggggagtctcatagagtaggacgttgagtgtctcctcatagattcgggcctctgggaattccaccttggtctgcttcttctccgtggcatacacgatggaggtacagcacacctctgccagcttacggccctggccataaaaggaccagcagcagatctcgtcaccaatgacatccttgatgaagagcacgcggccgttgaagcgcagggagagcttgtcaaacagctcgatgtttttcagcaggtggtcgtcagagttgctggtgtaggaatacttgttgttgcttctgttgtacagcagcttcaccacgggcttggtggaggattcgatgagccgctcctcctcctttagggatgtgatgatggggatgttgcacacaggctggtaggagtccttcttgtcctgcagggcactctggcacatattcaccagcccctggatgaggtaatactttgcttcagccatcaattccttgatttcttgccggttctgagggagggtgatggtgtcatctcggaggtaattcaaaatggtgccaaagtgctttccacaacggtctatgaggatccagccttctttgtcggtcagcacctccatgcgcccactgaacatggccttgagcatggtgtcgtggcgggtcagggcccgcacagtggtgtagtacagagagccgcccacgttgagctggacatacttgttgcccaaccctcctcccttgaagccactgagcttgggcttggcccctgaggctgggcacaggcaggtgtcccccgacatctcccgctgcaggtagatcaccacacggcaggaggtaggcttggaaggctccgccgtggtggaaagggtcacgagtgagtggccagtggaggccagagcctcataatctcagtgcgtccccgggggcgcctctcctctcagctgggtggccagcggactccgagccgcccctagcctgcagccgccttccc

SEQ ID NO: 255162 - DNA, 830 bp, Homo Sapiens
tagcgaggcctgggtggcgaattcggcacgaggctttgaactgcgggaccgtgtccgccgcatccacgtcaagcgctacagcacttacgatgaccggcagctcggccaccagtctacccatcgcgactgaccagaccctcagggagtcagggcacgggaggccctatctcccatcctgtggaacccgccccattggccaccccatgctgctgctgcctgggtctctgctctagcacccagaggcatgacaggccctgctcagaggtcagagggtctgggcagaggagggaccacattcccctgccttgcccctgagcacttctggagactgcgtcctgtcctatctgctcaccatcacccttcctgcccgacggagctgcttctgctccctggggcatatggactgacccacctcctgctgagaaccttcccctaggccctgtgcagaagggctactgccccgtaggcctcagctgggggaaaggcagttctggtgctgtagaggccctggtgcagaaagtgggacgtcttttttcctaaggtgtttaagcacaggcttgataagtttggtttttaaaaaataatctaggaaatgaataattctaaatctagtaatgaggaaactgagcatttcttttgccctccagggtgccaagaccctacatatgacagaacccttggcccttctccatgcctgtgggatctgtttctttaaagcactttgtactgttattcaggaggttgataatctccttgacccatgtctttctaccctaatccccacttccctgcagaatcaatctgagggaggggataaagaggaaggcaat

SEQ ID NO: 255163 - DNA, 837 bp, Homo Sapiens
ggggcagtcctctctggggagcctgaagcaaacatggatcaagaaactgtaggcaatgttgtcctgttggccatcgtcaccctcatcagcgtggtccagaatggattctttgcccataaagtggagcacgaaagcaggacccagaatgggaggagcttccagaggaccggaacacttgcctttgagcgggtctacactgccaaccagaactgtgtagatgcgtaccccactttcctcgctgtgctctggtctgcggggctactttgcagccaagttcctgctgcgtttgctggactgatgtacttgtttgtgaggcaaaagtactttgtcgggtacctaggagagagaacgcagagcacccctggctacatatttgggaaacgcatcatactcttcctgttcctcatgtccgttgctggcatattcaactattacctcatcttctttttcggaagtgactttgaaaactacataaagacgatctccaccaccatctcccctctacttctcattccctaactctctgctgaatatggggttggtgttctcatctaatcaatacctacaagtcatcataattcagctcttgagagcattctgctcttctttagatggctgtaaatctattggccatctgggcttcacagcttgagttaaccttgcttttccgggaacaaaatgatgtcatgtcagctccgccccttgaacatgaccgtggccccaaatttgctattcccatgcattttgtttgttcttcacttatcctgttctctgaagatgttttgtgaccaggtttgtgttttcttaaaataaaatgcagagacatgttttaagctg

SEQ ID NO: 255164 - DNA, 833 bp, Homo Sapiens; identical to SEQ ID NO: 15021

SEQ ID NO: 255165 - DNA, 497 bp, Homo Sapiens; identical to SEQ ID NO: 5605

SEQ ID NO: 255166 - DNA, 982 bp, Homo Sapiens
gagaccgccatccagaagcccctgtgtagcctcccagcaggctctggcaacgcgctggcagcttccttgaaccattatgctggctatgagcaggtcaccaatgaagacctcctgaccaactgcacgctattgctgtgccgccggctgctgtcacccatgaacctgctgtctctgcacacggcttcggggctgcgcctcttctctgtgctcagcctggcctggggcttcattgctgatgtggacctagagagtgagaagtatcggcgtctgggggagatgcgcttcactctgggcaccttcctgcgtctggcagccctgcgcacctaccgcggccgactggcctacctccctgtaggaagagtgggttccaagacacctgcctcccccgttgtggtccagcagggcccggtagatgcacaccttgtgccactggaggagccagtgccctctcactggacagtggtgcccgacgaggactttgtgctagtcctggcactgctgcactcgcacctgggcagtgagatgtttgctgcacccatgggccgctgtgcagctggcgtcatgcatctgttctacgtgcgggcgggagtgtctcgtgccatgctgctgcgcctcttcctggccatggagaagggcaggcatatggacgtatgaatgcccctacttggtatatgtgcccgtggatcgccttccgcttggagcccaaggatgggaaaggtgtgtttgcagtggatggggaaatgatcggttcaccgaggacagtgcagggcccaggtgcacccaaaactacttctggatggtcagcgggttgcgtggagcccccgccccgcctggaagccccagcagatgccaccgccagaagagcccttatgaccccctgggccgcgctgggccttagggtctacttgcaggacccttcctccttccctggggctgcagggcccgtcacagcttcctgtgggggggtggaaaaacaccctcg

SEQ ID NO: 255167 - DNA, 1356 bp, Homo Sapiens
gaaagcggagacaggtagcaacgctgtggactggtgatgacaggctcttcagctccctgcaagtgaccgggcctggggaacagggcatggcacaggcacacaggaccccccagcccagggctgcccccagccagccccgtgtgttcaagctggttctcctgggaagtggctccgtgggtgcgttcttcacaaaggtggtggatgtgggtgccacctctctgaagcttgagatctgggacacagctggccaggagaagtaccacagcgtctgccacctctacttcaggggtgccaacgctgcgcttctggtgtacgacatcaccaggaaggattccttcctcaaggctcagcagtggctgaaggacctggaggaggagctgcacccaggagaagtcctggtgatgctggtgggcaacaagacggacctcagccaggagcgggaggtgaccttccaggaagggaaggagtttgccgacagccagaagttgctgttcatggaaacttcggccaaactgaaccaccaggtgtcggaggtgttcaatacagtggcccaagagctactgcagagaagcgacgaggagggccaggctccacggggggatgcagctgtggctctgaacaaggggcccgcgaggaaggccaaatgctgcgcccactaggtgcagccactcctgggggctgtggggaagacaccccctgcctgggccatggccagctctaggtggattctgattcactgtcaatgctgggttgctcccgagccctagatgttcctggaagttggccccctttatgaaaaccacttcccacagccagtgggaactgccagaggaagatctggcgtcacatggctcccaggaaagtgctgtgccctatccccactgataccatctgattccccgatgcctgtgcctgttccacctggacggtggccccctcagcctggcagcctctggacagagaggaaggaaggattggaaaagtccccggagcacagcgacggtgggaagatgccttacgtctgatcttgatgggggcactggcctggagcctgggcccacctgcttctggggggttggggagcaggccagatggaggtggtggtgccaggaagaaatggagcgatgactgactgtggggtgggcccaggatttccgcatcttggtgaagttgcccctgggaagggcagctgggggcagtggcgccagttcccttccatggtctcccggctggcaatgtggtgaagctgagtttctgtccaatgagcaggaagattctgagacatttcgcctgagatataagttgtactgcgtatgcagtttttcctccaaaaattaaatgtctttgccaagccgg

SEQ ID NO: 255168 - DNA, 1450 bp, Homo Sapiens
  misc_feature (340)..(340): n is a, c, g, or t
aggatttgcctcaaagggcactgcaaaaattgaacagaggaatcccaaggaagctgcctgaatttgcctgtatactctcgttctgcgacttataaaggaccagacaaatcaaattagtggttttggtttccgccagctgtggatgcctttgacattatgaccgcagaggattccaccgcagccatgagcagtgactcggccgccgggtcctcggccaaggtgcccgagggcgtggcgggcgcgcccaacgaggcagcactgctggcgctgatggagcgcacgggctacagcatggtgcaagagaacgggcagcgcaagtacggcggcccaccgcccggcngggagggcccgcacccgcagcgtggctgcgaggtcttcgtgggcaagatcccgcgcgacgtgtacgaggacgagctggtgcccgtgttcgaggccgtgggccgcatctacgagctgcgcctcatgatggactttgacggcaagaaccgcggctacgccttcgtcatgtactgccacaagcacgaggccaagcgcgcagtgcgtgagctcaacaactacgagatccgcccgggccgcctgctcggcgtgtgctgcagcgtggacaactgccgcctcttcatcggcgggatccccaagatgaagaagcgcgaggaaatcctggaggagattgccaaggtcaccgagggcgtgctggacgtgatcgtctacgccagcgcggccgacaagatgaagaaccgcggcttcgcattcgtggagtacgagagccaccgcgcggctgccatggctcgccgcaagctcatgcctggccgcatccagctgtggggccaccagatcgccgtggactgggccgagcctgagatcgacgtggacgaggacgtgatggagaccgtgaagatcctctacgtgcgcaacctcatgatcgagaccaccgaggacaccatcaagaagagcttcggccagttcaaccccggctgcgtggagcgcgtcaagaagatccgcgactacgccttcgtgcacttcaccagccgcgaggatgccgtgcatgccatttgctgctccagctacagccacgatcgccacactacagaagaacgcggcagccgcggccgccgtgtatggaggatacgcaggctacatacctcaggccttccctgctgctgccattcaggtccccatccccgacgtctaccagacatactgaggctggtgaccagcacgaagacagaccacacaaacaccactgaaggaacgcttgactatttatgaagaaggaacatgttggattcacacatgcaacctggtgaagaatgttagcagatttatttctgaattattttatatacatgaagttttcactagttttttaagactattttcaacttagcatgcctacgttcatacatttccgacttgcaatggttcgtgccttcattccatcttttggatatat

SEQ ID NO: 255169 - DNA, 304 bp, Homo Sapiens
ggtgctctagggacactcagccaagattagtaggcctaccctaacatccaaaggcccacaaaacatcaagacctagcctaaacagggggcactgagtttgaatgcctttagaccagtacttctcaacggggacaatcctgcctctctcctccccacccctaggacatttggcaatgtctagagacatttttggttgagacaactgtgggtgaaggggtgctactggcatctagtgggtagaggctagggatactgctataataaatacctataaagaacaggataggctggacatggtggctca

SEQ ID NO: 255170 - DNA, 1299 bp, Homo Sapiens
  misc_feature (337)..(337): n is a, c, g, or t
ccgccaaaagtgacaatccaggtccaaggacaatggggtcacaaagttgggggcctgggcccacacattcgaggaaagttcccaaaagttccaagtgcctgtcccagccaggtaccaggttcgggccacacttaagtgcccatactctgggcaggctgggaaggcacctgacctcacctccagcagctctgcaagtgtggggtgaaaaaaggtgaatctgtgtgaggatggggttggctgcagctgtggtgatggcctgggcgggggcggggggtgctggaggctaagggtgtgctggcgggtgctaggcagggcgatggaagagggttgccagttncggagccgccctcaagagctccagccacagcaactgccgctcccgatgggtgcccttcatgaggctgctgttctccagggcacggcgggacaagtagggcagcacctccatcacggggccatagggcacgtacttgtacacggggtagccggcctggcccagcgggaagctgatctggtcacacatgcctagcagctgtccaaagtacacccggtggtcagcaggatgcaggcccagctcctccatcctgcgcagtgcaaagcgcactgtgtcctcattgtgggaggccaccatcaccttggccttggcgttgtgcttcagctcctccaacacgtagtccaggcacctgtggtacatggcgttggtggcctcgtacgtggggttgatggggtcctcatatccgatctctgccgcacgggctcgctcctgggccaggtatgcgccccgcaccagcttggccccaaaacaccagccctcacggcgagccagctccacgtccagggtcacattgtcataggcatccttgaggtagcactggtatgtgttgaagatgagcggcttctccacattgaacttccgctgcatctccagcgtcaggcggctgatggccggctggaagtaggtctgctcggcatccaccatcagccgcacgcccatctctgtggctttcttggccaggacatccatccgctgtagcatcctggtcatctgtagctcctcctcctcagtgaaccgggacagcaggggctccagctgtcctgtctgtgcgttggggactaccaggtgcttggacagcttggtcctgctgtcgatgaggctgctccagtccagcaggtccatggtgccagacactcccagggtctctgccgtgaaccagtcctcaatctcagccctggatgcgatgcccaactttgcgacactttcctgcagcaccgccacctccagcttggtggagcggcggc

SEQ ID NO: 255171 - DNA, 1154 bp, Homo Sapiens
cctgcacctgtttagaaggattcgaaggcaaaaactgtgaattattcacacggaagctctgcagcctggacaacggggactgtgaccagttctgccacgaggaacagaactctgtggtgtgctcctgcgcccgcgggtacaccctggctgacaacggcaaggcctgcattcccacagggccctacccctgtgggaaacagaccctggaacgcaggaagaggtcagtggcccaggccaccagcagcagcggggaggcccctgacagcatcacatggaagccatatgatgcagccgacctggaccccaccgagaaccccttcgacctgcttgacttcaaccagacgcagcctgagaggggcgacaacaacctcaccaggatcgtgggaggccaggaatgcaaggacggggagtgtccctggcaggccctgctcatcaatgaggaaaacgagggtttctgtggtggaactattctgagcgagttctacatcctaacggcagcccactgtctctaccaagccaagagattcaaggtgagggtaggggaccggaacacggagcaggaggagggcggtgaggcggtgcacgaggtggaggtggtcatcaagcacaaccggttcacaaaggagacctatgacttcgacatcgccgtgctccggctcaagacccccatcaccttccgcatgaacgtggcgcctgcctgcctccccgagcgtgactgggccgagtccacgctgatgacgcagaagacggggattgtgagcggcttcgggcgcacccacgagaagggccggcagtccaccaggctcaagatgctggaggtgccctacgtggaccgcaacagctgcaagctgtccagcagcttcatcatcacccagaacatgttctgtgccggctacgacaccaagcaggaggatgcctgccagggggacagcgggggcccgcacgtcacccgcttcaaggacacctacttcgtgacaggcatcgtcagctggggagagggctgtgcccgtaaggggaagtacgggatctacaccaaggtcaccgccttcctcaagtggatcgacaggtccatgaaaaccaggggcttgcccaaggccaagagccatgccccggaggtcataacgtcctctccattaaagtgagatccccctcaa

SEQ ID NO: 255172 - DNA, 1011 bp, Homo Sapiens
tggtacggtccggaatttcgggatatcgtcgacccacgcgtccggccctcgtggccggggccgggtctgggcgagctcccggcgctgccaccaaagcggctccccgcgcggacgaaggctcagaatccagaacccttgatgtgtccacagatgaagaggataaaatacatcactcctcagaaagtaaggatgatcagggcttgtcttctgacagttctagctctcttggagaaaaagaactttcatcaacagttaagatcccagatgcagcttttattcaggcagcccgcagaaaacgtgaattggccagggcccaagatgactatatttctttggatgtacaacatacctcctccatctctggtatgaagagagagagcgaagatgaccctgagagtgagcctgatgaccatgaaaagagaataccatttactctaagacctcaaacacttagacaaaggatggctgaggaatcaataagcagaaatgaagaaacaagtgaagaaagtcaggaagatgaaaagcaagatacttgggaacaacagcaaatgaggaaagcagttaaaatcatagaggaaagagacatagatctttcctgtggcaatggatcttcaaaagtgaagaaatttgatacttccatttcatttccgccagtaatttagaaattataaagaagcaatttaaatactagattaacattactaccaggaaaactcaacgctcacacctgagggagtatttgaaaaatacgtaacagatgtcaaaagctcaagcataccatacagaaactaaagagttcatcagatcaggcctaagttggtaagtctataaaggataaattaatgtgaaattactggagactaagaacagttataagatcagaaataaacctccagcagtagcactgaaaagcagaggccagtagaaacgagaaaagaacaaagcaagcaaagaacaaaataagacagaagacacacaggacccaaagacaaaaacggagaaaaagaacag

SEQ ID NO: 255173 - DNA, 611 bp, Homo Sapiens
  misc_feature (380)..(380): n is a, c, g, or t
  misc_feature (511)..(511): n is a, c, g, or t
caggaccccaggcagcagcgagtgacaggacgtctggaccggcgcgccgctagcagctctgccgggccgcggcggtgatcgatggggagcggctggagcggacccagcgagtgagggcgcacagccgggacgccgaggcggcgggcgggagacccgcaccagcgcagccggccctcggcgggacgtgacgcagcgcccggggcgcgggtttgatatttgacaaattgatctaaaatggctgggtttttatctgaataactcactgatgccatcccagaaagtcggcaccaggtgtatttgatatagtgtttgcaacaaattcgacccaggtgatctgattctcaactcttctactgaagatggtattatgattcctactntatacagtatcatctttgtggtgggaatatttggaacagcttggtggtgataagtcatttacttttatatgaagctgaagactgtggccagtggttttcttttgaatttagcactggctgacttatggctntttactgactttgccactatgggctgtctacacagctatgggaataccgctggccccttggcaattacctatgtaagattgcttcagccagcgtcagttc

SEQ ID NO: 255174 - DNA, 1394 bp, Homo Sapiens
  misc_feature (31)..(31): n is a, c, g, or t
  misc_feature (393)..(447): n is a, c, g, or t
  misc_feature (627)..(638): n is a, c, g, or t
gtaaaggtaccagaaaaaccatagcagctanaatcagcaaacaaatgtaacaaggagacaagcagaaacgctgcagcaagccaggaaatgtcaccgggttcatggttaaatggcgtcagcatttactaaagtataaaatttcacaggcaaaatgaacctccagatttgttttccttagccccagcaagtcaagtccttcctaactgttagttgattgcaaaagtgcagcttcaagtctgtcccttttgctttcatttcccccctgccccacctctgctccatcaggtttgtaacacaagcagacactctttcatacgcttcaatgtagcgtgagctgtgacccttggatggtgtgaaagccagcctttggggatattatagtgattcagttannnnnnnnnnnnnnnnnnnnnnnnnnnnnnnnnnnnnnnnnnnnnnnnnnnnnnnaaaacatgctgcataacatcttcttgctaaaaacaatttctcaattagtaggaacactgaattgctttgtatatgatttgcttgttaagaagtccaaagcatttggttattcttaagaattaagcacttccattcttgggcaaatatttatttgtatgaagagaaagaaatagacctccnnnnnnnnnnnnctctgtttagccatcccactgtaatgctgcactaagccttgagaacaaagagaatcacgcaactgggaaaccaaggctttgtgattttcagccaagccaaacatggtcactctgtcaggaaagccttggactcatccctgactgactggctgtttcagtgagttctttcttggcttaaaaaaaagagtgagaagaagagcagttgtgtggtttgcctgtggggacttgggcaatggggggtttgtagagccaagtggccaccatgataagcgagactgacttccctgtgccccgacatttgggaggaggcagcacccccagcacacgcctgaggttcaccagcccctgggccttggcacagattcctcccttctttgcctggaacaactgtttctgttccccaccccattgtgtcctccaggattcaccgtagagatcaccacttttgataagcctaactctgcagccggctgaggcccttcaccaagctcccatggcactgtattaccatcacaggtgcttggagggcaaggactatgtctctgcccttgttattctccaccccctggacttggcgctggagcacaggtaaccccacactgaatattatagagtgaataaagaaatgagagagcagagactgcaagagcagctctctttgaacgaaggggattttgttttgcagcgtgattttcatgtctatgaatgttctagaatttgagggacactaacttttacaagttaaatgtgcctaac

SEQ ID NO: 255175 - DNA, 818 bp, Homo Sapiens
  misc_feature (321)..(371): n is a, c, g, or t
  misc_feature (506)..(506): n is a, c, g, or t
  misc_feature (524)..(524): n is a, c, g, or t
  misc_feature (530)..(530): n is a, c, g, or t
  misc_feature (654)..(654): n is a, c, g, or t
gcacgaggtcaactaattacatctacaacaatcctgtctccaaataaagtcacattctaaggtgctggaggttaggacttcagtgcctgaactttggcgcgatataattcaatccataatagtaatgataaggtcaaggatatgaccgtgggaatagaggtgggttgatgtcaagataaaagtcgatcgggtgagaggccattgtattggaaggatcaatgacatgtctattgagccaccaataattatgacagaaatggtatctgaggacacaagtgtcctcttcccttcagcttcctacattttaatacaaaatgtatnnnnnnnnnnnnnnnnnnnnnnnnnnnnnnnnnnnnnnnnnnnnnnnnnnngtaagtattcagcaaattttcaaagtatgaaatatcttaagactaagatttatactatggtagttatctcatatgtaatgacttcaagttttcattaaggatatgtttattaataactgcttatactattggttntatataatgcttgtatcngcagangagatgggaatatcagggatgagcctaccgggctcccaagctccatctgccctggagtactctatggcaggcccagtgccctggctctgggtgcaagagtaggagctgcccactgctggaacangcttatgtcataccccttagacccactaaaggggcctttggagggtccaccaagtagactatttcttattccctaactctgtcccccagggtttctccctcaattggcctcccacatggactccagcagttcccttaaactttcacctggcccaatgtttccca

SEQ ID NO: 255176 - DNA, 680 bp, Homo Sapiens
cctgtattcatcttggagctggaatacgggtttgttccatatttttccatatgtcttttccagcatacccaaccatctgaggagcaactgggtgagcagacaatccatacttattgatcaggaggtcaacatgcttatcagtgggaatggttctatctgaaaattttattccaaggcttcccttactcatcttctcaaacccaagagccaagacacattctgccacaccaccctgaatcagctggcgggccataaacaaagcagtagaaccagtagcacagttattgttgacattgattataggaattccagtcattcccaaactgtgatagatagccctctgcccacaggtagagtcaccaaaaacatagccaacacatgcctggtccactgctgaataagggatctgtgcatcagctaaagccttcttgcctgcttcttctgccaagtcagggtagtctcttgaattctcagctccaggcttcacaaacttggtcatgccaacccccaccacgaacacccggcgcagggtcgcaggctcccacggggaagaggacatggctgcaccagtgcgggaccggggcgggcgccgcggacgactgccggcactgacaggcggagactgcaccagagctccctgaagcccgaagccagggccgcgggcggcaacacaggcgcgt

SEQ ID NO: 255177 - DNA, 1002 bp, Homo Sapiens
  misc_feature (858)..(858): n is a, c, g, or t
aggctggaccggtccggaacttcaaaaaattgcgcgcagctggagtcgttgcctgaggttgcagccgagagtgtgcgccagcccgcggcccagccgaagctctttcccgccgcctctccgcgcctcgcccaggttcagctccgcctgaccctccgcttggcacggtcccctgaccctcagtccggcctggtccggccttccagccgccccggggacgatgaacggaggataaatggtgcccaaggcagacagcggcgccttcctgctgctcttcctgctcgtgctcactgtcaccgagccgctgcggccagagctgcggtgcaaccctgggcagtttgcgtgtcgcagcggcaccatccagtgcatccccctcccctggcagtgtgacggctgggcgacttgcgaggatgagagcgacgaagccaactgtccagaagtgaccggggaggtgcgtcctcatcatgggaaggaggctgtggatccgcggcaggggcgggccagaggaggcgacccttcgcacttccacgcggtgaacgtggcgcagcccgttcgcttcagcaggaagtgcccgacagggtggcaccactacgaaggcacggccagctgctaccgggtctacctgagcggggagaactactgggatgccgcgcagacctgccagcgcctgaatggctctctcgccaccttctccactgaacaggagctgcgctttgtcctggcccaggaatgggaccagcccgagcggagctttggttggaaggaccagcgcaagttgtgggttggctatcagtatgttatcactgggcggaaacgctcccttggaggtcgctgggaggtggcattcaaaggctctttcanaaggtgttcctgccccccaaaccccatctttggcctcgggccatgtctgagaaacgacaaacgtggttttgtgcccagccttgcatgctttccatttctcccaccctggcggaaacaccaaacctcccacaattgggcacgccc

SEQ ID NO: 255178 - DNA, 392 bp, Homo Sapiens
tttggaggatagggagtatggctgttgtgaaaagggaggtaaagagaaatggtagatctgaagaggcctcatcagagcacatattttaggacaacacatatggaaattggacatctttaagttggtttccatagagctatgcatgtatccttacccccatgggaaaatgttggtgtgttctcaagggtatgcatgtgtcattttgaagaccaaggccctagaattgtcaaacttaaggatcataaaaatcatgagggttgcttgttaaaaatgtccaaacgtgcagagactgatctttgagatctggaccaggaatttgcatttgaacaagtgttcctggaatctctatgcaagttttatacagaacatacttttggaatccttgccctaga

SEQ ID NO: 255179 - DNA, 1700 bp, Homo Sapiens
  misc_feature (4)..(5): n is a, c, g, or t
  misc_feature (22)..(22): n is a, c, g, or t
  misc_feature (24)..(24): n is a, c, g, or t
atgnngaactgggctgtgaatnangggctctccatttttgtcattctggtttggctggggttgaacgtcttcctctttgtctggtattaccgggtttatgatattccacctaagttcttttacacaagaaaacttcttgggtcaccactggcactggccagggcccctgcagcctgcctgaattcaaactgcatgctgattctcttgccagtctgtcgaaatctgctgtccttcctcaggggttccagtgcgtgctgctcaacaagagttcgaagacaactggacaggaatctcacctttcataaaatggtggcatggatgattgcacttcactctgcgattcacaccattgcacatctatttaatgtggaatggtgtgtgaatgcccgagtcaataattctgatccttattcagtagcactctctgaacttggagacaggcaaaatgaaagttatctcaattttgctcgaaagacaataaagaaccctgaaggaggcctgctacctggctgtgaccctgttggcaggcatcactggagttgtcatcacgctgtgcctcatattaattatcacttcctccaccaaaaccatccggaggtcttactttgaagtcttttggtacacacatcatctctttgtgatcttcttcattggccttgccatccatggagctgaacgaattgtacgtgggcagaccgcagagagtttggctgtgcataatataacagtttgtgaacaaaaaatctcagaatggggaaaaataaaggaatgcccaatccctcagtttgctggaaaccctcctatgacttggaaatggatagtgggtcccatgtttctgtatctctgtgagaggttggtgcggttttggcgatctcaacagaaggtggtcatcaccaaggtggtcactcaccctttcaaaaccatcgagctacagatgaagaagaaggggttcaaaatggaagtgggacaatacatttttgtcaagtgcccaaaggtgtccaagctggagtggcacccttttacactgacatccgcccctgaggaagacttctttagtatccatatccgcatcgttggggactggacagaggggctgttcaatgcttgtggctgtgataagcaggagtttcaagatgcgtggaaactacctaagatagcggttgatgggccctttggcactgccagtgaagatgtgttcagctatgaggtggtgatgttagtgggagcagggattggggtcacacccttcgcatccattctcaagtcagtctggtacaaatattgcaataacgccaccaatctgaagctcaaaaagatctacttctactggctgtgccgggacacacatgcctttgagtggtttgcagatctgctgcaactgctggagagccagatgcaggaaaggaacaatgccggcttcctcagctacaacatctacctcactggctgggatgagtctcaggccaatcactttgctgtgcaccatgatgaggagaaagatgtgatcacaggcctgaaacaaaagactttgtatggacggcccaactgggataatgaattcaagacaattgcaagtcaacaccctaataccagaataggagttttcctctgtggacctgaagccttggctgaaaccctgagtaaacaaagcatctccaactctgagtctggccctcggggagtgcatttcattttcacgg

SEQ ID NO: 255180 - DNA, 773 bp, Homo Sapiens
  misc_feature (81)..(81): n is a, c, g, or t
cttcctgtccttactcctgcagctctcggtaaagctcacgctaatctttacatccttaagcaacttaaggtcaggggagancttccggaccgcaggtgcgtgccgggcggtgcgcgggctgtggccactacagttcgggtctatgaggaggcggcccttagagaaggatcctttggagagaagagaagctccgtagaagttgaaggggtcctcagcagggagttcggactgtccatcaccaccagagccaacgtccattacctctgcaccactggacgtttgcaggggaggtggtggagactgctcacggggcagcgcttggaaggggcgagctcggctctccatcaccgcttctcctgcgggcccacacgggagcggagaggggctctcatctgtctccatattaaaagcgcttaagactagtttacaagaccagagttttacaagccctcacataaatctacacagctaacatgcacaagtccgctgagacccgggcgcgtcctgccgcgctgtgcgctggcggccttaagtcaagctggcccacattgctcttttcattaatgtagacagcttttagaaccactgccctcaattattggaaatcacaatgcactcagcttaagtgactggcgactaagcgagtctgtcttcatgccggagtggcacctttcttcttctacctgcaaagaaatttaaaaatatcgtcacaaaatgacagaaaccttccaattccctggtaccaagttaaaagccaagcactattaacagca

SEQ ID NO: 255181 - DNA, 631 bp, Homo Sapiens
ggcgacctgcgaacctgtgtcagcagagccgccctgcaccaccatgtgcatcatcttctttaagtttgatcctcgccctgtttccaaaaacgcgtacaggctcatcttggcagccaacagggatgaattctacagccgaccctccaagttagctgacttctgggggaacaacaacgagatcctcagtgggctggacatggaggaaggcaaggaaggaagcacatggctgggcatcagaacacagtggcaagctggcagcactcaccaactacctgcaaacgcaactggactggcaagcccgagaggccagcacaacgggacacctcacttgctgaccacgggaaccgaggacagcctgagcctaccggaatgaaggtctctatggagggcccatctgtacaatggcttcaaccctcatagcagccgacctgagcacagcaaagggagacgtcatttgctactatgggaaccgaggggagcctgatcctatcgttttgacgcccaggtagaagaagaaaggtgccactccggcatgaagacagactcgcttagtcgccagtcacttaagctgagtgcattgtgatttccaataattgaggcagtggttctaaaagctgtctacattaatgaa

SEQ ID NO: 255182 - DNA, 687 bp, Homo Sapiens
gtgtgaggcactgcacccacccagccttatagctaaatatctcttaggctggtctaaccatagagtgtaatcaatggcttttggggtttacctgctagtccactcttcttgcatccgaattggttaccagaacacagggtgattaataagacattagacctggcccttacatttcctgggagaagggcatgtcccttttaacaaaaacacacttttcatctttggattcccaggtgatccctatttgcatttactggcgtttgtctttcgtaaggaagcaagaatgcaaagctttgtaactcagcacagcgatactcaagagtttctggatgctgggaggacattagataggtgatgagttctaattattcaatttttaaaaaagactcattttctttgctcttttgaactccactgagacacttgaacagaaagacagggagcccttatgctacctgaagagttatatgaaaagaagtttccagtgccaatacctctgcatttccatttaccatgtgacctgaaaagcaatataaagtaactatacagagaaaaaagatcaaaatgcaacacgccaaagtggttgtctttctaagtgggaaaatgataggcaacttaagtttttgtcttatttttttcctagattatttacagtgaatatgtaccacatttagaataataaaaaat

SEQ ID NO: 255183 - DNA, 769 bp, Homo Sapiens
  misc_feature (305)..(305): n is a, c, g, or t
  misc_feature (669)..(669): n is a, c, g, or t
ataactgggagggctgcagcatctttagtgacccctgctgatgttatcaagacgagattacaagtggctgcccgggctggtcaaaccacttacagcggagtgatagactgctctagaaagatactgcgtcacgaaggaccaaaagctctgtggatgggagctgttggtatggaaataatgtgttcttaactaactctttgggatcaggtaaatctttaaaatatctaattatatctgcgatttctccatttttttaaagctcgtgtatttagatcctcaccccaatttggtgtaactctgctgancttacgaattgctacagcgatgggtctacattgatcatggaggagtaaaacccatgggatcagagccagttcctaaatccaggatcaacctgcctgccccgaatcctgatcacgttgggggctacaaactggcagttgctacatttgcagggattgaaaacaaatttggactttacctacctctcttcaagccatcagtatctacctcaaaggctattggtggaggcccataggaagatcagccctgggatagtgctgtctttttgtgggtactgcagtaaagaacatccctcctgggaatgaagcaatgcttcattcccttttacgtccatctcttgacgaaattcaagtccaggctctgttnatcatgtgaaatgattcatttgatgggtgtattcttaaccaaatcattgtgaaattattcatatattatttggccctctgcccagcctttgttagctctg

SEQ ID NO: 255184 - DNA, 747 bp, Homo Sapiens
  misc_feature (129)..(129): n is a, c, g, or t
gacacctatctatgtggtctcaagtaagatatcaaattatcaatatgaatacattccacaaggacaatatgagctaactctgagatttagaaattatctccaggcgccgtctatcagagagtattatgntagatacacgactgagacaatatgaatcgtggtaagtatcctcatgacaagtggcatttatatcggtacttgccccattagaaagaactatctcaacattccattgctgccacttcacatcgtatacagtgtatgatccataggctcatcaatatgtgagaaaactgtcagattctgtataggaagatcattgcaacaatgcccaagtttccgattagactaatcgcaaactaggaaagtctgttattctacattacagagtaacacctcttggatgttagtattagcttcctgctgtagagacaatgttcaatcttattgaaggctcagttctttcacttcttccatatggacagaggtcacatgaagtgctcattagagctaattttatattacttcgttttgaaggtcatctcatctacacgttgatagcaggacacagtctctgtggcaatagcagggcaatgtagtcattttcatattgtaagcactgcgcagttactaggtactcatcctgtccatcatgttaaaaccagatcagccagctgtgtgaatgaacttatagagcctctttcaggcgcagtagccagtagaaaaagccgcttttcttagtatcgt

SEQ ID NO: 255185 - DNA, 1062 bp, Homo Sapiens
  misc_feature (800)..(800): n is a, c, g, or t
  misc_feature (873)..(882): n is a, c, g, or t
  misc_feature (904)..(904): n is a, c, g, or t
  misc_feature (955)..(955): n is a, c, g, or t
  misc_feature (958)..(958): n is a, c, g, or t
cgcagcatacacactgtagagagaccctatgaatgtgacgaatgtggaaaagccttctctcagagaacataacttatatgtgcatgtgaggattcatatcacgtgataaaccttaccaatgcaatgtgttgtggaaaagccttctctctagagctcatctctcactgtgcatgtgagaagccatacacggggagaagccctatgggtgtaatgagatgtgggaaagctttctctcaggtctcaacccttgcgtctgcatttgagaatacacacaggtaagaagccttatcagtgcaatgaatgtgggaaagctttcagccacaagtcacaccacattagacaccagaaaattcatactcactaaaaaccccatgaaagccttgaaagtgggaaagctttcattagaaatttgcacctcatcatgccccagaaataatccttctgaagcaaagcaccacgaatgaggttaactttaacaagtactaaaaacttaagggacaccagaaaatttgtactgaagagaaagacatgcatatgattaaaaccctgtgtccaacagagaaacctgcagcagagataatggtgaaagtttaggcacattttcactaaaagtgggaacagaaaatggaggcctgttttttattgctaccaccatagatctggagatcttcgccagtaacaagaaaaattaagttgtaaatattggaaaggaacagacaaaaatagatgacatggtcatctacaactaatattaagactcctgtggtattgattgagcagagcagaagagatttcaaaanaagacctatgcatttattagaatttggaatatgatacaagtggcatcaggaaatgagggaaatatgggactannnnnnnnnnagtggaggtagtttgttctccnagggggaaatagaccatgaactatacacaaaagtggattccgagattaaanacngaaatatgggaaaagctatggtactaaatgcatatggaccttggggaataggggaacattccttggaaacatttgaaaaaatacttaaccggtctacttaatga

SEQ ID NO: 255186 - DNA, 926 bp, Homo Sapiens
tcctacccccatcaggtgcagagccagttaaacgggggaggaactttacgggttgagcctttgaacagttttaccatccactcgatggacaatgttggcttacacacattgttcggaggaggacccccccatgccggtagtgacccttcttaatggccgtattccctgcttggatgccattattggcaaactttggttcctaccaaggtggagacgatggggattgctaacatggtggtatcctgctcccagggccgaaatgtcaaacgccatgcaccagaaattgctcgtatggccctagcattactagatgcagtttcttcctattcgcatccgccaccgaccccatgaccagctgagcgacgcataggggtccatactgggccagtctgtgctggggttgttgacctgaagatgccccgttattgtctttttggagacacagtgaacactgcttctcgaatggagtctaatggtcaagcgctgaagatccatgtctcctctaccaccaaggatgccctagatgagctaggatgcttccagctagagcttcggggggatgtggaaatgaagggaaaaggaaagatgcgaacatactggctcttaggagagcggaaaggacctcctggactcctgtaaacccccattctttccaagtcagatagtcttctgctgctggtacctgggtgggcaatggccaccatgtctgcacacaccagaaatggacattttcatatgcaatggaaaacagccacaaaaaaacctaccttatatggaagttgtagccctctgcagctcagccctgtacatatacctgtccctctctggcttggtccccttcctccctactttctgtaaatatctgtatctaaaccagaatattttggtcaaatataaaacaataataaaaaaagttctgatgtcaa

SEQ ID NO: 255187 - DNA, 300 bp, Homo Sapiens
  misc_feature (30)..(30): n is a, c, g, or t
  misc_feature (38)..(38): n is a, c, g, or t
  misc_feature (74)..(74): n is a, c, g, or t
  misc_feature (87)..(87): n is a, c, g, or t
  misc_feature (99)..(99): n is a, c, g, or t
agacccatgagcccctcgcagaacgaggcnaagtgganggcccattctccaactgtcctgtgtgggggccatgnacctcagccagcnaccaacgtcccnaccttcaaccatccatccttctactacatccttcaaccacctagaccatgccatcttccaaaacagatctacacaaaacaggcctgcacaagtccaggactgacactaaagcaaaggacacaataatgagaagagaggcaagtccctccttgtcccagtgactgccacctgctctgccagctccccatacatccaacagcc

SEQ ID NO: 255188 - DNA, 664 bp, Homo Sapiens
  misc_feature (326)..(335): n is a, c, g, or t
  misc_feature (379)..(392): n is a, c, g, or t
  misc_feature (650)..(650): n is a, c, g, or t
aaaacctcctcaggcttatggtttgttttccaaggaaattatgtttcaatgtaaagtttgaaatactccagacatacattccatgtaggttttgggtgccaatgttaaaatttcaaattttgcatgcaaggcttagcaaagaaacactggcagaattccagcatttgcaaaattctaagttttggtgaatattgtaaatattacaattggtattagaaagccatgatgaatccagaattaagagaaaacccatttcataaatattttgtttggattaaaaaataccaggcttaccatgttctaaataactcaagaaaatatctttnnnnnnnnnnggactgcaatttaacagtaatctgtatatctttagctgccattnnnnnnnnnnnnnngaacaaccaaaaacaatgaaaatgttacaactggtataaagtaaccctatgatgctccccatacgagaaaacaaaactgtacacatttataaacaaacagtctctcccatcagttaacacacagagccttctctacaccaaagtctctttccgtttgccaccagaaagggctttgtccctcgctcttcggatgccgggctgtgtctggtgtgtctttaagctcttgctgtcctctgccatctgcatgccagagccacntctgtaagcgtttt

SEQ ID NO: 255189 - DNA, 849 bp, Homo Sapiens
ctctgcgaggaaactcacagcccagaggagggcatccacagtttccagtgttactcaggtagaagttgatgaaaacgcttacagatgtggctctggcatgcagatggcagaggacagcaagagcttaaagacacaccagacacagcccggcatccgaaaagcgagggacaaagccctttctggtggcaaacggaaagagactttggtgtagagaaggctctgtgtgttaactgatgggagagactgtttgtttataaatgtgtacagctttggttttctcgtaaggggagcatcatagggttactttataccagttgtaacattttcatctgtttatcggttgttctttttctcttttattaactggcagctaacagatatacagattactgttaaactggcagtcctttctaacatgtccaaagatattccctgtgacattatttagaacatggctaacgcctggtatctcctctaactcaaacaacacatatttactgacaactgggctttccctcttaattctggattcactcatggcctctctaataccaatggtacactatttacaactattcaccacaacctcacgaattcgcaaatgctggaattctgccagcagctcactcggccaaagccctgccatgccaacactccgacaatccaaaccactcggcaccccaaaaccctacatgggaacgcaatgtctgccagctcaaccccaaacctccacatcgacaaccatacacccgcctcgcgcacaccacaccataagcccgacggacgcgccccaatcacccgcgaacggcgcagaattacgcacggacaccacccggcacatcctcaacc

SEQ ID NO: 255190 - DNA, 706 bp, Homo Sapiens
  misc_feature (351)..(383): n is a, c, g, or t
  misc_feature (400)..(400): n is a, c, g, or t
  misc_feature (404)..(404): n is a, c, g, or t
tttaaagaagattaacacgtgctggcaggaccactgcagacaaatgatcatgatcagaagcatcttcctgttcttggaccgcacctatgtgctgcagaactccacgctgccctccatctgccaaaatcattaacgggaacgtaggagtccaggtgggtcttagccttgaaacaccaggtgtctagccagcagcaaggagtggagcaggaagctcggacaggcggctgactttggtcatgagggtgaagaccagagggtcttggtttctctctgacgactggaggttgaacctggagcgggctctttccagcgctgcaagttgaaactcggagaaagactgcctgctgcccnnnnnnnnnnnnnnnnnnnnnnnnnnnnnnnnnctgtggaatggcttgcntcangtcccggcctcctgagcacatagcactcatcgtccgtcatctttcggggactgtatacaccaggggttctggggcctttcctcagcagcgttcgcggccacggaccccacatgtcctctgctgacccctgtgtgtcctctgtggccaccccatggcgctgaatcctgccgcctcctgcaaaccgactttggacaaaagctgtgtccggtctcaccgtctgatttgtcttgttctctgttaatgtagtgtttcattcttctcacattcatacataaaagtgatgtcgtgccttctcatgaaaa

SEQ ID NO: 255191 - DNA, 392 bp, Homo Sapiens
cctgattcatggagaatgctgcaggggattctgcaggcccaacccccacctgtctgcaagccaacaagtactactagtaattactgtgtgtcagcctcctaatgccatctaaatcttagctttcaacagaatgattgtgtaactatcgcctctgcagaaattgccttgaaattctaaacttattcattgtttccatcacctacttgttagctttcttaagaaaaaaatttttttagtataaaaagaattgtgttcactaagccagctcacttctgaccacaatagtgtctttgtgtattcatagaaggtgacctgcctctaaatctcaatgggaaattgtgaatgggccatgttatgaaactgtccgaacttcctacttgctagcatgggag

SEQ ID NO: 255192 - DNA, 1376 bp, Homo Sapiens
  misc_feature (217)..(228): n is a, c, g, or t
gctcagcaacttcaaatctattatttacaaatctgtcacctcctactagactaagctcaggacagaggctgtgtctcaatcaccttttaacaatcagtacctggaacattagtaggtgctcagtaagtgaatgtttgctgaatgaatgattgtataataccatctaattatcataatcagtatcaactcaatatacacattgtgtaaggcacagggnnnnnnnnnnnnaaagctaaaaacttttaaaaaatactctgcaagtgtttattattattttcccattagaaaggaacacagtgataagtaatgttctacaggttcaagatttcagtaacaaagtagagaagggagatccaatgactggttctctgcattttacccttccacagtcagctgttctaccaggcagagattttatgatagggttaaaatattatttcagatagtcaagcattatttttctttaaatcaatctctcaaatatatgataaagaaaacattgtcatttaagaattctaattgagaggtcttttgaggattggtttttcagattacttcaatgaagcaaatgtgttatctaccatcaagctataaaaaatttagaaaccaatttaaaaatactgctagcctctccctctgtgtacttagcccagtggtttatcaagctttttctaagcattctacaagcactggcaagactatgaggaaagtatctgtggtaatataaaaatgaaaggcaagataggaagaatatggtatttaagtagtttgaaagcacacgtttgaagatcgctcatccagattacaggaaaatgctgcaggggattctgcaggcccaacccccacctgtctgcaagccaacaaagtactactagtaattactgtgtgtcaagcctccctaaggccatctaaatcttagctttcaacagaatgattgtgtaactatcgcctctgcagaaattgccttggaattctaaacttacatttcaatggtcacttaaaattatttatatgttctagaaaaagttattttttattcattgtttccatcacctacttgttagctttcttaagaaaaaaatttttttagtataaaaagaattgtgttcactaagccagctcacttctgaccacaatagtgtctttgtgtattcatagaaggtgacctgcctctaaatttcaatggggaattgtgaatgggccatgttatgaaactgtccgaacttcctacttgctagcatgggagacgaggggggcaatataactgccatgttctcttcttttggaaaataacttcaaactgtagactcaaaaagggcaatgtgctacaggtttggaaggaagcttttaaaaaaaatgtttctcagattgtaaac

SEQ ID NO: 255193 - DNA, 412 bp, Homo Sapiens
gtcgtcagtttggcctttcctactgcagccaggtgagagcttaagatgtcagtccccaatatcttcacagagtgcctttatgaccagtttggagaattacgatggtaaggggaagaggcagatatgaagaggaatggttaggggaattgtcattcataactctgtgctatattacttgaggggctaagaaaaatgtatggtcagtgaaacacagtagtgtacccttaaatgccttataaaagaccatccatccagtctgcgcttttgactgtgtgcaagtatcagtaataatgcttttggggggctcagatggaacagcgaacacccaatcagccaggggctctgggaagggaaagctcccaaaaatgaggaagtcccttccaacacccatttttcccattactgttctcac

SEQ ID NO: 255194 - DNA, 2990 bp, Homo Sapiens
  misc_feature (1555)..(1555): n is a, c, g, or t
  misc_feature (2168)..(2185): n is a, c, g, or t
  misc_feature (2237)..(2237): n is a, c, g, or t
  misc_feature (2420)..(2420): n is a, c, g, or t
  misc_feature (2692)..(2692): n is a, c, g, or t
  misc_feature (2808)..(2808): n is a, c, g, or t
  misc_feature (2852)..(2852): n is a, c, g, or t
  misc_feature (2973)..(2973): n is a, c, g, or t
tgggctaaacagccgcgttataagcaggctggtacggccggaatctgggatatcgtcgaccacgcgtcgggcctgcggctgctaccgtcgccgcggagaaattgttggatctggcagtctaggaatgaatctcctctcagcctttaagctcacctggtcagaatccttggatgagcctgtgggaccgttcctcctagcccggtggtttggaaccagtggctttgggactgtaagaggatggacaaagattctcaggggctgctagattcatccctgatggcatcaggcactgccagccgctcagaggatgaggagtcactggcagggcagaagcgagcctcctcccaggccttgggcaccatccctaaacggagaagctcctccaggttcatcaagaggaagaagttcgatgatgagctggtggagagcagcctggcaaaatcttctacccgggcaaagggggccagtggggtggaaccagggcgctgttcggggagtgaaccctcctccagtgagaagaagaaggtatccaaagcccccagcactcctgtgccacccagaccagacccagaccctggactcaccaagcgtgtgaagaagagtaaacagccacttcaggtgaccaaggatctgggccgctggaagcctgcagatgacctcctgctcataaatgctgtgttgcagaccaacgacctgacctccgtccacctgggcgtgaaattcagctgccgcttcacccttcgggaggtccaggagcgttggtacgccctgctctacgatcctgtcatctccaagttggcctgtcaggccatgaggcagctgcacccagaggctattgcagccatccagagcaaggccctgtttagcaaggctgaggagcagctgctgagcaaagtgggatcgaccagccagcccaccttggagaccttccaggacctgctgcacagacaccctgatgccttctacctggcccgtaccgcgaaggccctgcaggcccactggcagctcatgaagcagtattacctgctggaggaccagacagtgcagccgctgcccaaaggggaccaagtgctgaacttctctgatgcagaggacctgattgatgacagtaagctcaaggacatgcgagatgaggtcctggaacatgagctgatggtggctgaccggcgccagaagcgagagattcggcagctggaacaggaactgcataagtggcaggtgctagtggacagcatcacaggcatgagctctccggacttcgacaaccagacactggcagtgctgcggggccgcatggtgcggtacctgatgcgctcgcgtgagatcaccctgggcagagcaaccaaggataaccagattgatgtggacctgtctctggagggtccggcctggaagatatcccggaaacaaggtgtcatcaagctgaagaacaacggtgatttcttcattgccaatgagggtcgacggcccatctacatcgatggacggccggtgctttgtggctccaaatggcgcctcagcaacaactctgtggtggagatcgccagcctgcganttcgtcttccttatcaaccaggacctcattgccctcatcagggctgaggctgccaagatcacaccacagtgaggagtggtggcaggactcgtgggccctctccagcctgtttcccctgccactccagcccccttgagctgggaactcaggctcctggaaaaacctgggcagtgggaggctcagctgcgggccattgatttgagcctttgagggaggatagggctggcctttgtgaagccagcagaggctgagaacctcaggcttccctagatccagagcccctccccatcttcctctctctaaaaacaaccctaccccccattgccaccttcactcctgtgtctccagctgattagcctcagactcttcttttattgtttttcttttgtaaataaaaacccaccaggttcccgcgtggcctgcaaggacccccgcgcccggccccaggccttcgcgcccgcgcttccgtaaacgatcacgcccccgcacgcaaaggaacctcgcgcggcgacggatgccggccagttcgcgccgccattccccctcccccctgcgtatgcgatccactcccggatgggggagaaccgtacctcctccgcttgcgccctgccgnnnnnnnnnnnnnnnnnntcctatccgtgaagtcgttgttgccccgcgacgaactccctcggctgtgggngggcggcgccgcgctcgcggcgctcgctcgcacgcgccaggtgccgacgggggagataaggtgcccaacacccgaacctaatcacacctcgccgcttcttttcgcgtatgtagcagcgcgatacgttcgccggccgacgcgtcagcgctcgtcgtccaactccggacgagctcgtatatgggngagaaaaggcgcactacacggcacccgggcccgcggaagagtagcgggtacgacggacacatacaatgtcacgcgcgcccgcgcgtatcgcgcccgcgcatcatgaacgcaccgtgagacgtggagtccgccgtggtggcgcccgcctctttgacttcgcccccctccgtcgtccgcgagcgtgctgactccttagaggctgacaggcgcgcgcgcgccgctctctcgtgcggggcctgggacctcctccccctcccacgtgtattcggctnagacgctccgtgccccactagaatcgtgcaggatttatagttcggtgtggaatatgccggagcgcccagctctcctccgccgcgacaggtgatcagcgctgatcgacgtcgcgcgnatatccgccaacctcgaggtaaccagtcgcgggtgaccggacgncgaagtcattccgtgcgtgtgcgtgcggccccgcgcgcacctcggaacatctcatcagcttcgatcacaccctcatcgcccgcacccccgacagacatgagagtgggtggtctaaacccanccgccgcgtgacacccg

SEQ ID NO: 255195 - DNA, 821 bp, Homo Sapiens
  misc_feature (304)..(304): n is a, c, g, or t
  misc_feature (320)..(320): n is a, c, g, or t
  misc_feature (346)..(346): n is a, c, g, or t
  misc_feature (369)..(369): n is a, c, g, or t
  misc_feature (513)..(513): n is a, c, g, or t
  misc_feature (551)..(551): n is a, c, g, or t
  misc_feature (555)..(555): n is a, c, g, or t
  misc_feature (580)..(580): n is a, c, g, or t
  misc_feature (640)..(640): n is a, c, g, or t
  misc_feature (643)..(643): n is a, c, g, or t
  misc_feature (656)..(656): n is a, c, g, or t
ccatttggggtttttactgaagatttagtaagtggtatttccatgagataccatctcgtggaaaccaaaaaccactgtttgggaactgcgtgattatcaaccacgctgtgccccaacaacccctagagaacccaggtactggactttctcggggcgctcctctcgtgagtccccacttctaaccagggtggctcttagctcagtgttctagtccctgtccccagatgagagcctgtcgctctccgctccataggctacgactaagaactcttgacatctgaggagagggcgaaggggcccgaancttgacggcaaactgnaggtaagggtctgttgccccttcctntaccggaccctccgcccctcgtntctcccaagagttgcacacccaaggtaaggggatcgggtccaggtctggtctcaagaactcggggtaggagcattgatgaagtcacctctgcaactcaaagcagagcaccaagtagccttggtttgagacccacaggctggtgnctggggaggtgggggtaaactcgcaagcccattctcancccncggtctccatgcctttgcgcatgcntaacacttcgagccagattctaacccggtccggaccacgcatgcgcagcttttcggggcnccnctggggcggggcnccaaacttggggggtggtcgtccccggcggcactctgcaaaactccatttcatccccaactcctctgagaaccctcagaggcgaaccgcgaggtctcaccattcctagactgccagatccaacaatttctccgcggcgacggtagcagccgcaggccgaaatgcc

SEQ ID NO: 255196 - DNA, 1311 bp, Homo Sapiens
  misc_feature (480)..(480): n is a, c, g, or t
  misc_feature (780)..(803): n is a, c, g, or t
  misc_feature (1118)..(1118): n is a, c, g, or t
  misc_feature (1234)..(1234): n is a, c, g, or t
agatgctccctgcagcccaggccccgggcacctcctgcaaccatctctgggctcagcacctgaggcgggtttcctgggtcccctctccagcaagcctccaccagcaagctcggcccagagcttcccttccggctggctctgaaccgtgcgtggtgcctacagcctgcagtctggagacaagctcttccggagtgctctgggagccaggccagggtgtgagggaggtgcagaggcatccggggcgggaacaagccccaggttgtgacaggtgcaggtagacaacgcccataaacagagatggtcctgaactctggagagatccttccctgatcctttcggacgactacttggagccataagtaacctcagcaaaaacgaggcctctgcaagccacttttccatgccaagcatccacccggcccacaggcatgtttctgccgccactccgcaagatggacagggagccagcaggcaggcggngaagggccaagtacaggcaatcacccccatcttcttggtttgaagctttatccatgtatcatgttccgtgtagccattttattttttaagaaactgctaatactttctccctaatggaagccctgatcccccagagagctacaggtctgctcccgacgggcctcgggctgaacccgtccacacagggccgtgtcaacagcagcgactcaagggacgtgtgtacatatgtaaatgagaaatagagacgtgtcaacagatgcattcatttctcttggaatgtgtattgtttttattttgcgnnnnnnnnnnnnnnnnnnnnnnnngcttggaactccatcacgtggaaaaactagatcctgttggttatagcatttgtgagttctccacgtctgtctctctcgctcatgtaatatactctgaccctgagtggaaaggggtttttgttctgtttttattttacctacatgtactatttagcttcagagtactagtcctgccacctgtgtatttttagggtgctatggaaataatgaaaagaaacggggatttcagaagaaaattgtaaccaaattcatactctggataatttttgatatcatgatcacaaggtgattcacacgtacacacataaacacacncaccagtgcagcctgtaagtaactcccacagaaaccatcatcggctttgtacatcggatggacaacgcaatcatttcatactctaaactggtcaaaaactaattgggatttctaancttgcaagctgcttgtaggtagattgatgtgacaccccctaaatttatctaataatatggattcagatgaaacctgc

SEQ ID NO: 255197 - DNA, 524 bp, Homo Sapiens
taattttcccctacatgtacctatttagccttcagtgtacctagtcctgcccacctgtgtatttttagggtgcctatggaaataatgaaaagaaacggggatttcagaagaaaattgtaaccaaattcatactttgtataatttttgatatcatgatcacaggtgattcacacgtacacacataaacacacccaccagtgcagcctgaagtaactcccacagaaaccatcatcgtctttgtacatcgtatgtacaatgcaatcatttcatactttaaactggtcaaaaaactaattgtgatttctagtcttgcaaagctgtatgtagttagatgatgtgacaacctctaatatttatctaataaatatgtattcagatgaaacctgtatattaggtgttcatgtggttattttgtatttaaagatcaaattatttgactattgctagacatttctatactctgttgtaacactgaggtatctcatttgcccatgttaatttttttctaaataaattgacaaaaa

SEQ ID NO: 255198 - DNA, 292 bp, Homo Sapiens
tggcaagcttcttcttgaagaaggatgaacagttctcagcaaagaggagtcatcattcttctgaaccaccataaacattccagagaagaggtagatagaaggctagatcctggaggatgtgctgtggtgagctaggccctcaggcaggtggtggtgcccagcagaaatggcactgtaagccaggcttccctggtcctaggagaatgttttagactagatgtctagcagaagtctgggcactaccactggtctcccggccgtaatgccactctgcgttgataccactgcttcc

SEQ ID NO: 255199 - DNA, 753 bp, Homo Sapiens
  misc_feature (11)..(11): n is a, c, g, or t
  misc_feature (45)..(45): n is a, c, g, or t
  misc_feature (139)..(245): n is a, c, g, or t
  misc_feature (262)..(274): n is a, c, g, or t
  misc_feature (353)..(353): n is a, c, g, or t
ccccaaacaangtccacaagggggcagacagaagatgacaaatanaaccaataaaaacctcagctgaaaagctaataactccagaatgcaggttgaaagcaagcttaaaggtcatctaggctggggtcagaagctcatnnnnnnnnnnnnnnnnnnnnnnnnnnnnnnnnnnnnnnnnnnnnnnnnnnnnnnnnnnnnnnnnnnnnnnnnnnnnnnnnnnnnnnnnnnnnnnnnnnnnnnnnnnnaagtagatttcgtcccnnnnnnnnnnnnntcatctaagtcatctaagtccatctccctcacctgacaagaaagaaacagaggccctaatggaaaggtggctcacccanagtcaccagtatggtcaatgcaagaggtagaagtagagacccatctcttcacctcttcatccctcctcactcggactacagtgcctcctccttaaacaaagtgatggtaaatgtggcaaatgaaagacttagagagataggagatgaagggcagaatctcatcaagaaatggtttttggttttttatgttctttgtagcaagagatggcaggtccagaaagacattacaaggaagcaaatttaggaacaatttagggaacaattaaggatgtctaaaaggtgagacaggtagaagatttccaattcaagcaaaacccgaaatggtcatctctaaggcaagcttttcccaagattctgtactgtatagttgcttgggatacaggccttctcagttcccttc

SEQ ID NO: 255200 - DNA, 949 bp, Homo Sapiens
  misc_feature (458)..(470): n is a, c, g, or t
  misc_feature (487)..(596): n is a, c, g, or t
gtcccaagcaactatacagtacagaatcttgggaaaagcttgccttagagatgaccatttcgggttttgcttgaattggaaatcttctacctgtctcaccttttagacatccttaattgttccctaaattgttcctaaatttgcttccttgtaatgtctttctggacctgccatctcttgctacaaagaacataaaaaaccaaaaaccatttcttgatgagattctgcccttcatctcctatctctctaagtctttcatttgccacatttaccatcactttgtttaaggaggaggcactgtagtccgagtgaggagggatgaagaggtgaagagatgggtctctacttctacctcttgcattgaccatactggtgactttgggtgagccacctttccattagggcctctgtttctttcttgtcaggtgagggagatggacttagatgacttggatgannnnnnnnnnnnngagacgaaatctacttnnnnnnnnnnnnnnnnnnnnnnnnnnnnnnnnnnnnnnnnnnnnnnnnnnnnnnnnnnnnnnnnnnnnnnnnnnnnnnnnnnnnnnnnnnnnnnnnnnnnnnnnnnnnnnatgagctactgaccccagcctagatgacctttaagcttgctttcaacctgcattctggagttattagcttttcagctgaggtttttattaaatggttttatttgtcatcttctgtctgcccccttgtggacattgttttgggaagaaaataaaatatttaattgctcgaagaacaatataatgaccatctcaccctccaaaaattcacttgcatcacactgtttgttttcagttattcatgttcacttctagtcgtcgttcataaatgtacatcattttacatggttgaatcatatcagggacataattttgtactttcccccctccctgataaagatgatgtttttacgagt

SEQ ID NO: 255201 - DNA, 834 bp, Homo Sapiens
gggcgatcgcgagcgcaacaagaagcggctgctggagctgctgcgggcgccggacacaggcaacgcgcactgcgccgactgcggggcggcagatcccgactgggcctcttacaagctggggatcttcatctgtctcaactgctgcggcgtccaccgtaacttccctgacatcagcagagttaaatctgtgcgacttgacttctgggacgacagtattgtggagtttatgatccacaatggaaacctccgtgtgaaggccaagttcgaagccagagtcccagctttctactacatcccccaggccaacgactgcctggtcttaaaggaacaatggattcgagctaagtatgagagacgggaatttatggctgatggggaaaccatctcgctcccaggtaaccgagaaggattcctgtggaagcgaggaagggacaactcacagtttctgagaaggaagtttgtacttctggcaagagaaggcctcctgaagtacttcacaaaggaacagggtaaaagccccaaagctgtcatcagcattaaggacttgaatgccaccttccagacagagaagatagggcacccccatgggctgcagatcacctacaggagagatggccacaccaggaacctgtttgtgtatcatgaaagtgggaaggagatagtggactggttcaatgccctccgtgcagcccgtctgcagtacctaaaaatggcctttcctgaactcccagagtctgagctcgtgccattcctcaccaggaactacctcaaacaaggcttcatggaaaagactgggccaaagaaagaacctttcaagaaaaggtggttcgccct

SEQ ID NO: 255202 - DNA, 643 bp, Homo Sapiens
  misc_feature (517)..(517): n is a, c, g, or t
  misc_feature (537)..(537): n is a, c, g, or t
  misc_feature (602)..(602): n is a, c, g, or t
gactggttcaatgccctccgtgcagcccgtctgcagtacctaaaaatggccttccctgattagctatttaataactaacgtccttaattctttttcaggtaaataagggatttctttttggtttggttgtattgctggtggctagtgtgatttttttggggggtgttgaagagccttgttttcttatattaccagagttgggtttctggttccttctcatttgggtaggctctgtcagagggaaggtctagggctgaaggctgttgtttagattattttgtcccatgaggtgttctcttgatgtagtactctcccccttttcctatggatgtggcttcctgtgagccaaactgcagtgattgttgtccgtcttctgggtctagccactcagcaagtctaccaggctccaggctggtactgggggttgtctgcacagagtcctgtgatgtgaaccgcctataggtctctcagctgtggatcccagcacctgttctggtggaggtggcgggggatgcantggactctgtgagggttctnagctttggtccgtgctttgcttcttattagtattaattttggcccagttctgcaggcttaaccanaaacatggctgggaagtgtcaaaaaacttgcaatcatggca

SEQ ID NO: 255203 - DNA, 557 bp, Homo Sapiens
  misc_feature (19)..(19): n is a, c, g, or t
  misc_feature (137)..(137): n is a, c, g, or t
aaccagcacaaaaattggngcatttaaccaccaaggcttaggaacttttcacaggagtccatttcacccccctgccacctccactggaacaggtgctggtatccgcagctgagaaacccatagacggttcacatcanaggactctgtgcagacaacccccagtaccagcctggagctggatagacttgctgggtgggcctagatcccagaaaagagataacaatcactacagcctcagctctcaggaagccacatccataggaaaagggagagagtactacatcaagggaacgaccccataggaccaaagaacctgaacaacaaccttcagccctagaccttccctctgacagaacctacccaaatgagaaggaaccagaaaaccaaccctggtaatacgacaaaacaaggctctttaacaccccccccaaaaaatcacactagctcaccagcaatggatccaaactcaagaagaaatccctgacttacttgaaaaagaattcactaggttggttattaagctaaggcaccagagaaaggtgaagcccaatgtaaag

SEQ ID NO: 255204 - DNA, 465 bp, Homo Sapiens
  misc_feature (257)..(266): n is a, c, g, or t
cagccttcagccttagacctttcctctgacagaggctacccaaatgagaaggaaccagaaaaccaactctggtaatatgacaaaacaaggctgtttaacaccgcccctcccccccagaaaaaaaatcacagtagctcaccaacagtggatccaaaccaagaagaaatccctgatttacctgcaaaagaattcatattagttattaagctaatcaggaaggcaccagagaaaggcaaagcctaatgcaaggaaatccnnnnnnnnnncaatacacgaagtgaagggagaaacattcaatgaaatagatagtataaataaaaaaaccccaaaacttcacaaaacactggacacacttatagaaatgcaaaatgctctgggaaatctcagcaatagaattgaacaagtagaagaaattcagagcttgaagataagatcttcgaattaacccaatccaacaaagacaaa

SEQ ID NO: 255205 - DNA, 1365 bp, Homo Sapiens
  misc_feature (1168)..(1168): n is a, c, g, or t
  misc_feature (1202)..(1202): n is a, c, g, or t
  misc_feature (1270)..(1270): n is a, c, g, or t
ggcctgggtggcgaattcggacgaggagaactatccctatctttacaactgatagcatttccaacagtaagctgtgagattctgcttgaaatcacctctcaaacaaataaaaaacagacctgggagacatgctacgctcattctgctgaagaaataggcatcatagctgggaaacggattcacaagacccaggctgttccctacatatgtttcctcctccgacatcagttcatcagtcaatcaagccatgtgagagtggaggccttgtattccctattattcttgggcactctactccaagtaggaaaaggccaggaggtcctgttaaaggatgcactcagagcccgggctccctaacatatgagagtgctaaccagcaggtgtagacttttcaggagtgaagaatgaggcaggcattccaaacctggaccttcatcaccttttgtttcatctcaagacaattctgagggactgttttggagcgtgtctggaaggtgaaccttgaagaagagtgtgggctttgatgtgactcagttgagatctttcatggggaggcaggaattcaatgcccagaatctgggctggtgtctttgaggtcagtaaggtgcgtctttggatccaagtccattgttactaggttggaggctggagattctaaatggcttccagaccatctctctgattctctttgggagatggggtctgaaagacaatgtcagtagttttgggaaattctagaaagtgtgcttggaaacgtgggaagagctcttgcctagtgcctaaacgctccatttgcagctctagccaagtagatactcagtaggtatagagccgggtttgcatttatatcagcaaaacctatgtcagaattgaagaagtagtcaggaaaaagcgtcttggtcgcaggccggggaacatcttaaaagcaaacttctaggcctgctgactctgggcaatgagtgttggatccgggctaaagttgcctttgaatgcagcatgagggccaatccatgaatccaacttctcatggagaaatgttaatattttttcagtttgaatcaatcagggtgaaactaccatgctattggtttgcttactttttattatttcatataaaatctaagacaaaatacattaaatgcttattgacatatgtatttattcttcncccaggctgataatatctgcctaattttaaactntcttccattttgtaggtttcaacttattctattgtaagatactgttaaatctaatagaggcattgtcncttttacgtataattttattttatttcatatatttcctattggctttttacatttaaattatggagcacttcatcatataaaaaacttcaattat

SEQ ID NO: 255206 - DNA, 835 bp, Homo Sapiens
  misc_feature (580)..(580): n is a, c, g, or t
  misc_feature (740)..(740): n is a, c, g, or t
ggggggatctgcgtctctcgctggcgccggcacaggaacttgggatccgtctccgctttcgcctcctgcaccttgagagccctgggctactctgtcacagcccctgttgccctgcgatctgtaggtccttggggacgcatagttaaggtgccaggacatcctggaagctgggaaatgatttcttccagaccatggctggagaaggaaagaaggtgtgttttgcctgactcagggactatagagagaaccaagttctgcaggcctgtcacctaagtctcagctgggtgccacaaactctgaactggattccaaggctttcatgaatgcacttatgtttgctgtggcagctgcattatgtcgtgggggatgtggatgcagaacctcacattctgtcgtcttgcttatgttactctcctttatgtttcactttctcaaatgaatgtcaagcaggtgattttcagattcaaaagttctaaaataaattgctcaaatttacacattatgtaagctgttaataaaatttcttgtaggtgctacatatttgttaaaatttttggttgtaattttaagctcactgtangcagaaagggatcattaagatttctatttctttttagcctgtatctaaatgaccatatattttaattccaaatatttactttatacttcagtaatgctcatttgtattttgcaaaatttatattggccctttatttggaaaatataaggctttttttacnctcctgaaagctatattattgtcctatagtttttattaatagatttggataaaaaagagcagccaccttattgagaaacgaataaaatcctgccg

SEQ ID NO: 255207 - DNA, 771 bp, Homo Sapiens
  misc_feature (564)..(564): n is a, c, g, or t
gggttcgcctcctgcaccttgggagccccgggctactctctcacagcccctgttgccctgtgatctgtaggtccttggggacgcatagtcaaggtgccaggacatcctggaagctgggaaatgatttcttccagaccatggctggagaaggaaagaagattgttgcagtggcaggaccaaggtcaaatgagttatagccaagtctacagtaagatgtggcagtattctgttttgaagccgggaccatgattggcaagcttgccacttggtcaagtgctcaccctctgaaaatgtcttccttggtctttgcctccagctgggtgccacaaactctgaactggattccaaggctttcatgaatgcacttatgtttgctgtggcagctgcattatgtcgtgggggatgtggatgcagaacctcacattctgtcatcttgcttatgttactctcctttatgtttcactttctcaaatgaatgtcaagcaggtgattttcagattcaaaagttctaaaataaattgctcaaatttacacattatgtaaggctgttaataaaatttcttngtaggtgctacatatttgttaaaaattttttggttgtaattttaagctcactgtaggcagaaaggaatcattacgatttctattcttttttagtctgtatctaaatgaccatatattttaatttcaaatacttactttatacttcagtaatgctccatgtatttttgcaaaattaaaatggtcctttttatttgaaaaatataaggc

SEQ ID NO: 255208 - DNA, 1223 bp, Homo Sapiens
  misc_feature (1205)..(1205): n is a, c, g, or t
ataggagtgagccacgcccgggctgtgggaataagatggcggggaagaagaatgttctgtcgtctctcgcagtttacgcggaagattcagagcccgagtctgatggcgaggctggaatcgaggcggtgggcagcgcggctgaggagaaaggcggattggtatctgatgcctatggggaggatgacttttctcgtctagggggtgatgaagatggttatgaagaagaagaagatgagaacagtagacagtcggaagatgacgattcagagactgaaaaacctgaggctgatgacccaaaggataatacagaagcagaaaagcgagacccccaggaactcgtggcctccttttctgaaagagttcggaacatgtcgcctgatgaaatcaagatcccgccagaaccccctggcagatgttcaaatcacttgcaagacaagatccagaagctttatgaacgaaagataaaggagggaatggatatgaactacattatccaaaggaagaaagaatttcggaaccctagcatctacgagaagctgatccagttctgtgccattgacgagcttggcaccaactacccaaaggatatgtttgatccccatggctggtctgaggactcctactatgaggcattagccaaggcccagaaaattgagatggacaaattggaaaaggccaaaaaggagcgaacaaaaattgagtttgtgacgggcaccaaaaaaggcaccacgaccaacgccacgtccaccaccactaccactgccagcacagctgttgcagatgctcagaagagaaagagcaagtgggattcggctatcccagtgacaacgatagcccagcccaccatcctcaccaccacagccaccctgccagctgttgtcacggtcaccaccagcgccagcggctccaagaccaccgtcatctctgctgtgggcaccattgtgaagaaggccaagcagtgacctgaggggccaccctaggacttgaaaggaccgtgcagcccagtgaccactgcccagtgggaggcgccactttgtatatttcaggactgggacctactccccagatgccacctgagaggagcttctgtttggcattccagatggaaggacaggcagcacgggagccaggcgctgtggacagggtctgtccacgcaccacctggggctgccgcctattaaaagtgccgtattcttacctcttgnatctcagatgttataaaa

SEQ ID NO: 255209 - DNA, 786 bp, Homo Sapiens
  misc_feature (705)..(705): n is a, c, g, or t
  misc_feature (720)..(720): n is a, c, g, or t
aactggctgagttctcgtccctgctctgagcctaaagcacatgacctctcaagtcccctgtcctcatggaaggaattggactagacaattactgtaggttcatcttccaactctaaaaagctgatttttgcatataggtgagaggtcttaggaccagagcgatgtctggtcttcctccattgaatgttcaagctagtgacatacagggaaaagagcatggcccttgtgtgggtctgagtgtgggtaagcccaatccagctgtgcaggactgaaggtcagtgaggacaaaacttcaggccgtcaccttgaccctgtgctcctcccggcccctagctaacaggtccatctccctgggagagtggagggccatcaggaagcttgcttagagcagctgagctggatttaaaagttgtgaaggttttgtgtcagccccaggagctggatggttcaggtcccatgcagggacgtggacttgtgcctgctcagcgccggcactgttctttcagcatctacgagaagctgatccagttctgtgccattgacgagcttggcaccaactacccaaaggtgcgtctggcacacggggctggagggtgatggggacacccagggtcctttgcttgttccatgggatttgacctgcagccacagaaaggtccacgtggtggcacggctcgttgaaagcacagtccctgtctcttttgnttgagtccctattgntctgaaatagtccaataaagagattccggtggccggcctggtgcctggcccctgactggtggggac

SEQ ID NO: 255210 - DNA, 1496 bp, Homo Sapiens
  misc_feature (1418)..(1418): n is a, c, g, or t
  misc_feature (1420)..(1420): n is a, c, g, or t
  misc_feature (1428)..(1453): n is a, c, g, or t
cacgatagactggagctccgtccagctcagaatgctgcagcagtaactcaatattctattcataaaattaatagggtcactaagaaggactgaacaaaaattattcccctaccgacaaacacaaccagaacagttctaatcaggccctcttctccccacaaaaatagggaagtagctgggctgaagactttaagtgtgacatttcagttcctaaaacatcactgctatttgctcaaagttgtaggtctatgtatttccttctccaatacgtccccatttataagtttatttccatacatacaaacgtgcacattgtgtttgttgataaattatgaggattatgaaataggtgtgtacagggtttcataggtgctttgtaaacatcagagtcacttggttcctttcctccacaagcctcaaatcaaattatgcaaccaatgaccactactttcccagacgctgttcacaggctgcatattgacgaagggcagagaaaaagtcctcataactgatgtttaggtgggaaggcaaagagacaatctcagtcaatctgatgtgccagggaagaaagcctaatgtgctgtccacaggaccgaacttcaatactaaatcaggatcaggacaaccatttgaactaagtaaactggctaacgtatctacatccaaatctgtgggtctcttttgcttctgggctactaactggcaaaagtcctgagcagctcttacaatatctgcttttccatcttccggagacagcaccttcactgccaaatggcaatttaaaacttgatcatctttgtcattactatttgcaaattctggtgagtattttgaacaatctaggcccagaagttcttgctgttgttttaaaatttcatccatcaatctggaattatttcttttgaaaataccttggtggtcgtagacgctaatgtaggagatgcccacggccatacaccacaccacgaggctcgcgatgtccgagaagctgggttcctgctccacctcggtgatcaccaggcccatatgcacaggcagcttctccaaggaacgaccgtccgcgcgccagcgcatccggtggtgtgcggctgtcaggcacgaccccccgcgcgggtgccggtggtgacggcggttcctgccgactgccgggggcttgcggagcgtgaagccgagcggcgctaggaccgcggtcagaggcggcgcggcagcagcgccgccagatccagttccaggtgccgaaccgaacgcggagccaggaggtgagcgtgcggtgcagacagagcagcgcgtgcagcacccgccacaccagctcgtacagccccgtcatactcttgtggccctcggacaccccctctccctcccgcccactcccgcagcgcgacggctttttatccgcccctgcggccggcgcgggccantntccgcgtnnnnnnnnnnnnnnnnnnnnnnnnnntttccactgccaacacctcacctcgcccccgccgccatcttcc

SEQ ID NO: 255211 - DNA, 963 bp, Homo Sapiens
ggagggggtcgtggaggctgtggcctgctttgcctacacgggccgcacagaccaggagctgagcttccggcggggggacgtactgcggctgcacgagagggcctcgagcgactggtggcggggggagcacaacggcatgcggggcctcataccccacaagtatatcacgctgcccgccgggacggagaagcaggtggtgggcgcagggctgcagactgcaggggagtctgggagcagtcccgagggcctcctggcatcggagctggtccaccggccagagccatgcacctcacctgaggccatgggaccctctggacacagacgacgctgcttggtcccagactccccagagcaacacgtggaggtggataaggctgtggcacagaacatggactctgtgtttaaggagctcttgggaaagacctctgtccgccagggccttgggccagcatctaccacctctcccagtcctgggccccgaagcccaaaggccccgcccagcagccgcctgggcaggaacaaaggcttctcccggggccctggggccccagcctcaccctcagcttcccacccccagggcctagacacgacccccaagccacactgaggtgccgctgctggagatgcgtgcccccggcggctacccgctggaccggccactctccccagcccccttgcttctctccagccctgtccagcaagtgcagggtgcctgcacttcaccctgtgcagagaggtgggatggggccgtgcacacagggatgcccgctccacatcctgcctgcccctcagccctggcccaggccccttttggaggcagctgaggaaggatgctggggaaagccctcttctgcagctttgtggaaggctgatcagtggctgctgggtggcgggtacccttgctcagatgcctggcagggctgggtggcgattcataaagacctcgtgttgattccccgaaaa

SEQ ID NO: 255212 - DNA, 787 bp, Homo Sapiens
agagagagagtcagcggccctgatgttagcgatgcagactccaggagaagggggcatgctcgcagtttagaggaagtgagcccctcttccacgttccactcccaccatcctcctgggaccccagcctgcatgccccccaaaagatgcttttgcactgattcaacaaagcctaaagatgcaaaggcctaattgaagacctgtgaatggcatgtacggtcctcagttcccagctgaggggccactcgggctccccatattcccctcagcctctccatcttccaacaggggtgtgggagtgcatccatggccatgagtattgatctgtcccagcctgtgcattgctccgaggcagttctgagtggatgatgtacagatgggattcctcagctcatttgcgtggttgacgttatggctgctggttttactgccacaactcccaggcccaacctggcttaatgtctaagttttaagccaaaaaagatggggagcagagctttgtggcagggctgggggttggggtccactttagttttgtggcaggatgaaggctgcagtggttttattaatcatgattggcctggccgtagctccaggctgagagggacaggtttgtcagtggtggtcccccagatgtccctgtgcccagccctggcctgtctgccctcaggcccagcaggaggcgctaccacaggctctgactggcgtccctactccctgtaccccagatggacagaaccttcgggtctacagtcggaatatatcattctccccattttaacctgagctg

SEQ ID NO: 255213 - DNA, 734 bp, Homo Sapiens
  misc_feature (50)..(50): n is a, c, g, or t
gcatcactctctcacaaatatccagcgccccatgagaatatgttccatgnaacctattagtgctcaactacgctgaaaccataagcaggcagcttaaaattaagagtaacaaaaaaacctataagcacaacaacagatcaggatcggcagggactgggatggggagaggagtttatcacagagggacacaagagaaagagtgtgaaagagctgtttcatcatgtgcacattaaacacagtaaattatagggagagtaaatttcacctcagtagaagtaactaagacatgggagttttgaggtgactggtgtacttacaagatatcccagtaaagaacaatacacatccccacagtaagtgggcatgttacaatgccccacagtgagttggccatagcacacacaggcattgtctgagaagcagcagattctttcagtgaattgtgagcaagaagaaagctcagaagacagcaagaagaaagataatggctttctgagtctacaatagacacatgcaatatacgtatgtaagcaagaaaggctcaaataacataaattctcatccaacactatcagccacaccaaagctttgtgtatcaggtctgcttggaaaaacatataacagcagatgcttaacacctgaagagaccttagagaccatgaatcaaacctgctgattccaactattctctccaaattcacaaagacagaacactttctatatctcaggtctag

SEQ ID NO: 255214 - DNA, 1004 bp, Homo Sapiens
  misc_feature (739)..(739): n is a, c, g, or t
  misc_feature (799)..(799): n is a, c, g, or t
agtttgtagcggacaacatggcggccttcatgctgggctcgctgctgcggacgttcaagcagatggttccttcatcagcttcaggccaagttcgaagtcactatgtagactggagaatgtggcgcgatgtgaagagacgaaaaatggcctatgaatacgcagatgagaggctacgtattaattcactcaggaagaataccattttgccaaaaattcttcaggatgtggctgatgaagaaattgctgccctcccccgggatagctgtcctgttagaatcagaaatcggtgtgttatgacgtcccgtccgcgtggtgtgaagcggcgctggaggcttagtcgtatagtcttccgtcacttagctgaccatgggcaactttctgggatccagcgagcgacatggtaaatgagctccagaacctattgagcttgcagggaagccaagcttgcagttccagcaagcaaagattttttttaatagaccaaaccctaatctctacaggggcccagtacagttgtttggcctacctgatgctatctctaaactacttttaaaatgaagacatttgggtgtttcatgtcagtgaattatcttttctcttggacttaacaaacatactgttcccatacatagtacaaagagtagcataataaatattttctgtgaatgtgttttataccctccttttaagtgtaatctcttagtaacatatagggggtttttgtattaagagcattatntcatataatgctatcttatacataatccaactaattgacatgtagctcatgtatggcagnttgtaatcctggactagctctgctgacctgcagagctccccttaactattattgttagataaacagattggatagcaaggctgctgttctggattatctaatgctccacttcttcttgtgatggctgaacgaccactaagtgttgtcttgtgctccttaagggactctaaacttatgcctctttagtacttgaagactcatctgg

SEQ ID NO: 255215 - DNA, 1265 bp, Homo Sapiens
  misc_feature (994)..(994): n is a, c, g, or t
  misc_feature (1008)..(1008): n is a, c, g, or t
  misc_feature (1021)..(1021): n is a, c, g, or t
  misc_feature (1050)..(1050): n is a, c, g, or t
  misc_feature (1101)..(1101): n is a, c, g, or t
  misc_feature (1105)..(1105): n is a, c, g, or t
  misc_feature (1120)..(1120): n is a, c, g, or t
  misc_feature (1130)..(1130): n is a, c, g, or t
  misc_feature (1141)..(1141): n is a, c, g, or t
  misc_feature (1160)..(1160): n is a, c, g, or t
  misc_feature (1185)..(1185): n is a, c, g, or t
  misc_feature (1187)..(1187): n is a, c, g, or t
  misc_feature (1194)..(1194): n is a, c, g, or t
  misc_feature (1201)..(1201): n is a, c, g, or t
  misc_feature (1205)..(1205): n is a, c, g, or t
  misc_feature (1213)..(1213): n is a, c, g, or t
  misc_feature (1218)..(1218): n is a, c, g, or t
  misc_feature (1227)..(1227): n is a, c, g, or t
  misc_feature (1231)..(1232): n is a, c, g, or t
  misc_feature (1240)..(1240): n is a, c, g, or t
  misc_feature (1245)..(1245): n is a, c, g, or t
  misc_feature (1247)..(1247): n is a, c, g, or t
  misc_feature (1257)..(1257): n is a, c, g, or t
  misc_feature (1259)..(1259): n is a, c, g, or t
tggacacgccccctccctgtctcccaccgatgattggcgcacggaactccgccttgggtttggaaggctcgcctgggagctcatacctggctggggccgaggattggctgttccggggctagggagcgctttctcccgggaaccgcggctgtgacccaagtggcccggaccagtttggggctgcgtgcggcctgcctcaagcaaccaggtacgtaggtcggcggcccagctcggcgctgcggtgggagccggagggcgacagtcagagccggggtgccagcgggacgcgaccgccagatccacttaggaccccgtcgttctgcgaagcggccacgtctgagtcccggggcctcctcgtgctgcagatgtcgccttaggacctcggccaggataccctctgccatgctcttgtgctgcccgtgatcaccgactggcccttgtaagcaccttcgcagcaggaagcccagagctgcgcctgccctttctgaaggctgtggaagaggttggagtgggcgcatcttagcttgccccatccccatttgaggtctgtcggagctgcccttcagtgtgagcatccacaatgggtaccccagcctcggtggtcagtaagccacccccttggcaggccccgattgaggcccggggccgcaagcaggcctcggccaacatcttccaggacgccgagctgctgcagatccaagccctggtttcaacgcagcggggaccagctggccgaggaacgggcacagatcatctgggaatgtgcaggggaccaccggtgtggctgaggacctcaagaagctgcgcagggaagaggcccccaaggcagaaacccctggggccactcgctacaccactgcagcccgcctcagaatcctggagcccccactctgcactgggccaacccacagagtgccacagagacagcctccagtgagcagtatctgcactctaggaagaaaagtgccaggatccgccggaactggaggaagtnaggccccacaagcnacctccaccagancagacactgatccagggaaagagccaggnatggcagtgtcttccctcttgccaaaaggcctgggggaggtgaaggaaganagantttaggcaagcagcncaaaggggtnaatgaaaccanaagctgctgcacttatctnctccatttagaacaagattggatgntntgttganctctccntatntgggaccnttctncacaaaatnaggnnaaaattantttcntncaaagtcttncnatttaa

SEQ ID NO: 255216 - DNA, 1077 bp, Homo Sapiens
  misc_feature (783)..(783): n is a, c, g, or t
ctaaccaccgaggcctgggtggcgaattcggcacgagggcccgtgatcaccgactggcccttgtaagcaccttcgcagcaggaagcccagagctgcgcctgccctttctgaaggctgtggaagaggttggagtgggcgcatcttagcttgccccatccccatttgaggtctgtcggagctgcccttcagtgtgagcatccacaatgggtaccccagcctcggtggtcagtgagccacccccttggcaggccccgattgaggcccggggccgcaagcaggcctcggccaacatcttccaggacgccgagctgctgcagatccaagccctgtttcaacgcagcggggaccagctggccgaggaacgggcacagatcatctgggaatgtgcaggggaccaccgtgtggctgaggccctcaagaggctgcgcaggaagaggcccccaaggcagaaacccctgggccactcgctacaccactgcagccgcctcagaatcctggagccccactctgcactggccaacccacagagtgccacagagacagcctccagtgagcagtatctgcactctaggaagaaaagtgccaggatccgccggaactggaggaagtcaggccccacaagctacctccaccagatcagacactgatccagggaaagagccaggaatggcagtgtcttccctcttgccaaaaggcctggggaggtgaacgaacacagactttaggcaagcagcccaaaggggcaaaggaaagcaaaaggctgctgccactgacctgctccanttcagaacaagactggatgcttctgttgagctctccattatgtgggacccattcctcaccaaaatgaggagagacagtgactgttcctgccacagtccttcccagtctaacactattcctgggctgcatgatattcccctgggagccaaagtgacaggcacttagatgcagcatttcaccactcatgctactaatcatctacctgctactactgtaaaccatggttccagcagcctgttccacacccccacaccatcaggatagcacagggaaactgtagtttaagtggcaaat

SEQ ID NO: 255217 - DNA, 728 bp, Homo Sapiens
  misc_feature (637)..(637): n is a, c, g, or t
agataaaatccccagtacccgcagaaacccttaaagatgttaaaaaagagttaacgtatcataacacagatttaagtgaaattaaggaagaagagcaggtaaagtctactgacagaaagtcagcagtggaagcccaaaacgaggtgactgaaaatccaaaacagaaaattgcagcagaaagcagtgaaaatgttgattgtccggagaatcctaaaattaagttggatggaaaactcgaccaagaaggtgatgatgtacaaacagcagctgaggaggtactagctgatggagacacattagattttgaggatgacaccgctcaatcatcacgcccgagggctggtggtgaagaattagatgaaggtgttgcaaaagataatgctaaaatagatggtgccactcaaagcagtcctgcagaaccaaagagcgaagacgcagatcgctgcaccctgcccgaacatgaaagtccctcacaggacattagtgatgcctgtgaagcagaaagtacacagaggtgtgagatgtcagaacatccaagtcagaccgtcaggaaagctctagacagcaatagcctatgcagagaagataccacaggagggaatgagaagggcacaagcaaagaagactgtgccatgtnctaagctgaggcaaggcgcaggcggcgtgcacaggaagtctcattgtgaagggggcttttctctcactgccaatgtgtagatgttcttcat

SEQ ID NO: 255218 - DNA, 499 bp, Homo Sapiens
  misc_feature (90)..(90): n is a, c, g, or t
  misc_feature (130)..(130): n is a, c, g, or t
agctcttgtgaaataaaagcagggttggcctcagcctgtgggtcttgtctcatgctctccctgttcctctccccgccaccccagggcctncaagccacctctggaaatacttggctctgcccatggacgnggaggggcgccacgtggagctgtggaattgggccccgtggcaagaacccccatcccttgggggctgtggggatgcgcccaagcccccgagggagaggcctggggacaccaacaaatctaagccctccctagctgcttggtaactgtgtcatgaagctgccggacagacacacgtggcatctccctgggcaggagagcaggcctgcagcatgggtcctgttcccgtgtgccgtgggtgccagtggctgcacctggcactagggctgctctgtggatgtgggtgacaacggcaggaggggatgctggccttcctgcacatagacctgcagttagtaaatcataagcccaaataaacaggttgtttgaatat

SEQ ID NO: 255219 - DNA, 719 bp, Homo Sapiens
gagaaacccagcaggagaaagcgctcctctgcgctgtagttggcctaaaggaggaaaactcccagaatgtttggaaggtcgaaataaaaaagggtgactaccccttataagcaaagggaaaaccttggagtgtggggctgggctgggagaaggaatggaatcatatacaaggtcagtttgtggattgtaatcccatttacagatgagattacttaaaaataaactccctaagaataagagcaacactccaagcttggcgtggccaacactcggtaggcagaatgatcacctccgttgtttcaggtactctgtgtttatttatgcaacagttcatgtaaaatggagacgaggccagaagaatccttgagcagacagagccagttgggcctcctaagtgaccttaaccttgcttgatttgcaagcatgtctgaaactttatttgtggtatttcttgtaaatgcctatgttaaagaaacacagaacttaagctcaaccaatcagaagcagccaacaaaaacgtaattagtaactaggacttcctcatgggatagaccaaataaggcaactgtataactgtgtaactgtataactgtaaccaatgaaatattatctttgcttttatctatttgtcctaaaaagcctcctcctcatgttctctctggggagctccctagccacttctggatcactgctcaaataaactcttaaatattttaaaa

SEQ ID NO: 255220 - DNA, 1643 bp, Homo Sapiens
  misc_feature (97)..(97): n is a, c, g, or t
ccgggatcaggtcaccgccagcacgcgcctgcttcccgtctgcgcgagtccacgcagctccccaggcccttcaccagcacagcagcagcaggcatgncagcaagcgtggagcagcgcaagggcaccatccaggtgcagggccaggccctcttcttccgagaggccctgcccggcagtgggcaggctcgcttctctgtactgctgctgcatggtattcgcttctcctccgagacctggcagaacctgggtacactgcacaggctggcccaggctggctaccgggctgtggccattgacctgccaggtctggggcactccaaggaagcagcagcccctgcccctattggggagctggcccctggcagcttcctggcggctgtggtggatgccttggagctgggccccccggttgtgatcagtccatcactgagtggcatgtactccctgcccttcctcacggcccctggctcccagctcccgggctttgtgccagtggcccccatctgcactgacaaaatcaatgctgccaactatgccagtgtgaagactccagctctgattgtatatggagaccaggaccccatgggtcagaccagctttgagcacctgaagcagctgcccaaccaccgggtgctgatcatgaagggggcggggcacccctgttacctggacaaaccagaggagtggcatacagggctgctggacttcctgcaggggctccagtgaagcccagcactgctgcagggggtgggctgcctgcctgctctgagctctctcttgcacgctctctcttctctcccaggctctggctcatgcacatgcaacaggtgcgtctgtctatatgtctgggttcttgtcttttgtggtctgtttgtcttttctacctctttctcttgcagtgatagactgagggggtaaaatcaagagaaaaaactctcaggaatcaaggaacataatcctgtggagggtaatccattacatgagcttctcctgttcttccactttcctgcctggctttcactccttcccctgctctgcccagcctttccctcccacccactcctccttctgcaaatgccctgaaggccagcccttaccccaacacccacttccccacctccttaggccccagatacatacatgcccacatgcacgcttacatgtttagagccatccttgtttccaaatatgacccttcgcttgagggcaactgcataggtacatctaactctggactggcatgcacattgtcatgtgcagctttgcatatacacacatgcatacatgagcctccacacaagcacttgcacacatgtggactcctaaccatgctaacctcactggctgggaaggtggggaccccatgggccagcccttgcaggaggcccttttgcaaggcttagggtgtggccagccctgaaagctacttggacacaggtttcagctggccccagcccagaagtgacccccagaaagggagggccaccgctttgccccctgcttttacccttccttctgggtgctctacacctcctcaggttaccaggcctgaggcatctcagccaagcttgtttcctgctctgaggcttgtggggtgggagccagagtggaggtcggtgaaataaagtgatgcaattagaccc

SEQ ID NO: 255221 - DNA, 958 bp, Homo Sapiens
  misc_feature (90)..(90): n is a, c, g, or t
  misc_feature (167)..(167): n is a, c, g, or t
  misc_feature (728)..(777): n is a, c, g, or t
  misc_feature (900)..(900): n is a, c, g, or t
  misc_feature (902)..(902): n is a, c, g, or t
  misc_feature (908)..(908): n is a, c, g, or t
  misc_feature (912)..(912): n is a, c, g, or t
  misc_feature (916)..(916): n is a, c, g, or t
  misc_feature (920)..(920): n is a, c, g, or t
  misc_feature (927)..(927): n is a, c, g, or t
  misc_feature (930)..(930): n is a, c, g, or t
  misc_feature (937)..(938): n is a, c, g, or t
  misc_feature (949)..(949): n is a, c, g, or t
caacctgaggcgtagagcacccagaaggaagggtaaaagcagggggcaaagcggtggccctccctttctgggggtcacttctgggctggngccagctgaaacctgtgtccaagtagctttcagggctggccacaccctaagccttgcaaaagggcctcctgcaaggnctggcccatggggtccccaccttcccagccagtgaggttagcatggttaggagtccacatgtgtgcaagtgcttgtgtggaggctcatgtatgcatgtgtgtatatgcaaagctgcacatgacaatgtgcatgccagtccagagttagatgtacctatgcagttgccctcaagcgaagggtcatatttggaaacaaggatggctctaaacatgtaagcgtgcatgtgggcatgtatgtatctggggcctaaggaggtggggaagtgggtgttggggtaagggctggccttcagggcatttgcagaaggaggagtgggtgggagggaaaggctgggcagagcaggggaaggagtgaaagccaggcaggaaagtggaagaacaggagaagctcatgtaatggattaccctccacaggattatgttccttgattcctgagagttttttctcttgattttaccccctcagtctatcactgcaagagaaagaggtagaaaagacaaacagaccacaaaagacaagaacccagacatatagacagacgcacctgttgcatgtgcatnnnnnnnnnnnnnnnnnnnnnnnnnnnnnnnnnnnnnnnnnnnnnnnnnnaggcaggcagcccaccccctgcagcagtgctgggcttcactggagcccctgcaggaagtccagcagccctgtatgcactcctctggtttgtcaggtacagggggtgcccgccccttcatgatngnaccggnggtngggngctnttcagtnctnaagctgnntgaccatgggncctgttctc

SEQ ID NO: 255222 - DNA, 478 bp, Homo Sapiens
  misc_feature (43)..(43): n is a, c, g, or t
aaaaatatgaaccccttcgccttgaaggggaaaactgcaatanggtaacatctaaactctggaactggcaattgaaattgtcatgtgcaagctttgcaatatacacacatgcaaaacatgagcctccaaaacaaagcacttgcaacacatgtggactccctaacccatgctaacctcactggctgggaaggtggggaccccatgggccagcccttgcaggaggcccttttgcaaggcttagggtgtggccagccctgaaagctacttggacacaggtttcagctgccccagcccagaagtgacccccagaaagggagggccaccgctttgccccctgcttttacccttccttctgggtgctctacacctcctcaggttaccaggcctgaggcatctcagccaagcttgtttcctgctctgaggcttgtggggtgggagccagagtggaggtcggtgaaataaagtgatgcaattagaa

SEQ ID NO: 255223 - DNA, 572 bp, Homo Sapiens
  misc_feature (12)..(12): n is a, c, g, or t
  misc_feature (372)..(372): n is a, c, g, or t
  misc_feature (411)..(411): n is a, c, g, or t
  misc_feature (550)..(550): n is a, c, g, or t
tcctgtggagangtaatccattacatgagcttctcctgttcttccactttcctgcctggctttcactccttcccctgctctgcccagcctttccctcccacccactcctccttctgcaaatgccctgaaggccagcccttaccccaacacccacttccccacctccttaggccccagatacatacatgcccacatgcacgcttacatgtttagagccatccttgtttccaaatatgacccttcgcttgagggcaactgcataggtacatctaactctggactggcatgcacattgtcatgtgcagctttgcatatacacacatgcatacatgagcctccacacaagcacttgcacacatgtgggacttcctnaaccatgcttaacctcactgggctggggaaggtgggggnaccccatggggccaggccctttggcagggaggccccttttggcaaggctttaggggtgtgggccaggccctggaaagctaatttgggacaaaggttttcaggtgggccccagcccaggaagttgacccccagaaggggnggggccaccgttttgccccttt

SEQ ID NO: 255224 - DNA, 648 bp, Homo Sapiens
  misc_feature (546)..(546): n is a, c, g, or t
  misc_feature (616)..(616): n is a, c, g, or t
  misc_feature (628)..(628): n is a, c, g, or t
gctgaacgtcacagcaacaggcgcagggcctgcccacgccctttattttgcctgctacggttaagtattgagccttcctgtgctggttcccccactttcccaactctttgggctttgctgctgtcagtgctttccagtctcagcatggtttggagctgaagctttgggctgggataggccagattataagggagggacttccaaacctgatgttctcagacaacgggccgcttcaaccctgccttttcctttggggcacctcaacaaagggttacagtatcctcccttacctaccagcttgacttggtcctctcatctccctggcatcaacttctaatgccctggtaatgtggagacacactgaactacccccagtctatgtttgacagttgggtggtgtcctgctccttagggcaggattggaggcgacccagccagccacccaaggaagatactaatgaagccccctgcttttgcctcacctttttaggatcccaactcaccagaggcagtttgtgttgagaacatgacaaagcctcatgacanaatgaatggggttgggcccaagaaactgcatgagaacccagaaggtgtgtggaagttaggaaaggttacnctagggctttangaccggtggccaggttgtgt

SEQ ID NO: 255225 - DNA, 1689 bp, Homo Sapiens
  misc_feature (632)..(632): n is a, c, g, or t
  misc_feature (634)..(634): n is a, c, g, or t
  misc_feature (1469)..(1469): n is a, c, g, or t
  misc_feature (1588)..(1588): n is a, c, g, or t
  misc_feature (1593)..(1593): n is a, c, g, or t
attcccgggatcaaatcctttagagagattccaaggattatgtttcactgagactgattttatttgctaatgccaattttgggattcaatcagtttaaattagaaatctggaagggcccttcaggattggagactagattggtttctagctagacactcccacctttgcagtttcagggtaaactttctttcccaagaaataaaagcatgtattaagaatgctgcttctgccaagactctgtgtagacccagccaccattgccagatagtctgaaaaagtataaaaaaattagccgcccctcagtgtgtggtcatgaagcagggccaggggcactctttaggtatacagcataaagtatgtcatagatagtaaatactggagtttagaatccatttgtaaagaactgtcagcttgagtgtattaaggcacaaaagcaacttctgaaacacaggcttgatatttgttgctggggctctgaatcattttggagtaccaggacacttagcaataggtgggattattttttcagggaaaataatggtgttccattcttagggtcatagatgactagaaaaagaaaggtccaaggcttagaagaaagatcagctatagattggaaataagctgaaancnagatatccctctcacagattggcacagctccatgtagaaggtctgcccagtgtgttgaggtggggcgagaagttggcattgctgacattgcgcttctccttgctgtaatttcagacccggatgcagagtctacagcctgacccagctgcccgctatcgcaatgtgttggaggccctctggaggattataagaacggagggcctatggaggcccatgagggggctgaacgtcacagcaacaggcgcagggcctgcccacgccctttattttgcctgctacgaaaagttaaaaaagacattgagtgatgtaatccaccctgggggcaatagccatattgccaatggtattgagccttcctgtgctggttcccccactttcccaactctttgggctttgctgctgtcagtgctttccagtctcagcatggtttggagctgaagctttgggctgggataggccagattataagggagggacttccaaacctgatgttctcagacaacgggccgcttcaaccctgccttttcctttggggcacctcaacaaagggttacagtatcctcccttacctaccagcttgacttgttcctctcatctccctggcatcaacttctaatgccctggtaatgtggagacacactgaactacccccagtctatgtttgacagttgggtggtgtcctgctccttagggcaggattggaggcgacccagccagccacccaaggaagatactaatgaagcccctgctttttgcctcaccttttcaggatcccaactcaccagaggcagtttgtgttgagaacatgacaaagcctcatgacaaaatgaatggngggtggggcccaaggaactgcatgaaagaaaccagaggttgtgtggaagtaagagaaaggatagcagccttaggcttaagacccgcttgaaaccagtttatgtggagagatgagggtanagtanttcaggacctgaccaaagactttgtagacaaagttaggctctgcaaatggttctgcgcaggacttaggtgggattttgggtgaggtttttgaaaat

SEQ ID NO: 255226 - DNA, 820 bp, Homo Sapiens
  misc_feature (398)..(409): n is a, c, g, or t
  misc_feature (432)..(672): n is a, c, g, or t
aagccctaaaaagtggtctcatctccctcaaaacgatttcagtcttcttcactctcctcaaacctctaaactctctggtagaaactgcattcttaatacattaaatgtcttgatatggaaacttcctcacccatcactaaatcttcaagtttatcttcatttgtattgtccattatttctgtgatcctgtctattcctggcttctgaagcacttgacccattcagttattcttcccttcctgagtcttcaacctctccttctatgccagatcctattcttcaacattcacagattctccagcatctcccatgtctcccattttatacaaagtacagcctttaattccatctcttcttgtagtaaatgccttagtatcctctagctaccaacaaccccnnnnnnnnnnnngagatggagtttcactcttgttnnnnnnnnnnnnnnnnnnnnnnnnnnnnnnnnnnnnnnnnnnnnnnnnnnnnnnnnnnnnnnnnnnnnnnnnnnnnnnnnnnnnnnnnnnnnnnnnnnnnnnnnnnnnnnnnnnnnnnnnnnnnnnnnnnnnnnnnnnnnnnnnnnnnnnnnnnnnnnnnnnnnnnnnnnnnnnnnnnnnnnnnnnnnnnnnnnnnnnnnnnnnnnnnnnnnnnnnnnnnnnnnnnnnnnnnnnnnnnnnntgagccaccgtgcccggccccaaacctgttttcatcactgcttcatatttaagttctaagaagttatctgtacttactgtctctacttaatctctcatgtgcttttcaaatgcactgaaatttgggttctgtcttcatcagtccatca

SEQ ID NO: 255227 - DNA, 1130 bp, Homo Sapiens
  misc_feature (703)..(870): n is a, c, g, or t
ctggaccggtccggaatttgcgggataaagatgagcgtgaaggcaattgcccatccttcttcaccctgaagaggctgccacagtgacttcctacctgaagctgctcctggccccctcctccaagaagggcaaagcccgcctgagccctcgaagtgtgggcgtcatctccccgtaccggaaacaggtcaggtcctcagttaccagcaagggtggggcccctcccccagatggtacctccctcttgcattaggttaatggcacgagagaaaggcacctgtcccctccttccaggtggagaaaatcagttactgcatcaccaaacttgacagggagcttcgaggactggatgacatcaaggacttgaaggtgacatgctgttccacagtcactccctgccttccgtgtgcccccacttgcccacttccagagacttcctcaagcttccactccagcccacgtccccgtcccacccctgctgccttgaatagagctcgagctctccctgagcctctcactcctggagattccaacttaagggtctgggatgggatcaggaagcctgcatgtttaacaaacacctcctgtcattcttagactgaggcaggtttgaggcctctgccctaaggataaagtccaaattccgtggcctgtcatgtgatgctgccacccccacccccagtagcctctctcttaaggttctggnnnnnnnnnnnnnnnnnnnnnnnnnnnnnnnnnnnnnnnnnnnnnnnnnnnnnnnnnnnnnnnnnnnnnnnnnnnnnnnnnnnnnnnnnnnnnnnnnnnnnnnnnnnnnnnnnnnnnnnnnnnnnnnnnnnnnnnnnnnnnnnnnnnnnnnnnnnnnnnnnnnnnnnnctctaagacttacaggcctctctcttggaaattctgatcgggggtccgggttaaggcccaaggttgtatattcttaacagatacttagtgatttgtttcaggaaaagttgaaagtcactgctctgaagttccgggttcttttgcaagctgggttctttccttttcacaagctaacttccaatcccttttccttggccccgttgcaacacttggtcactacttatctacaattgcccaagaaccttttgtaccctcctgga

SEQ ID NO: 255228 - DNA, 1040 bp, Homo Sapiens
  misc_feature (14)..(14): n is a, c, g, or t
cccaccatcctggnacattcctaaccagctctattatcgaaggggagctgcaggcctgtgctgatgtcgtggatcgagaacgcttctgccgctgggcggccctacctcgacagggctttcccatcatctttcacggcgtaatgggcaaagatgagcgtgaaggcaacagcccatccttcttcaaccctgaagaggctgccacagtgacttcctacctgaagctgctcctggccccctcctccaagaagggcaaagctcgcctgagccctcgaagtgtgggcgtcatctccccgtaccggaaacaggtggagaaaatccgttactgcatcaccaaacttgacagggagcttcgaggactggatgacatcaaggacttgaaggtgggttcagtagaagaattccaaggccaagaacgaagcgtcatcctcatctccaccgtgcgaagcagccagagctttgtgcagctggatctggactttaatctgggtttccttaagaaccccaagaggttcaatgtagctgtgacccgggccaaggccctgctcatcatcgtggggaacccccttctcctgggccatgaccctgactggaaagtattcctggagttctgtaaagaaaacggagggtataccgggtgtcccttccctgccaaactggacctgcaacagggacagaatttactgcaaggtctgagcaagctcagcccctctacctcagggccccacagccatgactacctcccccaggagcgggagggtgaagggggcctgtctctgcaagtggagccagagtggaggaatgagctctgaagacacagcacccagccttctcgcaccagccaagccttaactgcctgcctgaccctgaaccagaacccagctgaactgcccctccaagggacaggaaggctgggggagggagtttacaacccaagccattccacccgcctccctgctggggagaatgacacatcaagctgctaacaattgggggaaggggaaggaagaaaactctgaaaacaaaatcttgttctatgcaaa

SEQ ID NO: 255229 - DNA, 459 bp, Homo Sapiens
  misc_feature (11)..(11): n is a, c, g, or t
  misc_feature (28)..(28): n is a, c, g, or t
  misc_feature (46)..(46): n is a, c, g, or t
  misc_feature (72)..(72): n is a, c, g, or t
  misc_feature (87)..(87): n is a, c, g, or t
  misc_feature (120)..(120): n is a, c, g, or t
actgtgtcttncagagctcattcctccnactctggctcccacttgncagaacacaggccccctttcaccctncccgctccctggggnaggtaagtccatggctgtggggccctgaaggtnagaggggctgagcttgctcagaaccttgcagtaaattctgtccctgttgcaggtcccagtttggcagggaagggacacccggtataccctccgttttctttacagaactcccaggaatctgtggggtacagaggagtgcccagcagagactggaggctaagccacggtcctgtcccatctgagctgtacttgctcaacctctggatgtcatttaacttataaatacaatagtgatgctgtgaaaatggacacatctgaggattaactgagcgataagcaagcgcttaaaaaagatcccaactccctaggcaggggctgtggccactaagagggagaatg

SEQ ID NO: 255230 - DNA, 506 bp, Homo Sapiens
  misc_feature (321)..(353): n is a, c, g, or t
  misc_feature (453)..(453): n is a, c, g, or t
ggacaggaccgtggcttagcctccagtctctgctggcactcctctgtaccccacagattcctggagttctgtaaagaaaacggagggtataccgggtgtcccttccctgccaaactggacctgcaacagggacagaatttactgcaaggtctgagcaagctcagcccctctacctcagggccccacagccatgactacctcccccaggagcgggagggtgaagggggcctgtctctgcaagtggagccagagtggaggaatgagctctgaagacacagcacccagccttctcgcaccagccaagccttaactgcctgcctnnnnnnnnnnnnnnnnnnnnnnnnnnnnnnnnnccaagggacaggaaggctgggggagggagttttacaacccaagccattccaccccctcccctgctggggagaatgacacatcaagctggctaacaattgnggggaaggggaaaggaagaaaactctgaaaacaaaaatccttgttctatgcca

SEQ ID NO: 255231 - DNA, 1737 bp, Homo Sapiens
  misc_feature (1427)..(1427): n is a, c, g, or t
  misc_feature (1461)..(1461): n is a, c, g, or t
  misc_feature (1572)..(1572): n is a, c, g, or t
ctgatgaagaggaagaagtcaagccgatcttgcagaaattgcaggaactcgtggatcagctctactcatttcgagactgctatttcgagacacatagtgatgaggatgctgggaggaagcaacaggatgtgcagaaggagatggagaaaaccctacagcagatggaagaagtagtgggttctgtccagggcaaggcacaagttctaatagctaactgggaaagcactaaatagtgactcctgactatagccctaaggctgaggagcttctgtcaaaggctgtgaagctggagcccgagctggtggaagcctggaaccagctgggatgaggtgtactggaaaaaaaagggatgttgcagctgcccacacctgcttctcaggagccctcacccattgcaggaacaaagatctccttgcaaaacctgtcaatggtgcttcgtcagctgcggactgacactgaagatgaacattctcaccatgtcatggacagtgtccgacaggctaagttggctgttcagatggatgtccatgatggccgctcctggtatattcttgggaattcatatctttccctttacttctctactggccagaaccctaagatctcccagcaagccctcagtgcctatgcccaagcagagaaagttgacagaaaagcttctagcaatcctgaccttcatctgaacagggcgacgttgcataaatatgaagagagttatggggaggccctggagggcttctctcgggctgcagccctggaccctgcctggccagagccccggcaacgagagcaacaacttctggaattcctggatagattaaccagcctccttgagagtaagggaaaggtgaagaccaaaaagctgcagagcatgctgggaagcttgcgcccagcccatctaggcccttgcagtgatgggcactatcagtcagcctctgggcagaaagtgaccctggagctcaagccactgagtacgcttcagcctggggtgaacagcggtgccgtcatcctgggaaaggtggtatttagcctcaccacagaggagaaagtcccctttacatttggcctggtagattcagatggaccttgctatgcagtgatggtgtacaatatagtgcagagctggggagtgctcattggagactctgtagccattcctgagcccaacctgcggcttcaccgaattcagcacaaaggaaaggacaataccattgccatgttgtttcgagtgtgagacgccccccccgctagtggcgaatgggaagcctcagggatccagcagccaggctgttgccacagtggcatcgcgaccacagtgtgaatgaccttcgactcgcatgctcaacagggaggggaggagaggagacaaggctctggacagccgggccagccacaaccagtgattcagcagggatgggaggaatgtnctaaatgaagactcccccttccccggcctgtatntacacttcgtatcttcttctctctcctctgtcctcatcatgttccagctctctacagggccacatactcgtctggcatatctcccctgtctcttccactgctctctatgtnttaagcaaagagcatggaattggtagaactcttgggatcttgccatgggacagagtccccaaggtccctgttgttgccgccttcctaagcctcatatgtatatatcagttcagtatttattgctaaaggagggggcttaattttgtaatggcttttatttttagc

SEQ ID NO: 255232 - DNA, 852 bp, Homo Sapiens
ccacgcgtcgcccggttcgcggcgctgggagcggccgtgacgtcaggcgcccggctgctcctcacttgctctgagacaggtgcggcaagtctactgcgggctggtccgggctcctcaggttcagacccgaccgttatccagtcggttcgtggagaggagaggtgcactttacaggtccccgatgaaccaagagaaccctccaccatatccaggccctggtccaacggccccatacccaccttatccaccacaaccaatgggtccaggacctatggggggaccctacccacctcctcaagggtacccctaccaaggatacccacagtacggctggcagggtggacctcaggagcctcctaaaaccacagtgtatgtggtagaagaccaaagaagagatgagctaggaccatccacctgcctcacagcctgctggacggctctctgttgctgctgtctctgggacatgctcacctgaccagaccagcccagccgtcctgtcctgccagctctgctgccacctctgacaggtgtgcctgcccccatctcttctgattgctgttaacaaatgactagctttgcacagacacctctaccttcagcactatgggattctagattaatgggggttgctactggttaattcagtgacttgatctttttaatgtccaaaatccatttcttattgatctttaaagatgtgctaaatgacttttttggccaaaggcttagttgtgaaaaatataatttttaaattatacattccaaggtagtggccaaatgtaacacatcaatcatggaatgatttctctgctaacgccgcctgtatggtttaataaatttgtccaaagctcc

SEQ ID NO: 255233 - DNA, 811 bp, Homo Sapiens
ggggctcctcacttgctctgagacaggtgcggcaagtctactgcgggctggtccgggctcctcaggttcagacccgaccgttatccagtcggttcgtggagagcagaggtgcactttacaggtccccaatgaaccaagagaaccctccaccatatccaggccctggtccaacggccccatacccaccttatccaccacaaccaatgggtccaggacctatggggggaccctacccacctcctcaagggtacccctaccaaggatacccacagtacggctggcagggtggacctcaggagcctcctaaaaccacagtgtatgtggtagaagaccaaagaagagatgagctaggaccatccacctgcctcacagcctgctggacggctctctgttgctgctgtctctgggacatgctcacctgaccagaccagcccagccgtcctgtcctgccagctctgctgccacctctgacaggtgtgcctgcccccatctcttctgattgctgttaacaaatgactagctttgcacagacacctctaccttcagcactatgggattctagattaaaggggggttgctactggttaattcagtgacttgatctttttaatgtccaaaatcccatttcttattggatccttaaagatgtgctaaatgactttttttggccaaaggcttagttgtgaaaaatataaatttttaaattatacattcaaggtaggggccaaatgtaacacctcaatcatggaaatgattctctgctaacaacccgcctgtaatgtttcaataaatttgtcccaagcccaaaaaa

SEQ ID NO: 255234 - DNA, 587 bp, Homo Sapiens
ggacttgctctgagacaggtgcggcaagtctactgcgggctggtccgggctcctcaggttcagacccgaccgttatccagtcggttcgtggagagcagagtgtatgtggtagaagaccaaagaagagatgagctaggaccatccacctgcctcacagcctgctggacggctctctgttgctgctgtctctgggacatgctcacctgaccagaccagcccagccgtcctgtcctgccagctctgctgccacctctgacaggtgtgcctgcccccatctcttctgattgctgttaacaaatgactagctttgcacagacacctctaccttcagcactatgggattctagattaatgggggttgctactgtttaattcagtgacttgatctttttaatgtccaaaatccatttcttattgatctttaaagatgtgctaaatgacttttttggccaaaggcttagttgtgaaaaatataatttttaaattatacattcaaggtagtggccaaatgtaacacatcaatcatggaatgatttctctgctaacagccgcctgtatgtttcaataaatttgtccaaagctcaaaa

SEQ ID NO: 255235 - DNA, 439 bp, Homo Sapiens
  misc_feature (351)..(363): n is a, c, g, or t
aggaatacggcacgagctgtcctggtgtacccagatgtgccatgatggacgttttatcccatatgacgtctccctcctgatagatgtccgtatatgcagattaaactaccaacattgtttccagcaaaggtggtttttgaaagtaacctaatgagaaccctggctgccatggtcattctaattgctggactgagaagaagcgactctgcgttgtgctgttggcccaggcctgcatgcctgaggactgttggccgttacagttccttgctgtggtcgccggtctctctgtattctgccactgctctcatgtggcatttggcagaagtactacgtagatttctgtgctactgnnnnnnnnnnnnncagtggttccttttaataaccctgatttgagacttaggagagggtcaagagtccctacctgatttatgaggagaaa

SEQ ID NO: 255236 - DNA, 344 bp, Homo Sapiens
aggcccagagaccagaagagaacaatcttggtgactagacttcatgaatacatcatctaacgaaggtttgtgcaccactgactatgaaatctgagagttgtggtttggccaaagatttgggttagccaaggaaatctagtgtatgtagctggtcataagagttcctcaaacctgcagagtctagggtaagtgttaatatatcacctcaggaaagtgaaggtggaagactcatctatcactgaaatataaagtaaattaaatcgaggcgagccaaattctctgagccatttttcctaaacatatgagaatatagcactgtacttaggactttatagcctatttcc

SEQ ID NO: 255237 - DNA, 593 bp, Homo Sapiens
  misc_feature (486)..(486): n is a, c, g, or t
  misc_feature (505)..(505): n is a, c, g, or t
  misc_feature (544)..(544): n is a, c, g, or t
  misc_feature (549)..(549): n is a, c, g, or t
  misc_feature (569)..(569): n is a, c, g, or t
taaagtttcccccagtgattccagtgcacctgaaaagttgagaaccacaggcttagtggtacgttggggtttcccacgctaggctgcatagcattataacctgggaacgttaaaaaaaatacagacattcttgattcttagtgtagttatgatgtggatcccacgtattttttaaaaaactctccagataattttgatgtcacgagtcactagtatagactatctatctagtgagttgtattataagcgatgaaatactttaaaagctacccagtaactcttgggattaattttatgaaataaattctgagctgctgcttttgatatagtcagacttaagactgaaccccagtagataggcaatagatatagaattctggttagctaattgaacttttgtgacctgtttaaaaacaaatcaaatttattgaacaaatgacaaggcacaaatactttcagaattgtatttcagtttggaggatttanaaaaatgtggaaattaatntatattaggtatcctttattttaaggtccatttgttaanccggnggtaccggttaattttgggnggtttaaaattcccaacctttggc

SEQ ID NO: 255238 - DNA, 490 bp, Homo Sapiens
gccatggctcacgtggacctgaccggggatgggctgcaggagcttgccgtggtctccctgaagggcgtgcacatcctgcagcacagactgattcaggcctcagagctggtcttgacccggcttcggacatccaagtggagccagaggagacgtcggcttacaggggttggaggacggggcaagtgcagggcctgctgagaatgcagcctcttaagcacccatgcacccactcttcccagacctggggcgactcatggcgtgctcacctccagccgctggtggggggtgtcctgaaggacaggatgctctccccagacctccccagggtggtgaagctgtgccctggggccccagctaacccactcctctctctgtacgtcaatgtccctatttgaaagcagggatgatcccattccaccctgtccactctggatgagaattggccacctgatggttatttatacgtccagaagaacatcatttcccagtt

SEQ ID NO: 255239 - DNA, 888 bp, Homo Sapiens
  misc_feature (463)..(678): n is a, c, g, or t
  misc_feature (719)..(772): n is a, c, g, or t
cttccagtgccgctgggatgactccgtcacctacatcttccaccagcttctggacatgcgggagccggtgtttgagttcgtgcggccgcccccttaccaccccaagcagaagcgcttcccccaccggcagcccctgcgctacctggaccggtacagggacagtcatgagcccacctatggcatctactaaggagccagagtgtgcgcatttcagagcatgggattgatcggcagcaagagtaaagacacagctccagaggcccacactgtggggtctgggccctgccttaggcagcccccctctttggccccctcccgtcaggcccagggcttggagtgaaagtgactctcaggtggtggggtggggaatgtgaataaacatgatttcttgccgggaaaaaaaccgccttaaaaaacggcgcaccacaaagactatatcccacacctgaatcaaaagctcctnnnnnnnnnnnnnnnnnnnnnnnnnnnnnnnnnnnnnnnnnnnnnnnnnnnnnnnnnnnnnnnnnnnnnnnnnnnnnnnnnnnnnnnnnnnnnnnnnnnnnnnnnnnnnnnnnnnnnnnnnnnnnnnnnnnnnnnnnnnnnnnnnnnnnnnnnnnnnnnnnnnnnnnnnnnnnnnnnnnnnnnnnnnnnnnnnnnnnnnnnnnnnnnnnnnnnnnncgcgtgaatcctttggaaaaatacacgttaaagtctggcannnnnnnnnnnnnnnnnnnnnnnnnnnnnnnnnnnnnnnnnnnnnnnnnnnnnngaatataccaagatagggtcgagtgtttgtccacttaggacaagagtccactataaacggaaccataccctaataagtttttggggcgaggggcctaagacctcgaaccttggagc

SEQ ID NO: 255240 - DNA, 659 bp, Homo Sapiens
  misc_feature (83)..(171): n is a, c, g, or t
  misc_feature (208)..(311): n is a, c, g, or t
  misc_feature (332)..(342): n is a, c, g, or t
gcatcctactaataaagaagcaatatcactgaaagccattcaccactaatcatacatttactgtattataaataacaactagnnnnnnnnnnnnnnnnnnnnnnnnnnnnnnnnnnnnnnnnnnnnnnnnnnnnnnnnnnnnnnnnnnnnnnnnnnnnnnnnnnnnnnnnnaagtttaaaaaataaaccagttgcggtcctctgcacnnnnnnnnnnnnnnnnnnnnnnnnnnnnnnnnnnnnnnnnnnnnnnnnnnnnnnnnnnnnnnnnnnnnnnnnnnnnnnnnnnnnnnnnnnnnnnnnnnnnnnnnatggagtgagattctatctcnnnnnnnnnnntacacatgtacacatacaaagtaggtggagctgattaaaagaattgtccaagttttctatattgttactaatttttttgtctacttattttaccaaatactgagagataaatgttgacgttttcaactaccatggtggggttatcaatttctcccttcagtatgtcagttttactatgaagttatatttgtaaacagtttcatttgatcattatgtacttttgatgacttgattttgctgtcattaaaaattgtcctctttttctcttgaaagtctaaccgtttgatattaagatacccaaaccaactaaataattg

SEQ ID NO: 255241 - DNA, 391 bp, Homo Sapiens
acacaataagatgtataacaaccattgaaaaaagtaaactcgtaaggcttcgcttaaagtaactgcattaatatacaatagattacacaattgttaaatccatgtatacaattaattgtggtaggaagaaagaaaagaaaaaacttcataccagccctgtacaatatggccaattcaagttttaagactgactttaatacttggacctactaagggttttatttgctggagactaaagtctaacacacatctctaagccaggcaaccttaaattcaattaccccccgccaaaacaaaggtggtattatgcttcttcaacctcataaacaatgctgaaatgtaaatcaggatacaaattgcttgaactgcctcgtgccgaatcctgcagccc

SEQ ID NO: 255242 - DNA, 670 bp, Homo Sapiens
gttcagctcaccagcccattcatctcaccaaggactcctgaggcatcccctaggaaacttcagggctctgccaagcagtttgaaaaccactggcctagtttgtcctgagcaagtcagagacccgccacttcaactgcttgccacaagctggctctgagtttctggtgtcagcatactcacaacaagaccaagtggcacatgcagcctaccacctcccctagaaataccatgaaaaagtgcagccctctctcaaaagcagaagtctggactcaacacctgaggccaatttggtcccacgttctggcgagcaacaactacgttgccacattctaggaccaagtgaaaatctccaagaagagtcaaccatggtctagctaagctgatcagtgctcaggaccacaggcagggttctagagcactgtgtcagaaagttagcattggagagcagcaatcttagcaccttggaaagtgcagcagtgaggtctggctcagggcatgcatctggagtgaataatttcttcctcaaaagaaaaagccataatctgaagctgttctagaggactgcgagttccaaagttaacatcctcagactctgaggtacagacaagtaacacccatgcaaacagtgtggcttcaaataaatcataaatgcttctaggtcatggtaggc

SEQ ID NO: 255243 - DNA, 636 bp, Homo Sapiens
  misc_feature (171)..(171): n is a, c, g, or t
gtccccatcccatccacacagactccccctccaaccgctcggatttcttagttttcttgtttcttcacctgtctgggagaagaaacagaaaaggaggagacagagaaaaagacatgcagacaagggcgttgggggtggttaagagcgcccaggtcttcctcctgccatctntaggcgtccctcccactccgccccacccactccagaccttccgctcctgtcgacctcactctacccagcaccctcaggggtcagattctttaagaggagcctgaggaacaaggctagggtctctaatctccaaaacacctgttgcccctgcttgggggcttgtgaggtccctgtcgggcgcccctcttggcagccactaggatgcgctcactccccaaaaatgcagcagccccgcccccttaaccctcagctgctcgctaccgcagggactggaagtccagcccgcgacccgcaggggttatgggacagaaggagaaagctggagaggcaggggctggggaatggaagtcctgaatacccgaacgagaagggagagaggtgggtaggaagggaggagttcgagcctaaggagttaagcatcctctctccgccctggctggtcacgctgcccctagcgcgacctag

SEQ ID NO: 255244 - DNA, 1332 bp, Homo Sapiens
cgcttagacaatgccccggagccaccagaccgtcgcgcccctgccccatcgtagtatatgagctcgcctacacaaggacccccgctaaaagccagagctcccagtccccgaggcttgaagacggggactcccttctccaccaactctgtcctcggggggtggggccccagccgagatcacagcgcgacaggagtgggggtggccgctggagacaggtgaagaaacaagaaaactaagaaatccgagcggttggagggggagtctgtgtggatgggatggggacgccgggggaggggctgggccgctgctcccatgccctgatccggggagtcccagagagcctggcgtcgggggaaggtgcgggggctggccttcccgctctggatctggccaaagctcaaagggagcacggggtgctgggaggtaaactgaggcaacgactggggctacagctgctagaactgccacctgaggagtcattgccgctgggaccgctgcttggcgacacggccgtgatccaaggggacacggccctaatcacgcggccctggagccccgctcgtaggccagaggtcgatggagtccgcaaagccctgcaagacctggggctccgaattgtggaaataggagacgagaacgcgacgctggatggcactgacgttctcttcaccggccgggagtttttcgtaggcctctccaaatggaccaatcaccgaggagctgagatcgtggcggacacgttccgggacttcgccgtctccactgtgccagtctcgggtccctcccacctgcgcggtctctgcggcatggggggacctcgcactgttgtggcaggcagcagcgacgctgcccaaaaggctgtccgggcaatggcagtgctgacagatcacccatatgcctccctgaccctcccagatgacgcagctgctgactgtctctttcttcgtcctgggttgcctggtgtgccccctttcctcctgcaccgtggaggtggggatctgcccaacagccaggaggcactgcagaagctctctgatgtcaccctggtacctgtgtcctgctcagaactggagaaggctggcgccgggctcagctccctctgcttggtgctcagcacacgcccccacagctgagggcctggccttggggtactgctggccaggggtaggatagtataggaagtagaaggggaaggagggttagatagagaatgctgaataggcagtagttgggagagagcctcaatattgggggaggggagagtgtagggaaaaggatccactgggtgaatcctccctctcagaaccaataaaatagaattgaccttttaaa

SEQ ID NO: 255245 - DNA, 1391 bp, Homo Sapiens
  misc_feature (43)..(43): n is a, c, g, or t
  misc_feature (80)..(80): n is a, c, g, or t
  misc_feature (599)..(613): n is a, c, g, or t
  misc_feature (985)..(997): n is a, c, g, or t
ccaaggccaaaaaaaacaatataggtattatgcgaggggaggngaagcaaagagcacaaggtagtccacagaataggacncaagaaacctcaagctgtgaggtcaatttgtaattaaaagaatactaaagattagatgaacacaacactcagaaatactctaggagagctgaaaaagaaggaacagatgttaacaaaacaaattaatttttaatgcaagttagacatggagttagagggtcagataaataacgaagagaattaagttagcgatagaaagatctaaggatactagctcctgggcacctagggtgcaaactgacttgtggcagcataagctgatgctgcacaggggacccaagccatgttgctacttgtcacttaaggcaggaagcgcacaaaggaagtgatgaaaggttattagcctgcaacattatttacagcatgagagcctctcctacggttctcaaccttcattaggcactactgtgatctagtgatggttgtaacccattctttaaaggcaaagatgtaagatttacagggaaaagcttcgggttttatcaattcactatcatcaaacacatattgagttggttnnnnnnnnnnnnnnncccagaacacaaatgtgtaatatttttgcatgagaaccacttcaacaaacataacatgtggcaaccaatcaatctgggtcacaaaaagccaatccgtatattgtaaagccttacacagtattaggttccaaagtgttggcgcagatgaaatggctgcagaaagaagctaaaagtacttatcttttcaaacagtaaggagtaaaagccatgttatctatcatgcctacagcttcacaagactatttaagggtaagaaacaaaacaattactcaaaaagatattgacagggttcaaataatgcacaataaatctttctcaggatctaagacacttaaaaatataatcaaatttgttgctctcttcctcctcccnnnnnnnnnnnnnttcaaagaataccaggtaaggtacctctgcagagtaaactgtaactgtatatcatataaatccaaatatatgtgatcactgttctgtcataatttgctattttatatacacctcatgaaacactatatatacgttacacaagtgtcatttacagttgatttgggcaaactctgtagtctggaatactcatagggttttctcaatctgattacttggaaaggtaagatgtgtgctatggctttcccacatgcagacactgacatctgaaggggaaagcttaagactgtggaatctgcacattcggtctcttttcaatctgagtttagagatgttaagtcaggtgtgtaacacactaaggttaagtctcctactgacattatcatggattggtttg

SEQ ID NO: 255246 - DNA, 545 bp, Homo Sapiens
  misc_feature (427)..(441): n is a, c, g, or t
  misc_feature (476)..(476): n is a, c, g, or t
  misc_feature (487)..(487): n is a, c, g, or t
  misc_feature (492)..(492): n is a, c, g, or t
  misc_feature (502)..(502): n is a, c, g, or t
  misc_feature (517)..(517): n is a, c, g, or t
  misc_feature (533)..(533): n is a, c, g, or t
attcggcacagcatttccctcgtggaagatgccgtggatgggaaaaacatcaacacttgtggagccaagtaacaccagctggccttgtccaagggacagagccttctattctgagaatcccaggggccctcagaccctgcctgatgctatatgcagaggcccagggaccaggtgtgtttcctctcaccaagaagaaagtacacactgatgagaaactgagaaccaagacaggcatccctgggtggcctttcctgctgacactccacgagctgacccagcagaattctctgtgtaggaagcatcggactttgtccattggaatatgtagcggctgccagagatcacacattcaattgcaaattccagagcctgttcttgctattagcttcagtgactgtgtttgttgattcatagtaacatttaaaannnnnnnnnnnnnnnaagattcccacaggggcattttaaaattatttttntccttccctgnattcntgacattttnctgacagcgatgatntgttgacttgaatttnacttttccactt

SEQ ID NO: 255247 - DNA, 350 bp, Homo Sapiens
  misc_feature (122)..(136): n is a, c, g, or t
aatgtggggaaaatgtgaaagttccaaggtccacacagtccattcctgcctgtccagaaaaagtgtccatgagtccagggaaggagagaagtattttaaataagtgccctgtgggattcttnnnnnnnnnnnnnnnttttaatgtactatgaatcacaacacagtcactgagctatagcagacaggctctggaatttgcattgatgtgtgatctctggcagccgctacatattcaaatgacaaagtccgatgcttcctacagagaattctgctgggtcagctcacggagtgtcagcaggaaaggccaccccagggatgcctgtcttggttctcagtttctcatcagtgtg

SEQ ID NO: 255248 - DNA, 871 bp, Homo Sapiens
  misc_feature (52)..(52): n is a, c, g, or t
  misc_feature (60)..(60): n is a, c, g, or t
  misc_feature (249)..(263): n is a, c, g, or t
aggtgtgtttcctctcaccaagaagaaagtacacactgatgagaaactgagnaaccaagnacaggcatccctgggtggcctttcctgctgacactccacgagctgacccagcagaattctctgtgtaggaagcatcggactttgtccattgaatatgtagcggctgccagagatcacacatcaatgcaaattccagagcctgtctgctatagctcagtgactgtgttgtgattcatagtacattaaaannnnnnnnnnnnnnnaagaactcccacagggcactattaaaatacttctctccttccctgactcatgacactcttcctgacagcagaatgactgtgtgaccttgaacttcacatttcccacattggcccttggattgttcggattaaccccttccactcctcactggctggttcactgtgttctgactagtccataaaaataaagatggaaggagatcaaacacagaatcataatcataatgcggcccccttccccagagcttacctcgaatgtgaaatccctacttcttataatgcagagttaaggagctgagcccccatgattttgtagcctgtacctttgtatgtgtatatttttaatagctgcagattgtccccacacagtatacttttggaagtttgggtggatgactctgaattccttgcacacctttccctaaaaatttctccccaagagagacttgtttgggccttttgtggtgtcagtggaatggataggtaacttgggtgggcaacttggggagctgaccattctcttttggtaaatggttgacggctcaagaggatgaatatgaagctttccaagataagcagattaaaaggaacatgtgttaccgaaaaaa

SEQ ID NO: 255249 - DNA, 388 bp, Homo Sapiens
ggccggagcttaggtcgggaagggatggatcgctgagccgatagcgtccgctaggctgtctgcctcggtacctgttactgctgctacttcctcgtttgacaccttcctggaatctctcttgatttttgaggaaatacctagtaacaaacatgactgagttctggcttatatctgctcctggggagaatcttgctgtcacttccaagttcaatattcctgacttaaaggttggcacgttggatgtcttggttggcttgtcagatgaactggctaaactggatgcatttgtagaaggagtggttaagaaagtagctcaatacatggctgatgtattggaagatagcaaagacaaagttcaagagaatctgttggctaatggagtggactt

SEQ ID NO: 255250 - DNA, 1265 bp, Homo Sapiens
cttaggtcgggaagggatggatcgctgagccgatagcgtccgctaggctgtctgcctcggtacctgttactgctgctacttcctcgtttgacaccttcctggaatctctcttgatttttgaggaaatacctagtaacaaacatgactgagttctggcttatatctgctcctggggagaaaacctgtcagcaaacatgggagaaattgcatgcggcaacttcaaagaacaataatcttgctgtcacttccaagttcaatattcctgacttaaaggttggcacgttggatgtcttggttggcttgtcagatgaactggctaaactggatgcatttgtagaaggagtggttaagaaagtagctcaatacatggctgatgtattggaagatagcaaagacaaagttcaagagaatctgttggctaatggagtggacttggttacttatataacaaggttccagtgggacatggccaaatatccaatcaagcagtccctgaaatctcgagcatctgcatacaataacctgaaaggaaatcttcagaatttggaacgaaagaatgcaggaagtttgctaactagaagtctagcagaaattgtgaagaaggatgactttgttcttgattcagagtatctcgtcacattactggtagtagttcccaagttaaaccacaacgactggattaagcagtatgaaacactagccgaaatggtagttccaaggtctagcaatgttctttcagaggaccaagacagttacctgtgtaatgtcaccttgtttagggaagggcagttgatgactttcaggacacaaagccagaggaaaacaaatttcattgttcgtgacttccagtataatgaagaggagatgaaagcagataaagaagaaatgaacaggctttctactgataagaaaaaacaatttggaccacttgtacggtggctgaaagtgaattttagtgaagcatttattgcatggattcacgtgaaagcattacgggttttcgttgagtctgttttaaggtatggcttgccagtgaacttccaagcaatgctacttcagcccaataagaaaactttgaagaaactgagagaagtattacatgaattgtataaacatctagacagcagtgcagcagctattattgatgctcctatggatattccaggtttaaacctgagtcaacaagaatactacccctatgtgtactacaagattgattgcaacttgctggaattcaagtgaaaatgggctcctcccccgacaat

SEQ ID NO: 255251 - DNA, 950 bp, Homo Sapiens
ttttaaggggaaaaaaagcaagatttaatgtgaatactactggttacaactaatataacagcttgaaaaaatcatgacacagaagcataaatataatataaaaagacaattttaaaattgtattgtaggaatataactataataagtggaaaagatacattaaaaccatcagtgtgttacacttgttcaaaacagaactcataaggcagaccaaaactgatgcaagttaaggaaaatggtctgtttttaggaagcatgtccagacagacaccacaaagaaatgccaacagagactatgtggtcccctcttgttactagtaatgtgtcaaaggtggagtgactgggttaacagcctaagctttctccaaggatttgtagtattctgtcagcacggtccaagccttgggagccatgaaaccttcaggtggtttctggccttctcgagcaagtttgcgcattcgtgttcctgaaataaattcaaagtcttcatggtgttcagagtcatagtagtccatacgcttctttttcttgttgtaagctgcaactcgaaagggaactatttccaaagtgattaaaccaggggccatcgtcagcactttggcaccatgacttggctcataaagatccttccctgtttctggatgaggcatgccagcagggtctcgtccaacaatgtaaaagttggctccctgcaaccatccgtgctctgcaatgccactggacctcagttggtccagcatacatcatgggagatgggaagatggccaccactgtcgtctcaggattcagaactccttcctccaacagctgcagcatgctgcttcatacgccacatcaaaggaacatcgtcatcctttgtccacacacccagagggtggaggaggaggacagggcgccggtagcaccctctctagaagttgcttatgggtatcctgcattaacagggcatg

SEQ ID NO: 255252 - DNA, 483 bp, Homo Sapiens
  misc_feature (21)..(21): n is a, c, g, or t
  misc_feature (222)..(222): n is a, c, g, or t
ctgttggggcccaaaacctcncccagctgccaaaaaccgcccatgcaccccaagtggccagggtccagtgccccacaagggggttgccctgctttgaactgaaactaaacctgtgggtttagtcccaacgaacagatgtgcctgatttcagggctgaatttttgcttgaccacaaagcctcgggcagaacagattcgcctatgactgaatcgactgaatggnatggccagcgacagcctggcctgggaatggactggcagctcatcactaaaatgactcctttcatggaagcccactgctatgcagccacactgaccacagagcaactgaataggtgagcattggattgttgatgacaactcttcagcagaacaattgtgtgtttgaagggactgttttatgatgaaataactgttatttcctggagctaattgttgaatgacagtttgtcaactgtttaaatgaatttcatttgaattaaca

SEQ ID NO: 255253 - DNA, 828 bp, Homo Sapiens
accatgagtcatttagaatagtgataaatagaatacacagaatagtgatgaaattcaatttaaaaaatcacgttagcctccaaaccatttaattcaaatgaacccatcaactggatgccaactctggcgaatgtaggacctctgagtggctgtataattgttaattcaaatgaaattcatttaaacagttgacaaactgtcattcaacaattagctccaggaaataacagttatttcatcataaaacagtcccttcaaacacacaattgttctgctgaagagttgtcatcaacaatccaatgctcacctattcagttgctctgtggtcagtgtggctgcatagcagtgggattccatgaaaggagtcattttagtgatgagctgccagtccattcccaggccaggctgtcgctggccatccattcagtcgattcagtcataggcgaatctgttctgcccgaggcttgtggtcaagcaaaaattcagccctgaaatcaggcacatctgttcgttggactaaacccacaggttagttcagtcaaagcaggcaacccccttgtgggcactgaccctgccactggggtcatggcggttgtggcagctggggaggtttggccccaacagccctcctgtgcctgcttccctgtgtgtcggggtcctccagggagctgacccagaggtggaggccacggaggcagggtctctggggactgtcggggggtacagagggagaaggctctgcaaaagctccctggcaatacccccttgtgtaattgctttgtgtgcgacagggaggaagtttcaataaagcagcaacaagcttcaaaa

SEQ ID NO: 255254 - DNA, 872 bp, Homo Sapiens
  misc_feature (595)..(824): n is a, c, g, or t
ttctctgctcccaggaactcagactaaatttaaggtccaaacccaggaactatctggccttcagattactggtataaagatttctgtcccattcccccattctgctcatatttctcaagtgatttatgctcattttctgtctttgtttttaatggtctttgcctgttttgcttgaatcacaaactatcaaatcctgggtcaatgaataggttaatataaattataaattaaagaaaacttaatgaccttagtttgtatcttcacatcactgcataacttgttaatgcaatttataaaaaatgaaggttctaaaaggtatctttgctgttttagagttaattatttcacatgaatcatgattcacgattcacttttagaaaagccaatgacaatttttgttaaataaaagaatgatagaatgaaacaaggatcaaaacttaaaattactaaattagagacacagaattaggaggattcaaaattttttaatgttttaaatttactaacaaaattggtctggcaaagctagataactatcataaaaaattaacttacataaagtgtattaaattctcagtgggcacggtggctcatnnnnnnnnnnnnnnnnnnnnnnnnnnnnnnnnnnnnnnnnnnnnnnnnnnnnnnnnnnnnnnnnnnnnnnnnnnnnnnnnnnnnnnnnnnnnnnnnnnnnnnnnnnnnnnnnnnnnnnnnnnnnnnnnnnnnnnnnnnnnnnnnnnnnnnnnnnnnnnnnnnnnnnnnnnnnnnnnnnnnnnnnnnnnnnnnnnnnnnnnnnnnnnnnnnnnnnnnnnnnnnnnnnnnnnccggccgtaatggccgaattcccgggcatatgtccggtaccgtcgact

SEQ ID NO: 255255 - DNA, 223 bp, Homo Sapiens
acacatggatccagaatgacgtagaaaagaatttagatttcaccaacttaatatactagtaaaagctccataatttaaggtgggtttaaaagttactttaatgaacttctagcgcttatgttacctatactttcatggttgacaaaagtcactatctctaggataattaatactaccttgggaggtattaagaaaatgctttctcggccgggcatgtggctca

SEQ ID NO: 255256 - DNA, 1213 bp, Homo Sapiens
  misc_feature (5)..(5): n is a, c, g, or t
  misc_feature (12)..(12): n is a, c, g, or t
  misc_feature (23)..(24): n is a, c, g, or t
  misc_feature (26)..(26): n is a, c, g, or t
  misc_feature (31)..(31): n is a, c, g, or t
  misc_feature (36)..(37): n is a, c, g, or t
  misc_feature (43)..(43): n is a, c, g, or t
  misc_feature (51)..(51): n is a, c, g, or t
  misc_feature (57)..(57): n is a, c, g, or t
  misc_feature (60)..(60): n is a, c, g, or t
  misc_feature (75)..(75): n is a, c, g, or t
  misc_feature (86)..(86): n is a, c, g, or t
  misc_feature (93)..(93): n is a, c, g, or t
  misc_feature (101)..(101): n is a, c, g, or t
  misc_feature (127)..(127): n is a, c, g, or t
ccctngaatgtngggccctgtanncncatcncagcnngctacntgtagacnggcccntgncaaaggcggtactgnccaactacggnaccctcnccattgcnttttgctgttcatgatagctggcatnacagtgtccatgtacctcttccgggtaacagtgaccaattcactccccccaagctctggatcctggtattgggagctgtatttggtttctcctcgtatggccccattgccctgtttggagtcatagccaacgagagtgcccctcccaacttgtgtggcacctcccacgccattgtgggactcatggccaatgtgggcggctttctggctgggctgcccttcagcaccattgccaagcactacagttggagcacagccttctgggtggctgaagtgatttgtgcggccagaacggctgccttcttcctcctacgaaacatccgcaccaagatgggccgagtgtccaagaaggctgagtgaagagagtccaggttccggagcaccatcccacggtggccttccccctgcacgctctgcggggagaaaaggaggggcctgcctggctagccctgaacctttcactttccatttctgcgccttttctctcacccgggtggcgctggaagttatcagtggctagtgaggtcccagctccctgatcctatgctctatttaaaagataacctttggccttagactccgttagctcctatttcctgccttcagacaaacaggaaacttctgcagtcaggaaggctcctgtacccttcttcttttcctaggccctgtcctgcccgcatcctaccccatccccacctgaagtgaggctatccctgcagctgcagggcactaatgacccttgacttctgctgggtcctaagtcctctcagcagtgggtgactgctgttgccaatacctcagactccagggaaagagaggaggccatcattctcactgtaccactaggcgcagttggatataggtgggaagaaaaggtgacttgttatagaagattaaaactagatttgatactgaacactgtcagtgattcattttttcaaagtgagacagcttccttgggaaatattgtcaatacctgctctttccaccccaaaatggaaagacttcatttccctggaatggggaagctgaagtgtagatggactcctttttagagataaagctattgggttgtggacagattaaa

SEQ ID NO: 255257 - DNA, 566 bp, Homo Sapiens
acagaaaaggggagagaaacaaaaaacgatgataaaggacaaaaggagaaggaatgcacaacagaagccataagagggggaaagcaaaaaaagagggcaacggaaagatgaaaaacaaagtcctggaagcaaggaatttagaaaggatatcttaaagtatataaagtgaaaaccaaggaagaaggaagtaagtatataagaaacccatacttgaagaagaatatagacatatgtatatactagactaggccaggtgtgatagctcacacacacatataatcgcagcactttgggaggttgaagcaagaggatcgcataaacccaggagttcaaggctgcagtgagatatgatcaagacaatgcactacagcatggaccacagagtgagaccctctatttaaaaaaatgaataaataaatataaaaggtccgagatagacaaagtgtgacatgcagtcagtagagggggtaaggaggtcagatagatagtggggaaaataattaagcagaggtatataaaataagtaacaatctcaggactaaaaatataaatacatcacatagtaa

SEQ ID NO: 255258 - DNA, 824 bp, Homo Sapiens
ggtggttgcctgtcggcgcttgtgctagtgcaccccccctgggcggaaacaccataggacaattcagcctccaagagggtggtgctcagtcccgcaccacaacatggcgagaatggctcatcagacccttcgacacggttatcagtgatctataggtctctgagcactcttatagcgatttcgacagcatcagcgctgtttcttcaatcttgatatcccaatactctgggctgactttccttttgtactaactattcttttgttattgctaacagatgagctcagtggcttagaaaccagttgtcttgaatggacagaaggcttttgtcgtttggtatcagtagattccattcgatcactgggtcttggggatccctgtttctcagttgtatcttgttcactctctggattatacagttcatcatcttgttctggtacttcagttaaaatatcatccagaacattaagttctccatctttctcctcccgactgtcagccgccatggctccccttcggtttccgccgctgccaccgccgccgccgcttagacgcgactcgcgcgggcgccgcagccgcggcagaagcacgggcccgtccgtcagtccgtctgcccggatacgcgcgtcgcacttggcctcttaacactcagccttctcgactcttcccgctttttccctttctcccttcctttcactccagcatccagcggcctaggcccagccttctcgttagggctcagactcgggctaggtatgggggagggaagggaaacagatggcgacggcgggcggcgctaaaatggagcctgcttcctgctcgaaac

SEQ ID NO: 255259 - DNA, 371 bp, Homo Sapiens
  misc_feature (195)..(240): n is a, c, g, or t
ggccatgtcatagcccatcacggagacctagtcggttggatcacctgtagtcaggacgtttgtgccatgcctgtacagtataatcaagccctgtctctactagaaatacataatttagctgggccatgtgccgggtgccagtcatcctagctactcagcggtcaagtcaggacaatcacttgaacccagtagccnnnnnnnnnnnnnnnnnnnnnnnnnnnnnnnnnnnnnnnnnnnnnnagacaatggtcaggaggctgcctccctccctctcttgcatttctttttaaaaaacagagcagaggccgggtgtggtggctcatgcctgtaatcccagccataagtggtctaattagtcaaaagaatatgtc

SEQ ID NO: 255260 - DNA, 384 bp, Homo Sapiens
ttattattgactgtagtcaccctgttgtgctatcaaatacttgatgttattcaccaggtattcaagtctttctatttgtcgtaccctcatagtgcatttaaatggaacgacaaggcttttttttacccatctgattaaaacatgtttgataggcctgtgcatttttaaaatttctgctcaatttaaggtaattttgaaagttaagaggagaattctgttttaatttgttgcccctccatttgatctcattccaaattaaaaagaggtatgtatttgataagacttaccaaataaaaatacaaaaaatcaccatgcctattttggtaataacttttaaaaaggcacgtggaaaaaaattattctgggccgggcgtggtggctcat

SEQ ID NO: 255261 - DNA, 823 bp, Homo Sapiens
ggtttcggggcatttaaaggccaaggggccaggacgggttgcctttttcgtggggctttaccccaagggcccaagggcggggtttccccgctggggcttgaagaaaaccaggacggcccatggtaccccagcccggcaggctactggctgggattcgaaacatcaagttcccccaaagggccatcttggagcccccacggggggggtgccggccgtttcctccaccttccttgatgtaggctgaaaagatccgaccacttgaagtcacaggagcccggcagccagcagcacattgttggggtgccagtccaggctgaggacggtggagcggatgggcttcttgatgtgcttgcaaacccaccagtcattctcctgctcgaaataacagatggagatcacacgagagccgctgcccacagcaaacttgttctcgttgggggcccagcgcacgcagcgggcagcccggttgatccgcaggatgaccagcgtgggcttccatgtgcggcccttcagcgtccacacgtaggcgttgcggtctgtgccgcaggtcacaatacggttactctcgggggcccagtcgatgcctgtcacctgcccgttgtgctccttgagctcgtgcaccttggtccatttggcaccgctcttttcatagatatgcacctcatggttgttggggcagatggcaatctgggtgcggtccttgttccaggcgtggcagctgatgggctccaccaggaagctgtggtaggccatggcggcttggctcctcccgcgccccggccgcggactctgggcagtcgacgcgccgaaccggctctccccc

SEQ ID NO: 255262 - DNA, 2463 bp, Homo Sapiens
  misc_feature (1429)..(1443): n is a, c, g, or t
  misc_feature (1516)..(1525): n is a, c, g, or t
  misc_feature (1746)..(1754): n is a, c, g, or t
  misc_feature (1874)..(1874): n is a, c, g, or t
  misc_feature (1939)..(1939): n is a, c, g, or t
  misc_feature (2039)..(2039): n is a, c, g, or t
  misc_feature (2061)..(2061): n is a, c, g, or t
  misc_feature (2111)..(2111): n is a, c, g, or t
  misc_feature (2172)..(2172): n is a, c, g, or t
  misc_feature (2177)..(2177): n is a, c, g, or t
  misc_feature (2204)..(2204): n is a, c, g, or t
  misc_feature (2246)..(2246): n is a, c, g, or t
  misc_feature (2300)..(2300): n is a, c, g, or t
  misc_feature (2376)..(2376): n is a, c, g, or t
ggggaggaagtggctgctgctccggcgcggagcccagagccggttcggcgcgtcgactgcccagagtccgcggccggggcgcgggaggagccaagccgccatggcctaccacagcttcctggtggagcccatcagctgccacgcctggaacaaggaccgcacccagattgccatctgccccaacaaccatgaggtgcatatctatgaaaagagcggtgccaaatggaccaaggtgcacgagctcaaggagcacaacgggcaggtgacaggcatcgactgggcccccgagagtaaccgtattgtgacctgcggcacagaccgcaacgcctacgtgtggacgctgaagggccgcacatggaagcccacgctggtcatcctgcggatcaaccgggctgcccgctgcgtgcgctgggcccccaacgagaacaagtttgctgtgggcagcggctctcgtgtgatctccatctgttatttcgagcaggagaatgactggtgggtttgcaagcacatcaagaagcccatccgctccaccgtcctcagcctggactggcaccccaacaatgtgctgctggctgccggctcctgtgacttcaagtgtcggatcttttcagcctacatcaaggaggtggaggaacggccggcacccaccccgtggggctccaagatgccctttggggaactgatgttcgaatccagcagtagctgcggctgggtacatggcgtctgtttctcagccagcgggagccgcgtggcctgggtaagccacgacagcaccgtctgcctggctgatgccgacaagaagatggccgtcgcgactctggcctctgaaacactaccactgctggcgctgaccttcatcacagacaacagcctggtggcagcgggccacgactgcttcccggtgctgttcacctatgacgccgccgcggggatgctgagcttcggcgggcggctggacgttcctaagcagagctcgcagcgtggcttgacggcccgcgagcgcttccagaacctggacaagaaggcgagctccgagggtggcacggctgcgggcgcgggcctagactcgctgcacaagaacagcgtcagccagatctcggtgctcagcggcggcaaggccaagtgctcgcagttctgcaccactggcatggatggcggcatgagtatctgggatgtgaagagcttggagtcagccttgaaggacctcaagatcaaatgacctgtgaggaatatgttgccttcatcctagctgctggggaagcggggagaggggtcagggaggctaatggttgctttgctgaatgtttctggggtaccaatacgagttcccataggggctgctccctcaaaaagggaggggacagatggggagcttttcttacctattcaaggaatacgtgcctttttcttaaatgctttcatttattgnnnnnnnnnnnnnnntgcccccaaagcactatgctggtcatgaactgcttcaaaatgtggaggtaataaaatgcaactgtgtataagnnnnnnnnnngcaaagacgaatcaaaccgtgtcgggccgccctccggcccctcgagaaacttttctagaaccatttcgtttatggagcgaggagccccaatttaggaaaagtgaaaaaatggctcattcaacctgtttttccctaaagaaaaatcccttgggcccatccaacttaacgcggccctcggggaatctccctccccccccacacaaagataacacggccccgcnnnnnnnnntataaccaccggatggccttgttatttgggtaaacacaaaatattctctacaaagataatgcggaaaatcctcacgcccgaaacgggcccaccatatctaaacctctgggcgaaatttcnctatatatttcacaaagcatgcggctgggggatgtctcccccacaccacaacccgtcgtaaaaangctttttcttgggcaatattactttcccaaaaaatatattattcacgaagtgcctccccctcgcgctcccctctccctggaggtcgcaaaatactatctngatatgtgtgcccatagaatanaaacaccatgatgaaacacgcgcgggaaaaactctctcgccacctcgttntaagagggacgatattttttggtcttgtcgtctagacgaaaaaaataaagtgggggtcatnaaacnctgaccaacgttgtctcgcggccactnacacccctgggccgcctatcttctctccttgttggaaataancctccctcttggtttattcttcatccaccgccgctgccgccgcggggtgctccncctcccctcatcgttctacacacctccttctgtgtggaccagcggccactacctctgagggcggccgtttgcttcnaacgaggtctgttgttttgtgcgcgcccctccccggtcgggtagaggagaaaaaatacagacgcctggtggagtgggcggcccatag

SEQ ID NO: 255263 - DNA, 1425 bp, Homo Sapiens
  misc_feature (1067)..(1127): n is a, c, g, or t
  misc_feature (1171)..(1171): n is a, c, g, or t
  misc_feature (1210)..(1210): n is a, c, g, or t
acgaatttgtatctcttatcaattgctcctctcagccacctctgatcagccatggtatcggcaaggatgtggagtcctgccatgatatggccgcgctgaacatcttaaagttgctgtctgagttggaccaacaaagtacagagatgccaagaacaggaaacggaccaatgtctgtgtgtgggaggtgctgaaccttttctggccatgaaccattataaaatcccaacatatatactgaaaatactgaaactgctttgaaaatttggaatttctgatacctccagtgggccgagagacacggtgggtaaaggatgtgggcagcagcagggaagacaacagaaacacaaggaggcggctgtggccgggctggactgtgctggggtttgttgtgatggccactcggtgacctggcggtccctacgcaatagcagctgcctgtggggaagaagggctgcccagccagctgggttctcccgggacaccagcagatccacaccctgggcacctccgtgtttggtcttttttttcccctgtgtgaaagaagaaacggcacgaccccttctcaagctggctcactcagacacattgggacaaaccctggacagccatgccagagagaggcctttgaccggccccagagctaaaagcaccagagaaaatcaaatgcttcctactcagcgtgacccaacttttctagtgtgccacggccccaccacctcctgcagtacccacaccatcaccactgctttctcttccaacagtgatctgtattcttagtttcattattttcttttgattgatatgacactatataaaattttcatttgagaatttctcaattgtatctagttaaatagcacagtttggaaacttgtctgagactgactttatcaataatctaaccgacaaagatcatatccatgtgtatgtggttagacatttttatttcattgactaacccaggacagtttcagtgatgcaaattgtgtgccctctggttcagctgaaacagtcctggactttcaaaaaccttgaataagtctcccacagttgtataaattggacannnnnnnnnnnnnnnnnnnnnnnnnnnnnnnnnnnnnnnnnnnnnnnnnnnnnnnnnnnnngttaatgcaaacaggacttaaatgaactttgatctctgttttanagattattaaaaaacattgtgtatctatacatatggctncttgagacttagcttttcactacactacagggatatgatctccatgtagtccatataaacctgcagagtgatttttccagagtgctcgatactggttaattacatctccccttagggctgaaaagattgaccctacgttttctgaatacagctgggggtggctttttgaagggtgggttaaccgaaacaccaaaaatggggttgcacatgggagg

SEQ ID NO: 255264 - DNA, 950 bp, Homo Sapiens
  misc_feature (326)..(348): n is a, c, g, or t
  misc_feature (837)..(849): n is a, c, g, or t
ggcctgggtggcgaattcggcacgaggactatataaaattttcatttgagaatttctcaattgtatctagttaaatagcacagtttggaaacttgtctgagactgactttatcaataatctaaccgacaaagatcatatccatgtgtatgtggttagacatttttatttcattgactaacccaggacagtttcagtgatgcaaattgtgtgccctctggttcagctgaaacagtcctggactttcaaaaaccttgaataagtctcccacagttgtataaattggacaatttaggaattttaaactttagatgatcatttggttccnnnnnnnnnnnnnnnnnnnnnnngttaatgcaaacaggacttaaatgaactttgatctctgttttaaagattattaaaaaacattgtgtatctatacatatggctcttgaggacttagctttcactacactacaggatatgatctccatgtagtccatataaacctgcagagtgattttccagagtgctcgatactgttaattacatctccattagggctgaaaagaatgacctacgtttctgtatacagctgtgttgcttttgatgttgtgttactgtacacagaagtgtgtgcactgaggctctgcgtgtggtccgtatggaaagcctggtagccctgcgagttaagtactgcttccattcattgtttacgctggaatttttctccccatggaatgtaagtaaaacttaagtgtttgtcatcaataaatggtaatactaaatttttttgttaatttattctcaaatgccactactgctaggttggtcccctcccaacttgcccctatccnnnnnnnnnnnnnaagaaaaaaactttgtaatgcttgtgattccatctgggcaaaagtctgaagatctgaaataactttatatcaaaccattgatcaataaacagctactaatg

SEQ ID NO: 255265 - DNA, 714 bp, Homo Sapiens
gtattttttgccctacgttttaaggactagacttttgaagtattttatagtctagaggtctcaagtaatatatatgtgtttaatatttttagagccaattgataccacaattagataggagtagtgagaataatatggaattacttggtttgaagtagttattggatatggttatatctgagctgtagtcatattatctcaagatttcctctactatcccccatagagaaccactaacaagtggatgtctaatattcctctggtgagttgaaggcaggagaagttgagaatccattagtttcaatgagtatcccaggtgacctatcctggccctctactcgagaaaccggcaatttgtcttcactctgagattccattaaattgcctgttgtataacctgatggttattatgaaccactgaccctgtgagaccatatggaagataaagtttggtcttaccaggaaatcttgaggagagtcaaaagagaaatgggagatgtctcttgagaggtgatcagagaagtttatgctcactgtctgatgcaaatgtctggtctatttgttagtaaataacagggaaatcattttcactttttgttaaaaataaggtatttaccagcataccttgtagttattgtgggttccgtttcagaccactgcaataaagtgaatatctcagtaaaacaaggcccgcaaaccacagatcccccttgt

SEQ ID NO: 255266 - DNA, 851 bp, Homo Sapiens
taaaatgctttgggaaaaagaacatcttttactaacagaaatttcttagcctctggaagggccagttgattcggtaacatatgccaggagacttcagcaatatcctgctccattgtagaaaacagcaatctgatccttttctctcctcaatcattaacgagattatgcatttggggtgtgataatcctccagggacaagtattctcaaatcatacgtttcagtttcttcttaaggtgcttaacaaagtctcgtctcatacatcttgctgcttccttgatgatggattcaaaaaatcgcttcctgactgcagtaggtccttgcactccttcaagcatttcgaagattttttcatatttttgtccaacgcatcggagttccttcactaatttacgttttatatcagcattaatttctcgttggcttttgggagaggaggctgtttctctgcattctaggtcatctccagagaaactgctggtaacgtttcctcccacaggtgcattgctaccaggtttctgcatcatcctatctttgctgaaaccagtgaagtcatcaatctgagaatccaattggctgggtggaatagcatgtcctgtcataagcttctttgctttggacatggcagagcctgcaataaggctgtctcctgctccttgtttccttgccaacagggccatcctctgccttttctgatacgaaggactgtcacattccctgggacgtttaaacacagtttcaggatctacagccaccttctctgttttatcggtcattgtttcagtcctgaagtcctgaccttgctggaggagagacggcggcacctcacaaaatggcagtgaagttgtggcgc

SEQ ID NO: 255267 - DNA, 1585 bp, Homo Sapiens
  misc_feature (1191)..(1191): n is a, c, g, or t
  misc_feature (1197)..(1197): n is a, c, g, or t
  misc_feature (1215)..(1215): n is a, c, g, or t
  misc_feature (1456)..(1456): n is a, c, g, or t
  misc_feature (1470)..(1470): n is a, c, g, or t
gcatttccagagcagagttcagagaaaggctgggctgcttgttgctggctaaaggacaaagggtaagtttcaggaagcagaagagtgagcagatgaaattcagcactgggatcaggggagtgtctgatttgcaaaaggaaagtgcaaagacagctcctcccttctgaggaaacgaaaccaacagcagtccaagctcagtcagcagaagagataaaagcaaacaggtctgggaggcagttctgttgccactctctctcctgtcaatgatggatctcagaaataccccagccaaatctctggacaagttcattgaagactatctcttgccagacacgtgtttccgcatgcaaatcaaccatgccattgacatcatctgtgggttcctgaaggaaaggtgcttccgaggtagctcctaccctgtgtgtgtgtccaaggtggtaaagggtggctcctcaggcaagggcaccaccctcagaggccgatctgacgctgacctggttgtcttcctcagtcctctcaccacttttcaggatcagttaaatcgccggggagagttcatccaggaaattaggagacagctggaagcctgtcaaagagagagagcattttccgtgaagtttgaggtccaggctccacgctggggcaacccccgtgcgctcagcttcgtactgagttcgctccagctcggggagggggtggagttcgatgtgctgcctgcctttgatgccctgggtcagttgactggcggctataaacctaacccccaaatctatgtcaagctcatcgaggagtgcaccgacctgcagaaagagggcgagttctccacctgcttcacagaactacagagagacttcctgaagcagcgccccaccaagctcaagagcctcatccgcctagtcaagcactggtaccaaaattgtaagaagaagcttgggaagctgccacctcagtatgccctggaagctcctgacggtctatgcttgggagcgagggagcatgaaaacacatttcaacacagcccagggatttcggacggtcttggaattagtcataaactaccagcaactctgcatctactggacaaagtattatgactttaaaaaccccattattgaaaagtacctgagaaggcagctcacgaaacccaggcctgtgatcctggacccggcggaccctacaggaaactttggngtagtnggagacccaaagggtttnggaggcagctggcacaagagggctgaggcctgggctgaattacccatgctttaagaattgggatgggtccccagtgagctcctggattctgctgacccagcacactccaggcagcatccaccccacaggcagaagaggactggacctgcaccatcctctgaatgccagtgcatcttgggggaaagggctccagtgttatctggaccagttccttcattttcaggtgggactcttgatccanaagaagacaaagcntcctcagtgaagcttgggtggtataatcccagggacaagaaaccccagggccttcctggaactccctgggccccttcctatggccccttctaatccccatatccatagaagaaaa

SEQ ID NO: 255268 - DNA, 487 bp, Homo Sapiens
accgaggaccccggacgtatcagaaatatggttacattggaacacatgagtaccctcatttctctcatagacccagcacactccaagccgcatccacccccacaggcagaagaggactggacctgcaccatcctctgaatgccagtgcatcttgggggaaagggctccagtgttatctggaccagttccttcattttcaggtgggactcttgatccagagaagacaaagctcctcagtgagctggtgtataatccaggacagaacccaggtctcctgactcctggccttctatgccctctatcctatcatagataacattctccacagcctcacttcattccacctattctctgaaaatattccctgagagagaacagagagatttagataagagaatgaaattccagccttgactttcttctgtgcacctgatgggagggtaatgtctaatgtattatcaataacaataaaaataaagcaaatacc

SEQ ID NO: 255269 - DNA, 632 bp, Homo Sapiens
  misc_feature (308)..(321): n is a, c, g, or t
  misc_feature (351)..(368): n is a, c, g, or t
  misc_feature (520)..(520): n is a, c, g, or t
  misc_feature (537)..(537): n is a, c, g, or t
  misc_feature (607)..(607): n is a, c, g, or t
ctatattgaagccaatagaaaactactaaaaggctacatgcaattagtaaatttttaaatgtacattttttaaatgagtgtaggaaacataaaactttagtaggtgcatgcttactgggaaagcacgcatgcatgctaaaatgtcattgtacagtacatattgtttaccacttgttttttagtttaatattacattatggatatcttttcaagttacatataatacctatatgtagctgacatacatttcactgcaagggtattgaattattttgtaactggccttagagggtttttacattgctgcnnnnnnnnnnnnnnaaatactaccaactaaaagccataaactcnnnnnnnnnnnnnnnnnncttcactctgtactatgaaaaaagtttaagcatatataaaagtacaattgtactacttctaataaatccccacaaacctgtcacccagcttcaacattatcagattatggccaaacttgtttcacttacaactctactcatatcccatgctnttatatatatataattntaaagcatatctgagctagcatagtctttcaaatgtaaatatttcaatatttgctgtaaaagatatgaantttatgtcattactattttcatcct

SEQ ID NO: 255270 - DNA, 516 bp, Homo Sapiens
  misc_feature (24)..(24): n is a, c, g, or t
  misc_feature (50)..(50): n is a, c, g, or t
  misc_feature (105)..(105): n is a, c, g, or t
  misc_feature (175)..(175): n is a, c, g, or t
  misc_feature (181)..(181): n is a, c, g, or t
ggaaaagtagcccacctgacctgnatgtgtgttaatgcctgagatatctnttctgctcatcacctatcaaaaggtaaaagtccctacttgcttctcatttcatantgagtttcagagccataaggctgtcagtatcactttactctcatttcctaatattcttctggcccatgtntctgtnttcccatctaaataatatttcctaatttattctgtttctcaaatgctggccatgaaccatatgacccagtaatgggctgccacctacaatttcaaaaacacagagcaaggcttccccagcatacttcacctagggtttgtgatgaaagataatgttttaatggcacaaattgtactttgtaaggcagtgaaaaatgcaaatcaatactttcatatactgccttaccataaaggaacaagagtttacttatacatccttcatattaaattaaaaccaagatatcaattgaagaatgtgatcattatccttactgggcttaaaaatacatgtttttg

SEQ ID NO: 255271 - DNA, 1785 bp, Homo Sapiens
  misc_feature (84)..(103): n is a, c, g, or t
tgacttccagtccccgggcgcctcctggagagcaaggacgcgggggagcagagatgatccgagccgcgccgccgccgctgttcnnnnnnnnnnnnnnnnnnnncctagtgtcctgggcgtcccgaggcgaggcagcccccgaccaggacgagatccagcgcctccccgggctggccaagcagccgtctttccgccagtactccggctacctcaaaggctccggctccaagcacctccactactggtttgtggagtcccagaaggatcccgagaacagccctgtggtgctttggctcaatgggggtcccggctgcagctcactagatgggctcctcacagagcatggccccttcctggtccagccagatggtgtcaccctggagtacaacccctattcttggaatctgattgccaatgtgttatacctggagtccccagctggggtgggcttctcctactccgatgacaagttttatgcaactaatgacactgaggtcgcccagagcaattttgaggcccttcaagatttcttccgcctctttccggagtacaagaacaacaaacttttcctgaccggggagagctatgctggcatctacatccccaccctggccgtgctggtcatgcaggatcccagcatgaaccttcaggggctggctgtgggcaatggactctcctcctatgagcagaatgacaactccctggtctactttgcctactaccatggccttctggggaacaggctttggtcttctctccagacccactgctgctctcaaaacaagtgtaacttctatgacaacaaagacctggaatgcgtgaccaatcttcaggaagtggcccgcatcgtgggcaactctggcctcaacatctacaatctctatgccccgtgtgctggaggggtgcccagccattttaggtatgagaaggacactgttgtggtccaggatttgggcaacatcttcactcgcctgccactcaagcggatgtggcatcaggcactgctgcgctcaggggataaagtgcgcatggaccccccctgcaccaacacaacagctgcttccacctacctcaacaacccgtacgtgcggaaggccctcaacatcccggagcagctgccacaatgggacatgtgcaactttctggtaaacttacagtaccgccgtctctaccgaagcatgaactcccagtatctgaagctgcttagctcacagaaataccagatcctattatataatggagatgtagacatggcctgcaatttcatgggggatgagtggtttgtggattccctcaaccagaagatggaggtgcagcgccggccctggttagtgaagtacggggacagcggggagcagattgccggcttcgtgaaggagttctcccacatcgcctttctcacgatcaagggcgccggccacatggttcccaccgacaagcccctcgctgccttcaccatgttctcccgcttcctgaacaagcagccatactgatgaccacagcaaccagctccacggcctgatgcagcccctcccagcctctcccgctaggagagtcctcttctaagcaaagtgcccccggcaggccggggttctgccgccaggactgccccccttcccagagcccctgtacatcccagaactggggcccaggggtctcccatagaacagcgctggggggcaagttagcactttaattccccccaccagtcccctgaaatgggggtgggcctgggccccctttctctgctttaaagaatgccccttttaagaatggaactgaatt

SEQ ID NO: 255272 - DNA, 1406 bp, Homo Sapiens
  misc_feature (22)..(22): n is a, c, g, or t
  misc_feature (33)..(33): n is a, c, g, or t
  misc_feature (90)..(90): n is a, c, g, or t
  misc_feature (112)..(112): n is a, c, g, or t
  misc_feature (166)..(166): n is a, c, g, or t
  misc_feature (168)..(168): n is a, c, g, or t
  misc_feature (176)..(178): n is a, c, g, or t
  misc_feature (219)..(219): n is a, c, g, or t
cttcaggaagtgcccgcatcgnggccactctgncctccacatctacaatctctatgccccgtgtgctggagggtgcccagccattttagntatgagaagaaaactgttgtgntccaggatttgggcaacatcttaactcgcctgcaactcaagcgggtgtggcatnanggaatctnnngctcaggggataaagtgcgcatggaccccccctgcaccaanacaacagctgcttccacctacctcaacaacccgtacgtgcggaaggccctcaacatcccggagcagctgccacaatgggacatgtgcaactttctggtaaacttaaagtaccgccgtctctaccgaagcatgaactcccagtatctgaagctgcttagctcacagaaataccagatcctattatataatggagatgtagacatggcctgcaatttcatgggggatgagtggtttgtggattccctcaaccagaagatggaggtgcagcgccggccctggttagtgaagtacggggacagcggggagcagattgccggcttcgtgaaggagttctcccacatcgcctttctcacgatcaagggcgccggccacatggttcccaccgacaagcccctcgctgccttcaccatgttctcccgcttcctgaacaagcagccatactgatgaccacagcaaccagctccacggcctgatgcagcccctcccagcctctcccgctaggagagtcctcttctaagcaaagtgcccctgcaggccgggttctgccgccaggactgcccccttcccagagccctgtacatcccagactgggcccagggtctcccatagacagcctgggggcaagttagcactttattcccgcagcagttcctgaatggggtggcctggccccttctctgcttaaagaatgccctttatgatgcactgattccatcccaggaacccaacagagctcaggacagcccacagggaggtggtggacggactgtaattgatagattgattatggaattaaattgggtacagcttcaaatcccgtcttctctgtggcactgggggttagagggggcactacaggctatgaatgtgggaaaagaggggctgagaggggttggggtcctgaatgacagctgccagcttggggattgagggctcagacagctgctgtggacggtgtgggggcagtggacgccctgacatcagcaggccggttcttctcaatcacctctcgcagccctttggcaaagtggagatcagccccgatggtgaggaatcccgcatggttcgtcaccacctcatgcacaaagttgatgccctcaggtagtgggatctgcaccccacgccagggtccgctcatttgagcatggggcatcaccccaatctgcagcatggtcttcaaaggggcc

SEQ ID NO: 255273 - DNA, 388 bp, Homo Sapiens
  misc_feature (287)..(287): n is a, c, g, or t
accactcatcccccatgaaattgcaggccatgtctacatctccattatataataggatctggtatttctgtgagctaagcagcttcagatactgggagttcatgcttcggtaaaaaacggcggtactgtaagtttacccagaaagctgccgggaacatacgaagcaggcccccaggaagacccaggtcggggcgaaaagtagtcaacagatcagaccttctctcctatctccaagctccaacccagaaggcagacagctgggttccactcccctttttggggggggnccacctctctaggactgacttggatgttgggctggatgggctgggattcagacagcctcaactcaccaccatttagaaaggtacagggatgctgggcgtgg

SEQ ID NO: 255274 - DNA, 495 bp, Homo Sapiens
  misc_feature (76)..(76): n is a, c, g, or t
  misc_feature (267)..(267): n is a, c, g, or t
actgtcccagcacagtggttaaaaaccagggcctctggaagtcaacaggccccgggtgcaaatcccctgtaactancccacataaccttgggcaaaatttccttaaatatgaaccctcaggttctcccatctgtaaaatggggataaataatgaatatctaccttcaacagataaaacatttaagtagaatactggacatgcagtaaagtcgttagaaaacatgaaaattccctggttcgtgttatctagcttggccccttgaattntcctgaggggtaggccttgaactagggaagggctggggactgggcttgttccacacccctcatttttaccccatcctgctttagaaataccagatcctattatataatggagatgtagacatggcctgcaatttcatgggggatgagtggtttgtggattccctcaaccagaaggtaaggtagagattcctggccctgggataggggctgctgtggaggattgggagc

SEQ ID NO: 255275 - DNA, 1652 bp, Homo Sapiens
  misc_feature (89)..(102): n is a, c, g, or t
  misc_feature (113)..(129): n is a, c, g, or t
  misc_feature (131)..(132): n is a, c, g, or t
  misc_feature (134)..(134): n is a, c, g, or t
  misc_feature (137)..(139): n is a, c, g, or t
  misc_feature (146)..(162): n is a, c, g, or t
  misc_feature (164)..(174): n is a, c, g, or t
  misc_feature (176)..(180): n is a, c, g, or t
  misc_feature (182)..(185): n is a, c, g, or t
  misc_feature (187)..(199): n is a, c, g, or t
  misc_feature (201)..(232): n is a, c, g, or t
  misc_feature (234)..(235): n is a, c, g, or t
  misc_feature (242)..(250): n is a, c, g, or t
gtcccgggtttccttggaaaacagttttggcccttttcctttcccttggggggcccggcgcccaaaagaaagttttgaaaaaatttttnnnnnnnnnnnnnncgccccaaaannnnnnnnnnnnnnnnntnntngtnnnccccccnnnnnnnnnnnnnnnnngnnnnnnnnnnntnnnnngnnnngnnnnnnnnnnnnngnnnnnnnnnnnnnnnnnnnnnnnnnnnnnnnngnngaaagannnnnnnnnattctacaagaaattgataggtgcaatcctgttaaagaaatttcttttcaaaagtaaatgaaaaacccctctgaattatttatatattaattttttgaaaacaatagtcatagggcctgctttgtcctatttaactataaatgttacacatttacaaactgaaacaaaaatgcatagtacagagatttaaatgaaatcttcgaaagaataaatttgcttttcagtccactgtattttcaaaattgattatcaccaagcttggatgaaagctgtgaaccacaaaccatttgtttatttaatagaaaaaagaatgtgtagattattagcaaagtaatgccttaaaatgtatcttcacacagttgaaattttagtataaacttgtatatcaagttgctttccattatttattctactttaaaaatatatacaactatgatgttcaaatatgtattctgagccattatgttcaaacataaatatctgggaaattcaaactgctgcaacaagttaggaaaggattaaggaaaaatgatgagctacaaattatgtagttggaggaagaaaaaaatgttacttagcatttatgtctggataggtatgtattttctaatttacatacacatatccagttgagtatagacaaccatcaaaatgtaaccagttacacagagactagactaagccaacactattttctataacaggtaacagtagtgatttcaaaaattttaatatctcaatagtttcaccaaaaattatttgtggtaatatgctaatattctgaagttttgagaggcacagattaaatgagtgcactatctatgccaaactcagcaagtctataacttactgtttaattatggtgtaagtatctgaacacaatagcatagagaggcaaccagaaaaggacattttacatatgcccatgctgatcaatcacattaacatcagtgcttacaactttcaaatttaaatataaagggacacttgcaaagccgcaagacaacttcagtacaaaaacccaaattgataaatctgcaaaatcttaaacttcttaatccattgataaatattaaggagtagctggtcttcaaacaccgtaaaaagtaaaaggggtgaaaacatgttcaccctttgctatacggtggcatctgaaattatcaggcatgacaacttgaatatgttttgctcttccatgcaagaagtatatatatgcattttaagatagcttagaattaagagttaacttctagtcagtattggtaagtgactaggatggctatccaatcagtattctatggtatcacataccaaagtctctacaatatgacagtcttgtcttgttcagaactcatcacttttgggtagggaagagaggcacggcagaaaagcagttgcaatt

SEQ ID NO: 255276 - DNA, 1448 bp, Homo Sapiens
aggctggaccggtccggattcccgggatcggggattgaggaggcctcaggcgcctttgtctacctgcggcagccgtactatgccacgagggtgaatgcggctgacattgagaaccgagtgttggaactgaacaagaagcaggagtccgaggatacagccaaggctggcttctgggaggagtttgagagtttgcagaagcaggaggtgaagaacttgcaccagcgtctggaagggcagcggccagagaacaagggcaagaaccgctacaagaacattctcccctttgaccacagccgagtgatcctgcagggacgggacagtaacatccccgggtccgactacatcaatgccaactacatcaagaaccagctgctaggccctgatgagaacgctaagacctacatcgccagccagggctgtctggaggccacggtcaatgacttctggcagatggcgtggcaggagaacagccgtgtcatcgtcatgaccacccgagaggtggagaaaggccggaacaaatgcgtcccatactggcccgaggtgggcatgcagcgtgcttatgggccctactctgtgaccaactgcggggagcatgacacaaccgaatacaaactccgtaccttacaggtctccccgctggacaatggagacctgattcgggagatctggcattaccagtacctgagctggcccgaccatggggtccccagtgagcctgggggtgtcctcagcttcctggaccagatcaaccagcggcaggaaagtctgcctcacgcagggcccatcatcgtgcactgcagcgccggcatcggccgcacaggcaccatcattgtcatcgacatgctcatggagaacatctccaccaagggcctggactgtgacattgacatccagaagaccatccagatggtgcgggcgcagcgctcgggcatggtgcagacggaggcgcagtacaagttcatctacgtggccatcgcccagttcattgaaaccactaagaagaagctggaggtcctgcagtcgcagaagggccaggagtcggagtacgggaacatcacctatcccccagccatgaagaatgcccatgccaaggcctcccgcacctcgtccaaacacaaggaggatgtgtatgagaacctgcacactaagaacaagagggaggagaaagtgaagaagcagcggtcagcagacaaggagaagagcaagggttccctcaagaggaagtgagcggtgctgtcctcaggtggccatgcctcagccctgaccctgtggaagcatttcgcgatggacagactcacaacctgaacctaggagtgccccattcttttgtaatttaaatggctgcatcccccccacctctccctgaccctgtatatagcccagccaggccccaggcagggccaacccttctcctcttgtaaataaagccctgggatcactgtgaaaaa

SEQ ID NO: 255277 - DNA, 968 bp, Homo Sapiens
  misc_feature (822)..(822): n is a, c, g, or t
ggggagtgtctccaagcaagatggcggaggagccgcagtctgtgttgcagcttcctacttcaattgctgctggaggggaaggacttacggatgtctccccagaaacaaccaccccggagcccccgtcttccgctgcagtttccccgggaacagaggaacctgctggcgacaccaagaaaaaaattgacattttgctaaaggctgtgggagacactcctattatgaaaacaaagaagtgggcagtagagcgaacacgaaccatccaaggactcattgacttcatcaaaaagtttcttaaacttgtggcctcagaacagttgtttatttatgtgaatcagtcctttgctccttccccagaccaagaagttggaactctctatgagtgttttggcagtgatggtaaactggttttacattactgcaagtctcaggcgtggggatgaaccacaaagaaaatcaacttgctactacatgaaatggattttcacggaagagacagctctgaaaagttttgatgcttgtggcaagagacttaacagatgtgatctatttagtatgtgtctactctatgtttatgcataagaaaacatccatagcatgaatggactcagaaaaatgtgatttgtattaatgcaccagtcatcataaaagatggtcatgatagtacacccattgctcctacttgttactattattgctgcagatctgcctccaagggttgaaaagggagactaagactgtataaacatcttccttggcagttctcaaaatgactgaaattgttttcatgggaaaaagttaatatactaaaggggtcccctntttttttaaaggggtaacatttatccccaatggttaccctttttaatcccctttgaaccggcttggcttgaaaccctcaaaaaaatcccagtaagaaggggcatcccccccggcaaaaaaaggggttaggcggttttgggcttccc

SEQ ID NO: 255278 - DNA, 1360 bp, Homo Sapiens
tgggatgtgtcatgtcctatctcctctcctggacacattaaggggttgggacaagaagagactcctgtgagatcagcagacctcgtgtttaaggagagaatgcctgcctgcaacactcatggagagggacacttcctggccccacctgctaaatacctccaaactctgggcaggcgcctgcattctcaacacaggacttcccttaacagtttccggatcagtgaccaccaccacgttcaggtttctgaatgcagacccaccacgagggatggattccacccgcccgccctgctgcagatacatgcggcacagcaggcacgtgcctggagagaacagctcctgagcacagcacccttggagccctcaccccgctcacgatcctcaccagtgctgatgatgccgtcatgctgctggcctgagacagtatcccagctacaacaggacgacaccgggttcaggaatatgtggctatcaccttgagcactgacagtggccttccaggctagttgccttccaaacgcaggtagccgacctgcaggagggcctacaaacgggcccagcaagagctgggcaacagctggcttgtgaaatgagacaccttgaccaatatgcttttgggtggacggtctcctacatgttcagtggaggccaccaggagcatccatgaagcgggggaaggggtccacacccttacatggcaagttgatacgatggggtgccttggtggatggggccatggaggtccgtgaagctggaactgggcacacgccatcccagagggctcaggatgccccaggaaagaaagaagggcaacagactacacgattggacgtgtgtggttgactgggatgaagttggagggaggggcagggccttgcaggggattggtactgatcccagggaggaagtgttggggcttcatgaactaggatgaaaggaggcccctgagccatgacaaggggcacatccaggatttccgccaccctgaatttagtagagctagtaggccctggtcgtcactctgggcagggatgccgtcagccttgagggtcgccacccacctgtgtgttgccctctgtcctggcggggaaacatacaccccttgtctcaccaccaaccttgcttgtgtagtcagcagggctggccctgccccaaggactcactgcatgtacccggacccctaggcctggcctttgcagcatagttgggagcttctggattccatctgcacctgtgagccccatgctggctgtgcactgcgcgggcctgagactgctggatacaatgttgggcaacaactcagccagcctgatggcagcctcagaggcttactctaacccatcccagaataaatggagac

SEQ ID NO: 255279 - DNA, 733 bp, Homo Sapiens
ggggctgctgtgttggaactgccagctagactgctcaccaaaatgggaggcagcctctgctgctgtggtgaaggtgaagacacactcagcgattcagctctacagtatgcactctgggatctcccatttgctaaggaaggatcttagctttgagaaaggtgtcaagcctgtggcagcagagcttcctggggagtcctcagagcaagtcattgccattgtcgaagtgtcttctaggctttattttggggccattacctcgagcactgtttcttgtctggtttcctaatgtcagcaactgaagaaaagacctgtatacacaggacacagcatggtctgacgctcacagtgttttcctttctctctgcagagggattcagcactttgggcaagtggttgcacagaggatcccgtggaagaattcatatatgaatcagatgagaatgccccaggaccatcgtaggtcaggccacctgcttttgtcaaagaaaaaagataacccctatttgaattaaaatatgagaatctgaccatatgtatcataggtgacttacacagtgtccttggtaaggagaatttagagtgagagtctgttccccactgaggtttgatttaagatggcagaagaaaatgacatcatcagccactcagcagcttgattctctccttggggcaaaatcacctaaatgccaagcaacatggacttacaggaaacatccctcaataaaaacttaag

SEQ ID NO: 255280 - DNA, 503 bp, Homo Sapiens
  misc_feature (323)..(371): n is a, c, g, or t
atgtgaaagggtgttgaagttaaatactcctgtgcataatgaagtgatcttgtaaattgtaatttaatcttatctattctcatgtccaaacactcaagagaaaactataaggaactatatttacaaaataaatcataactttacaaaaagggcataaaatagcattttggcaaaaacttaacttaggtaatctgaaggtatctaactgtatcaattttaaaaatataaaaatatagctttatgacgaaattttttctgattaaaaaagtaaaacttcatttgctggttataagacaatatgttcatttaagaaaaaagtggannnnnnnnnnnnnnnnnnnnnnnnnnnnnnnnnnnnnnnnnnnnnnnnnatttagccgggcgtggtggtcttagtttcaagtgcggatttgttgattgtttttagcagattggaacttaaatcgaggtgcttcagactactgacttcagaaagaaagctattaggtaggtggctcgtgccg

SEQ ID NO: 255281 - DNA, 821 bp, Homo Sapiens
ccacagtgcacctctccagtgccccccttgcaggtgcagacagcacacttaattaagccaaaggggggcacaacggggtgccaccgcgtacccgctgcccgccagctccggtcaccatcaaaatagcagccctctcctgggtcccggctccttggcagccctggcaagtctctgacatcttgtttctcagggcaaacagggcagcactggtcgggagcctgcaccgggtctgggcagctggccggtgggcacaccaccgggtcacagatcaccgttcgtctctggcaggtgcagagtgagcagagcgggtcgtagttgggcgcccagcgagccccgtgggggcgctgctgcccctcgaagaagcatgtgttggggtctcgggcacgcccaggaccaccaggtttggcgggcgctagggccgggagaccaggcaccacaggcggcgcagcagaggctgtatccggagcccccagcgcccgcaccccctcggccccggccgcctccaggcgcagtccgccaacctcacattggttggctatgtgcacctgccctcggagctcccctctggggctacccttggtggtgatcatcagggaggccatgccttttgccaggtgccgcagcagttccggctccaggtccttcaccacaccctgggcctctgagccatagaatcccttcagcagccgccgaggcctggcgttccaggaggcccaaggaggtgggcagtgacagtgccttgttctgagccaccaagcccagcctcgtgccgattcgccacccagcctcgctaccttaaaccgttagattactgccgtgct

SEQ ID NO: 255282 - DNA, 743 bp, Homo Sapiens
  misc_feature (267)..(316): n is a, c, g, or t
actgcgtctggccatggaaaatatttattgagcacaattatgtgagagcatcatgctgagctttgaagatacagtggtgagcaaacatatatcctggcttcatgaagattatactctagttaacatgagcaacaaaataaaataatcacacaaaatatataggttcaagctgaaatgagtggctgcaccagattctatgagataagaaaggaagaaggacatttttcaccaagttcaaagactgggatacaaaggaatttgtcctgnnnnnnnnnnnnnnnnnnnnnnnnnnnnnnnnnnnnnnnnnnnnnnnnnntgacagtagaacataacggggccagatcaaaaatgctgacaggttcccaaaagaataaaatgacggtaggacatgacggggcccagatcccaaaatgctgacaggttcaaacaaaattggaattgaaaatcagagtgcgttcaagagtatcaaacaatactatcttgttacttgcttattaccttagtagactggaagcaacacttcacacaaaaaaagggtttggatgtaatttcggataagaagagatgtttctgtaaagtctttcctgagaagcatattatttgagaaaaacacatatttctgtttttagtatttcactttgtataatgtcttaatttttgaagagctggtatattcctatgattcattaatgaaagttctataagatataaaatatacaatgaggagatctcctcttctgtat

SEQ ID NO: 255283 - DNA, 1562 bp, Homo Sapiens
  misc_feature (43)..(43): n is a, c, g, or t
  misc_feature (1289)..(1308): n is a, c, g, or t
ccgcgcccatggcgccgcccgcctctgcgagccactgcccgcngggcatgtccccaccggatggccccccccgcgcttttcccgcccgccggggcccggtggtgcccgccccgggccccgggctcgcagtccggggtccggcgggaggttcggcccagcccaatcccaaggcttcggggtcggggagcaacggcattgggtaagggcgcggggcattcacaaacccccgtgagagatttccccttccccatgtccacgaactgaacagcaatttcctccccacagcggctctgagcctccttggtgctggcacccaggtggggacagctgatgacattctcatggtccaccaaggcccggtcccgtgccggcttcttccgtaaacacgtccagtgcagccccggcacactggccagactgcagggcccggagcagggcgccttcgtccacgatccctccacgggcacagttcaccacacgcacccccttcttgcactgggcaaaggtgttgtcattcagcaagcctgtcgtggagggcaggagaggagtgtgcacagtgatgaaatcacagagaggccagatctcctccaggggcagctgctgaacaccaaaggaggccgagacctctggggaaatgatggggtcataccctatagtcttcatcccaaaggactgcatccgggtagctacctctctcccaatcctgcccaggccaagaattcccagggtctttccattcagctctgttcccatgaacttcttccgctcccatttgccgtccttcatcgaagccgtcgcctggggaatctgcctggccaggcacatgatcattccacaagtgagttctgcggcactgaggctgttcccattgggggtgttcataaccaagatgcccttccttgttgcggcctccagatccacattgtccacacctgtgccagccctgcccaccacctggagtttctcagctgcgttgatgacatcagcggtcaccttggtggcagagcgaacaataaggccttcacagtcctgcagctccgctatcagctcctctttgctaaggttctgcttttccaccacctgcagccctccatcttgcaagatcttccggcagcaagggtccaggctgtcactgatgagcactttccgcagatttgcaaaagccattgctggagttggcctcggaatcggccgctgtgagtagaagtacctaagccaagaagctgcggttcggcctggcgcgctagagtaactgggcagtattctccagctcccgctccccagtcatnnnnnnnnnnnnnnnnnnnnacagtctccttttgattggacggaaatactcaaactctccgcgactccgcctcctcctcgcggctctgaggttgccaaatccctgcccgctttattatcctcccgcgatgaatttctccatctcagccaaagctcttacctacacctggtgagcatatagcacaatttacgctgactagctgatgcatatctgaaatgaacggagaaatacacctcatcctgagagaattttttttgagtgggttgtgcggcct

SEQ ID NO: 255284 - DNA, 939 bp, Homo Sapiens
gtagcgaggctgggtggcgaattcggcacgaggatagggtatgaccccatcatttccccagaggtctcggcctcctttggtgttcagcagctgcccctggaggagatctggcctctctgtgatttcatcactgtgcacactcctctcctgccctccacgacaggcttgctgaatgacaacacctttgcccagtgcaagaagggggtgcgtgtggtgaactgtgcccgtggagggatcgtggacgaaggcgccctgctccgggccctgcagtctggccagtgtgccggggctgcactggacgtgtttacggaagagccgccacgggaccgggccttggtggaccatgagaatgtcatcagctgtccccacctgggtgccagcaccaaggaggctcagagccgctgtggggaggaaattgctgttcagttcgtggacatggtgaaggggaaatctctcacgggggttgcctcctggcagaggcaggcgtgcggctgctgtcctaccagacttcactggtgtcagatggggagacctggcacgtcatgggcatctcctccttgctgcccagcctggaagcgtggaagcagcatgtgactgaagccttccagttccacttctaaccttggagctcactggtccctgcctctggggcttttctgaagaaacccacccactgtgatcaatagggagagaaaatccacattcttgggctgaacgcgggcctctgacactgcttacactgcactctgaccctgtagtacagcaataaccgtctaataaggaagctacccccgtaggacctcatcgtctgacaatcatcccaggcccacctccaggcttttttgccgggggccggagaaaaaggaattgaaatggcccgtggtcctaacttgtttcctgaccccctttttgtgtacaaaaggggaaattttgcgggca

SEQ ID NO: 255285 - DNA, 696 bp, Homo Sapiens
  misc_feature (14)..(14): n is a, c, g, or t
agctgaagaatgcngggaactgcctaagccccgcagtcattgtcggcctcctgaaagaggcttccaagcaggcggatgtgaacttggtgaacgctaagctgctggtgaaagaggctggcctcaatgtcaccacctcccacagccctgctgcaccaggggagcaaggcttcggggaatgcctcctggccgtggccctggcaggcgccccttaccaggctgtgggcttggtccaaggcactacaactgtactgcaggggctcaatggagctgtcttcaggccagaagtgcctctccgcagggacctgcccctgctcctatttccggactcagacctctgaccctgcaatgctgcctaccatgattggcctcctggcagaggcaggcgtgcggctgctgtcctaccagacttcactggtgtcagatggggagacctggcacgtcatgggcatctcctccttgctgcccagcctggaagcgtggaagcagcatgtgactgaagccttccagttccacttctaaccttggagctcactggtccctgcctctggggcttttctgaagaaacccacccactgtgatcaatagggagagaaaatccacattcttgggctgaacgcgggcctctgacactgcttacactgcactctgaccctgtagtacagcaataaccgtctaataaagagcctacccccctcg

SEQ ID NO: 255286 - DNA, 416 bp, Homo Sapiens
  misc_feature (342)..(342): n is a, c, g, or t
  misc_feature (396)..(396): n is a, c, g, or t
tttcggcacaggggaagcagaaagaccaattaggaggccccggaactaattgatacggggtgcatgcgaggggggcgcgctggcctgggcgacagccttttttccatggaggttgccctagagacctcaattttctctctctcgccttacctgcagctccgctatcagctcctctttgctaaggttctgcttttccaccacctgcagccctccatcttgcaagatcttccgggcagcaagggtccagggctgttcactgatgaggcactttccgcagatttggcaaaagccattgctgggagttgggcctccggaattcgggccgctgtggagtaggaagtnacctaaaggccaaggaaggttggcggtttcggcctgggcgcgcttagagtaaantggggcagtatttttcgaag

SEQ ID NO: 255287 - DNA, 647 bp, Homo Sapiens
  misc_feature (109)..(167): n is a, c, g, or t
acgtgtgtattgggaaatggtggtgcccatctctggcccagtccagacagcttccccctaggaagtgagccgagttcacatggcgtgtcagagttaaaaccaagcaccnnnnnnnnnnnnnnnnnnnnnnnnnnnnnnnnnnnnnnnnnnnnnnnnnnnnnnnnnnngggacacacaggtcccctgcttcctcttctgtttgttcattaatcaggctgatgtcaggtggcacaaggggcattggacatcatttcatggctcaagatcattgtccctaagtctgttttcacaggctgtccccttaagagctgggctgccgcggccataccctgcagtccatgtcaccctccagccattgctctcctgtgggtgtgcccggcagagcctccagttctgtgcctgccccctggaatgcccctaaagccctcccagccccttacccagccttcaaggccacacctgtgcccctccttcatgcagcccccagatgggatcaggaggcagggtgtgcctctctgtcccttaggggctccctggtcatctctgtgcatgtctagatgccactgagatggactggccttgatggccgggactctatgtcttagcatccagcatggctagctgaagtcagtggctgcagagtgtgg

SEQ ID NO: 255288 - DNA, 585 bp, Homo Sapiens
ccaaaatgctgggattacaggcatgagccaccatgcctggccaacaccaacctttagttacttgctgaatacacaggattaaggaggaagagaaagtatcaaggatgactcccaggttcctagcttggtggtcccagtaattgagagagagaatgcagcaggaagagcagctctagggggaacaggatgagtatctccacatgatgggttggaggtacctgtgagtcacatccaggtggatgtgtcctgtgggcagtgggacgcgagtctgaagctcaggcaagaggctagagttacatctttggagtcatcagcctaatggaggactgtggcatccaggtgccaaaagctagggaaacggctctggagagagaggggctttcttaattgacctgtatgctttgaagctctatagagacacaatcttatcccttcaggcctgtattttcttgggccactaagatgtggttacatattttctctcacatctcctagaacgtttgcaaaacaattcccagtcctatgatcatttctcccttcttctgagaactaattatatatggcacttaatatctattcacatgt

SEQ ID NO: 255289 - DNA, 580 bp, Homo Sapiens
cacccgctgagccacaacaagcaacttattaccccgtggtctgagaccaccgggtgcctgcttctcaccctcagatcaagttgactagagctgagatgtgcagcagaagggatgctcagagcaaagtagaaatagaaataaagcaaatcccaagggtgtagatgtgctcctcgggagaatacggagattccagattgtatccattggcagaaaagtctgagaagtggttcattgctttcctacctttgtttactttcaggtctaaaacacagcatttacatcccgtagtcttcatagtggtagtgtagagataggataggttgagggacgaaattatactttttaaaactcttcagaattctttagtgagaaggttgagattcaatttaattgaaatcaacaatcatgttccctttcagatgccatgtaagagtctggagattcaaagatcatggggatcgattccctgcttctttagcattaattgtggggtgggggttgggcagctaattctacctgaaagggtcaaggaaggcttcaaagaggaggtgacatttgaggtaggtcttcaagaatgaac

SEQ ID NO: 255290 - DNA, 3064 bp, Homo Sapiens
  misc_feature (2401)..(2401): n is a, c, g, or t
  misc_feature (2403)..(2501): n is a, c, g, or t
  misc_feature (2590)..(2598): n is a, c, g, or t
  misc_feature (2848)..(2848): n is a, c, g, or t
  misc_feature (2887)..(2887): n is a, c, g, or t
  misc_feature (2889)..(2889): n is a, c, g, or t
  misc_feature (2975)..(2975): n is a, c, g, or t
  misc_feature (2982)..(2982): n is a, c, g, or t
  misc_feature (3001)..(3001): n is a, c, g, or t
  misc_feature (3029)..(3029): n is a, c, g, or t
  misc_feature (3038)..(3038): n is a, c, g, or t
atttccggagcgccagggaagagggaagtcgtggtggtcgcgagagagccggaaagatggtggttaccagatctgcacgggctaaggccagcatccaagccgcgtcggctgaaagttccgggcaaaagagttttgctgctaatgggattcaagcgcatccagaaagtagtactggatctgatgcccgaactactgctgaatcacagaccactgggaagcaaagtttaatccctagaactcctaaagctagaaagaggaagagcagaactacaggctcactaccaaaggggactgaaccatctacggatggagagacctctgaggcagagtcaaattattctgtgtctgagcaccatgataccattttaagggtaactaggagaaggcagatcttaattgcatgctccccagtgtccagtgttaggaaaaagccgaaagtaactccaacaaaggagtcttacactgaagaaatagtgtctgaagcagaatctcatgtttcaggtatttctagaattgtgcttcccacagaaaaaactacaggagccagaagaagtaaggctaaatctctgacagatccaagccaagaatctcatacagaagctatatctgatgctgagacatcaagctcagacatttcattctctggaattgcaactagaagaaccaggagtatgcagaggaaattaaaggcacaaactggaaaagaaagatagtaagaatggtaccaggaaatgagaaacacgatcgtgggtacacctgtgaattcagaggattcagataccagacaaacttcccatttacaagcaagatctctttctgagataaataagccaaatttctataataatgactttgatgatgatttctcccacagaagttcagaaaatatattaacagtgcacgaacaggccaatgttgaatctcttaaagaaaaaaaacagaattgtaaggatttggatgaagatgccaatggaataacagatgaggggaaagaaattaatgagaaaagttctcagctgaagaatctttctgaacttcaggacactagccttcaacagttagtttctcagagacattcaaccccccaaaataaaaatgctgtatcagtgcactctaatctgaactctgaggctgtaatgaaatcattaactcaaacatttgcaactgtggaagtaggcagatggaataacaacaaaaagagccccataaaagcaagtgacttgacaaagtttggtgattgtggtggtagtgatgatgaagaagagtccacagttataagtgtcagtgaagacatgaacagtgaagggaatgtagattttgaatgtgataccaaactatacacgtctgcgcccaacacatctcagggtaaagataattctgtcttactagttctcagcagtgatgaaagccaacagtctgaaaacagtgagaatgaagaggatactttatgttttgttgaaaatagtggccaaagggagtcattaagtggagacacaggaagtctgtcatgtgacaatgcattgcttgtaattgacacaactcctggaatgagtgctgataaaaatttttacttggaagaggaagacaaggcaagtgaggttgccattgaggaagaaaaagaagaggaagaggatgaaaaaagtgaagaagattcatcagaccatgacgaaaatgaagatgagtttagtgatgaagaagacttcctaaatagcacaaaggctaaacttctgaagttgacaagcagcagcatagaccctggtctgagtatcaagcagttgggtggtttgtatattaattttaatgcagataaactacagtctaacaagagaaccctaacacagatcaaggagaaaaagaaaaatgagcttctgcagaaagccgtcattacacctgattttgaaaaaaaccactgtgttccaccatatagtgaatcaaagtatcaacttcagaaaaaacgcagaaaagaacgacaaaaaacagcaggggatggctggtttggtatgaaagctccagaaatgacaaatgaactgaaaaatgatctcaaagcactgaagatgagagccagcatggacccgaaaagattttacaagaaaaatgatagagatggcttccccaagtacttccagattggaaccattgttgacaatccagctgatttctaccattcacgaattcccaagaagcaaaggaaaagaactattgtggaagaactgctggctgattctgaattcagaagatacaaccgaaggaagtactcagagatcatggctgaaaaagcagcaaatgcagcaggaaaaaagttccgaaagaagaagaaatttcgcaattaagatttaccaagcaaactgcaacattttacattgctcctttatttacttattaaagacgtttggaaaactancnnnnnnnnnnnnnnnnnnnnnnnnnnnnnnnnnnnnnnnnnnnnnnnnnnnnnnnnnnnnnnnnnnnnnnnnnnnnnnnnnnnnnnnnnnnnnnnnnnnttgtctaaaccatcccatcgggccccaagaaactgttccgaaaccctttccctgcgaaaaacttgttcacaaacgaacgctgggcgcgnnnnnnnnngattgtaatcgccaaacccttgcccaggccccgtggacaaaaacccccgcggagaaaaaaagcgcgctgtggggcccctaaacaattttaaagggccacccgcgggcgcgcagagtccgagagacaaacccccgggttctatactgacccctcgccgcccactgtgctttgtcttttcaacgaaagggtggggcccgccgcccctgccaaaatccataaaccccacccgggagggccccctacccttccnattacacaaagggccacttgagaaacgcctcggccgacnantccgcgacactaaaaaacatcgacacacgcgcacacaaagcggagcgccaacacataagaaaacaccccgccctcgaactaaaagnttccccnagtggggcgaacagagganaaataacaaacaaacgggctcaaaaatntcgaccccncgagcgataatcacacctctcccccg

SEQ ID NO: 255291 - DNA, 765 bp, Homo Sapiens
  misc_feature (40)..(40): n is a, c, g, or t
aaatgagataacacacagcaggaccaagctgggtgcccanattgcagtaggtcctcaatcaatgttttttaaagacagaaccagtgagtaatgaacactggccttgcctaaaaactgtttcctacatcacctccccacacccaggtacttcaaacacagtgatggcagcttctccaacaagcagtggatcttcttctggtttggcctggctgatatccgggactcctatgagttggtcaaccacgccaagggactgccagactcctttcacaagccagcttctgacccaggcagctgaccctcaccatggacactacaggccctggaatggccagggtggaccaaaagccatgccagctgggcatgaccccaggcagccagccacaggctgaagggggcttgttggctgagtgatctgcagaggagaaagcagccccagctctgcccagaggaggcgctgaagtgggacaagcacaggaaagaaggggaccagtctaggaccccaacttgactcactctaaagctacaaccaaatggccttcgattttcaacctggggattaggggaggggagggtgccttccagggctctactcaggactaaccctaagggtgagctagtttctgtgcctctgtgctatgttttgaggctcccttacccaaaataatacccctgcctgcgtgatattctaccattcattttaattcctttgggtcttgcagtttttcaggaggccttgattaaaatgcaaatacttgtctgaga

SEQ ID NO: 255292 - DNA, 479 bp, Homo Sapiens
gtgactaggaagagccgagactgcgaaggagaacgcagcaagcccaggcggcggtggaaaggctggaggacacacctaaacatgtggaatcccaatgccggcccctgtcctcctcccccaggagctccccatggcaatccagctttccccccaggtgggccccctcatcctgtgccacagccagggtatccaggatgccaaccgttgggtccctaccctcctccatacccaccgcctgcccctggaatccctcctgtgaatcccttggctcctggcatggttggaccagcagtgatagtagacaagaagatgcagaagaaaatgaagaaagctcataaaaagatgcacaagcaccaaaagcaccacaagtaccacaagcatggcaagcattcctcctcttcctcctcctcttccagcagtgattctgactgaatacaggccctggacccttccctcaagtctcaccagttctgctctcc

SEQ ID NO: 255293 - DNA, 964 bp, Homo Sapiens
  misc_feature (928)..(928): n is a, c, g, or t
tttcaaacccccacccgaacccagcccaaatagatatcaaacaaacccgcgaggcctgggtggcgaattcggcacgaggccagctttccccccaggtgggccccctcatcctgtgccacagccagggtatccaggatgccaaccgttgggtccctaccctcctccatacccaccgcctgcccctggaatccctcctgtgaatcccttggctcctggcatggttggaccagcagtgatagtagacaagaagatgcagaagaaaatgaagaaagctcataaaaagatgcacaagcaccaaaagcaccacaagtaccacaagcatggcaagcattcctcctcttcctcctcctcttccagcagtgattctgactgaatacaggccctggacccttccctcaagtctcaccagttctgctctcccatcaagcttcagatgccatgttgtactgggggaatgtagcccttgtgctccccaccccctacctccacctgagcctcaccctgctgttgagccctgagtggctaggggaaatgggaagaggattgccatggcctggccatcttgttgctgcttggttagatcatatagctaatgaattaggcaggggagctattttttgaagatgatgaactaaatgttgaagacaagtttgagatctgtaaaatgtgattttttacttccacttataatacttgtgattggggaggtttgtggaaattcaattatgatgaaaaacctatcttttttgtaatgttggcatacttgggggaatttagtggcaaatacattccccagcaggcctttttgttggttgcactaactgcaaggtttgctggggaagtaaagtcccattttggttgatgagcttttgactggggggttttgggaaccctaacctctcctcccttagccccaatatggctgtcntggggtcctatttcaaataaagttatttctccctgg

SEQ ID NO: 255294 - DNA, 430 bp, Homo Sapiens
aaatggggaagaggatttcccatggccctggcccatcttgttgctgcttggttagatcatatagctaaggaattaggcaggggagctattttttgaagatgatgaactaaatgttgaagacaagtttgagatctgtaaaatgtgattttttacttccacttataatacttgtgattggggaggtttgtggaaattcaattatgatgaaaaacctatcttttttgtaatgttggcatacttggggaatttagtggcaaatacattccccagcaggccttttgttggttgcactaactgcaaggttgctgggaagtagagtccatttggttgatgagctttgactgcggttttggaaccttacctctcctccttagcccaatatgctgtcttgggtcctattcaaataaagttatttctcctggtctcagaa

SEQ ID NO: 255295 - DNA, 756 bp, Homo Sapiens
ggggaaggagaacgcagcaagcccaggcggcggtggaaaggtgatggggctggaggacacacctaaacatgtggaatcccaatgccgggcagccagggccaaatccatatccccccaatattgggtgccctggaggttccaatcctgcccacccaccacctattaatccaccctttcccccaggcccctgtcctcctcccccaggagctccccatggcaatccagctttccccccaggtgggccccctcatcctgtgccacagccagggtatccaggatgccaaccgttgggtccctaccctcctccatacccaccgcctgcccctggaatccctcctgtgaatcccttggctcctggcatggttggaccagcagtgatagtagacaagaagatgcagaagaaaatgaagaaagctcataaaaagatgcacaagcaccaaaagcaccacaagtaccacaagcatggcaagcattcctcctcttcctcctcctcttccagcagtgattctgactgaatacaggccctggacccttccctcaagtctcaccagttctgctctcccatcaagcttcagatgccatgttgtactgggggaatgtagcccttgtgctccccaccccctacctccacctgagcctcaccctgctgttgagcccctgagtggctagggggaaatgggaaagaaggattgcccatggccctggcccatccttggttggctgccttgggttaggatccatattagcctaattgat

SEQ ID NO: 255296 - DNA, 797 bp, Homo Sapiens; identical to SEQ ID NO: 74207
  misc_feature (779)..(779): n is a, c, g, or t

SEQ ID NO: 255297 - DNA, 464 bp, Homo Sapiens; identical to SEQ ID NO: 168486
  misc_feature (292)..(292): n is a, c, g, or t

SEQ ID NO: 255298 - DNA, 1218 bp, Homo Sapiens
  misc_feature (1100)..(1110): n is a, c, g, or t
  misc_feature (1112)..(1115): n is a, c, g, or t
  misc_feature (1117)..(1125): n is a, c, g, or t
ggaagagccgagactgcgaaggagaacgcagcaagcccaggcggcggtggaaaggctggaggacacacctaaacatgtggaatcccaatgccgggcagccagggccaaatccatatccccccaatattgggtgccctggaggttccaatcctgcccacccaccacctattaatccaccctttcccccaggcccctgtcctcctcccccaggagctccccatggcaatccagctttccccccaggtgggccccctcatcctgtgccacagccagggtatccaggatgccaaccgttgggtccctaccctcctccatacccaccgcctgcccctggaatccctcctgtgaatcccttggctcctggcatggttggaccagcagtgatagtagacaagaagatgcagaagaaaatgaagaaagctcataaaaagatgcacaagcaccaaaagcaccacaagtaccacaagcatggcaagcattcctcctcttcctcctcctcttccagcagtgattctgactgaatacaggccctggacccttccctcaagtctcaccagttctgctctcccatcaagcttcagatgccatgttgtactgggggaatgtagcccttgtgctccccaccccctacctccacctgagcctcaccctgctgttgagccctgagtggctaggggaaatgggaagaggattgccatggcctggccatcttgttgctgcttggttagatcatatagctaatgaattaggcaggggagctattttttgaagatgatgaactaaatgttgaagacaagtttgagatctgtaaaatgtgattttttacttccacttataatacttgtgattggggaggtttgtggaaattcaattatgatgaaaaacctatcttttttgtaatgttggcatacttggggaatttagtggcaaatacattccccagcaggccttttgttggttgcactaactgcaaggttgctgggaagtagagtccatttggttgatgagctttgactgcgggttttggaaccttacctctcctccttagccccatatgctgtcttggggtcctattcaaataaaggtatttctcctgggtnnnnnnnnnnnannnnannnnnnnnnaaaacctgttcgggcgccctcgggccctcgaaaaagacttcctagaaccattccttttgggggcggggggccccaagtagggaaagggaaccc

SEQ ID NO: 255299 - DNA, 820 bp, Homo Sapiens; identical to SEQ ID NO: 74206
  misc_feature (731)..(731): n is a, c, g, or t

SEQ ID NO: 255300 - DNA, 286 bp, Homo Sapiens
  misc_feature (35)..(35): n is a, c, g, or t
ccataatccccgggaaaggactcctgaattgcctnaccctggttcaagatgactatatctggacccaatcagctaaggacaggaagttaggtctcagtgggcagacatggctgtttcccactgtggcccacgtgaatggaagggagaagaagttcttacaaaaggagtggatgtcagagaggcaaatgggcaggaataaaagagatttgtttctgctacaacatagcaacattgtagcagagtatagcacaggctgtgaaaccagactcctggggtcaagagtgtg

SEQ ID NO: 255301 - DNA, 1101 bp, Homo Sapiens
  misc_feature (104)..(104): n is a, c, g, or t
  misc_feature (417)..(448): n is a, c, g, or t
  misc_feature (843)..(843): n is a, c, g, or t
  misc_feature (912)..(912): n is a, c, g, or t
  misc_feature (1014)..(1014): n is a, c, g, or t
  misc_feature (1024)..(1024): n is a, c, g, or t
  misc_feature (1031)..(1031): n is a, c, g, or t
  misc_feature (1049)..(1049): n is a, c, g, or t
gcgccgcggggaggggtggccccgccgaggcttcaggggccccctccccaccaaagggttcacctcacacttgaatgtacaacccaccccactgtcgggtaagncctccgtcctaggcccctgcctcttgctgctgtcctgtccccgagcccctgcagataacccccccgtcccccactcaagagttagagcaggtggctgcaagccttgggcccggagggaagccactgccggccacttggggcagacacagacacctcaaggatctgtcacggaaggcgtcctttttccttgtagctaacgttaggcctgagtagctcccctccatccttgtagacgctccagtccctactactgtgacggcatttccatccctcccctgcccgggaagggaccttgcagggacctctccctccnnnnnnnnnnnnnnnnnnnnnnnnnnnnnnnntaaatgaggaaacgtgttgcagcacaggcagttttcttctccttctgctcccctgtttctcatacccccaaactcagatgctggagctcaggcccgccgtgtgtgcacccaggcaggagcgggcgctgtccaggctgggccgcccccttggctctccctcctgttccaggggagccataggagggaaagcaggtggcccgggggggatatgggggccccagcctgtcccaaagctccctgctcggctgcccctcgcccgcctttatataaattctctgaatcacctttgcatagaaaataaaagtgtttgctttgtaagaaaagtctggaaagtagcagaatcatctcaaggtgtcaaaggagccttcagtcatcgtctggggggcaggacaggnagaggggttggtccacttaggtgttgcctgtgggacccgggccttcctaggagggggccagggactgcngcaaggtaggggacagcgcgatgtttgagggcagagatgtgatttgggggtggaggagccacgtttctccggaggcaagcgactggaagaagtacaacttanagcccatggncaggagngcttggagcagcacgacnacggacagcagcactgttggcaccaacctggtttcctaaggaccacgggcag

SEQ ID NO: 255302 - DNA, 863 bp, Homo Sapiens
tttttatcctttcctcggttaccgcgcgtgctccaggacaactccccgaggagtgggtggcgaattccgcacgaggctcttccaacttcaaaaaagccaagagagtcaaaacagaggatgaaaaagagaaagacccagaggagaagaaagaagtcaccgaagaggagaaaaccaaggaggagaagccagaagccaaaggggtcaaggaggaggtcaagttggcctgaatggacctctccagctctggcttcctgctgagtccctcacgtttcttccccaacccctcagattttatattttctatttctctgtgtatttatataaaaatttattaaatataaatatccccagggacagaaaccaaggccccgagctcagggcagctgtgctgggtgagctcttccaggagccaccttgccacccattcttcccgttcttaactttgaaccataaagggtgccaggtctgggtgaaagggatacttttatgcaaccataagacaaactcctgaaatgccaagtgcctgcttagtagctttggaaaggtgcccttattgaacattctagaaggggtggctgggtcttcaaggatctcctgtttttttcaggctcctaaagtaacatcagccatttttagattggttctgttttcgtaccttcccactggcctcaagtgagccaagaaacactgcctgccctctgtctgtcttctcctaattctgcaggtggaggttgctagtctagtttcctttttgagatactattttcatttttgtgagcctctttgtaataaaatggtacatttctatgaaacaaatccaaaggaggaaaacttgacaaatagaattttttttggacaaattt

SEQ ID NO: 255303 - DNA, 923 bp, Homo Sapiens
gatgcaatcattactgatcctccatatggtatcagagaatctacaagaagaacaggttcacagaaggagataccaaaggggatagaaaaatgggaaaaatgtccagaaagccatgttcctgtttccttgagttatcatcctgagtgatatgtttcttgacctgttaaacttcgcagctgagaccctcgttttaggtggaagactagtctattggttaccggtgtatacgccagaatacactgaagagaatgtgccttggcacccttgcctggaactcgttagcaactgcgagcagaagctttccagtcacacatcaaggcgcttgatcacaatggaaaaggtgaagaaatttgagaatcgggaccagtattcacatctgctaagtgatcattttctgccataccaaggtcataattccttccgtgagaaatattttagtggggtaacaaaaagaattgccaaggaagaaaaatccacccaggaatgaaaattaagattttgacaatgaagaaagaataagaatttgatttaaaaagacatctggatgtgaactttcatgtatgatccagaaaataggtacggttttaaaatattttatatagaaaagctacaaagtaaattgagcaatgcttttaaagttatctttgttttatagacttttttgttgtatgtattacagtctttataatcttatttaatgtatatttgtactttcaagtactgatggagatagactcaaaacagttatttttttacaattaatctacaaagggaattaatattgttgacttttaaaacatctgctggatatattatatgcaattaatagtagttaagaatttattcatttggtagatatgtttatttggtttttggttgtcatcgatttacattgccactaataaaccatattgagaatttct

SEQ ID NO: 255304 - DNA, 887 bp, Homo Sapiens
  misc_feature (490)..(490): n is a, c, g, or t
  misc_feature (589)..(589): n is a, c, g, or t
ggcggctgcagtagcagcagcagctactgcagcttccctccctccttgtcgtcctcctcttcgtcctccccaacctctggctccccacgaggtagccactctagcgccctggagaggctagccaagcttcacctcctcaggcaagagatggttaacctcagagccacagacgtcaggctcatgcgccagttgcttgtaatcaatgagagcatcgagtccatcaagtggatgatcgaagagccaccattaccagcagaggcagcagcctcagtggcagcctgtgcagtttgttggagagtcagagcacctccttacgtggcagctacaacagcctacacgatggcagtgatgggctggatggcatttccgtgggaagttatctggacacgttggcggatgatgtcccaggccatcagaccccttcagacttggaccaattcagtgacagctccctcatagaggactcacaggcactacacaagcgtcctanattggattctgaatactactgctttggctagtgacagttttttgcatgggactggtgtgcaatgaacttgtatttatccttcttctccgctgctatatnttttggtgtgatttttaatttaataagatgacctttttaaaagaagctgattttgaaactgcttaatggtattgctgttgctcctaatacttctcatctgagctgatttatttttctctgttacatctctattttttatttattacaatgattttctcccttcttttacagtagcacaaacaaagtagggggaaaagaataagcaataattatgtttttgcttttgttttcagagcaatgggtcagggattacaagaaaaactttgctaaattttacaataaaccaaagtctgataac

SEQ ID NO: 255305 - DNA, 712 bp, Homo Sapiens
  misc_feature (462)..(462): n is a, c, g, or t
cagaagtattatcagagtagagctgacttccagtacccgggcagccagctctgtctccagggaggcctggcctggaggaggagtccactaacaggaaacacttctcaccccctcacacaggcccaggggagcccctggagggaaattccttggcaggggaacaggtgtggtcgcctctgccccactgccagcctgagtgggcaaggaagcaggtggatcccccagaaggaaccgcagctcgcgaggcacctctcctcgtccccacccacccccacatttgcacaccttccacagggtcaggatggagtagctgccttgcgaggtggtgagactcctgtctctggaggtctgcaagcactggtagtgatattgcagcagacaaggtctgggttgggcgtctgcaggaggacaccttgtgggacatctgaggacatccgcagattcttgtcagcctgtgaactnagccctgcctctgtcacctcattggtccatgaaggagcagccaggggtggtggaaggagcactgggctaggggtcaggggtcagagattctgtcctgctcctgggatgcactggctactcccttagtctactcccttcccatctctggtcctcagcttcctccatcatggaggagatgggatcatggattttctgggcataagtggctgttctgggagtcattccaaagagagaataaaactcctgatcc

SEQ ID NO: 255306 - DNA, 347 bp, Homo Sapiens
  misc_feature (21)..(21): n is a, c, g, or t
  misc_feature (57)..(57): n is a, c, g, or t
  misc_feature (170)..(170): n is a, c, g, or t
gacgccagcgcctgcagaggntgagcagggaaaaagccagtgccccagcggaagacnagctcagagctggtctgccatggacatcctggtcccactcctgcagctgctggtgctgcttcttaccctgcccctgcacctcatggctctgctgggctgctggcagcccctgntgcaaaagctacttcccctacctgatggccgtgctgactcccaagagcaaccgcaagatggagagcaagaaacgggagctcttcagccagataaaggggcttacaggagcctccggggaaagtggcccttactggagctgggctgcggaaccggagccaactttcagttctacccac

SEQ ID NO: 255307 - DNA, 874 bp, Homo Sapiens
attgattactatgtcttacttatcagaccctgcactaagattaaaagttgtgcatgggcttatacaatttcaaatgtaaaaacagcctatttatatatgttgaaacactaagattttatggtttcactggcccttaataattggatccttcattaaacacatccatgaataccactgtgtctactgtgacttgttccattagaagctgatttgctttttattaaactgcaggaaattaattctgaagaaggaaaagaaactgacatggtaatttggatagggtgaagctctgaaataaatactgcaccaaaaatgtgaaaaagaatcacgtagtaaatgtatactcagtgtgttcttacaatcgtggaaatcagaaatgtgtatacaggtgtcagatcagaatttttaagagttatctctcagtgaaattttataacagtttcagtgaatagagaaaaaattctgaactgatcataatgagttaaaagttagctcttcacttatgaatcatgggagtgttaactgtgaactcttgccgcatcaggagactgaaagttcatactaatttacaaactttgtaaagactggtgctgttcattcatatagggaagaaccctctcttttgtgaccataggaccatctttcaaaatgcgctctcttcgtagaagaaatgttcagcttaattagctctggattttaacatgtgtttctgaatgaccagatgtaggcttagccagtttattttctctaatttaatggataataaatattaagctcctggttaaatgtttttcagccattgaaaatgttttgaaaaagccttgaatatgcatgctgctttcattttataaactttttattttttaactatagc

SEQ ID NO: 255308 - DNA, 478 bp, Homo Sapiens
  misc_feature (69)..(69): n is a, c, g, or t
  misc_feature (130)..(130): n is a, c, g, or t
ggccccgggggtccagggtggtctggggcccacatgccaggaacaaaacgccccaccgcaaccctgaanaccgccgaatgttgccctaggaacagctcccactgtgccttggtgtgttgtttcctcattnaagagtgtgttggtgaattatcctgctgcccccaggtacaagagtcagcagaaatgtgtgctttaagcagagtcacaggggcctggggctgaactgagagtaatttctcaaagatatccctgcctgggatgatgatggctctaattgaagctctggcatcatctggggctttatgagccaagggagataagaagagccacagcaaaacccttgggtctacagtgcaggctgcaaccaaggcagcatttgctagaatatttgtgattatgtgttcaacctacagagcatgtgtcaagcttgggatgaggcctgagagtaattaagttttttaaatccctccaaataatc

SEQ ID NO: 255309 - DNA, 1117 bp, Homo Sapiens
actctgggtatctagaagagtcctcagctctccctactccacgctgcctgtgttcatttcccatggagctggcagcctggtctaccccaagtgcatgccccgcctctcctctctcccttgggtctgcctgcgtgcatgcttctccagttgcgtctgcgaagtagcctactttcttgggagggtcgaccttgatcatgaaacaataccatgagggggcctctgtcacctttgaaaagaacactttttgagcagcctcaaaaagctcatacataccagcgccttcttaaattggctctaatgtaaagattgttaatgtcatttatcaaaaccataggtgattatttggagggatttaaaaaacttaattactctcaggcctcatcccaagcttgacacatgctctgtaggttgaacacataatcacaaatattctagcaaatgctgccttggttgcagcctgcactgtagacccaagggttttgctgtggctcttcttatctcccttggctcataaagccccagatgatgccagagcttcaattagagccatcatcatcccaggcagggatatctttgagaaatgactcagttcagccccaggcccctgtgactctgcttaaagcacacatttctgctgactcttgtacctggggcagcaggataatcaccaacacactcttaacgagaaacaacacaccaagcacagtggagctgtcctaggcaacactcgcggtctcaggctgcggtgggcgtctgtcctgcatgtggcccagaccaccctgacccccgggcctgcctgcctggccctgcatgctgcacgctcactgtatttgtgcagatcccggccagtacaaagtcgttgctcttgtcttatcttctcttacagagtctccctccctttatagaatgtcaaccaaagagtgccctcctcccctctcagcctcctctttagctagcctccccatctcatcacaacgcatgtctgtgacctttggtaatcatttacagtgccacacggaaccctgtattttgcacacagcaaaacaaacaatgtttagctttatttatggtatttgatgctgtaaatggaaataaatattgttctttataaaaaaaa

SEQ ID NO: 255310 - DNA, 708 bp, Homo Sapiens
gttctctggaacagctgctgcagaggttctcatcacagtttgtgagcaaaggcgacttgcagacgatgctgcgagacctgcagctgcagatcctgcggaacgtcacccaccacgtttccgtgaccaagcagctcccaacctcagaagccgcggtgtctgctgtgagcgaggcgggggcgtctggaataacagaggcgcaagcacgtgccatcgtgaacagcgccttgaagctgtattcccaagataagaccgcgatggcggactctgctctggaatctggaggcggcagcatcttgagtactcgctgtatctgaaacttacgaaaccaaaacggcgctgatgagtctgcatgggatcccgctgtggtacttctcgcagtccccgcgcgtggtcatacagactgacatttaccccggtaactgctgcacatataaaggctcccagaagtacctgatgatgaggctctacatgatgatccacccagacgccttcactctggagcacatacctaagacgctgtcgccaacaggcaacatcagcagagcccccaaagactacgacgactatggatgaggtggggaggcgctccaaatgttcaggcccctgaaggaccgccacacactttcctagggggactccgatttttttacctggggcatctgagataccggttggttggtgcttatggcgacctgtagggagacacct

SEQ ID NO: 255311 - DNA, 794 bp, Homo Sapiens
gaaatgaccgtgagggcctcagtgagaccagattgtgtcatttggctccaccttcatcttgcagagccagctgatctcagattgccaagaaactagaagccacttgcacggtgtggccagagctcagctggatgagaggctgagatgggtggccagcttgtacaccagtccctgaactgagctgtttacaggactggggaggctccacccagaaggctttcatttgtactctgctgggagtgactgggaaaaactccttccctgctgctgagtggagagaggcctcatccggctttgacccaccatccgttgcagaagcctccaggaagcagcaatcctaagagtgggaggcagccaagacccccttccttcaaaacctcccggaagtggtttcaggccctctaagttgccatgaccaatttgtgtgtgtgtttaattttttgcttcaagctctgtagcaggacctgccccacgcaaacccctacccctctgtgaggagctgtgggaagtgtgggtttgtctccagaacagaagagaatgatggatattctggctctggggccctctccaccaccactcacagtagccttgctgaagccatcacagatgggagaaggccatgccagccacgttcgccgaggggcgccagcctgaagctgccaggccctgaggttcagaccctggaccccatagctggaggcctgtggtgccagaagcccagattagggtggctgtccatccctggatagctatttgcacgaatcatggacataaatccaagttgaagaagatca

SEQ ID NO: 255312 - DNA, 376 bp, Homo Sapiens
acagacccaaaagaatagatgtaaacactaaaaataagcttatctacacctttaaaaaaacaaaaccgagtggtcaataactgtaaattgacagaagtgagacatttctcatcaaccacttgtccggttgtttcagtgctaaggatgtgctttctaatactgacatcaactgtaccaacccaaggccaggcagatttccataagtagtgaaaaacatggggtctagccaaagctgcattacaaaacaaacctatttgcaatttcatgcataaggcaagatgatttcctgggaattgagagttaaaggagccaatcatctaaaagtcctaaatatgcaaacatgcaaaagatcaatcatcacattgtctctttatgc

SEQ ID NO: 255313 - DNA, 470 bp, Homo Sapiens
tggttccgggtcctgacagtactgtccatcttccctgaagcccgtcaccagcccacgggggccgagggcaaaaggaagctccagatcggggtcaagaagcgggtggaccactgtcccatcaaatcgcgcaaaggggatgtcctgcacatgcactacacggggaagctggaagatgggacagagtttgacagcagcctgccccagaaccagccctttgtcttctcccttggcacaggccaggtcatcaagggctgggaccaggggctgctggggatgtgtgagggggaaaagcgcaagctggtgatcccatccgagctagggtatggagagcggggagctcccccaaagattccaggcggtgcaaccctggtgttcgaggtggagctgctcaaaatagagcgacgaactgagctgtaaccagactggggaggggcagggggagaggccccaatcagggaccagactgttcc

SEQ ID NO: 255314 - DNA, 837 bp, Homo Sapiens
  misc_feature (158)..(158): n is a, c, g, or t
  misc_feature (429)..(429): n is a, c, g, or t
  misc_feature (535)..(535): n is a, c, g, or t
gccgacgggtaaaacgacgccaagtgaagttgtaattgtgaatttcccagaagttggaaagggttgttaggacaggaccaggaaggggcaccatcagagcctgaccaggggtgacctcttgccaaaggctggggagaaagtggtgagccaagccctcnctggcaaacgagacccaaaatagctcctgggccctggcggggagcacatttctggcaagggctgggattagaaccagaaccatttcggggggtgaagggtggcgcgggaagacacactccctgcggctcgagagcccaagaggaatctgagctcttctttcaagggtggacggttctcaagagtggaagtcggggcctccaaccggcctggggtgcctgggccttgagagggccaggcctgagaaactaggaggcaaggaccgaggagtcncagctgggcagggcctgggaaacgtggtcctgggcagttctgataatttaaaaaacaccgaggactttgatgaggggccctggctgcgggcaaggatgctcttctnccccaagagggtccctgctcccagccgctggtgtgggtcaccagttgtgtgactcgcaggtccgttccctccctgggctccggcttttcctgctatgaaaaggggtgggaggcgctgggctgggagcaggcctgcactcctcctctggggaaagcggactgcctagaaccacagagtacacacacaggtcctctacatcatctcctccgaaggggacagacccgctgagaaaacagggaactttagtataaataagaggtctgcgggacagggaggaacctgaggggcttccataatttaac

SEQ ID NO: 255315 - DNA, 531 bp, Homo Sapiens
  misc_feature (335)..(335): n is a, c, g, or t
gttcatcctgagaacatgctaacagcagcatatctcttgctgatgttacatcataacttactttacatggacaaattaagtcctctttcttatctaagtgatctctgtggcacttaacatggcatcttcgacactctagggcagggggtggcttaaaaacatgccagagaggtttggcacaggcatcacggaaattagttcagcttgttgtactggttccatctctacatcttttctacattcaccttcatttgcatatagtatctggaatattttaggaatttcttcagtttcagctctatacacatctccttggggttacagggtctaacggngaaacaggttatctatggccaataccatagatggattggattgctccttatcttgttcggtcattatagaacaaaatttttttgctgcttaccacaacatactgtttcttccagccatatcgtttgatatttcctctatttggtactgaaagccaaccttcaattcttgactctgggaggttaccatcagtttcat

SEQ ID NO: 255316 - DNA, 1090 bp, Homo Sapiens
cggagctggcctcaggagtgggacacccagacttggcagggccttcaagaggcctgtgtgggggccccaggaatccttagctgaagcggggagactcactctccatctcaggaaattctagcccttgccctcagggagccacggttgagggtgaggcccaacacctgccttagggccctgggtgggcaagtctgggccctggggtagggagggagactcaggcccacacttgggtattttctaatttcagacaaacacacactcagcgcgcactcactgattcctacacattgccaagatttcacacatgtgaccaggggccaccaaagtccctgtgacctttgtgactaggatcctaatttctctattttctcctgggtgcctgggtctgtgtcacctggggcagtgtggataatgtttagttctgtgacactgttttttgggggtggcacctggttctccgatgcctgggctggtgtcaggcccaggactgtagtgctgggagcagtaaagctcagctctgtgtaatgagtgatgctatggcttgctcgtgtcttatgatccaatccttttctacatcagcccttgttttgttttatggctagtcttatctgggcctggttatttccttgcggggaggagagggtttgctaatctgctcccagcccaacctattaccaccccacctcgctgggacctactgctcgggaggcagcagacagggagccaccagcagtggctttcctggccctgtgctgggggtggggggaagctgggggcacatgtggcccttgccttctgagcagctcccagtgccagggctttgagactttcccacatgataaaagaaaagggaggtacagaagttccaattccctttttattttgctggttggtatctgtaaatgtttaataaatatctgagcatgtatctatcaacgccaagaatttcaaagtctccttcaacaatatgaggcttttaggatgtttatattccttcatccctcttgtttcccaggttttgcagggaaaaaaagtctggaattatagatacagcttattattaaatttgttcttgcataatgtcaaa

SEQ ID NO: 255317 - DNA, 470 bp, Homo Sapiens
  misc_feature (344)..(344): n is a, c, g, or t
  misc_feature (373)..(373): n is a, c, g, or t
  misc_feature (423)..(423): n is a, c, g, or t
  misc_feature (436)..(436): n is a, c, g, or t
  misc_feature (451)..(451): n is a, c, g, or t
ggaaattctagcccttgccctcagggagccacggttgagggtgaggcccaacacctgccttagggccctgggtgggcaagtctgggccctggggtagggagggagactcaggcccacacttgggtattttctaatttcagacaaacacacactcagcgcgcactcactgattcctacacattgccaagatttcacacatgtgaccaggggccaccaaagtccctgtgacctttgtgactaggatcctaatttctctattttctcctggggtgcctggggtctgtgtcacctggggggcagtgtgggataatgtttagttctgtgacactgttttttggggggtngcacctgggttctccgatgcctggggctnggtgttcaggcccaggactgtaagttgctggggagcagtaaaagttcagntctgtgttaattnagtgatgctattggnttgttcgtgttcttatgat

SEQ ID NO: 255318 - DNA, 805 bp, Homo Sapiens
  misc_feature (711)..(711): n is a, c, g, or t
gggtgggaccataactcttacgtaagaccacccatgccaaagaaacggtgtagagactatgatgaaaagggtttttgtatgagaggagacatgtgtccttttgatcatggaagtgatccagtagttgtagaagatgtgaatcttcctggtatgctgcctttcccagcacagcctcctgttgttgaaggaccacctcctcctggactccccccacctccaccaattcttacacccccacctgtgaatctcaggcccccagtgccaccgccaggtccattgccacccagtctcccacctgttacagatgatatttcttattctttggttttgacaggaccaccacctccacttcctcctttgcagccatctggcatggatgctcctccaaactctgcaaccagttctgttcctactgtagtaacaactggcattcatcaccagcctcctcctgctccaccctctctttttactgcagtttttgtattaccagatacatatgacacagatggctacaatcctgaagccccaagcataacaaacacttccagacctatgtatagacacagagtgcatgcacaaaggcccaacttgataggactaacatcaggggatatggatttgccacccagagaaaagcctcccaataaaagcagtatgaggatagtagtggactcagaatcaaggaaaagaaccattggttctgggagagcngggagttcctacaaaggaaggacttggtttggttaaaccaattttaataggaacaaacagcccgggttttcagtagaggttcatttgggaatgg

SEQ ID NO: 255319 - DNA, 718 bp, Homo Sapiens
taaataaataaaatgaatttcagctagaagagccttattccattttcctttttattaaacatctggcataagttggtaagtatgtgaagtttatcatatattcttatgcgaattattattttcgcctttttttataattctgtctgggatttgaatagtagagtttgaattcaggaaggacacctgtgatagggacaataaaatctagagctggacgtggccctcctgctacctgtcgacacaggtaaatttcctagaatctgttccctttatagatccatgttgaaattcacttatagcctcacttgcatgagatttgccaggcagaagtgaagaagacattagtcaggtattggaaccccaccatacagggagacagcctgcttcctgctcattttcctggttattttctctgccaatcaaaagtatcctgaaaacaccctgagctgcttgacttccattctcaaagagatgtgttggtttccacagttgtctccacaaagtccgcatcaaagatccacgtacagtttggattttccttctagccttcatgtgtggcccaagcatctatttcagactgtcatggttggcattgttctctgaggttctgtcttccctttgtgtttctatgagctttaatttgtatggttcttgttctgttaatgccactagggactatgtattcctgattccaccatgacagctacagtaaaacagt

SEQ ID NO: 255320 - DNA, 731 bp, Homo Sapiens
gcaggattcggcacgagggggagcgagctgcgggtagcggcgcactgggtacaggcgcgcgcttggctgtcgcctctgccgctgtgtttgggaggactcgaactggcgccaggaaatattaggaagctgtgattttcaaagctaattatgaaaacatttatcattggaatcagtggtgtgacaaacagtggcaaaacaacactggctaagaatttgcagaaacacctcccaaattgcagtgtcatatctcaggatgatttcttcaagccagagtctgagatagagacagataaaaatggatttttgcagtacgatgtgcttgaagcacttaacatggaaaaaatgatgtcagccatttcctgctggatggaaagcgcaagacactctgtggtatcaacagaccaggaaagtgctgaggaaattcccattttaatcatcgaaggttttcttctttttaattataagccccttgacactatatggaatagaagctatttcctgacgattccatatgaagaatgtaaaaggaggaggagtacaagggtctatcagcctccagactctccgggatactttgatggccatgtgtggcccatgtatctaaagtacagacaagaaatgcaggacatcacatgggaagttgtgtacctggatggaacaaaatctgaagaggacctctttttgcaagtatatgaagatctaatacaagaactagcaaagcaaaagtgttt

SEQ ID NO: 255321 - DNA, 936 bp, Homo Sapiens
  misc_feature (115)..(124): n is a, c, g, or t
  misc_feature (496)..(496): n is a, c, g, or t
ttggtgacacattgctggtcagccaatcagaggctggtgttaaggggaaaacagaaataatttctgtcccctgaattctctaagatttgtgaaagaaaaaatagtatcccccctnnnnnnnnnncacaagaaaacctgaccccagagagatgctgcaaaaatttccgaaagtaaaacctgggccactcactggaacatagagcagagtctcctgagaggttagtcattgagcagttaagtgagcacgctggggtgggagaatctctcacgtgattggatgacctgacttgacacatgagtcagacacatctgtgttttaatcatcactgctacaccctgtgttcgtcaccttgaaaagatatgtgcactcatattgatttcaatttcttaaactgtaaatagcattttattagtagagctcgaaaggttcaaaaacatttacacagggcatataagtggtgggtttcaaaaaatattaatatctaatcatatattntcgtatgtaaaaaatacttacttacctttttctttccaagagagagtttaggaattttctcaggtgtgttttctgtaggtgatgtcaaaaagaattccaaggctcagctcttagaatgctaccaacgaaaataatagggaaaatctcctccgatattggctgtagaaaatgaatacatctccacgaggaaatattgtagataattggtgagttacataaatttataaaacattagttcctctttctgcagggtaaatttctgagagtgaatatctctgttctgtatcctgttatcttgatttctgagtttcatactaaatttcatgagatgaaacttggtacctcctagaagtttttccctatgactaattgtttactacattatttttaatagaaataatacaataataaatttattatctgaaaggaataggaaaaaa

SEQ ID NO: 255322 - DNA, 645 bp, Homo Sapiens
agaaggctctgtccctgccgccagaccccagtggttgccactgaagacctcattctcctgtctggaggggctgataggacccccttccgggggtccccttcaccccaccaggcttgggaggaagtgcctgcagccaggtcctgaaccataaccacccctgggaaacacatcattcccagcctcaggccctgctggaattggggctgccttatatgtgtgtttaccccttcctggcctggggaaggaggcggggagggctcctttctacctccagtgccctgagcctccagtccgtctccccctgcatgccccatgtgggaggtgctgagctccaaaccagcatcacaccaactctgacacatggatgtacctatcttggtgatgggtgggggccaagaattgagcatgacatcttccccagtaggcaccttctgtgagatacctcaccttgtacaaaccatatgcaatctaacctcagcccgaggcatgctccccaacgcgctcttctgtgcttatgggttggacccctgctgaggggacaggagagggagtgtcgaggacctgggcctccagaggctggatctgcttatgctgtggcttatactgagggacctgggctggtgaggtgggcctttcacggtgtct

SEQ ID NO: 255323 - DNA, 1111 bp, Homo Sapiens
  misc_feature (49)..(49): n is a, c, g, or t
  misc_feature (425)..(469): n is a, c, g, or t
  misc_feature (727)..(727): n is a, c, g, or t
  misc_feature (752)..(752): n is a, c, g, or t
  misc_feature (768)..(768): n is a, c, g, or t
  misc_feature (826)..(826): n is a, c, g, or t
  misc_feature (855)..(855): n is a, c, g, or t
  misc_feature (880)..(880): n is a, c, g, or t
  misc_feature (902)..(902): n is a, c, g, or t
  misc_feature (911)..(912): n is a, c, g, or t
  misc_feature (919)..(919): n is a, c, g, or t
  misc_feature (924)..(924): n is a, c, g, or t
  misc_feature (952)..(953): n is a, c, g, or t
  misc_feature (964)..(964): n is a, c, g, or t
  misc_feature (967)..(967): n is a, c, g, or t
  misc_feature (987)..(987): n is a, c, g, or t
  misc_feature (991)..(991): n is a, c, g, or t
  misc_feature (993)..(993): n is a, c, g, or t
  misc_feature (995)..(995): n is a, c, g, or t
  misc_feature (999)..(999): n is a, c, g, or t
  misc_feature (1006)..(1006): n is a, c, g, or t
  misc_feature (1013)..(1014): n is a, c, g, or t
  misc_feature (1023)..(1023): n is a, c, g, or t
  misc_feature (1025)..(1025): n is a, c, g, or t
  misc_feature (1034)..(1034): n is a, c, g, or t
  misc_feature (1037)..(1037): n is a, c, g, or t
  misc_feature (1056)..(1056): n is a, c, g, or t
  misc_feature (1058)..(1058): n is a, c, g, or t
  misc_feature (1062)..(1062): n is a, c, g, or t
  misc_feature (1066)..(1066): n is a, c, g, or t
  misc_feature (1073)..(1073): n is a, c, g, or t
  misc_feature (1091)..(1091): n is a, c, g, or t
  misc_feature (1101)..(1101): n is a, c, g, or t
  misc_feature (1107)..(1108): n is a, c, g, or t
gagattttaaaaacactttatttaataaaagttaaacatacaaaactgnaaataatacacatcctaaaaattaccttcttccattaataggaagacccttttctatgcatgtatttggcttaaactcaactcaggataactgtgatgatgttcacttacaccaacaaatgcagacaacctgatctaattaacaaaaattacaaacagctaaatgaacataatatacagggaaattatcgtcagattaatgcacaagaaatacaagaaatttttaatgatgaaatattcagtattcttgttcattaatttagccttgtgtttttacaaaaatagtatctacactgtatacagggctatacatcagctttttgttctcccatataaacatcacacatccaaaacatggtaccactgccgtaaatggnnnnnnnnnnnnnnnnnnnnnnnnnnnnnnnnnnnnnnnnnnnnncaccttagaaaagggagctcatcctaaggtttcttacataaaactaagagtacataaaaataaaacagctagatcaattttagagatggcctaataggcctgggaaacaagttattgaggaaaaacctcaaaacaaactttgccatttacaaattaacctatctttaagcttaactgaacgacagctaagttttaaagctgaaaataagaaaaatgaaaagatctcttttagcaggttggtgtttttgccttggtgtnccaatgaattgctagagtatgtttnaagttcaaagcatctnaaaatttcaagttacaacttacaaaaagtacacaccataggttaagtaggcgcctaanattaggaagatcaataattcatctaagtnctgtatgaaaaagcatctacaaaantagctttaatcaacaaactttnagggaaccnnggtactnataangagaaatgttaaatgactagcagttatnnaatgcaattcntcncgtttcattctactgaagcnaacnantnacgncaattgnattttgnntaccctctnanaattatttngcntttagacaatataagggtnanaggnaatntaagccnccggaatgaacccacagntttctgatantggggnncca

SEQ ID NO: 255324 - DNA, 340 bp, Homo Sapiens
  misc_feature (173)..(190): n is a, c, g, or t
cctagacccattctagtgaaaaatgtttagttgctgctttcttatatgtaggattaggaggtttaagtatgtgataaaatgtaaggcctcttctggtgttaaaatgctgaagtattttatatgtaggtatgtacatatatccttatatatgtgtgtgtatattatatgtatgnnnnnnnnnnnnnnnnnntatatacactttttgttgcaacatctattaagcttttggttttgtttgctttatttagaatcatatcatatatgctattcttttttaacctgctctttttcaccttaataatcacagggtattccatcatcttggtgtacttcaattctt

SEQ ID NO: 255325 - DNA, 546 bp, Homo Sapiens
ggaaccacccagcccatcccctacccacctgtcctgcattttttttctccttatcactgtctcaccactagaggccagctccaccagggcaagggtttttccctgcctgccactgtatgccgagtgtccagaacaaagcctagcacaaggaaaagaacctgaccatcccgctggtgcccgagacggaagatgaccgcaagctggcggctctgctgaagttccacaccctggactcctacgaggacaagcagaaactcaagcggaccgagatcatcagccgctcctggttcccctctgcccccggatccgcctccagcagcaaggtcagcggcgtcctgaagaagctggcacagagccgcagaaccgcgcttgccacctcccccatcaccgtcggggacctgtgcatcgtgcggcggaggtctcgggacgtcccggagagcccccagcatgcgggcgacacccccaagtctggggaaacgcgggtaccagaagaggctgcccaggaccgggccatgtcccccggagactgtccttccgaaacaactg

SEQ ID NO: 255326 - DNA, 1944 bp, Homo Sapiens
  misc_feature (48)..(48): n is a, c, g, or t
  misc_feature (632)..(632): n is a, c, g, or t
gtcctgggggcgcggagagggcgcccaggttcaccgcgctctcagcgncacttccgggcacggtcagggcgtgacgtcgggaggagggcagacacgccgctttttggatgcctcctatgcctggcgggagtcttgtctgagctggcaccaccacacggcccacgacatcttcgcagggaagcctgtggaccctctgccaggctccacaagaggtcaggacagtgcagtgtgttcacaaggccagtttctgatcgtccgccccgaggctgaggaccagtaggcagctcccaagatgggtgaaaggaaaggggtcaacaagtactatcctccagacttcaaccctgagaagcatggctctctcaaccgataccacaacagccacccgcttcgggagcgggctcggaagctgtcacagggcatcctcatcatccgattcgaaatgccatataacatctggtgcgatggctgcaagaaccacatcggcatgggtgttcgttacaatgcagaaaagaagaaggtgggcaattactacacaaccccgatctacaggttccggatgaaatgccacctctgtgtcaactacatcgagatgcagacggaccccgccaactgcgactacgtgatcgtgagtngcgcccagcgcaaggaggagcgctgggacatggcggacaatgagcaggtgctgaccacaggtgagcgccacccacttacctgcctgggggccctggccctgagtctgcgctggggccccaaagcccagccgagctctgatcgttgcagagcatgagaagaagcagaagctggagacggacgccatgttccggctggagcatggcgaggccgaccgcagcacactcaagaaggcgctgcccacactgagccacatccaggaggcccagagcgcctggaaggacgacttcgccctcaacagcatgctgcggagaaggttccgggaaaagaaaaaagccatccaggaggaggaggagagagaccaggccttgcaggccaaggcgagcctgaccatcccgctggtgcccgagacggaagatgaccgcaagctggcggctctgctgaagttccacaccctggactgtgcgtaggaggccagggggaaaaggggacagggaggctcagagttgcctggagatggggggtcctcagccatgagtggactctggtctaccagagggcagttctggaccccctcccctgccgcccctgaaatgtcctctcctctcctctagcctacgaggacaagcagaaactcaagcggaccgagatcatcagccgctcctggttcccctctgcccccggatccgcctccagcagcaaggtcagcggcgtcctgaagaagctggcacagagccgcagaaccgcgcttgccacctcccccatcaccgtcggggacctgggcatcgtgcggcggaggtctcgggacgtcccggagagcccccagcatgcggccgacacccccaagtctggggaaccgcgggtaccagaggaggctgcccaggaccggcccatgtcccccggagactgtcctccggaaacaactgagacccccaagtgcagcagcccgagggggcaggaagggagccgtcaggacaagcccctgtcgccagcaggctcctcccaggaggcagctgacacccccgacacgcggcacccctgcagtctcggctcctccctcgtggcggactactccgactcggagagtgagtgagcgatccccatcctggagactggacccgctctagaggcccggacacacccaggaggcccctcacagactgcagacccccggctcgcccaccagccctgggagagctcagatgccgcatcctccccagaccgcgccttcctgcaaccgtggagttatttatttggtcctggtgagggtgtttgtgccttgtgagactccgtacattaaagacctgtctcttc

SEQ ID NO: 255327 - DNA, 1938 bp, Homo Sapiens
aggagcgaggcctgggtggcgaattcggcacgaggctgctgagccggtacctgacgctggacggcttcgacgccatgttccgggaggccaaccacaacgtgtcagcgccctacgggaggatcaccctgcacgtcttctgggagctcaactatgacttcctgcccaactactgctacaacggctctaccaaccggtttgttcggacagtgttaccattttctcaggaatttcaaagagataagcagcctaatgcacagcctcagtatctgcatggatccaaggctttgaacttggcctactccagcatttacggcagctaccggaacttcgtgggacctccacactttcaagtcatctgccggcttctcggctaccagggtatcgccgtggtcatggaggagctgctgaaggtcgtcaagagcctgctgcaaggcacaatcctgcagtacgtgaagacgctgatggaggtgatgcccaagatctgccgcctgccccggcacgagtacggctctcctggtatcctggagttcttccaccaccagctgaaggacatcgtggagtacgcagagctgaagacggtgtgcttccagaacctgcgggaggtggggaacgccatcctcttctgcctgctcatcgagcagagcctgtctttagaagaagtgtgtgacctgctgcacgcggctcctttccagaacatcttgccgcgagtccatgtgaaagagggggagagacttgatgccaaaatgaaaagactagaatcaaagtacgccccgctgcatcttgtcccactgattgaaagactggggacccctcagcaaattgccatcgcaagagagggggacctgctgacaaaggagcgcctctgctgcggcctgtccatgtttgaggtcatcctgacacggatccggagctttctggatgaccccatctggcgcgggcctctgcccagcaatggggtcatgcatgtggaccagtgtgtggagtttcacagactgtggagtgccatgcagtttgtctactgcattcccgtggggacacacgagttcacagtcgagcagtgctttggtgatgggctacactgggctggctgtatgatcatcgtacttcttgggcagcagcggcgttttgctgtgctgggatttctgctaccatctacttaaagtccagaaacatgatggcaaagatgagattattaaaaatgtgcctttgaagaagatggtggagagaattcgcaagttccagattctcaatgatgagatcatcaccatcctggataagtacctgaagtcaggcgacggggagggcacgccagtggaagcatgtgcgctgcttccagccgcccatccaccagtccctcgccagcagctgagggcacgcgctgcactccgtaactcaacatggcatgcctttctctccgtaaactatttagtgagatttttagggactatttttcaagtatctctgtacctgttaaagggggtgcttttcgatctaaaaacttaattttataaaattgacttatttttctagactaaaattgtatatgcttttggtaattaggaactcttgagaatattggctgctgattgttgccatcacgttcctacaaaattgtttttctatgggatgttctggcagctgtgtcataaaatgctgctgggttcattcattcattccataagaaacttaataccagcaaatgcattaaatcccttgccagttaccattaactgtaactatttagcttttgtttagggatctttctgatggtcttttatgagcaatcttagttctaagtcattgttcccatcccttttttgtgtgtttcagaaaatagtgaacttgattcccctgcttccactaaatccagttgtgacaaaatctaacgtgacatcagatcgaaaggttatagaaataaaactaatgagatctaaaaaa

SEQ ID NO: 255328 - DNA, 997 bp, Homo Sapiens
  misc_feature (15)..(15): n is a, c, g, or t
  misc_feature (36)..(36): n is a, c, g, or t
  misc_feature (89)..(89): n is a, c, g, or t
  misc_feature (96)..(116): n is a, c, g, or t
  misc_feature (551)..(563): n is a, c, g, or t
cccgggctgggtccnaaaaaacccccccggggcctnaaagtggatccctcctggccctctgccctcccctaagtgctgggattgccagncatgagnnnnnnnnnnnnnnnnnnnnnacctcaattttgtaataagaggctgtatagtctgagagacataaaagtttttgtagctcaacagacctagttaacattcctggcttcacccctttgtagttgagtaaacctctgcaaattattttctctgaagcccagtttccttacttgtaaaatgcctggtgaagtgcctggcaaacagaaggtattcaagaaataccagttcctctgtgagggtgtttttttcaagctaagggttgcaacccattggtagatatcaatttagtgggttgcaactggcatattttaaaaactgaaacaataaaaagcatcagaatggtaagtattgttcattaaacatattctaaggtttgatataaatgcgttttttactgtgggttacagccaaaaggtttgaaagtctctgctctacagagaaattctcagattatgttnnnnnnnnnnnnngtccttaggattgctgcctttatccaaatgagggcccacaaattttaagacattaatcaaagtgttcccactttctaacttgttgcagtaaaaataagacatggagaaaatatttaatctgatatgataaaacattaaattcaattttaagattggtttctgtgtcacactgactatgcttataaacactttatcatttatagttgatcaaactcttctagcaatttctatgaaaaagttggctattaggttccattatagggaaatgagatgctttttaaaaggactgtaacttgcctatgtgtgaagactgctagagtaatattccaatcctgatgagcagtaaaagtcaagggcttatatgagtacatacagtggtattccacactggctcagtaaaaatgagagataccaataccaagtgtgagcttcaa

SEQ ID NO: 255329 - DNA, 1018 bp, Homo Sapiens
tgcgctgccaggaccgcgctgggcgctcaccagtgctgtagcgtgcgcggcgccatacttcactctacggtcagatttgtctcacgtcctttctctggtcggccgggtcgccgctgccgcagtctaacggcggtgttcaaggttggagctatcgcgggcgagcccaacggggatctcttgggtgcttgccgggtcctgctctacggcattaacccgcgccgctatggctggcacctcgtttcgctcgggccgtgggagcagtgaggtgggcccgcgctggcagggtccgcgggcgctcgatccccgcgcgcgtccgccgaggggaattcgccgggctaccctttgttggggggaccccttcccccctgacccaggttcgccgactattcgggaaggttctttagaactgctgccccagtctagtaggatctctgggctccctgggtactatgatgaggcaggaagtcccagggagatggaatagggaacaggggacacaccacctttcccttccaccaagccctggttttcctttttgctggcaaaaacctgtgtcctctgtcatcatcaattaaacgcccctgccccaggccttgagttaaaactggggcctgaaacgtgagaagggggtttcagaagcacagagaaacggactgcccctgaagctgcttacagagagagatgctcggggtaggtgccagtagctctggctacacccagctctcttcaggaaaaaggtcccaacccagtgtcttcaaaagccactggagcacacaggaaggagaaacggtgacctctggccagccccagccactccagtggttctcaccctgcgagctaggctaggataaggacggagacaccaccagctgaggctgcaacaaagctggcagggagtgtgtggagtgggtcccaagcatgtgcgtgctgacagggcgactcccaaggtcaccatcctcctcaccccgccccgagatcccgccctcgtgccgaattcgccacccaggcctcgctcctt

SEQ ID NO: 255330 - DNA, 367 bp, Homo Sapiens
gaatctgagacaagatattgtacctaatcattaaaaacaaatagaaaactgaaaattcagatcaatttaaacccccctgactaaatgaagagaacttgacattttcagaaatgttaaatcattgaagaaaaatactagacacacacaagttttaagctagacaagaaaagattttacactgaattttataatagcattcatataaaattgattggaactacaagatataaaagcaaaattttaaaaagtcagaaagtaaaaaagcacgccaacatttatccactgtgaaccgtagcttgtagttagccaggacaattctgtccattcatcagagacactctacaaaataaccagagccctattattt

SEQ ID NO: 255331 - DNA, 396 bp, Homo Sapiens
caagtctaaatacaagcaacgtacaattaaggagaaaatattcaaagtcctatcaagcatggctctgggcacctttccctcggcatttgcttccaactgtctggcatttaagagcaggcaggcaagtttatttctaccaggtcaaagggtttaaaaataaaagcacggaccaatgaggtgggaaagactgccaggctggttcttttacctaggatctcagtaataccagattccagattccctctcggcctctaaggctctgaatccaggttagaggtctgaacccctcccaccgtccccaaatggggggcattttaggttttgagtttcaagaaatactgtccaggcaactcaaagaagacaccaaggttggactctgttttctttcctgctcag

SEQ ID NO: 255332 - DNA, 651 bp, Homo Sapiens
  misc_feature (95)..(95): n is a, c, g, or t
  misc_feature (200)..(200): n is a, c, g, or t
gcaggcgtcccactcgtgatatacatattatgtattacttatctttcattgtccacttaccccactatatagagtttaacttggatatttcccanaagtgttaaaaagaaagatggaaaatgggagccagaaatagaaagcccactgagtactacagttatcactgagaaagaagaatgagagttattactgaaaaatanaactgaagaaacctctcagatgggcctggtgcctgggtccatggggacaaaagtggaacatcagtctagcagtctagtctggtgctggggaagacctaaagcctgattcttcagaggccatcatggaggctgggtttgtgggtggtagcctgtaggctaggccctctggggtagttctggtgccagggtctactggggtagacctggaccttgggtttgttggagcaggcctggaacctgggttcactggaacctggggctgtagggaccagcagtcagtggacctaaagcctatatccactggtgccaacctggagactggggctgtagggcccaacctggtgttggagcctggtgcctgaaactatggggaccaacatggggaatggagtgggcatagatctaggcgccatggagattagcctagcattggggtgatcttggagtctca

SEQ ID NO: 255333 - DNA, 738 bp, Homo Sapiens
  misc_feature (498)..(498): n is a, c, g, or t
  misc_feature (625)..(625): n is a, c, g, or t
  misc_feature (657)..(657): n is a, c, g, or t
tactgcagcgttaatgaaaactagagctgggagaatgtgtttttccttgagtaaattgcaaatgcctgtgcaccgcatttgaccaggagggaagaatgagaggccctggtagcaaagccagtggaagaagttttactaggagcagttgtatcattcgtgtactttttttgtgtcatacaagtgagagtaattctgaagcaagcccttatagttgtgctgcagtggtgtttcaatcacaattttagtgttcgactgtatgctttagttgctcttaagaaactctggactgtgtgtaaagtgttaagtgttgaagaatttgatgccctgactcctgtgattgaatccagcctccatcaagtggaaagcatgcacggagcagggaatgccaagaagaattggcaacgcattcaggagcatttcttttttgcaacatttcacccactcaaggattattgtctagaggcagtgtctggctttgtaaacatggaagggaatatntaactctaaacagaaatctggtctgacattaaaggaaatgagtgagaacatttgtgcagaccatattttacattctttcacgcctttcaaggctatttgagatgaaatggatcaccattgataaatntaccagattcactgatgttcttttactgcggnatttcagtggtacctttctaaactcaacttagtaactaaaccaggtgactggtctagcagaacatagactaatttggtcaa

SEQ ID NO: 255334 - DNA, 1181 bp, Homo Sapiens
cttatggtgaagaaaatcttaaaacaagcatttgtacgtttttagcagttttatcacatttagacattattactcaaaatattccagaaaagaaactaattctgaagcaagcccttatagttgtgctgcagtggtgtttcaatcacaattttagtgttcgactgtatgctttagttgctcttaagaaactctggactgtgtgtaaagtgttaagtgttgaagaatttgatgccctgactcctgtgattgaatccagcctccatcaagtggaaagcatgcacggagcagggaatgccaagaagaattggcaacgcattcaggagcatttcttttttgcaacatttcacccactcaaggattattgtctagagaccatattttacatccttccacgcctttcaggccttattgaagatggaatggatcaccattgataaatttaccagattcactgatgttcctttagctgcgggatttcagtggtacctttctcaaactcaacttagtaaactaaaaccaggtgactggtctcagcaagacataggtactaatttggttgaagcagataaccaagcagagtggacccgacgttcagaagaagattatcccgtggaacagtcgtgtttccgacttagacctggagctcctgtttcaggatcgtgctgccagacttggaaagtcaattagtagactcatcgttgtggcctcgctcatcgacaaaccgaccaatttaggaggtaaaaccacctcagctaattgattatctgcagcacaacaaaacagaaaggtataccatcattggagtggaacaaactgccaaaagtttacaccctacccccatattgctttcctgagaaatctctgctctttgtgggaaatgaacgtgaaggaattccagcaaatctgatccaaccgttggacgtttgtgtggaaattcctcaacagggcattatccgcttccctgaatgtccatgtgatcggacccctgcttgatccggcgagtacccccaggcacccaccttgttctcgccccggaagataaccagcccatgcatggcccccttccttaccggaatcgcccgccggcttggtccaaacttttttttaacaaacaccctatctgggacttaaaccaaacacgaatttctgaaattttaattgggcaacaattttcactttcg

SEQ ID NO: 255335 - DNA, 1080 bp, Homo Sapiens
  misc_feature (453)..(465): n is a, c, g, or t
  misc_feature (941)..(950): n is a, c, g, or t
ggttccttcattagtatatgtcacttcctttgaccttcagtgtctgttgaaccatgtgattttagaaagcaagggattgcttgacatctccaggctgtgaagactaaagttcacaggaaaagactacaaggaaatttaaacagttttattattttccccctcatttcttaattttcctgccactactcagtactgtgtgggtccaggatcaccattagggaagacagagtagctcagaaatcagtagtgaggaggaggacagcactttgtgtggtatcttgctctaggagcattttcaagccatcagaagtgggactcttgaagactatttctgactttctcagcacaaattaagataataggagatggaggctccatttgaaaaacattttggttgtataatggttagcataaaacatacttttttcaagttaactcaggtactagagtatnnnnnnnnnnnnnaaatgtactgcagcattaatgaaaactagagctgggagaatgtgtttttccttgagtaaattgcaaatgcctgtgcaccgcatttgaccaggagggaagaatgagaggccctggtagcaaagccagtggaagaagttttactaggagcagttgtatcattcgtgtactttttttgtgtcatacaagtgagagtaaaatggtccatgtctgtgttttgaggaattttttgcctttcttttcagaaactaattctgaagcaagcccttatagttgtgctgcagtggtgtttcaatcacaattttagtgttcgactgtatgctttagttgctcttaagaaactctggactgtgtgtaaagtgttaagtgttgaagaatttgatgccctgactcctgtgattgaatccagcctccatcaagtggaaagcatgcacggagcagggaatgccaagaagaattggcaacgcattcaggagcannnnnnnnnngcaacatttcacccactcaaggattattgtctagaggcagtgtctggcttgtaaacaatggaagggaatatttaactctaaacagaaatctgttctgacattaaaaggaaatgagtgagaacatttgtgc

SEQ ID NO: 255336 - DNA, 992 bp, Homo Sapiens
  misc_feature (799)..(799): n is a, c, g, or t
tgattgaatccagcctccatcaagtggaaagcatgcacggagcagggaatgccaagaagaattggcaacgcattcaggagcatttcttttttgcaacatttcacccactcaaggattattgtctagaggtactaatttggttgaagcagataaccaagcagagtggaccgatgttcagaagaagattatcccatggaacagtcgtgtttccgacttagacctggagctcctgtttcaggatcgtgctgccagacttggaaagtcaattagtagactcatcgttgtggcctcgctcatcgacaaaccgaccaatttaggaggactgtgcaggacctgtgaggtatttggggcttcagtgctcgttgttggcagccttcagtgtatcagcgacaaacagtttcagcacctcagtgtctctgcagaacagtggcttcctctagtggaggtaaaaccacctcagctaattgactatctgcagcagaagaaaacagaaggttataccatcattggagtggaacaaactgccaaaagtttagacctaacccaatattgctttcctgagaaatctctgctcttgttgggaaatgaacgtgagggaattccagcaaatctgatccaacagttggacgtttgtgtggaaatccctcaacagggcattatccgctccctgaatgtccatgtgagtggagccctgctgatctgggagtacacccaggcagcagctgctctcgcacggagataccaagccatgatgtgccttccttagtgaactgctgctgctgttcagacttttttaaanaaaactatttggactaaagaaacagattctgaaatttattgtgataatttgtatttcttttttcttgcaatttaatgccaaaagtttgccatgtgccttaaacatattactatatattttcccctttaataaacactttttgttaaattgtattcttcctttaataaaatattttaagcaattgtggaaataa

SEQ ID NO: 255337 - DNA, 451 bp, Homo Sapiens
  misc_feature (120)..(120): n is a, c, g, or t
gaatctggtaaaatttatcaatggtgatcccattccatcttcaataaggccttgaaaggcgtggaaggatgtaaaatatggtctcttagacaataatccttgagtgggtgaaaatgttgncaaaaaagaaatgactcctgaaatgcgttggccaattcttccttggcattccctgctccgtgcatgctttccacttgatggaggctggattcaatcacaggagtcagggcatcaaattcttcaaacacttaacactttacacacagtccagagtttcttaagagcaactaaagcatacagtcgaacactaaaattgtgattgaaacaccactgcagcacaactataagggcttgcttcagaattagtttctgaaaagaaaggcaaaaaattcctcaaaacacagacatggaccattttactctcacttgtatgacacaaaaaaagtacacc

SEQ ID NO: 255338 - DNA, 454 bp, Homo Sapiens
  misc_feature (334)..(334): n is a, c, g, or t
  misc_feature (368)..(368): n is a, c, g, or t
  misc_feature (378)..(378): n is a, c, g, or t
  misc_feature (389)..(389): n is a, c, g, or t
gtgattgaatccagcctccatcaagtggaaagcatgcacggagcagggaatgccaagaagaattggcaacgattcaggagcatttcttttttgcaacatttcacccactcaaggattattgtctagaggtactaatttggttgaagcagataaccaagcagagtggaccgatgttcagaagaagattatcccatggaacagtcgtgtttccgacttaggacctgggagctcctgtttcaggatcgtgctgccagacttgggaaagtcaattagtaggactcatcgttgtgggccttcgctcattcggacaaaccgaccaattttagggagggantgtggcagggacctgttgaggtattttggggggntttcagttgntcgtttgtttngggcagcctttcagtgttattccaggcgacaaaccatttttcaggcaccttcagtgttctttttg

SEQ ID NO: 255339 - DNA, 567 bp, Homo Sapiens
  misc_feature (182)..(182): n is a, c, g, or t
  misc_feature (200)..(200): n is a, c, g, or t
  misc_feature (207)..(207): n is a, c, g, or t
  misc_feature (226)..(226): n is a, c, g, or t
gtgcactccagcctgggcaagaagagcgaaactgggtctcaagttaaaaaaagaaagcaaggaaagagtaatttacaacgaaggaaaaaaacccacagcacacccttcgcggctgtcagcgctctcctgatgtcacagtggctgcgtgtccttggggtgggtgaggtgtggggagccccagncccctggccctgcctccncccgccnccgctccccttctctctcntaactcggttaaagccatagcgaggcctccgctcgtttcagatatgaattcgctatatagatcataaatatgcatatacagtgtatgtataaagcagaatgcctgccttcacctggctattttttgtaccatattgtaaattatattatttattctttaccaattttgggaataaaaggtgttttggttattgaatataataagagctgttaaacttctggttaaatttccagttcaacttgtaaatgattttattgcgcataaatacatactaatgttgatctgaagacttatatttatggctacaatttcccatttttatttctaacacacttggctct

SEQ ID NO: 255340 - DNA, 656 bp, Homo Sapiens
gttcttaattggcccaagaccagcaggattctccagaagcccagcaaaaagcccagtagggtgcctttgtttaataggcaaagttatgacaattgggactgagcattttaactgtccaacaaaagacgggttgtctgcaaccccttgctgaatgcaaatggggttcagagtgctgtctaatccaatgggtaggattattggcaattagaattttactcaatgcaaagagttttaggtggccaacacagtacacaagaaaagatcactactcaaaattgggactgtgactacagaagcaatgacagagaaatggtttctcctttaagggcaggggatcgagaaaatgataagtaactcaaattgtgggcaataatgctctgatagaaagctctcaattgacattccctaacttcaacgtaccgagtaaggaaattctttgtcctgagatcacagacaaatgggattgtatgcattaactgaaaatggtcaaggagtcagtactgaagatcagcaatgccaagggtaaacggaatatcccagtataataggataagcaatggacaacttattttgagcactgaatcaatgaaaattagagtgactttcgagagaagctgggcgggactgaggaactaggactgggctcgtgccgaatc

SEQ ID NO: 255341 - DNA, 860 bp, Homo Sapiens
tttaataggcggctcccctttccctttaaagggcccgttgttaaatccatgtaccttgattgttccataaaggtttgctgttttaggaatcgggacctccttccctctttcaatctccaagctttaccctttaagggcccgtaactcctcccatcggcttttggccgtttcgtaaaaaagcttcagttcttcttgcaaagtttctaacagcaacatagagtccatgtgatcagtagtggattcttgtcgtgatgccagggtctcactgcctaaagctgggatcaagggcccttgctctccaaaattgccaaacaattgtcccgaaacttctccagcagctctaccttctgggtcaggtccttcagctctccctgagtttcagtcaacttctggtgcaactgcttgttgacggcttctaacagctggttcttgtccttgagctcttcctctgatttttgcttactcagtggtttgtagccttttctgacattccttctggtggcagtgtcagtagctttcatttgcccattctctcgtctcagtttggtgatttttgtaacatcattctctggacctcctgaatgaagctgtttggaaacatcgacttctttggacctaacaggtaagagactcttagaagtggcccgagtttgtgtgtctgccggctggccgccgctcagcgcagaggggggctgcaggctatacactgtcttaaccacactggtcatcgtaacgaggcggcacggctgaaccccaggagcccgccggtcctgcccgcagtccttctcgctctcgtttaaaagattccctgcagcaactgtcgtgccaccggctaagtcggccgcctgggtttcaaatag

SEQ ID NO: 255342 - DNA, 821 bp, Homo Sapiens
ccgcctcgttacgatgaccagtgtggttaagacagtgtatagcctgcagcccccctctgcgctgagcggcggccagccggcagaacacctgaatggtaatcctggcaccagcggggactaggagttgctggaagaactggagccagacacacaaactcgggccacttctaagagtctcttacctgttaggtccaaagaagtcgatgtttccaaacagcttcattcaggaggtccagagaatgatgttacaaaaatcaccaaactgagacgagagaatgggcaaatgaaagctactgacactgccaccagaaggaatgtcagaaaaggctacaaaccactgagtaagcaaaaatcagaggaagagctcaaggacaagaaccagctgttagaagccgtcaacaagcagttgcaccagaagttgactgaaactcagggagagctgaaggacctgacccagaaggtagagctgctggagaagtttcgggacaactgtttggcaattttggagagcaagggccttgatccagctttaggcagtgagaccctggcatcacgacaagaatccactactgatcacatggactctatgtgctgttagaaactttgcaagaggagctgaagctttttaacgaaacagccaaaaagcagatggaggagttacaggccttaaaggtaaagctgggagatgaaagaggaaagagtccgattcctagaacagcaaaccttatgtacaatcaagtaaatgatttaacaacaggccttaagggaaatggggcagtattagaaatgttagaagaaggcagtggcagatgggtccctcc

SEQ ID NO: 255343 - DNA, 728 bp, Homo Sapiens
  misc_feature (77)..(95): n is a, c, g, or t
gaaacagaatccggtctatttatcacacccagagttgtacattctcatcactaaaccaactacgtttttttgtaacnnnnnnnnnnnnnnnnnnncaagtctgacagtcaaagcccacttagaggtttgcaatactttctcactcaattgcaacccaactgggtaaagtagcagtatttacagtgctgcactgccattgataccattcgctgctgaagaaagctagtggcccagtgatagcccactgctgctgcctcaggtctttggaagaaatcaacttatgtttaaagcagcagctactgaactggaattgagaacaaaagagcagttattgaaaaagtaatattacaatcttttaaaatagggaatatacttgtgtgctaatgggagaagtcattagtaaatatttaactagcccaaatagctcacttaatataattccacaaaaaaatgaattactttattgtagaaacctgtaaggctaaattataggtagtgttacaagtttccgttagctagtcaaaaactggcattaattttacatttcctaagaatgagaactttcaagtcataaaaatacgaaactcctagagcctgtaaaataatccacttaatacaactgatgacgtgctaaatattaaactactaggttctgaatgtaaaccattatcttcctgcttttaaaaaaactaacccaagttttgctgcacttaagcattaagacttct

SEQ ID NO: 255344 - DNA, 424 bp, Homo Sapiens
acaaggatgctaagtcatgctcacaaactcgccagaagctgaaatacacagcctagactaacacaaaactcacagcatggctgaaaatgcctagggcagagtgacagggacagaggaaaaggagatggtttaatgaatttagctctgagagtctcatgcatcattttacaagagaggaatgtgcatgccaagcaaaccaaatgtttgtaacctatgactgagtcgtatctcttatggcctgtggtcggtgcacatgctcatggtggtcacatgggcttctcatatgctatcatggtggaccagtctaccactgtgagccccatctttgtgttcacattcatattttcaaccaccttaaaattactgcttgctctgaaatgacaggttaaaaggttataaagaagatttaggtttcaaatttgtt

SEQ ID NO: 255345 - DNA, 360 bp, Homo Sapiens
aggcctcactccttgctcaaacaagtgcgccttacaagatccttggcaagggctacctttaaagcagacatgaagcccttctaatatgccgggcattctcttaagtgcccatgcgaagatctactgacccttctcgtaaagctccagataggttaagccacttgctcaatccaggtcgctcagccaccgtacatctcataccatgacctcagaaaggctatgatgccccgcaaagctctcctgaaaggcgcagctcagagcactgtttatgcatcaggagccaggcatagtttgcgctcactggcgcgtgtaatcacagctcggtgtccaaggcggtcagatcataaggtcatgagatcg

SEQ ID NO: 255346 - DNA, 929 bp, Homo Sapiens
  misc_feature (51)..(60): n is a, c, g, or t
  misc_feature (461)..(719): n is a, c, g, or t
cacggccaacagcatttccaggcctgggagacagagcaaggcttagttttnnnnnnnnnntcaaatattgtgtgattctgtttataggaaatattcagaattggtaagtccataaggacaaaaaccagattgacaggggctgagatgaaaaagagaatggggtatggggagtgacagcttgataggtatgggttatgttggggggagataatgaaaacatttggaactaggagaatcacctgacatcaggagttcaagaccactgaactcgaacctgggtgacagagtgagactccgtctcagaaaaaaagaaaatgtttggaactagatggtggtggttgtacagctttgtgaatgaaccacacacccactaaattgtacactttaaaatggctaattttatcttatgtgaatttcatcttaatttttaaaattatatatatacatggccgggcatggtnnnnnnnnnnnnnnnnnnnnnnnnnnnnnnnnnnnnnnnnnnnnnnnnnnnnnnnnnnnnnnnnnnnnnnnnnnnnnnnnnnnnnnnnnnnnnnnnnnnnnnnnnnnnnnnnnnnnnnnnnnnnnnnnnnnnnnnnnnnnnnnnnnnnnnnnnnnnnnnnnnnnnnnnnnnnnnnnnnnnnnnnnnnnnnnnnnnnnnnnnnnnnnnnnnnnnnnnnnnnnnnnnnnnnnnnnnnnnnnnnnnnnnnnnnnnnnnnnnngactctgtctcaaaatatatatatataatttcgtatattataattttcgaataatctcacatcctcccactcacttgcaatgcgacctcagacaactggtgccatggaagggaaggaagctggcttgcagcaggtctctcagaggcaggaagttgcagggagtcagagccattgtctacagaggcgggacactgaatgaccctggaatcc

SEQ ID NO: 255347 - DNA, 653 bp, Homo Sapiens
  misc_feature (60)..(60): n is a, c, g, or t
  misc_feature (89)..(89): n is a, c, g, or t
  misc_feature (92)..(92): n is a, c, g, or t
ccgaaagaggagggcgattgagtgtacaactgaagttatggctaagacataaatctcctntgcattaattacggttcgtcggcagtagnagnttagtgtgtgaccaatgaaagagggctttaggttgtgttcagactgtagaaaagtccttaccaaacttcaactgttggtcacgggatcaagacaagaaacacttcatgaattaggaaattctaaaacactcagagcctgggtttgctatagaattggaagcttatgaaacctgggtataaatgagcatttcatagattaccaggactgactagctccaaatcctctctctcctggtttagtcagttccccatggagctcctaaatccaaggtactggcagagtacactacacaacaggcttcttgtgcctgtgctgtggaattagtcctgggtttaattcagtgagcctgagaataaagactgctctaacccttgctttggaatacttctaggctttaagtttacaagaagatttttcaaagttaaagatatgggaagtgtgaggatgtcacatttacagtaggtccctctcagcaatgttaagataaatatccagtaatttaacagctgaattcacatatatttgacacatgagaatcaacttgcgttgatgtgatctgc

SEQ ID NO: 255348 - DNA, 1754 bp, Homo Sapiens
agttccccggagaaggatcctgcagcccgagtcccgaggataaagcttggggttcatcctccttccctggatcactccacagtcctcaggcttccccaatccaggggactcggcgccgggacgctgctatggacgacattttcactcagtgccgggagggcaacgcagtcgccgttcgcctgtggctggacaacacggagaacgacctcaaccagggggacgatcatggcttctcccccttgcactgggcctgccgagagggccgctctgctgtggttgagatgttgatcatgcggggggcacggatcaatgtaatgaaccgtggggatgacacccccctgcatctggcagccagtcatggacaccgtgatattgtacagaagctattgcagtacaaggcagacatcaatgcagtgaatgaacacgggaatgtgcccctgcactatgcctgtttttggggccaagatcaagtggcagaggacctggtggcaaatggggcccttgtcagcatctgtaacaagtatggagagatgcctgtggacaaagccaaggcacccctgagagagcttctccgagagcgggcagagaagatgggccagaatctcaaccgtattccatacaaggacacattctggaaggggaccacccgcactcggccccgaaatggaaccctgaacaaaacactctggcattgacttcaaacagcttaacttcctgacgaagctcaacgagaatcactctggagagctatggaagggccgctggcagggcaatgacattgtcgtgaaggtgctgaaggttcgagactggagtacaaggaagagcagggacttcaatgaagagtgtccccggctcaggattttctcgcatccaaatgtgctcccagtgctaggtgcctgccagtctccacctgctcctcatcctactctcatcacacactggatgccatatggatccctctacaatgtactacatgaaggcaccaatttcgtcgtggaccagagccaggctgtgaagtttgctttggacatggcaaggggcatggccttcctacacacactagagcccctcatcccacgacatgcactcaatagccgtagtgtaatgattgatgaggacatgactgcccgaattagcatggctgatgtcaagttctctttccaatgtcctggtcgcatgtatgcacctgcctgggtagcccccgaagctctgcagaagaagcctgaagacacaaacagacgctcagcagacatgtggagttttgcagtgcttctgtgggaactggtgacacgggaggtaccctttgctgacctctccaatatggagattggaatgaaggtggcattggaaggccttcggcctaccatcccaccaggtatttcccctcatgtgtgtaagctcatgaagatctgcatgaatgaagaccctgcaaagcgacccaaatttgacatgattgtgcctatccttgagaagatgcaggacaagtaggactggaaggtccttgcctgaactccagaggtgtcgggacatggttgggggaatgcacctccccaaagcagcaggcctctggttgcctcccccgcctccagtcatggtactaccccagccatggggtccatccccttcccccatccctaccactgtggccccaagaggggcgggctcagagctttgtcacttgccacatggtgtctcccaacatgggagggatcagccccgcctgtcacaataaagtttattatgaaaacagaaaa

SEQ ID NO: 255349 - DNA, 1507 bp, Homo Sapiens
  misc_feature (167)..(167): n is a, c, g, or t
  misc_feature (203)..(203): n is a, c, g, or t
  misc_feature (225)..(225): n is a, c, g, or t
  misc_feature (242)..(242): n is a, c, g, or t
  misc_feature (930)..(946): n is a, c, g, or t
  misc_feature (1352)..(1352): n is a, c, g, or t
  misc_feature (1435)..(1435): n is a, c, g, or t
  misc_feature (1471)..(1471): n is a, c, g, or t
  misc_feature (1493)..(1493): n is a, c, g, or t
gtgtgaatatgggttcccatcaaaaatggaaggttggcgaaattgagtttgaagggcttatgaggactctggacaacttggggtatagaacaggctatgcttacaggcatcctctcattcgagagaagcctaggcacaagagtgatgtggaaatcccagcaactgtnactggcttttttcctttgaagacgatacagtgccantctctcctctcaaatacatggnacagaggcaacagcgtnaaaaaacaagatggctgaactcaccaaatacttacatgaaagtgaatgtgcctgaggaagtctcggaacggagaaaccagtccccgaaccaaaatcacgtggatgaaagcagaagactcatctaaagttagtggtggaacacctatcaaaattgaagatccaaatcagtttgttcctttaaacacaaacccgaatgaggtactagaaaagagaaataagattcgggaacaaaatcgatatgacttgaaaacagcaggaccacaatctcagttgcttgctggaattgttgtggataagccaccttctactatgcaatttgaagatgatgatcatggcccaccagctcctcctaacccatttagtcatctcacagaaggagaacttgaagagtataagaggacaatcgaacgtaaacaacaaggcctagaagaaaaccatgagctgttttccaagagcttcatctccatggaagtgcctgtcatggtagtaaatggcaaggatgatatgcatgatgttgaagatgagcttgctaagcgagtgagtaggttaagcacaagtacaaccatagaaaacatcgagattactattaagtctccagagaaaatcgaagaagtcctgtcacctgaaggctccccttcaaaatcgccatccaagaaaaagaagaaattccgcactccttcttttctgnnnnnnnnnnnnnnnnnggagaaagttgaggcctaaataaagtctttttataattattattataacaatgtgacattgcacatctaaataccacatttaagttgatcattaatatgcaatggtagatcagattgggggatgtagcaaactggactttaagaactggaaagaggttttacaaaagaaaaactttcagattcatctctcattttatatgtccagaaatggctttgaattttaagcaattactagttttaattagctctgccctcatgaagtattattataattcaccataaacagctatctgtctgaattacttcaggccttctccataatatctgttagaaagaaattgccagtgagcaagtgagaatttttatttctcaatacctgcttcacttgataatcatattataattntttatcatgattattgactatatttttggagtcccattgtttcagtgggcattaacagaatgctttaaaaacttctaagacangaatctatagcattagtatacactggcacataattntttagttttaaggatcatttgntttattcacagtat

SEQ ID NO: 255350 - DNA, 1033 bp, Homo Sapiens
attatgtattcttttaaaatttcctctgatactataagctttttgcatttatctgaagcagtatacatgcctttggtatcagcaattttaacagtttggatatacttatcagctatcttattccaaaactacatctacttcttccagtatagaatctggtgcttcctgaccaaaaagatgagaaaaacaatgttaaaaatatagatgctttccattgaaatgggagtgaaaacattggttctatgatgttttcttttaaaataattttcttattaaaaacttgctgtctttattatacttaccctttttacgcatatcaatagtatttataagatgtgttctataattatgtaattgaagatactgtcatgcattgtccagtcacatcataagccaggccccactgcggtatctttgcaactttcttatttgtaatagaaactatagaatgtatgactaaaaagtcactttgagattgacttttttaaaaagttattaccttctgctgttgcaaagtgcaaaactgtgagtggaattgttttattctgacttaatgtgttagaaattagagaatacagtgggaggatttttagacattgctgctgctgttacccaaggtattttacataaaaaattttacataaacatccctgtggtatttaaagtggcacattgagcctgttcattttaatctaaagcaaaaagtaatttgggtcaaaatattggtatatttgtaaagcgccttaatatatccctttgtgcaaggcacctacacagttaacctttatattgtattgtgtacataagtattttgtattaaaattgaatcagtggcaacattaaagttttataaaatcatgctttgttagaaaaagaattacagctttgcaatataactaattgtttcgcataattctgaatgtaatagatatgaataatcagcctgtgtttttaatgaacttatttgtattttcccaatcattttctctagtgtaatgtttgctgggataataaaaaaaattcaaatctttca

SEQ ID NO: 255351 - DNA, 469 bp, Homo Sapiens
gaatgaatatcagtaaagtgcttcagtgtgtgcctgtagctttatggttctgactggctgttgtggagggtgagacccttagctccaggctgggcagggagaagcagagatgttacttcagcctgaggctccccactttcattagctaagcctggggtcagtggtggtattgggcaaacggtcagggcagtgggctccaaggtcaaaattctgaatacaggatacagaggctcagaggaagaggcgtgcagaaatgtgtagatatgagatccatccgtggcattgtagaacgagatatgtccagtctcatagtccaggatgacccccactttcctaggaggctcaggaagtttcaggttggttctgggctcagtgagagcccgatacttattcccatcagtcaggcccatagtccagtatccgttctccggtgtcattttgacccaaacttttttcctctccacgttct

SEQ ID NO: 255352 - DNA, 1317 bp, Homo Sapiens
  misc_feature (11)..(11): n is a, c, g, or t
  misc_feature (892)..(900): n is a, c, g, or t
aaaatgattgncaaattttgagttaaaaaattgttaaaacattctctatatttaatttcaattttataatagattacaggaagatgcttatgaaacaaatacatttgtttcagtacatgtctttaaatgatagacttataagtatgtaaacaactatataataaaaggtttccaaacgctgcctgtaagaaatcaggcaaattttaccataagcaataaaccattccaagccttccagacagtctccatagccgcaccagcatggcaataagctttaaccaaacgaaaacaaacaaacaaaagcacttcgcaatttgttgctgcaaaacagggagagaaaagagtgtacaaacttgatggaatcacaacagtcaatataatttaagggacaataaagtcaataaggttgatggtgtttattgtttaaaaagttgaattctgctgtttgcttggggctgtttagaaagttgcattctgctgtttgcttggacaccgtaccactgaacaaactccacagagtcttgctatccgccagcaggggtgccgtccaaactcacggcaaataagcggcatcaggggctcaccatccacaacaggaggtgttttattttcatggatgtggttgaaatacaatttcttcagcaaactcagcaaaaacttttcaggggcaaaaatgaactctgcacttaaagaaaaatagcaaatgaaaacacaaaatcctaacaagtaaataaacgctctgcatcagcacactggtatcaaaacacacatccacagcacgtcctaatcctacgggaaacaatccttgcttatcagaggtgcatatctaaattcaatagcttaccaatatcttcttgggagtaggccaaaaggaaacagaaaacccacattnnnnnnnnngtttcttttcgctaaacgttttcctgaagccgaatctgaagtggggaggacgtcagtcgtcctcgtcattctcgttgaagtcatcgtcctcctcgtcgtcctccccgacgtaggacaccggagtctccaccctggagccgctgtactgagacacattggagcttgtggccagcatcccatctgcaccgttggtcaggtcactgcaaggcaggaggcggatggcgccgtcagtgcaggcggcccacgcagcctcccggtcagtcacacaaacagaacggggaggctgagtgtctgcactacagcacgccaacgctctggcacttactccatctctgtctggttctcttctggccctgtctcctggaacccataacgacagaaacaggaggctgagcagagccacacgctgcctctccc

SEQ ID NO: 255353 - DNA, 465 bp, Homo Sapiens
tgcctgatttcttacaggcagcgtttggaaaccttttattatatagttgtttacaaacttataagtctatcatttaaagacatgtactgaaacaaatgtatttgtttcataagcatcttcctgtaatctattataaaattgaaattaaatatagagaatgttttaacaattttttaactcaaaatttgtcaatcatttttaatagttctttttttataaaaagaaaaaggaatttaaggacaggcagtagtctcttttaaaatttattcacaaaacccattaactgcacagttgctattagctgcctgttctaaaacgatagtctttttattgaaacacaaataaacttttctgtaatattttatggtaaataaaaagactttaattgtttgacttgtttaacttggccctgttagtttttattaataaaacgcgcatgggcctttttacaaaacatcaataaaa

SEQ ID NO: 255354 - DNA, 932 bp, Homo Sapiens
  misc_feature (71)..(71): n is a, c, g, or t
  misc_feature (339)..(369): n is a, c, g, or t
gggaggcagggtcatttgggaaagtgacaaaatccataagaatccgacctgcattagaaggcccactttanttttttcattattttttgtcgaaacattcctctatatttaatttcaattttataacagattacaggaagatgcttaagaaacaagtacaacatttgtttcagtatgtctttaaatgaaagacttttaagtatgtaagcaactatataataaaaggtttccaaacgcagcctgtaagaaatcaggcaaattttactataagcaataaaccattccgagctttccagacagtgtaccagtagctgtaccagtgggcaataacctttaacnnnnnnnnnnnnnnnnnnnnnnnnnnnnnnngcactttgcaatttgttgctgcaaaatggggagaaaaaaagagtatataaacttgatggaatcacaactgtcaatataatttaagggaaaataaagtcgataaggttgatggtgtctattgtttggaaagtcgaattcggctatttgcttggggctctagagaccacacccactgaataaacaaaactctgcagagtctagctatccgccaacagggggtgccgtccaaattcatggcaaataaagggcatttggtgctcaccattcacaacaggcgggcatttatgtggatgaagtacaatttcttcagcaagctcagcaaaaactcttaaggggcaaatatgaactctgcattttaagaaaaatagaaaacggaaacacaaaatcctaaaaagtatatgaaggctctgcattagcacactggcatcaaaccacacatccacagcacatcctaattctatgggaaacaatccttgcttatcggaggtgcatatctaaattcaatagcttaccaatatattcttgggagtaggccaaaaggaaacagaaaacccacattaaaa

SEQ ID NO: 255355 - DNA, 591 bp, Homo Sapiens
  misc_feature (19)..(19): n is a, c, g, or t
  misc_feature (77)..(77): n is a, c, g, or t
gcaccagaggctccaggtntgggtgaaaggctaaaagtagaggggaactcactcacgagaaatgataaagtgaatanatagttctcttctatgaacctattactatttagttctctggaaaaaaatataaaaagccaacctttaaataaatcatagagacctcagacataatataggaaagaattcgtccttgtttacactgtgtacatagtacaaatataattttaaagctacatcctataacatttaagaaataacagtagtttcaaaatgcttaagatgaggagaaaaatgccttagaagactaggtttctaaaagtcagaaataaaagtacaagttatttttcttgtatccagcaactttataaagcaacttgagtcctgaagaaaagactgttgttcttttaagaaatgggtcttctcgaattataaactttaacaccattttgcatcgaagaacgagaatatttagtgagtaatgcacctatggtttgcttctctccacacaaatcttgaatatatggagcaatatcttcttctgtccacttctcccttagagagaaaaggctattaaaacgttcctgattatcc

SEQ ID NO: 255356 - DNA, 991 bp, Homo Sapiens
ctgccgtgcacctgcacggcctgacagcgctcccccgtgtagaagaaagcatgtccagagatgcacctgcagctcgccatccccttcacgttcacacagatgccgtcattttggcaagggtttgggtcacatgggtctctgaagtactgtggccagttatggtcctccagggggcctgtgttctccaccgaccgcttctgtcggctgggctgcccctggctcaggctgacaggtagggcttcctctaacatggcctttcccgaaccttcttcggagacctgctgctcctggccttggagaatgaggccttgggggctcagtcttttgcctttagagggaacttcagtctggctgaggtgggtgatatcttcaaagtccacaaatatgatgaggtcatcatttttcaggaaactcctccttttcagcatttggtgggaaatgaaaccactccagcccaagtcgatgcttctaaaacaattacagtctgtatgataggttcccaccctggacggcctgtcccagatgacagtgtcatttatcgctggagatgtgtgcgacttcgaggtagtgaacaccatgcttgaggacatcctgttccggacatcaggctcctggtcaaggatggtaattatcacctgtctgttttctaccggccactccaggatagcatcgttctccccactgcacacatgaaaagcaagtctcaagtaaccagagcaagctctgctatttgggtataaagttaccccaaaaccatatccctccgaattgtagaatcgagggctctgaagcttgtcccctttgctggtgttctcaaggacttgggagaaattccggactgtccagacccctgtggggcagggggtttctgtcagagtgatgtcatctaggtaaattcccccagttgagttctgagggtcgccgtgccctggaaaaggtagcgaaacttctgttcctctttgagcaccacatgggcaattttccaattgtg

SEQ ID NO: 255357 - DNA, 2292 bp, Homo Sapiens
aggcctgggtggcgaattcggcacgagggattgattagtggagttgtacagtcttacgtggaattggggctgaatgaagatgatgcatttgcaaagggccctacgttaacagtgtataaagaatcctttgaatctcaatttttggctgacacagagagattttataccagagagagtactgaattcttgcagcagaacccagttactgaatatatgaaaaaggcagaggctcgtctgcttgaggaacaacgaagagttcaggtttaccttcatgaaagcacacaagatgaattagcaaggaaatgtgaacaagtcctcattgaaaaacacttggaaattttccacacagaatttcagaatttattggatgctgacaaaaatgaagatttgggacgcatgtataatcttgtatctagaatccaggatggcctaggagaattgaaaaaactgttggagacacacattcataatcagggtcttgcagccattgaaaagtgtggagaagctgctttaaatgaccccaaaatgtatgtacagacagtgcttgatgttcataaaaaatacaatgccctggtaatgtctgcattcaacaatgacgctggctttgtggctgctcttgataaggcttgtggtcgcttcataaacaacaacgcggttaccaagatggcccaatcatccagtaaatcccctgagttgctggctcgatactgtgactccttgttgaagaaaagttccaagaacccagaggaggcagaactagaagacacactcaatcaagtgatggttgtcttcaagtacatagaagacaaagacgtatttcagaagttctatgcgaagatgctcgccaagaggctcgtccaccagaacagtgcaagtgacgatgccgaagccagcatgatctccaagttaaagcaacctgggcgggttcgagtacacctctaaacttcagcgcatgtttcaagacattggcgtgagcaaagatctgaacgagcaattcaaaaagcacttgacaaactcagaacccctagacttggatttcagcattcaagtgctgagctccgggtcctggcccttccagcagtcttgtacatttgccttgccgtcagagttggaacgtagttatcagcgattcacagctttctacgccagccgccacagtggccgaaaattgacgtggttatatcagttgtctaaaggagaattggtaactaactgcttcaaaaacagatatactttgcaggcgtcgacattccagatggctatcctgcttcagtacaacacggaagatgcctacactgtgcagcagctgaccgacagcactcaaattaaaatggacattttggcgcaagttttacagattttattaaagtcgaagctattggtcttggaagatgaaaatgcaaatgttgatgaggtggaattgaagccagataccttaataaaattatatcttggttataaaaataagaaattaagggttaacatcaatgtgccaatgaaaaccgaacagaagcaggaacaagaaaccacacacaaaaacatcgaggaagaccgcaaactactgattcaggcggccatcgtgagaatcatgaagatgaggaaggttctgaaacaccagcagttacttggcgaggtcctcactcagctgtcctccaggttcaaacctcgagtccctgtgatcaagaaatgcattgacattctaattgagaaagaatatttggagcgagtggatggtgaaaaggacacctacagttacttggcttaacccttctggaagggtctgactgtgtgacccgcagcaaatagttcatgttggaaagaatgaaaacaactcaagttcatagcagccagcctgccgccattggacctcccttttaaaaactgagaccaagactcccatcagctggtctcggatttacatcggaactgctcaggattgatacatttcaagtctgtaaatacggacaccaacgccatttaccctaatttaagaacagcggggactgaccctccgtgccgagggctgcatgctaccgcactaagtcaatacatgggctccccgattcgcagctgtcgtcttggcagcacttgtcacgttggcagcactttgagagcaagtctgagtggacccacatgtaacctgctatgaaaaccatttgtatagtgtgtttcattttttaatgtgtgaaaataaagaaaattaaaggatttctgtacaagtcgcattgggttttgttttaagttttactaatttctatatgtaaataaaagatataatgattgtgcaaattt

SEQ ID NO: 255358 - DNA, 370 bp, Homo Sapiens
  misc_feature (20)..(20): n is a, c, g, or t
  misc_feature (27)..(27): n is a, c, g, or t
  misc_feature (36)..(36): n is a, c, g, or t
  misc_feature (177)..(177): n is a, c, g, or t
  misc_feature (345)..(345): n is a, c, g, or t
tcccctttaaaaacctgagnccccaanactcccccnccagcctggtcctcggatttaccatccggaacctgcctcaggattgataccatttccaagtctgtaaatacggacacccaacgcccatttaccctaatttaagaaccagccggggactgacccctccgtgccgagggctgncacgaccgcactaagtcaatacatgggctccccgattcgcagctgtcgtcttggcagcacttgtcacgttggcagcactttgagagcaagtctgagtggacccacatgtaacctgctatgaaaaccatttgtatagtgtgtttcattttttaatgtgtgaaaataaanaaaattaaaggatttctgtacaaaa

SEQ ID NO: 255359 - DNA, 1041 bp, Homo Sapiens
  misc_feature (553)..(566): n is a, c, g, or t
  misc_feature (1007)..(1007): n is a, c, g, or t
gacggttactctggttactggggccgcgccgcgctggcgagagccgccgcccgcgagggatgctggtgaggaagccgtcgggagccgccgccgccatctgagggaggtaccctggaaaccaccttttatcggtggggaagtgcagtcgcggtgggcggctctgggggccagcgaaacgggaggcctctaaatctttaggttggggctgcattgccctggagccgcactcttgagtccgaggccatcttttgttggagaaggcgtcggcgttggcgttttcccgaggttgggctgtacagtgtctccgtccgcggaaaaagaagcctctgaacccgcgccggcccgcagcccccgtgccttccggccgctgctcgccgtcgccagaggctaggccacgtttcccccagtgccgaggtgtttctgtgaccctccctccactcccattcccttctgaaagggcacctgctcttggtgagaaaagaaattatagcacgaagagccagtatcagaagagtatccatcacccgcagcaaccgctcagggaacaccatcnnnnnnnnnnnnnngggaatatctggatttcctgggcgaggaggagcgagtctgctcgggagctgttccagcaggcgatttttaaatactgctttctacgccctatacaacttggcttcacatacttttacactaactttatatgatttttaaaaactggtctgatcggacttctcgtcctgggacactgtttactggagtctggccggctctccgtgctcctcttggtacctcattttgggggagaaccttaaacccactcgagcagataatctccgccttgaccggggccaccaaagaacccttggaaccatgtgggacttttctgggcattgccactttcacctaattttataagaagattcgggggaattctatcactttgggccaacagggagggtcctgttgtgcgtgctgggtgttcctctcgctggggccgggggcttctcctaccnctgttgccaccgaaacgggggtcttcttggggcg

SEQ ID NO: 255360 - DNA, 771 bp, Homo Sapiens
  misc_feature (53)..(54): n is a, c, g, or t
  misc_feature (113)..(113): n is a, c, g, or t
tctagccctggagttggagatccgcccagccgacgcctccagaaaggatcaanngaatggggctggtgtctgagtaagcaatctggtccttgggtcggaacaagtctgctatntgatgaggacgtctcggtcgcatgtgaggctcgaagtgcaccaggcggtagggctgtgacttcaggaagctggttatccactgggcggtggcctcgccacagtccctgccctctatctcccaggcccgtgcactctgcacttgtgcactgcatttgtggtgggcattttgataggcagtagtaggtcctttgtgtaggctgcactgagagtcagggtgtcaccatcgcaggtcagggaaatcaggaccaggcgaggttcctggcgagcagtaaccatgtttccctcctggttgatcacaagccaaaacctgtcccgcaggttgccgctgcgcagccccatggccgtgcactccgcctcgctcaccggcaccccagagcaggatttcacagggtagatccagagctgcaccactgtgcccacctgctgcagcagccgccggcgccgcgtgggccatgcacggcgccaggcgacagcccccagcgccaccgcggtcaggcccagcgaggcaaccccgagccacccgggccgggattgcgcgaggaggacaaagcgcgccagcgcggaggagccgccggcgcccatggctggcttctccgcgaggtggcggcggcaaggccggagcgcgctggtcgcccggggccgctgggggaaggtccc

SEQ ID NO: 255361 - DNA, 807 bp, Homo Sapiens
ggcggccttgctgtgagccccaaccctggcgacaagcccatgacccagcgggccctgaccgtgttgatggtggtgagcggcgcggtgctggtgtacttcgtggtcaggacggtcaggatgagaagaagaaaccgaaagactaggagatatggagttttggacactaacatagaaaatatggaattgacacctttagaacaggatgatgaggatgatgacaacacgttgtttgatgccaatcatcctcgaagataagaatgtgccttttgatgaaagaactttatctttctacaatgaagagtggaatttctatgtttaaggaataagaagccactatatcaatgttgggggggtatttaagttacatatattttaacaacctttaatttgctgttgcaataaataccgtatccttttattatatctttatatgtatagaagtactctgataatgggctcagagatgttggggataaagtatactgtaataatttatctgtttgaaaattactataaaacggtgttttctgatcggtttttgtttcctgcttaccatatgattgtaaattgttttatgtattaatcagttaatgctaattatttttgctgatgtcatatgttaaagagctataaattccaacaaccaactggtgtgtaaaaataatttaaaatttcctttactgaaaggtatttcccatttttgtggggaaaagaagccaaatttattactttgtgttggggtttttaaaatattaagaaatgtctaagttattgtttgcaaaacaataaatatgattttaaattctc

SEQ ID NO: 255362 - DNA, 688 bp, Homo Sapiens
cacacacacaaaattgaaaagtgaagacattttaatggagatttaatagtgcttccagactaatgaactaatggagttttggctccactcatgagtgtatttgaaatgtaagtaaccagctacaaagaataatgtcacttcatttgattatgactaccaatcaagagaaggaggaatacatttctgaggagtgatactaaaccatttgagcttaaatgagtacctgattttgcagccattaaaatgagtcaataactatgtggaaatatagaaaaatattttataatataatactaagaaagaggacagtaggccataaaatgttagcagtgttatgctatgtctatataaataagcatgggccattaaaaatagcaaactgaaaacagttcatgtgtggggggcaagtttagaagtaattttaatgtatctaagaagtgatttcctttattgttgtactcaggtacgaagactaaaaatcaggatgaatccagaaaattaacacaaaaaagtatgtattaggctacttcctgtcatagtgaaattaaacactcaaagtaatgtgaatctcaggctggggcgtgggcgggcttcatggctgttaattccccaggcactttggggcagggacaagggcagggagggatccacttggaaccctaggggagtttcggaggaccagcctggg

SEQ ID NO: 255363 - DNA, 1261 bp, Homo Sapiens
ggcctgggtggcgaattcggcacgaggcctcccgcggcccctggggccgtaggaggccgcagcgaggaggtagagggggcgggggtcgcactagggtgtccctagagaacgaggactctgaaggcgggacatttgggcgacccccgggcggggccagccattaaacagtcccacttctgtgccagacactgaactgggctcttgacgggcatcatctcttaatcctcagaacatcccagggagctccacaggatccccatatcctgggccatgagtgagttgaaagactgccccttgcagttccacgacttcaagtctgtggatcacctgaaggtctgtccccgctacacggcagtgctggcacgctctgaggatgatggcatcggcatcgaggagctggacaccctgcagctggagctggagaccctgctgtcttctgccagccggcgcctgcgtgtgcttgaggccgaaacccagatcctcaccgactggcaggataagaaaggtgacagacgattcctgaagctgggtcgagaccatgaacttggagctccccccaaacatgggaagcccaagaagcagaaactggaagggaaggcaggacatgggccgggccctggcccaggacggcccaaatccaaaaaccttcagcccaagatccaggaatatgaattcactgatgaccctatcgacgtgccacggatccccaaaaatgatgcccccaacaggttctgggcttcagtggagccctactgtgctgacatcaccagcgaggaggtccgcacacttgaggagttactgaagcccccagaagatgaggctgagcattacaagatcccacccctggggaagcactactcccagcgctgggcccaggaggacctgctggaggagcagaaggatggggcccgggcagcggctgtggctgacaagaagaaaggcctcatggggccactgaccgaactggacactaaagatgtggatgccctgctgaagaagtctgaggcccagcatgaacagccggaagatggatgcccctttggtgccctgacgcagcgcctcctgcaggccctggtggaggaaaatattatttcccctatggaggattctcctattcctgacatgtctgggaaagaatcaggggctgacggggcaagcacctcccctcgcaatcagaacaagcccttcagtgtgccgcatactaagtccctggagagccgcatcaaggaggagctaattgcccagggccttttggagtctg

SEQ ID NO: 255364 - DNA, 944 bp, Homo Sapiens
ggcctgggtggcgaattcggcacgaggcctcccgcggcccctggggccgtaggaggccgcagcgaggaggtagagggggcgggggtcgcactagggtgtccctagagaacgaggactctgaaggcgggacatttgggcgacccccgggcggggccagccattaaacagtcccacttctgtgccagacactgaactgggctcttgacgggcatcatctcttaatcctcagaacatcccagggagctccacaggatccccatatcctgggccatgagtgagttgaaagactgccccttgcagttccacgacttcaagtctgtggatcacctgaaggtctgtccccgctacacggcagtgctggcacgctctgaggatgatggcatcggcatcgaggagctggacaccctgcagctggagctggagaccctgctgtcttctgccagccggcgcctgcgtgtgcttgaggccgaaacccagatcctcaccgactggcaggataagaaaggtgacagacgattcctgaagctgggtcgagaccatgaacttggagctccccccaaacatgggaagcccaagaagcagaaactggaagggaaggcaggacatgggccgggccctggcccaggacggcccaaatccaaaaaccttcagcccaagatccagggaatatgaattcactgatgaccctatcgacgtgccacggatccccaaaaatgatgcccccaacaggttctggggcttcagtggagccctactgggctgacatcacccagcgaggaaggtccgcacaccttgaagagttactgaaacccccaaaaagatgaggctgagcattacaagaacccaccccctgggggaaacactactcccagcgctgggccccaggaagaacctgctgggaggaacaaaaaggaagggggccccgggcaacggcctgggggttt

SEQ ID NO: 255365 - DNA, 1086 bp, Homo Sapiens
  misc_feature (94)..(170): n is a, c, g, or t
  misc_feature (1060)..(1060): n is a, c, g, or t
actgtcatagagtcttgagcgactcggggcctcttacggcggctgttagtgggtttggatactcccccttcgacgcccgtggggcggtcgtcgnnnnnnnnnnnnnnnnnnnnnnnnnnnnnnnnnnnnnnnnnnnnnnnnnnnnnnnnnnnnnnnnnnnnnnnnnnnnnacggttgcgccaccgcgccccccccggggttgggtcgcgcgttctccctcctgcggcccgccaagactcggcgcgtccggacgggagattggtcagcctgcttgcgtcacctcacaggtccgctcggaccttagctgtgtgtagcgccttctcccctgaggcccgcgccttcccgtgggggtggctgcgtccccgtgcgtctccttggtgcgcttcgtaaagcggcccgtccgcaaaagatccgcgtttggggcccatacgcccccccaggtcctgtgtggccttcgggcccgtgccggcgcgccggccctgggcccttttctcgccctgtcctctttcggtttgctggttttcggccttccccacgcttggggcgcagtccaaagttcagggtttcggcgcgagtctcggggaatcgctccgccacctttctcatctcgccagtgcgtgcgggtctgggttccggcctcaggcacccgcagggcgccggttggcataagacagcagggtctccagctccagctgcagggtgtccagctcctcgatgccgaggccatcatcctcagagcgtgccagcactgccgtgtagcggggacagaccttcaggtgatccacagacttgaagtcgtggaactgcaaggggcagtctttcaactcactcatggcccaggatatggggatcctgtggagctccctgggatgttctgaggattaagagatgatgcccgtcaagagcccagttcagtgtctggcacagaagtgggactgtttaatggctggccccgcccgggggtcgcccaaatgtcccgccttcagagtcctcgttctctagggacaccctagtgcgacccccgccgcctctacctcctcgctgcggcctcgtgccgganttcgccaccccaggcctcgctacctt

SEQ ID NO: 255366 - DNA, 910 bp, Homo Sapiens
  misc_feature (182)..(190): n is a, c, g, or t
  misc_feature (197)..(258): n is a, c, g, or t
acttacgattcatattctgtgcctggaaacagtccctgtatttaacaatacttacacataaaaacaatccactgttacaacttgtatggtcacaaaacattaatgatcttctttagaccaagcaaatgtttttttaccataattgtcgtgcaccaaattcacagccagaatccccaagatcnnnnnnnnntttttgnnnnnnnnnnnnnnnnnnnnnnnnnnnnnnnnnnnnnnnnnnnnnnnnnnnnnnnnnnnnnntcttacagaactgtgcttggggaaactccatttgttgaatgccactgaaggcatattttgctaaactgctgctccaggtatttttgtttggaaaatctatcacagtagggcacagctgtttattggatgagcagaaaagaaagatatgcttgtggcaaccagaaagttttacggtctttcaagttgtataaaatggacctgcagaaacgtttaagtgttctcaggatgcaaagttggagctgaaatgtgacatcaaaccagttgcaaaaagtgtacagcagccatctcttgaggtcaaacctggtacccagatatgtgacaaagcttcatgacacatagcttgttggccttgtcccataccgtcgcataatctgatcatgtgtgaatttcacaaaagattcatattgttctgctagtttggtattgaggatttgctcatactcctcccgaattttatcttcatagtcttttaagaggcgctcacatattatgccaacttgtcggagggtaaatgtgggctggtccttcttcatccatgaggaacctggagagctaggtgctgtgagtgctgaggagtgaggttgactttccgaagcacaagcttcactctgattaagaacaacttctaaatgtctccacctctgataacgac

SEQ ID NO: 255367 - DNA, 673 bp, Homo Sapiens
  misc_feature (629)..(629): n is a, c, g, or t
  misc_feature (653)..(653): n is a, c, g, or t
  misc_feature (661)..(661): n is a, c, g, or t
catgcgtctctggccctcgtgggtaaatgacaaacgggaccaatgggtttgccaagccctttgctgttcgcagcctcacattcccccggtgcctctcccatggctttgtgctgctgagtcgctctcatgaagcccttagggagagcacctgttgtgtgcctgacaccacgctggagctgtgtaccaatcgtctcagccttcattagggaggccgaggtaggagtcttatatcccaggtgaggaatttgaagctcagaaaggttgaggggctccccagaggtcacacagcctgtgtgcagtggagctggcaccattcagactttcagccgactcagcaactttcccttgccctgggctgcctcctcctgagagctgttccccaccgccctgcctcttccggttggaggctctcatgtctctttggggagagctggcagtgtgcggagctgataacattttcccaatattgagcagttcccaaggacagtcagcatttctagacttccacaaaattatgctggcatttggctgggagcccggtgttcagtgggtttcctggcccgaggtcggttgcagccccatcttaccacatctttcatgtgggacattgaggatttcacatgctgggntcctgaaggggtgttcaagttttnctttgggngaattaaggggt

SEQ ID NO: 255368 - DNA, 1437 bp, Homo Sapiens
  misc_feature (840)..(948): n is a, c, g, or t
  misc_feature (956)..(969): n is a, c, g, or t
  misc_feature (1101)..(1188): n is a, c, g, or t
  misc_feature (1229)..(1239): n is a, c, g, or t
  misc_feature (1346)..(1360): n is a, c, g, or t
agatcgcctgaagagcggaagccttctgtcgagaagcagctacccaagctccaggagcttccgaagaaacaggaccagagagggaaggtgacctgaaagtcacagaataattttttagagctgaacaagaatccaagcctgcaactgcagagacgagagatctttctgctgtctatactcttggaaagcacatcctaagatctttgcagattatcctgtggaaggaaaatgcctaaagtcaaaagaagccggaaagcacccccagatggctgggagttgattgagccaacactggatgaattagatcaaaagatgagagaagctgaaacagaaccgcatgagggaaagaggaaagtggaatctctgtggcccatcttcaggatccaccaccagaaaacccgctacatcttcgacctcttttacaagcggaaagccatcagcagagaactctatgaatattgtattaaagaaggctatgcagacaaaaacctgattgcaaaatggaaaaagcaaggatatgagaacttgtgctgcctgcggtgcattcagacacgggacaccaacttcgggacgaactgcatctgccgcgtgcccaaaagcaagctggaagtgggccgcatcatcgagtgcacacactgtggctgtcgtggctgctctggctgaggctggcgcgctccaccctggactctggacttcgcaggttcctgcctgtcacgccacccccttcctgggagcagcgagcagtgccccaggcccgagttggagcacggtctctatggggaaggcttcgctgtctatcagctgtgatttgtaaaaataaaatctttaaatctctcgaannnnnnnnnnnnnnnnnnnnnnnnnnnnnnnnnnnnnnnnnnnnnnnnnnnnnnnnnnnnnnnnnnnnnnnnnnnnnnnnnnnnnnnnnnnnnnnnnnnnnnnnnnnnnttggcggnnnnnnnnnnnnnnaaaaaattttttaaaactttcgtttgggcggggggccccaaagggaagggaacctggccaatcactgtgtccccaagaaaaaccgggccaagaaaaaggggttgggattcccccccaaataaaaaacccccnnnnnnnnnnnnnnnnnnnnnnnnnnnnnnnnnnnnnnnnnnnnnnnnnnnnnnnnnnnnnnnnnnnnnnnnnnnnnnnnnnnnnnnntccccaaggggggagcccccaaaataacaaaatttacccgnnnnnnnnnnntttggcccattttatttgaaaaaaaaaggggtggggggaaattttccctttaaaaaattttttccgggcccccaaaatgggggaaacaccccctctccccaaaaaannnnnnnnnnnnnnntgagaacccccttaaatattccccccccggggggggatatcaccacacaccctttgtgggcccccccttggggggag

SEQ ID NO: 255369 - DNA, 894 bp, Homo Sapiens
ggggtcgagaagcagctacccaagctccaggagcttccggtatgtgttttccctctgttctcgattaccttggcaacggctgaggcgggagaccggtggtctgcaccgtcctggagggagatatgagtggctggactctcagccagccactgggatgtgttcgggctttggaccttgaggccggagagagctcccgagaggaggcggcgccacgttcgttcttctgaggggacggtagatttgggggttttcctctaggattctcgcgccgtttcctctgaagaaacaggaccagagagggaaggtgacctgaaagtcacagaataattttttagagctgaacaagaatccaagcctgcaactgcagagacgagagatctttctgctgtctatactcttggaaagcacatcctaagatctttgcagattatcctgtggaaggaaaatgcctaaagtcaaaagaagccggaaagcacccccagatggctgggagttgattgagccaacactggatgaattagatcaaaagatgagagaagctgaaacagaaccgcatgagggaaagaggaaagtggaatctctgtggcccatcttcaggatccaccaccagaaaacccgctacatcttcgacctcttttacaagcggaaagccatcagcagagaactctatgaatattgtattaaagaaggctatgcagacaaaaacctgattgcaaaatggaaaaagcaaggatatgagaacttgtgctgcctgcggtgcattcagacacggggacaccaacttcgggacgaactgcatctgccgcgttgcccaaaaccaacctggaagtggggccccatcatccagtgccacccctggggctgtcctgcctgcttctggctgaggctggcccc

SEQ ID NO: 255370 - DNA, 466 bp, Homo Sapiens
ggactatccaaagcactaaaactgcctcttcctactctctaacccaaatatgcacaaactctctatggccttgagaagcagttggagagacatgacttgttaaaacctcaaggaatcaagacatgttactctgtatttaagggtaagccccacagcgggcagcacaaacagcctgggagccactgtgcctgtgcttctctgtccttctccctttgcttgccatgaatccgcataccttggaatacactgtgaccccagttaagtgtcccttcgccaggaagctgccgcaacgtccagacctgggtcaagttcccactcctgctcccatagccttgacctgcttctgtcacagcactgatcacactgagatggaagactccagggggcaaggaccaagggccatatcccaagtgactttgtacccagaaaataacagctgttcaataaatgtgtattgagttaaaaa

SEQ ID NO: 255371 - DNA, 936 bp, Homo Sapiens
  misc_feature (785)..(785): n is a, c, g, or t
ggggtgttgcaggggtttccaagcccagcaccagcacccttgcccttttccatcaggggttcagcctagggtccccgctggtgggcggctcccgagtcttggagaagagcacgagaacctagaccgcccccgaagtgcggagaccccctgggcaggctgaaagatggcggcggcgtctgtctctgcggcttctggttctcacttgtcgaacagctttgctgagccatcaaggtctaatggaagcatggttcggcattcttcatctccatatgtagtatatccttcggataagcctttccttaatagtgatctacgacgctccccaagtaagcctacacttgcctatccagaaagcaacagcagagccatattttctgctcttaagaatcttcaagataagattcgacgcttggaacttgagaggattcaggcagaagaaagtgtgaaaaccttgtctagagaaacaattgaatataagaaagtactggatgaacagatacaagaaagggagaattcaaagaatgaggaatcaaagcacaatcaagaactgacatctcagttgttagctgcagaaaataaatgcaatctattagaaaaacaattggaatacatgcgaaatatgataaagcatgccgaaatggagaggacatctgtcttagagaaacaagtttccctagaaagagaacgacaacatgatcaaacacatgttcagagccaacttgaaaaattggatcttcttgaacaggagtataacaaacttaccacaatgcaggcccttgcagaanaaaaaatgcaagagttggaagcaaaactccatgaagaaaaacaggaaaggaaacgcatgcaagctaaggcagctgagttgcagactggtctagaaacaaatagacttatctttgaagataaggcaactcccgtgtgttcccaatgccttgg

SEQ ID NO: 255372 - DNA, 2077 bp, Homo Sapiens
  misc_feature (1742)..(1800): n is a, c, g, or t
gggggtgtgggatggccgcggagccgggcggagctggcttgcggctcccggggccggctctccggccggagacatggcccgggggcccggcccgctaggcaggcctcgccccgatacggtcgccatgcccaagagaggaaagcgactcaagttccgggcccacgacgcctgctccggccgagtgaccgtggcggattacgccaactcggatccggcggtcgtgaggtctggacgagtcaagaaagccgtagccaacgctgttcagcaggaagtaaaatctctttgtggcttggaagcctctcaggttcctgcagaggaagctctttctggggctggtgagccctgtgacatcatcgacagcagtgatgagatggatgcccaggaggaaagcatccatgagagaactgtctccagaaaaaagaaaagcaagagacacaaagaagaacttggacggggctggaggagaagagtatcccatggatatttgggctattgctggcctcctatatccgtcctgaggacattgtgaatttttccctgatttgtaagaatgcctggactgtcacttgcactgctgccttttggaccaggttgtaccgaaggcactacacgctggatgcttccctgcctttgcgtctgcgaccagagtcaatggagaagctgcgctgtctccgggcttgtgtgatccgatctctgtaccatatgtatgagccatttgctgctcgaatctccaagaatccagccattccagaaagcacccccagcacattaaagaattccaaatgcttacttttctggtgcagaaagattgttgggaacagacaggaaccaatgtgggaattcaacttcaagttcaaaaaacagtcccctaggttaaagagcaagtgtacaggaggattgcagcctcccgttcagtacgaagatgttcataccaatccagaccaggactgctgcctactgcaggtcaccaccctcaatttcatctttattccgattgtcatggggaatgatatttactctgtttactatcaatgtgagcacggacatgcggcatcatcgagtgagactggtgttccaagattcccctgtccatggtggtcggaaactgcgcagtgaacagggtgtgcaagtcatcctggacccagtgcacagcgttcggctctttgactggtggcatcctcagtacccattctccctgagagcgtagttactgcttcccatcccttgggggcagcctcgagtgtagtccattagtaatcagattccagtttggacagggtggctggattgtatatctcgttagtaatgtacatgctcttcaggttctagggctcctgttaggggagggagaaatgttgaatcaagagggaaaacaactactatgatttataaacatattttaatgtaaaaatttgcatttaaaaggagtggccctgttttctgtgttaaaaccccatttggtgctattgagtttgttctttattcttttatcccagtgaaaattgttgatcttgctgtagggaaaaattaaactctttgaatctccaaacaaggaagtttcagcattcccttatggatcagaggaaccttagaggcctgaaattgttgcttccagtttagctgcccctcaaattcaagtgaatattttcccttctccctttacccttctccagaaataaagcaggtgacagggttttcagaatcttaccatattgacttgtgtatcttttttaaaaaataannnnnnnnnnnnnnnnnnnnnnnnnnnnnnnnnnnnnnnnnnnnnnnnnnnnnnnnnnngcatgaggctgataatggtgatgatgactttatacccttggtactatactaggaactttacatagtatctctacttctcacagtcttgcaaagtaggtgatattattcccattttatagttgagaaaacggaattagtgactgtacctataacaccagtaaatgcagagccaagattctgacccaggtctttttgttgtaccataagtttaaaagatgagtctcatttttcttgtggtagatggtggtaaaaaggagtaggcagagtgtacatagat

SEQ ID NO: 255373 - DNA, 412 bp, Homo Sapiens
  misc_feature (21)..(21): n is a, c, g, or t
  misc_feature (31)..(31): n is a, c, g, or t
  misc_feature (37)..(37): n is a, c, g, or t
  misc_feature (46)..(46): n is a, c, g, or t
  misc_feature (52)..(52): n is a, c, g, or t
  misc_feature (114)..(114): n is a, c, g, or t
aaccgttcggcccctttgacngggtggccancccctnagtcccccnattccnccccctgagaaccgtagttacctgcctcccccatccccttgggggcagccctcgagtgtagncccattagtaatccagattcccagtttggacagggtggctggattgtatatctcgttagtaatgtacatgctcttcaggttctagggctcctgttaggggagggagaaatgttgaatcaagagggaaaacaactactatgatttataaacatattttaatgtaaaaatttgcatttaaaaggagtggccctgttttctgtgttaaaaccccatttggtgctattgagtttgttctttattcttttatcccagtgaaaattgttgatcttgctgtagggaaaaattaaactctttgaat

SEQ ID NO: 255374 - DNA, 750 bp, Homo Sapiens
cccctatcccatgcaaacagtcccccagacacaaagccaggtcatgaggcttgactcttctaaggctcagaatggggttctgtttccagacgtgcttgcattgcttgtctatgcttgtcttaaggctctaatttcaggccaatacttgatcctcagacaaactgggacaggttgggaactttgatcacagcagacacagcccgcgcaggggctgctgaaaggccaccctcggatttctccagcctgttttgagcctcaatcgggagccacgatttcattcaggtttgtttccaaacaccatcccacccatcaccacctcctggaggatgtagtgcaccttatccatatgggaagatcaaatccaattgcacacacattttcgaaacacttatccagagtttccacaaaaacctggatgaggtccaagattccaagttcactctctgaggaatccacacaaaatacaaagtagagggtatgcatagtgccggtagatcagtttgtagtcagagccaccaatcaaacttccaccctccaagaagttacagatgctgtcatcccgcttgaggactagatggaaagtctctcgaacaatctgctgttgaatttcttctgggaaacgctggtagaagcggactagccgtggcttcccatggttgttgaaaaccagaatcgcctgaatcatctttgccagccacggttctctcagcaccggcttctcccagaaagctcctccttccgccacaaccc

SEQ ID NO: 255375 - DNA, 1822 bp, Homo Sapiens
  misc_feature (704)..(1017): n is a, c, g, or t
  misc_feature (1713)..(1726): n is a, c, g, or t
aaagagcgaggcctgggtggcgaattcggcacgaggcatcaacctgccagagattcctcggaacatcaacattggcgatctcaacatcaaagttcccaacctgtcccagtttgtctgaggatcaagtattggcctgaaatagagtccttaagacaagcaaagacaagcaaggcaagcacgtctggaaacagaacccattttgagccttagaagagtcaagcctcaggacctggaaactttgtgtctggggaagactgtttggcatggaatagggaagggattcctattgacactgctcgggtgcacccagttctcacatgtgcagtcatgccgttctctgatgcatacggccactgcagatgtgaggggccctgccttcctcagtagggagtcaacatgcctaagtcatttgcacctttacctctcacatggatgctcccaagggttagggactgcattgagcaggcccacctgcttcccagaacctcctcactagggctgagcaccttctctgagtagagtcttcatccttagcaccacagacttctgaggtcctgtgccctttacttgctggtgaggtgtcataggtagaaaagggctggcccttcagatctgggggtgtggtgagtggcaagtaagggcagaattttaggagaaccagagtcacccgctggctctactgagattgttacacccagaatccnnnnnnnnnnnnnnnnnnnnnnnnnnnnnnnnnnnnnnnnnnnnnnnnnnnnnnnnnnnnnnnnnnnnnnnnnnnnnnnnnnnnnnnnnnnnnnnnnnnnnnnnnnnnnnnnnnnnnnnnnnnnnnnnnnnnnnnnnnnnnnnnnnnnnnnnnnnnnnnnnnnnnnnnnnnnnnnnnnnnnnnnnnnnnnnnnnnnnnnnnnnnnnnnnnnnnnnnnnnnnnnnnnnnnnnnnnnnnnnnnnnnnnnnnnnnnnnnnnnnnnnnnnnnnnnnnnnnnnnnnnnnnnnnnnnnnnnnnnnnnnnnnnnnnnnnnnccagaatcctttggtatagccaagccttttggttaccgcctcatgaagaatatgcttcccgcattgtcctagtcccagttgtattctcacaggtgttatgtgcaggacacaatccaaatcataaacctggctcatgcccaacacatttctgctaatagggagagggacccaccacacacccacacatgccagaggtccctcctcacagaggagagggcctgtgtctgtagaaggttaaagctgacaacatgtgaaacatcccagaattatgactcttcccaagtttaaaatacattctcctcatgagagcagaaggtttgttgctgtgttgtgaatgatgagctgcctccatagggaacccactgccacctgggccagcttctggagcatgagaacctgagccagggtcacccttgtggggcctggacatgacgcacgctggctgcgactaggagcagggctgcctcttctccctcccaaggtctgcttgtgggcacgctctgttccctcaggtgccattctcccagggccttaggcgcccataaatgttctttctgtgggggagtagggcctcctgcttccatactgtcgcatgggctagatccccggggtggtggtgagccaccctaagatgagggctgcctccacagaaagtttccaggcctgggcccttcttgggccttttgggctggggannnnnnnnnnnnnntgatgctgttgccacgccagggtcttgaaagggtgcccagaaaaacccggggcccagggccaacttggtttttcccttcttagaacagcccccccc

SEQ ID NO: 255376 - DNA, 401 bp, Homo Sapiens
accgggggccgaaggatgaaaggtctaagcagggtctgtcctcgaccctcccagcaccagaccgtcgggtagtacgctgtaaccacgggacagtggtcttgaaggaagcggctgaaactctcacccccggtcactaactggggtttcttggcaatgctgctcaggtagtagaaggcataagcgacgctgaagcccaggataagggataagcccacccccgagccgaagaaccccacccggacttggtgttccaggtagagggagagctcccgggacaacatccgcaggtccatggccaggcgctgcatggcccccgagcgcggcgcgcgggtcctgcggcgggaggagagccggctggcgagcgggcgagagcgggcgagagcggacgcggcgccgctgcc

SEQ ID NO: 255377 - DNA, 412 bp, Homo Sapiens
aaaatctcagtaaacccaaacgactgtagctcatgggcccttgcagggcctagaacctggctgaggaaagtaaaatcagaacccctagctcagccagccatgatacgtgggacaacaattgccagatgccagcagccatagccacacccacttgctacaaccagcttccagggggttgctgggctctgaaccacagggtggggagcatctgaatatgagtgcggcagatgtaaaccccttcatccctcaggtgtcaggttgtcaatggagaatatggccattgtcccagttgggacttggtaatccacaggctctgcatatccctctttaaacagcatgaataccaaatcctgcagccagccatggcagaggatgttaacattacacccaggaagagcgggggtctcagcct

SEQ ID NO: 255378 - DNA, 751 bp, Homo Sapiens
acccaagccacaaaaatataaaacagtagaaactagcatcccattaattagaaacctcaaaatattcagacaacaagtatcaagtactcaagagaaagctcaagaagccaaaacctcaagaatccatacatcctggttgttaccctaaattgtaattaactacccacacacaaatcataatcaactcaaagatatacaaatcaatgcatctatttaaaaggactactctttatagttcagaactttacattaacttttatattctactcagcagggtgtctgtctgtactccaaattagctctcatgttccaggaaataaatacaaactcatatgccttgtgatcactgatggcctgcttatgtaattctagtccactaaatgttaattccatagaatatgctcttgattatgtaaaaactctaatttcttgatgaaatactgtaattctccaaaggttacaattttgtaaagatatgcaataactgagtatcactcccatgaaagacaaaaaaagtataattttgttccaagattaacttagtctcatgtatctctattaagtctttcaaggattccagagaatcttttcatatctccatttctggaaagtgaaatcagtatagaagtaatttgggaacttgaaaatggcattcatttttttcagcagatgccaaatttttgaccgacatggttctcacaattactttgttaccaacagtccagtcagttaacaggttgtagcaaaagat

SEQ ID NO: 255379 - DNA, 419 bp, Homo Sapiens
  misc_feature (270)..(270): n is a, c, g, or t
aaaaacgggcccggcgcgggagggagcgaagcagcgcgggcagcgagcgagatgcagcaccgaggcttcctcctcctcaccctcctcgccctgctggcgctcacctccgcggtcgccaaaaagaaagataaggtgaagaagggcggcccggggagcgagtgcgctgagtgggcctgggggccctgcacccccagcagcaaggattgcggcgtgggtttccgcgagggcacctgcggggcccagacccagcgcatccggtgcagggtgccnctgcaactggaagaaagagtttggagccgactgcaagtacaagttttgagaactggggtgcgtgtggatgggggcacaagcaccaaagtccgccaaggcacccctgaagaagggcggctacatggctcatggcagaagacctccgggtc

SEQ ID NO: 255380 - DNA, 1245 bp, Homo Sapiens
  misc_feature (975)..(1110): n is a, c, g, or t
  misc_feature (1122)..(1133): n is a, c, g, or t
  misc_feature (1160)..(1169): n is a, c, g, or t
gctgggtggcgaattcggcacgagggaacttctcagacggctcctgtcagcgccaagtttcaccaaatccaggcctgcgggctcctcccccaggacccccactcgcagtccctcaagcctgtgctcccggaaaggcactgggcgaccgcacccgtggctttctctgggcgcccgggtcccagactccccccagcacagcagagcgcttccctgcccacccgcggaaaccgccccaggatgcagcaccgaggcttcctcctcctcaccctcctcgccctgctggcgctcacctccgcggtcgccaaaaagaaagataaggtgaagaagggcggcccggggagcgagtgcgctgagtgggcctgggggccctgcacccccagcagcaaggattgcggcgtgggtttccgcgagggcacctgcggggcccagacccagcgcatccggtgcagggtgccctgcaactggaagaaggagtttggagccgactgcaagtacaagtttgagaactggggtgcgtgtgatgggggcacaggcaccaaagtccgccaaggcaccctgaagaaggcgcgctacaatgctcagtgccaggagaccatccgcgtcaccaagccctgcacccccaagaccaaagcaaaggccaaagccaagaaagggaagggaaaggactagacgccaagcctggatgccaaggagcccctggtgtcacatggggcctggcccacgccctccctctcccaggcccgagatgtgacccaccagtgccttctgtctgctcgttagctttaatcaatcatgccctgccttgtccctctcactccccagccccacccctaagtgcccaaagtggggagggacaagggattctgggaagcttgagcctcccccaaagcaatgtgagtcccagagcccgcttttgttcttccccacaattccattactaagaaacacatcaaataaactgactttttccccccnnnnnnnnnnnnnnnnnnnnnnnnnnnnnnnnnnnnnnnnnnnnnnnnnnnnnnnnnnnnnnnnnnnnnnnnnnnnnnnnnnnnnnnnnnnnnnnnnnnnnnnnnnnnnnnnnnnnnnnnnnnnnnnnnnnnnnnnccctgggggcgnnnnnnnnnnnntaaaaaattttttaaaccctttttttnnnnnnnnnnccccaaaggtaaaggaaaatgggcaatacttttctccaaaaaaacccgggacataaaaggggttggtttccccccc

SEQ ID NO: 255381 - DNA, 3084 bp, Homo Sapiens
  misc_feature (2500)..(2626): n is a, c, g, or t
  misc_feature (2661)..(2680): n is a, c, g, or t
  misc_feature (2766)..(2774): n is a, c, g, or t
  misc_feature (2876)..(2885): n is a, c, g, or t
ccggggtcgccgtctccgcctcgccgcagtcggggcagccgctcgcccctcttttccatgtatccgtccaggatcccatgacagattctgttgtcacgtctccttacagagtttgagcggtgctgaactgtcagcaccatctgtccggtcccagcatgccttctgagaccccccaggcagaagtggggcccacaggctgcccccaccgctcagggccacactcggcgaaggggagcctggagaaggggtccccagaggataaggaagccaaggagcccctgtggatccggcccgatgctccgagcaggtgcacctggcagctgggccggcctgcctccgagtccccacatcaccacactgccccggcaaaatctccaaaaatcttgccagatattctgaagaaaatcggggacacccctatggtcagaatcaacaagattgggaagaagttcggcctgaagtgtgagctcttggccaagtgtgagttcttcaacgcgggcgggagcgtgaaggaccgcatcagcctgcggatgattgaggatgctgagcgcgacgggacgctgaagcccggggacacgattatcgagccgacatccgggaacaccgggatcgggctggccctggctgcggcagtgaggggctatcgctgcatcatcgtgatgccagagaagatgagctccgagaaggtggacgtgctgcgggcactggggggctgagattgtgaggacgcccaccaatgccaggttcgactccccggagtcacacgtgggggtggcctggcggctgaagaacgaaatccccaattctcacatcctagaccagtaccgcaacgccagcaaccccctggctcactacgacaccaccgctgatgagatcctgcagcagtgtgatgggaagctggacatgctggtggcttcagtgggcacgggcggcaccatcacgggcattgccaggaagctgaaggagaagtgtcctggatgcaggatcattggggtggatcccgaagggtccatcctcgcagagccggaggagctgaaccagacggagcagacaacctacgaggtggaagggatcggctacgacttcatccccacggtgctggacaggacggtggtggacaagtggttcaagagcaacgatgaggaggcgttcacctttgcccgcatgctgatcgcgcaagaggggctgctgtgcggtggcagtgctggcagcacggtggcggtggccgtgaaggctgcgcaggagctgcaggagggccagcgctgcgtggtcattctgcccgactcagtgcggaactacatgaccaagttcctgagcgacaggtggatgctgcagaagggctttctgaaggaggaggacctcacggagaagaagccctggtggtggcacctccgtgttcaggagctgggcctgtcagccccgctgaccgtgctcccgaccatcacctgtgggcacaccatcgagatcctccgggagaagggcttcgaccaggcgcccgtggtggatgaggcgggggtaatcctgggaatggtgacgcttgggaacatgctctcgtccctgcttgccgggaaggtgcagccgtcagaccaagttggcaaagtcatctacaagcagttcaaacagatccgcctcacggacacgctgggcaggctctcgcacatcctggagatggaccacttcgccctggtggtgcacgagcagatccagtaccacagcaccgggaagtccagtcagcggcagatggtgttcggggtggtcaccgccattgacttgctgaacttcgtggccgcccaggagcgggaccagaagtgaagtccggagcgctgggcggtgcggagcgggcccgccacccttgcccacttctccttcgctttcctgagccctaaacacacgcgtgattggtaactgcctggcctggcaccgttatccctgcacacggcacagagcatccgtctcccctcgttaacacatggcttcctaaatggccctgtttacggcctatgagatgaaatatgtgattttctctaatgtaacttcctcttaggatgtttcaccaaggaaatattgagagagaagtcggccaggtaggatgaacacaggcaatgactgcgcagagtggattaaaggcaaaagagagaagagtccaggaaggggcggggagaagcctgggtggctcagcatcctccacgggctgcgccgtctgctcggggctgagctggcgggagcagtttgcgtgtttgggttttttaattgagatgaaattcaaataacctaaaaatcaatcacttgaaagtgaacaatcagcggcatttagtacatccagaaagttgtgtaggcaccacctctgtcacgttctggaacattctgtcatcaccccgtgaagcaatcatttcccctcccgtcttcctcctcccctggcaactgctgatcgactttgtgtctctgttgtctaaaataggttttccctgttctggacatttcatataaatggaatcacacnnnnnnnnnnnnnnnnnnnnnnnnnnnnnnnnnnnnnnnnnnnnnnnnnnnnnnnnnnnnnnnnnnnnnnnnnnnnnnnnnnnnnnnnnnnnnnnnnnnnnnnnnnnnnnnnnnnnnnnnnnnnnnnggttttttggtggttcccctgggccccctgaaaannnnnnnnnnnnnnnnnnnnggccggcgggcccctagggaaaggaacgaggggtaatgccttttccaaaggaaacctgtgaaaacatacggtttggatccccccgnnnnnnnnncccccgggggatcccaggggtccggaacaaaccaaaagggggatcccaggtgaaatcccggtaagaatacaggggacccggaggccttcaaaaacaaaatgnnnnnnnnnnttccaattatgcaaaaaagggttgaaccccttaagtattttgcccggcggggaagccacaccaaagggaagaaataacccaaatcggcccaggttaaaaccccctttggcggcccggaaaaaaatatttcccctgggaaaaaacggggagtaaaaaaattttccctttatggccccagtaaaaaattaacgcgggaaaa

SEQ ID NO: 255382 - DNA, 925 bp, Homo Sapiens
attcggcacgaggcctcaaggctctggtgtccggctgtgggcggcttctccgtgggctactagcgggcccggcagcgaccagctggtctcggcttccagctcgcgggttcagggaagtggtggagacccaagaagggaagacaactataattgaaggccgtatcacagcgactcccaaggagagtccaaatcctcctaacccctctggccagtgccccatctgccgttggaacctgaagcacaagtataactatgacgatgttctgctgcttagccagttcatccggcctcatggaggcatgctgccccgaaagatcacaggcctatgccaggaagaacaccgcaagatcgaggagtgtgtgaagatggcccaccgagcaggtctattaccaaatcacaggcctcggcttcctgaaggagttgttccgaagagcaaaccccaactcaaccggtacctgacgcgctgggctcctggctccgtcaagcccatctacaaaaaaggcccccgctggaacagggtgcgcatgcccgtggggtcaccccttctgagggacaatgtctgctactcaagaacaccttggaagctgtatcactgacagagagcagtgcttccagagttcctcctgcacctgtgctggggagtaggaggcccactcacaagcccttggccacaactatactcctgtcccaccccaccacgatggcctggtccctccaacatgcatggacagggggacagtgggactaacttcagtacccttggcctgcacagtagcaatgctgggagctagagccaggcaggggcagttgggtcccttgccagctggctatgggggcttaggcatgctcagtgctggggggaaaagggagtttttgcccaacgcagtgtcataaaactggggttcatggcctttaaccccattgg

SEQ ID NO: 255383 - DNA, 1068 bp, Homo Sapiens
gggagggtaggtttttgaagatggcggccctcaaggctctggtgtccggctgtgggcggcttctccgtgggctactagcgggcccggcagcgaccagctggtctcggcttccagctcgcgggttcagggaagtggtggagacccaagaagggaagacaactataattgaaggccgtatcacagcgactcccaaggagagtccaaatcctcctaacccctctggccagtgccccatctgccgttggaacctgaagcacaagtataactatgacgatgttctgctgcttagccagttcatccggcctcatggaggcatgctgccccgaaagatcacaggcctatgccaggaagaacaccgcaagatcgaggagtgtgtgaagatggcccaccgagcaggtctattaccaaatcacaggcctcggcttcctgaaggagttgttccgaagagcaaaccccaactcaaccggtacctgacgcgctgggctcctggctccgtcaagcccatctacaaaaaaggcccccgctggaacagggtgcgcatgcccgtggggtcaccccttctgagggacaatgtctgctactcaagaacaccttggaagctgtatcactgacagagagcagtgcttccagagttcctcctgcacctgtgctggggagtaggaggcccactcacaagcccttggccacaactatactcctgtcccaccccaccacgatggcctggtccctccaacatgcatggacaggggacagtgggactaacttcagtacccttggcctgcacagtagcaatgctgggagctagaggcaggcagggcagttgggtcccttgccagctgctatggggcttaggccatgctcagtgctggggacaggagttttgcccaacgcagtgtcataaactgggttcatgggcttacccattgggtgtgcgctcactgcttgggaagtgcagggggtcctgggcacattgccagctgggtgctgagcattgagtcactgatctcttgtgatggggccaatgagtcaattgaattcatgggccaaacaggtcccatcctcttcatg

SEQ ID NO: 255384 - DNA, 392 bp, Homo Sapiens
  misc_feature (94)..(94): n is a, c, g, or t
  misc_feature (183)..(183): n is a, c, g, or t
  misc_feature (326)..(326): n is a, c, g, or t
aaaaaaaacctgcctcggtggggcccatcttcaacaacactccctcgaatcttgcggtgttcctccccctggcaataggccctgtgaatctttncggggcaagcaatccctcccatgaggccggatgaaactggctaagcaagcagaacatcgtccatagttatacttgtgcttcaggttccnaacggcagatggggcactggcccagaggggttaggaggatttggactctccttgggagtcgctgtgatacggccttcaattatagttgtcttcccttcttgggtctccaccacttcccgaacccgcgagctggaagccgaganccagctggtcgctgccgggcccgctagtagcccacggagaagccgcccacagccggacaccagagc

SEQ ID NO: 255385 - DNA, 1022 bp, Homo Sapiens
  misc_feature (23)..(23): n is a, c, g, or t
gcattctcagcccatgctgcttnattgctaaaatatatatatacacagggtgcagaggcttcccaacttttttaacagttccctttttacatcaaagaattaaatttcttcaaaaaaccccaaagatgcatagattaagaagcaagctgccttttgtaatacttaaaataatattcaatgaaactcttaacgttatacaccaatggtgcaatggagaatatggaggacagcaagtaaacacagtgagcaactcttattcttacaaggcagtaggtaaagtataatgtgaaggacagtctaagataatctttctggttataagaaatgggtcggttttgtgataagtgccaagactgttactgtttaaggattgatgataatgtattaccagaatacctttcttatccctgggagaaaatattttttcactgatggaatgacatatcaccaagggagaaaaaaacctgaatactgtcagtaactaagatacctattctgaccttaaagaagatttaggacttcatggagaaatctgtgatgtctggtttcccaaaattaagtattttaatgtgccttagtggaataatcggaggaatttagagaaactctgttcttaatctttactggctgacagacatgctatcaagtaattggggaagacaaactatattcaggatatgacatctcacttcatatatttcaatggaaaccaaacatcacagtcacaagaagtctaattcaattctgaaccactggaaagttaccattccactttattcattcccaaagttatttgtagcaaaatcctacaggaaagaatgaaataaaaagttttcaaaaaatttttttcaatcatagaatgtaaacccttgaatgtgctttgtgaaaatcatttagtctaatcttgaattctatttaggcttgtttcagacatcatgaatgccatttttacgtcatttgtcacaatcacgtgtacttatataagggttatttttaaagtcaggaattttctcaaggaaaat

SEQ ID NO: 255386 - DNA, 744 bp, Homo Sapiens
  misc_feature (718)..(718): n is a, c, g, or t
caggcctgctgaccaacttgttgcaatcacaaaggtgggggtcctggtgcaggcagtgaacaggcttctaatgtggggttcagtagtgccagcaagtgggggaaactttcagtattgcgctaggtcaacacttcctgctgcatttccttccctttgcacagcttgaagaaatagagtagacagaatcacacatcatgtggtgggcagatggaaataagtacctgtggcgaacaagtttctactggagttggagatcattagaattgaattcagtttctcttagaatataatcaggcataaacctaagttaaactttttcccaaacaaggagcatccaaagacacagtgacttgagctatagatagtaaaaatcatacgagagttgaactgagtcaggtttaggaagcaagtttggttgcatcaattaagcaggctcttttcaattgactgatgctggggccttcagttttattctcagtatagattgccagtattgttaagagtatccaaaggcctttctagatggagacagaataactgacttgaacatacagtgtgcctgtaagtgtccaggctcagagctggtgacttcaatgcttgcttggcgtcctgggcagcaccatgaatgcctttaccaagacatgccaagcttggatcccccgaatgaagcacaggtggctgtggtgtgaaccttgctcctgctacacaaagcatccanggctggcctgtgtggtttcaaatgag

SEQ ID NO: 255387 - DNA, 889 bp, Homo Sapiens
aaaaaccacccccccttaaataaggaggcaaaggaaggtaatgaccagatccctccccaaaagccagtaaataggtccagctaattactatcccaacttccagagctttcacaggcatcgtccccttagcgtaagattatacttcattttacaatttcagagatccaaccatcttttgaaacctgtctgaaactagcccacatgccatataccagattacaacatttaggccagcttcactattacttttcctccttttacgaccaccaagacccagtgttcagatccgatgggaaagggatcaggaggattaagctgatcaactttaccttaaagcacagctccagaaacaagctcacctcctcagtatcacacactgccaggaaacttgggggcaaccaggtcccctgcatttcatcactgtcattaccccggaagtcctcgatcaccagaaaaatcaccttctgtcatcttaagagtcttcatctgcttaagtacgccgggatctctgtagactaagtcagtcatcctgtaggccccactgcccacgctgtgccaatagctggtgtgctttttctcagtcttgatgggaccgttttatccgcctgtcagcccagagcgcagcgttgcgcagtccgaagcgagagaagggcgcggcccccgcgggctcccgcccctctcactgccgagggggcctttcggagctcgggcccaccgggttggaaggcccggctcctccgtgccacattcaccaccatctcgaggccgtgggaggaaaaacccggcgagtgcgcgccagcagcagcgactagcggggaacggcgcgcaggaaggcaggcagaggcttgcagctagtaagtcgacaccgggaatgcggcggggagaaaag

SEQ ID NO: 255388 - DNA, 1048 bp, Homo Sapiens
tgttggtggcggcgtccccccgggagggggtggtcatcacgaggaacagagatggcccagcagacatttggcctctagatcctttgaatggagcgtggttccgagttgagacaaattacgaccactggaagccagcacccaaggaagatgaccggagaacatctgccatcaaggcccttaatgctacaggacaagcaaacctcagcctggaggcacttttccagattttgtcggtggttccagtttataacaacctcacaatttatactacggtaatgagcgccggtagcccagacaagtacatgactaggatcagaaacccgagtagaaagtaagtcagcagaagagcgagttcgcccgtgctgtgaaagatgattttttaaaaaatgaaattcttgaagagctgcaccttaaaaaataagacaaagtgaaagtattgtattatgttacaaacaatgcaggctccttcctcatttaactttacaaccttgcgaagtgggtccaggagatttggagtttgtggtaaagccagtaatgggcattgtcctgcattcccttcccttcatggtttgcctcgatcctctctaagcttctatcctgggcctgaataactcaaagataattggtctcagagatcaagccatatcctcaggccttatttccatcttctcatgattctgccatcatacctttgcttctccgctaatgaaatgagctggcaagacctctgttcattgtgaagtgcttctgaaagagcctaagaaaaaaggctcatctgaaagaaatggagaactctatttcgaaccaagcctgtttgaatgtgtgttagtctgatctttgatcatgtgtttccatgtaatgggagtctcgttttttataatgtttctaacgttttattgaaaaacctatggccctccttctttctcaatagctactttcttactgctttttgaaaataatatgcaaccaaattatttcttaatgtcacataattaagtaataaaatgtcaaaagaaatgttggcaaggagaataaaaaaatttccaag

SEQ ID NO: 255389 - DNA, 1036 bp, Homo Sapiens
ggcctgggtggcgaattcggcacgaggctggaatgcccaagggaagaggcaaggtggggcctgcagcctggactcggcactcacagctgctgtgcaaactcaggcagatctcctgccctctctgagccttgtcacttgaaaaaaaacaggaccctttccctcctttggcctccctggaggtttttaagcagtacgtgcctccaagttacctccagatcagcaggcacaggtgggcattgccaggtattttctgagcccctgcgggtttgaggccttgtttttagtgctgagagccagttgctgccctgagaagagaagacaacctccatctatttattgcttcctgagaactgacctggatgcggccctctgcagggcccagtcttcagtcctgtggtccctggactggtgggaacctgaactaggagtcctgggagagctgtggtgggaatatgggctggcactgctgcagggcaagaacattcatgtaggagcccgaggaccagcaggctgggaatggggagcaagtcacgtcagctctgtcattccccacagttaacaaattggcggggtgggaagtcctgagtgctccgtccctctagcatcactcctgagctgcgggagaggtggcccagagaacagcagagtcagttacacctgcagctcttgtctaaagtgattagatggccaccctcaccactgtccagtccagcagcagcctggctgccttgtcatggcctcctgggggcagaaggcgatgtggaccacggggatttgtagccagccagctcccaggccaacgcccaaagccctgatgacctggttcttctgaggccctcaacctggcatccttagggtatggtcaggcaacaggggtgaccaggctgtcctggggtcccaggacatggaactttcaatgctgcctggggctcttgcttcccgagaacgcctgtggcttgaagaaccttgactgcttggtcctcaggtatctacctcccaccttctcctcatctgtggagcaagccctcagtgcccc

SEQ ID NO: 255390 - DNA, 904 bp, Homo Sapiens
cacaggccacactttggagttgcaagcctctggtcatacattgtgtttgtgcacatcagagaagatccctcttcttccacaagagaaactccactccagggcacaagcaagtgggtccagcgcagcctgcacaggacttcagcccccacttgcccccaacagcccacagatgaactcggtagctctggacatcctgtcttgacctcctcatcctgaacaccctttgcccagagtttgaccaaccaggccttgggatacgagcagaatgaacagagtctcttgagatactgagcgctcagtgatggcccaacaatggcccgacctatcagttccttcccaagagacaagagacctgggcagggacgagggaactgggagcattctgagcagggattactgctctgagcagtggtctgagctctcaacatcttagccttaggagtagtaaagtggccactcgtccacggcacacaggatttggacggcctggctttgcctcaaactctggggccctcaggtgtctctggaagatgcaaaacaaaagatgcaaatcaaggtggggtctggggcactgagttggcttgctcccacagatgaaggagaaggtgggaggtaagatacctgaggaccaagcagtcaaggttcttcaaagccacaggcgttctcgggaagcaaagagccccaggccctctccctggtaggggaccaaccatccccacttgctgggtaatgtcccagttttagcattgaaagttccatgtcctgggaaaccaggacagctggtcaccctgttgcctgaccataccctaagatgccaggttgagggcctcagaagaaccaggtcatcagggctttgggcgttggcctgggagctggctggctacaaatcccgtggtccacatcg

SEQ ID NO: 255391 - DNA, 815 bp, Homo Sapiens
ggggcggaccgcgcggagctaagtggaatcccggttggcttggggcgcaggcttccaacttcgtactctggcctctggcgtctcggctcgtcggttgggtacccgaacccagctactgctgcttgaagagaagatggatggggactcctcgccgtcgctgcgccgccggccttccctgggcggacgtacacctttgcgaagcgtcagtgaggacccagggcccctccttggaatagctcttatttctcaagcgctgcagcgtgaagctcgctctgcgggtccgagaggcctgcgatctgaagactgaaaactgggaagagacgctctaccctgtgctcctcgccggcttcgataggagccgcaggtgcctgggattttctcaaactttgtcccaaacttcagctgtgggagtggaggaacaaacaggcctctcccagaattgtgaaagagatcgccctggtggatgaaacaaaaacaaatgcacttgacttccaccgcctgcctggcgtgtcacgcgggtttaatgtatgtgtcacatttaaattcaaagtattttcttctaagggcctggacacatttcttttctccctgtatcgtgaattggaaaataccttacgatattaaaaagtatctaagataacccccctttcttccggaaagttaaaatactaaacggccttaagaccgaaattttgggaatatacgagatgattgatgcagaactgcagtgaaattatccaaatatgcaattctcccctgtttctccccaattaaaacataatttttggttgccgcaaaattccatggtcacggaa

SEQ ID NO: 255392 - DNA, 1319 bp, Homo Sapiens
gtcgtaagacatagatgaatgtaccatccctccatattgccaccaaagatgcgtgaatacaccaggctcattttattgccagtgcagtcctgggtttcaattggcagcaaacaactatacctgcgtagatataaatgaatgtgatgccagcaatcaatgtgctcagcagtgctacaacattcttggttcattcatctgtcagtgcaatcaaggatatgagctaagcagtgacaggctcaactgtgaagacattgatgaatgcagaacctcaagctacctgtgtcaatatcaatgtgtcaatgaacctgggaaattctcatgtatgtgcccccagggataccaagtggtgagaagtagaacatgtcaagatataaatgagtgtgagaccacaaatgaatgccgggaggatgaaatgtgttggaattatcatggcggcttccgttgttatccacgaaatccttgtcaagatccctacattctaacaccagagaaccgatgtgtttgcccagtctcaaatgccatgtgccgagaactgccccagtcaatagtctacaaatacatgagcatccgatctgataggtctgtgccatcagacatcttccagatacaggccacaactatttatgccaacaccatcaatacttttcggattaaatctggaaatgaaaatggagagttctacctacgacaaacaagtcctgtaagtgcaatgcttgtgctcgtgaagtcattatcaggaccaagagaacatatcgtggacctggagatgctgacagtcagcagtatagggaccttccgcacaagctctgtgttaagattgacaataatagtggggccattttcattttagtcttttctaagagtcaaccacaggcatttaagtcagccaaagaatattgttaccttaaagcactattttatttatagatatatctagtgcatctacatctctatactgtacactcacccataattcaaacaattacaccatggtataaagtgggcatttaatatgtaaagattcaaagtttgtctttattactatatgtaaattagacattaatccactaaactggtcttcttcaagagagctaagtatacactatctggtgaaacttggattctttcctataaaagtgggaccaagcaatgatgatcttctgtggtgcttaaggaaacttactagagctccactaacagtctcataaggaggcagccatcataaccattgaatagcatgcaagggtaagaatgagtttttaactgctttgtaagaaaatggaaaaggtcaataaagatatatttctttagaaaatggg

SEQ ID NO: 255393 - DNA, 660 bp, Homo Sapiens
  misc_feature (590)..(590): n is a, c, g, or t
  misc_feature (613)..(613): n is a, c, g, or t
gtacattcagctttactgcacgatacaattttaagttttgcttagtgctgcttgaaatcctagctaccttatctcttttcttcttggtcttctagacttcttatgaatttaaaatgctacctagaacttcaccttctttattaggtgcgtaacactccatcttaattaaatatgatggcagataggttcctgcatccatggcctaacgttggagtggaattttactgctcactagagatcactgcagtcatttcctaagtgcttcctttgccacagactggcctgggtcctttacttaccttccctcattcactttccctcggccaataccacgttcttgattttctttcttcactggaagaaagcagataaactcctctttggtctgttttcagaggccagggctgattcagatgcctgttgctattgttgctctccattgttggggagggcattccttttcacaagaatgttctggggaaactcttcagaggacgtgaagggaaataccctgaagagtcatggattaactattgactattttctgatttagaattcatgaagatgctgagtatgttgtgtcactgcangcggagctgtggtgatcacgttntgccttgctgtgcccatgtctcttcccttgagcttttctggtgctgg

SEQ ID NO: 255394 - DNA, 689 bp, Homo Sapiens
  misc_feature (19)..(19): n is a, c, g, or t
  misc_feature (183)..(387): n is a, c, g, or t
  misc_feature (627)..(647): n is a, c, g, or t
ccctcccccaaccgaaccncccgagcccacggagtcagtgaccgggaagcggaaaaagccccaatacccaaacggctctctccccgcggttgggcgattcatttaatcaaggtgccccgccgggtttcccgactgaaaaggggcatgtagggccacccaattaatgtgggttggccccccctnnnnnnnnnnnnnnnnnnnnnnnnnnnnnnnnnnnnnnnnnnnnnnnnnnnnnnnnnnnnnnnnnnnnnnnnnnnnnnnnnnnnnnnnnnnnnnnnnnnnnnnnnnnnnnnnnnnnnnnnnnnnnnnnnnnnnnnnnnnnnnnnnnnnnnnnnnnnnnnnnnnnnnnnnnnnnnnnnnnnnnnnnnnnnnnnnnnnnnnnnnnnngcccgaaaaacaccagtattgattccttccacgacgaatcgatcctgtggcttgaaaaaagcctctacctggaaactgtgggggagggatgaagtgcaagagaaaacatctgttaatctggacagaggcagcgtggcctgaaatgaagacataccaagcccatcctgggaagaagtgtttctccaggtggcagcctgcaggaagcagagctccttctgaacaggcttcccactggctccnnnnnnnnnnnnnnnnnnnnnccagctttgttaaggtatgacaaataaaaattgtgtatattt

SEQ ID NO: 255395 - DNA, 1425 bp, Homo Sapiens
ttgagatccatgatgacatagaagtactaaagcggatgggaatgtcgtttggcctggagtcaggcaaatgctctctggaggatctgaaacttgcgaaatccctggtgccaaaggctttagaaggttatatcacagatatctccacaggaccttcttggttaaatcagggactacttctgaactctacccaatcagtttcaaatttagacctgaccactggtgccaccttaccccagtcaagtgtaaaccaagggttatgcttggatgcagaagtggccttagcaactgggcagttcctggccccaaacagtcaccagtccagcagtgcggcctctcactgctccgagtcccgaggcgagaccccctgttcgttcaatgatgaagatgaggaagatgatgaggaggattcctcctccccagaataaagacaagagaaagcctacgtttcaatatgtgatgctcatgtgtgtttgtagtgtgagctcttgtttttgaaatgattgcttcagtctttgcctttgtttgcactgtgtgttcagtgaaaactagagaaacacaataagcaaatcacatgaaggctgagatgattgagatgaaagttaacatagtgtgaatgaaagtctggccaacagagcagtagatgatataacaaagaaagcatgctttctgaggagatagtggggataatccctgaagagttggcagtgtgagtgcaactcatttatcttctgtgaggtgggatttttgtgttcctcacacccatgtaattattcttagaattgagattgctacacggagcagtccttgacgatcgtgtttctgacgtttctcttccttgcctggactgcctttgacaaggcagaaatgaacatgaaaagtccccaggagaggggagctgtgtagtgagggatactgagggcagtcctgtggctgaggggcacagattgaactgctgaactagttggaggtctagatgaggtgctttacgcatcagctgccttagacagcttctagaaaggagcgagcgctacttcttaagtacttaagtgacatttagataatttatagtaaaactgaaattattattagccaatgcattggtgcatagaatttactagggctacttctggaagccaaaatagaatagcatttccatgtgcattaaatactttgccagcactgcctttgcccagcatccctaaatctggagttttacaaagaaggaaactgtatctttaggttaatcaaagctatgcatttcatatagctttttcatttaaaacaagacaaagaaacaaattcctatgaccaaattgcttgcctacagttccctgcagtaattgtatgatctcacccagtgtgcaatttgtgaaaatgaaccaaatgtcattacttttgtcttaaagaaaagtctatttcaagaat

SEQ ID NO: 255396 - DNA, 1138 bp, Homo Sapiens
  misc_feature (59)..(59): n is a, c, g, or t
  misc_feature (308)..(331): n is a, c, g, or t
  misc_feature (400)..(400): n is a, c, g, or t
  misc_feature (1051)..(1073): n is a, c, g, or t
aaatttccccatccaggaacatttcccccaattggcccagccgttcctttgggtaaatnaaccccataggtaaacagttcccctgaaagagcagaacagctatttacctaaacaagaatagtgaagggtctttagcgaaacactgttgtatgaaatcggtggcctctaatacggagtctaaggcctcgctggtggaagtgactagagaatagccccacttgtgccactgtgcatatacagtgtggtacaagggaacagatttccacattgaaagtaaattctgcatggctcaggagaaatgaagagcnnnnnnnnnnnnnnnnnnnnnnnngtggtgcacgcacacgtgtacgcagtgtattttagatgtttgatttcagcttcctttgtgtttccaatnagggtcaagagcaaggcttttaagaatatgagtcaattaacactgatttcaaaagaatccaaatgtttcttattaaatgagtgattgtaagttagtaaaatatttgtattaggatatttttcaaaaagtcaaatcacagtatttaagatatagctattaacgtagttctttttaccacacaatgtagaaaaaagtgatatttaacatgaacactgtaactttaccaaaaagagtactacatggtcttcatcttttgtgaggtacatgagaaaaggaactgactgtgccttaaaaaaagtgaagttgccaaaagtgagtgattttattgtgaaatgatcggccagtcactcgtctccggggcctgaaggctgaccctctctgacttgaggcacagccaaggcctgggggtccggggaaggtgcccgactgtgtcccagggctgcggcatgcccccccacgcccggtcaccacttttcctaggagccaggctgcgtggactgggggcctgtttgtgcaccagtttgcacggcactttatcaattcattaaatgaatggattttggatgctggatgtgtgggcagaagaggggcaagagaagaggtggcaggtagactccctcctcctcacatttgacccaactagcaaacttnnnnnnnnnnnnnnnnnnnnnnngctgacccccctccccaggtcttagtttgctatctctgatgtaaaaatcaattattttttctctc

SEQ ID NO: 255397 - DNA, 1181 bp, Homo Sapiens
  misc_feature (158)..(158): n is a, c, g, or t
  misc_feature (161)..(180): n is a, c, g, or t
  misc_feature (990)..(998): n is a, c, g, or t
acttacaatcactcatttaataagaaacatttggattcttttgaaatcagtgttaattgactcatattcttaaaagcctggctcttgaccctattggaaacacaaaggaagctgaaatcaaacatctaaaatacactgcgtacacgtgtgcgtgcacnacnnnnnnnnnnnnnnnnnnnngctcttcatttctcctgagccatgcagaatttactttcaatgtggaaatctgttccctttaccacactgtatatgcacagagcacaagagaggctatctctagtcacttccaccagcgaggccttagactccgtattagaggccaccgatttcatacaacagtgtttcgctaaagacccttcactattcttgtttagtaaataggctgtctgctcttcagggaactgttacctatgggttattaccaaagaacgctggcaattggaaatgtcctgatggaaattctttgcacgtgccggttctctggcatcctccaggtggcccaacccaaagcagaaagcagaaaccacagaccccgtgagtctccccataccttgtttccaataacttggcaaaacttcttggtgcatattggttacaccctctgggattcataatgccattaggctaaaaccctaagagagagggttgacagaaacacacgcgagaatgaggcagatcccagagcaaggactgggcccagactctccacatgtgctctactagtgagtgccttatactctcagtattttggggcttacagcttcttatttgtgctaaaaaggtgcagttcccaaagtaggaactgccacacaggccccagcatcctctctccaacttcataccctctctccctggtggggggagcgggcatcccaggacctccggaatcaaggatgtgcagagaagagcgaaagtaatttttctagtcacatgaactgattggttcccaggcaattagaaaatggctataaaataaccttaattttnnnnnnnnntcttgggtcttcgttttcctattaggagactgaactgaccacatgtattgatttatatcctgaatatatgggaacttctgtgtttgggatgtcctactgtaagactgatgaatgtacagagttaatttcagggtacagttttgccttaatggttttaaaaaataaactattttttaaaatttt

SEQ ID NO: 255398 - DNA, 1313 bp, Homo Sapiens
  misc_feature (880)..(880): n is a, c, g, or t
ctagacctggaatcgcccaagtccctctactcgcgagaatctgtctatgatcttctcccaaaggagttacagttacctccatctagagaaacatctgtagcatcaatgagtcagacaagcggtggtgaggcaggctcgcctcctccagctgttgttgctgctgatgcttcttcagctccctcctcttcctccatgggcggtgcttgcagctcctttaccacctcttccagccctaccatttattctacctcagtcaccgacagcaaggctatgcaagtggagagctgctcctcagccgtggggaacattggaaaaccaaaaaggaactggagtaaagaagagccctatgttgtgtggacaatatcctgttaaaagtgagggaaaggagctgaagatagttatactttggaaatacgactaaatggatggttattcaattgctttatatttatttctgggaaaataaatcttaaaccttgactgacttttcagtgttaattagtcatgttgaggagaaacaaattctcaaattccttctctgcattacaataactatgaaactcacaagcagtgtgtaccaactcaaatagttaacttcatatacaaccaataccaagggtttcagtaattatgttttaagcaaaagcaaacgattgcagatcacatgatttaagactacagtttattcaatatgtctccaagcattaaaaagataattctgtgaagttaaactcaggtaaaattatatcttaaagtgcttttattttgctgtttttaaaatctgtttggggggaacaactcataactttctttaagggaattggatgtcaaataatgcaccctgtacttctggagaacacagcattttccaaaattgccncttttcaatctaattatatcagaaaaatatcttcaagagcttagtatttcccaatttttgatcctgatcctggtaacctttcatcaagatccaagcttatgcatagggttctcatctagacccatctgaaattctatacaaatagggagacatattaaatacaaaggtctgtgtaaattgacttaattactattttacaatgaaaaggaattttattacatctttacatcattttaaattggatattcctgtttaatattactgcaagattaaaaatttgcccccacatatctaaaagcagcttgctttttcttaaaatataaaaaccaaaggaatttcttttgtagcatcgtagagaaagcaacagctttatgctcactcgtgtatgttcgtgtaacaaaaaagtctgccactggctctatttccgaaaatc

SEQ ID NO: 255399 - DNA, 449 bp, Homo Sapiens
gcaggattcggcacgaggaataaagaaaataatgctcttaaagtactcagagccaccacgccaggccaagacattttatttaatatagtaacacattgattccacaaaagaacactgagggatagatgttaatttttccatttacatgtgaggaatttaaactgaaaggtgaaataattggttcagcattatgctcaaaaccaaagcgttgtctgcatttttatttagcagttctacttccgcagtctcttagtggaacattttaataatattctgcattataaagtacaaaattagttcctattctcatttcctttttaatgtcgggtttctttttgtaaagtctttagtatctcaactcttcagttcttacacctcctccctcagatcttttgtttcactgactacttcaggttattctactgtgaaggctgccttcttttcctttg

SEQ ID NO: 255400 - DNA, 685 bp, Homo Sapiens
ggaaaattagtgtgtggttttttatgatcattatcccactttaggtaaagaaaaatattggaatggaatagtgttgggaaacagacattaacaacctagggtgcctgcactcaaatagccgatgttactgtccctagattagagactcgattaagggcttgtttgtaccaaaagtggggaaacaatgccatgacctgtgttttagtttggctgcaccacagatcaaatctgcactgtgtctacatataggaaaggtcctggtgtgtgctaatgttcccaatgcaggacttgaggaagagctctgttatatgtttccatttctctttatcaaagataaccaaaccttatggcccttataacaatggaggcactggctgcctcttaattttcaatcatggacctaaagaagtactctgaagggtctcaacaatgccaggtggggacagatatactcagagattatccaggtctgcctcccagcgagcctggagtacaccagaccctcctagagaaatctgttataatttaacaacccacttatccaccttaaaactgaggaaagtcgtctttacatctaattttattcttgtgtgttataactcaaacctatatctatttttgttgggtattgcccttataaggagtgtccatctccaagttcaataaactaattcatttaactctt

SEQ ID NO: 255401 - DNA, 620 bp, Homo Sapiens
gggtgtgagtccggagatcagtctcaaagcaaaagagtcgatggccgtataaaagcgatggtgtacagaggggagcctgggatgggtgcatcctgagtcacgtgccccctgcgcctggccaggacggtataaactgcagagacgcaatctgcaggggcctggacctctacaaagtagtaaggctccatcagacgaggagtagccatgaggaaggcagagtagacgactctcctggctgtggggatgatctggcccccgccccggtgcaggggctcctgggcaaccaccgcatccaggatcttaaacttgacattccgaatcactgtaaaggaggtggagggagtgactggggagaggttctgggcctgtcatggggccatggcagagtagcagtctcctgcaacactgcagctgtcttgcagtcacgaaagacatggtacagaaatcaaatgggaggtgggcgttctaactgaataagcaaggcccatggcagaggtcagaagttaagcatatgttcttagtgtttgcttcaggccatgctcagacttagagctttcctagaagtttatttccttcttctgcacatatttacatttttgtggatgtagaataaattccag

SEQ ID NO: 255402 - DNA, 1854 bp, Homo Sapiens
ggggtactgggggagaactacaccctggaggatgaggaagactcccagatatgcaccgtgggccgcctttggatctctgtggccaggtaccacatcgaggtgaaccgtgttcctgctggcaactgggttctgattgaaggtgttgatcaaccaattgtgaagacagcaaccataaccgaaccccgaggcaatgaggaggctcagattttccgacccttgaagttcaataccacatctgttatcaagattgctgtggagccagtcaacccctcagagctgcccaagatgcttgatggcctgcgcaaggtcaacaagagctatccatccctcaccaccaaggtggaggagtctggcgagcatgtgatcctgggcactggggagctctacctggactgtgtgatgcatgatttgcggaagatgtactcagagatagacatcaaggtggctgacccagttgtcacgttttgtgagacggtggtggaaacatcctccctcaagtgctttgctgaaacgcctaataagaagaacaagatcaccatgattgctgagcctcttgagaagggcctggcagaggacatagagaatgaggtggtccagattacgtggaacaggaagaagctgggagagttcttccagaccaagtacgattgggatctgctggctgcccgttccatctgggcttttggccctgatgcgactggccccaacattctggtggatgatactctgccctctgaggtggacaaggctcttcttggttcagtgaaggacagcatcgttcaaggtttccagtggggaaccagggagggccccctctgtgatgaattgattcggaatgtcaagtttaagatcctggatgcggtggttgcccaggagcccctgcaccggggcgggggccagatcatccccacagccaggagagtcgtctactctgccttcctcatggctactcctcgtctgatggagccttactactttgtagaggtccaggcccctgcagattgcgtctctgcagtttataccgtcctggccaggcgcagggggcacgtgactcaggatgcacccatcccaggctcccctctgtacaccatcaaagcttttatcccggccatcgactcttttggctttgagactgatctccggactcacacccagggacaagccttttctctgtctgtcttccaccactggcagattgtgcctggtgatcccctggacaagagcattgtcatccgccccttggagccacagccagctcctcacctggcccgggaattcatgatcaaaacccgccgtaggaagggcctcagtgaagatgtgagcatcagcaaattcttcgatgatcctatgttgctggaacttgccaaacaggatgttgtgctcaattaccccatgtgagtgcgtggactcctgggagctcctgctccctacagtgggctgcaactcctgtacttgaagctgagacctcatatgacgtggccttcgtgttgtcagagagtgtctggaagctgctgttgccatcttgaacaactcaccaacctccaacccagagccccagtgagagaggagcatttggcctcctgcttccttctgtggcctctgccgggctccattcccaaggaaaagagaggagcttgggctcacagaaagagaaggggatgaaaccccaaggggccctatctttgggatttacatggaattttattttctacaagtttgaccttagccatggtttgcaagtgaacagaacattctgacctctgtcttgctctgctcctttcatcctcgtctcccctgccccgtctggtgcttacattctgaatatatgtcatctccccaagaggcttcactgcc

SEQ ID NO: 255403 - DNA, 770 bp, Homo Sapiens
  misc_feature (107)..(152): n is a, c, g, or t
attcggcatgagctggaagataatattggagaaagtgacagagcatcaggcattagattctcatagggacagcgcaacgtagatccctcacatgcatggttcacaannnnnnnnnnnnnnnnnnnnnnnnnnnnnnnnnnnnnnnnnnnnnnagaaggcagagctcaggcaggaatgtgagcaatggggagtggctgtaaacacagatgaagcttccctcattcaacaccattcacctccggctgtgtggctccttacagttccatggctctggcgttggggaccctgcccaagtacatccagaaggacccttccacaccagtcttcatagtggtcaagtgcagcagccactttagctcccaaggcatatgccacagctggcatttcatcacaatcaacactaagtggtagcttgagtcattgtgaggtcacttcctggaaatcaacagcatcccatttcccattgcaaggagctcagcacggcccctaagataaccaaactgatccccaaatcccatctgtgtgggtctgtctcctgggacccttcccagcatcaactctgtattagtcagggtccaatcaggagacataaaccactcaaaagcccaaagtgctaaaatttaatatagataattattcattataacaggggaacagcatgagagattggctagcacaaagtaaagagaattctagagaatataggactagccaaagtaaggcatggtggctcatgccagtaatttaagaagccaatgcaggaggattgc

SEQ ID NO: 255404 - DNA, 1794 bp, Homo Sapiens
  misc_feature (1001)..(1001): n is a, c, g, or t
  misc_feature (1024)..(1024): n is a, c, g, or t
  misc_feature (1032)..(1032): n is a, c, g, or t
  misc_feature (1036)..(1036): n is a, c, g, or t
  misc_feature (1042)..(1042): n is a, c, g, or t
  misc_feature (1045)..(1045): n is a, c, g, or t
  misc_feature (1047)..(1047): n is a, c, g, or t
  misc_feature (1057)..(1057): n is a, c, g, or t
  misc_feature (1062)..(1068): n is a, c, g, or t
  misc_feature (1070)..(1071): n is a, c, g, or t
  misc_feature (1124)..(1124): n is a, c, g, or t
  misc_feature (1212)..(1212): n is a, c, g, or t
  misc_feature (1215)..(1215): n is a, c, g, or t
  misc_feature (1232)..(1232): n is a, c, g, or t
  misc_feature (1236)..(1236): n is a, c, g, or t
  misc_feature (1254)..(1254): n is a, c, g, or t
  misc_feature (1257)..(1257): n is a, c, g, or t
  misc_feature (1267)..(1267): n is a, c, g, or t
  misc_feature (1279)..(1279): n is a, c, g, or t
  misc_feature (1281)..(1281): n is a, c, g, or t
  misc_feature (1284)..(1284): n is a, c, g, or t
  misc_feature (1636)..(1637): n is a, c, g, or t
tggcggacacggtacctttaatgattaaacacagccagtaccccgcttcccgggaaagaatcagacttcagtagaaattccccacaccctaaccagccttttctggtttctcctggaccagagttgggggaaagggtgggcttcagagaaaaccaaggagtattctcacctccatcccctacccaacccatgccagagagaatggtgacgacatggccaacacggggctgcagcagccatcatggcacatggtggcccactgacgttgtcacctacccagtatgatgtccatcaaagcacccaatgggccaaaaaaggtgttacacagaatggtggccaacttggcacctactgtgccaagtacaccaaaaaagaagtgggcacagcacctaatggggggggccaaagaagatgtcactgaaatgctatcaccatcacacccaaagggccaaccgagatggtggccatcaaaccatgcagtggattagccaataacatccatcaatgtagcagtcctcacagtacccagtgggccaccaaaatgtatccatggtggttatcacagtaccccgtggatcaacaccatgcccactgagacagcagtcatcacagtaagtaatagacccacccagatgttaaccaatgggacaagtgaagtgtcaccagaaggatcaggccccaagagcttcgtggtgtgagctccagccatacccaccaccatgttcccaacccctgctaggatgcattaagcaaagagcgggaatagaggccctggtagtagactccaggctccccaccttcagccccgtagcccccaaaccccacgtccagtttgggaggtgctggtgtctgttctgacattaggttgttgatggagaaagggtggttgaagttgtagggcgcgtccagcttcagctcccctgggagctccaggccagtgaaatagggtgtggaggaagcgggtgagccacagtccagagcccccacatcttccccgcccntggcctcaggctcaggggctggnggcggggntggngcgggnagntnactgtggccncaaannnnnnngnngaggcagcagaccctgtcccgttcctggtggtggtgcagccccgctgcccccntttttcaccttctcctccagcttgaagcgtttctggcggcgcaggtagcagccattctcaaacatgttccctagagctggggtgtagngcncagtaggagcccttgcnaggnttgtctggggaacgcgcnacnttgacgaagnagtcgttgaaananagngagtggcgaatggagttctgccagcgctgctgattctcccggtagtaagggaagaggtccatgatccactggtagatttcactcaaggtcagcatcttgcccggcgcctgctggatggccatggtgatgagtgagatataggaatacggtggcttggcgtgtgccaggggccgccgatacccttcggcatctccttcccgtgcaccagcccaggacccggggccccgtacccggagctgctgctgccaccgctgacacccaggcctgggaaagtgggccccaggggggctgcaggtgctgggggtgccaggggtcctgagggcagtggggaggcagggagccccccaggggnntagggagagcttagaggattcagggtcatgtaggagttgaggggggccatggtgggcactggggtcaccggcgagtagacctcgcccgcctccgggtagtagctccactcggccaggtcatgggcctccatcttcactgagcccagcatcccccggg

SEQ ID NO: 255405 - DNA, 686 bp, Homo Sapiens
  misc_feature (647)..(647): n is a, c, g, or t
gccgggctaactacttcggcgtgtacacccgcatcacaggtgtgatcagctgtatccagcaagtggtgacctgaggaactgtccccctgcaaagcagggcccacctctctggactcagagagcccagggcaactgccaagcagggggacaagtattctggcgcggggtgggggagagagcaggccctgtggtggcaggaggtggcatcttgtctcgtccctgatgtctgctccagtgatggcaggaggatggagaagtgccagcagctgggggtcaagacgtcccctgaggacccaggcccacacccagcccttctgcctcccaattctctctcctccgtccccttcctccactgctgcctaatgcaaggcagtggctcagcagcaagaatgctggttctacatcccgaggagtgtctgaggtgcgccccactctgtaacagaggctgtttgggcagccttgcctccagagagcagatttccagcttcggaagcccctggtctaacttgggatctgggaatggaaggtgctcccatcggaggggaccctcagagccctggagactgccaggtgggcctgctgccactgtaagccaaaaggtggggaagtcctgactccagggtccttgccccacccctgcctgccancctggccctcacagcccagaccctcactgggaggtgagc

SEQ ID NO: 255406 - DNA, 1059 bp, Homo Sapiens
  misc_feature (588)..(606): n is a, c, g, or t
  misc_feature (837)..(845): n is a, c, g, or t
  misc_feature (949)..(957): n is a, c, g, or t
ggtctaagtagcgagcctgggtggcgaattcggcacgaggcctctgcccgccatgccgttcctggagctggacacgaatttgcccgccaaccgagtgcccgcggggctggagaaacgactctgcgccgccgctgcctccatcctgggcaaacctgcggaccgcgtgaacgtgacggtacggccgggcctggccatggcgctgagcgggtccaccgagccctgcgcgcagctgtccatctcctccatcggcgtagtgggcaccgccgaggacaaccgcagccacagcgcccacttctttgagtttctcaccaaggagctagccctgggccaggaccggatacttatccgctttttccccttggagtcctggcagattggcaagatagggacggtcatgacttttttatgattgggcacggagggatccagggcatctgtgaactggctgcttcttccagagagatctcttggcagagtgagggcctggagataaccagctttggattatcccgcatgcaacattcctgtgatcacataatcctcttcttcatcctcatatgaaataaatgaagagagcttcctcattcnnnnnnnnnnnnnnnnnnnctcgaggcatctatgttcgggtgcgggagaaagaggtaatgaaatggcacatgggccatagttgtttcctggacccagcttttcttggaacaaagggggtagaatcttgccgggcccccctataatggagcccgaattaaatttcccaataagccccggttaaccctgcctttaatggaactcggctgccagaacccgggaaattttacccccgcctaaaggggcggggcnnnnnnnnnggtggatcccaagggaaccttcctggaagatcccttcttttttcctggcaagaaaaaccgggctggcttggcacaaaaaacaaaacccccccggctccccagcnnnnnnnnntttgttttggccggaaattgagaaagccttcccacactcttctttttcagaaaggggaaactgtgcttttcacccccaagccgaccattcacccctagatcc

SEQ ID NO: 255407 - DNA, 651 bp, Homo Sapiens
  misc_feature (59)..(100): n is a, c, g, or t
ccagcagcagaatctgttgagttgctgccacaaacaaaaaatacaataaatatttgaannnnnnnnnnnnnnnnnnnnnnnnnnnnnnnnnnnnnnnnnnacgaggaccatcgggggcagagtcgttggagactgaagaggaagaggaggaggagaaggggagtgagcggccgcccccagggaggagatccaggagctggcggccgccgatccgatggagaaggggggacccaggccagcaggagacaggacccccgaagctgaggccttgggatggagcagaagccggagtggcggggcacgctgccgccttccccatcacggagggtccagactgtccactcgggggtggagtgagactgactgcaagccccaccctccttgagactggagctggcgtctgcatacgagagacttggttgaacttggttggtccttgtctgcaccctcgacaagaccacactttgggacttgggagctggggctgaagttgctctgtacccatgaactcccagtttgcgaattatagagacaatctattttgttacttgcacttgttattcgaaccactgagagcgagatgggaagcatagatatctatatttttatttctactatgagggccttgtaataaatttctaaagcctctat

SEQ ID NO: 255408 - DNA, 1180 bp, Homo Sapiens
aagactatggtgcgctctatgagaagccgacagcctgagagtcccagaagaggagccctgtggaccctcccctgccagccactcccttaccctgtgtataagagccaccaccgcctgccatccgccaccatctcccactcctgcagctcttctcacaggaccagccactagcgcagcctcgagcgatggcctatgtccccgcaccgggctaccagcccacctacaacccgacgctgccttactaccagcccatcccgggcgggctcaacgtgggaatgtctgtttacatccaaggagtggccagcgagcacatgaagcggttcttcgtgaactttgtggttgggcaggatccgggctcagacgtcgccttccacttcaatccgcggtttgacggccgggacaaggtggtcttcaacacgttgcagggcgggaagtggggcagcgaggagaggaagaggagcatgcccttcaaaaagggtgccgcctttgagctggtcttcatagtcctggctgagcactacaaggtggtggtaaatggaaatcccttctatgagtacgggcaccggcttcccctacagatggtcacccacctgcaagtggatggggatctgcaacttcaatcaatcaacttcatcggaggccagcccctccggccccagggacccccgatgatgccaccttaccctggtcccggacattgccatcaacagctgaacagcctgcccaccatggaaggacccccaaccttcaacccgcctgtgccatatttcgggaggctgcaaggagggctcacagctcgaagaaccatcatcatcaagggctatgtgcctcccacaggcaagagctttgctatcaacttcaaggtgggctcctcaggggacatagctctgcacattaatccccgcatgggcaacggtaccgtggtccggaacagccttctgaatggctcgtggggatccgaggagaagaagatcacccacaacccatttggtcccggacaggtctttgatctgtccattcgctgtggcttggatcgcttcaatgtttacgccaatggccagcacctctttgactttgcccatcgcctctcggccttccagagggtggacacattggaaatccagtgtgatgtcaccttgtcctatgtccagatctaatctattcctggggccataactca

SEQ ID NO: 255409 - DNA, 251 bp, Homo Sapiens
  misc_feature (251)..(251): n is a, c, g, or t
gcacgagccttgctcaaatgacctgctcacacagaagtctctactcacccacttctttctagctcacacccagaggcagatttcagttctgcacagttccttctgagctgtggggcctcccaccagtccctactctctccaagactcaatttcctcatctgtgagatgggggtaagaagaatcagtgggaataagaggagataaaaatctgtgtagtacttgggcggggtgcggtggctcacccctgtaan

SEQ ID NO: 255410 - DNA, 863 bp, Homo Sapiens
  misc_feature (709)..(769): n is a, c, g, or t
agaaccaggaaggcgctgagcttaaactgaagcaagttcggtggacgccggcggcgccctgatctaaagaaacgactcagggactgcggcgcttgcacgtcaacgggaggtgtgagcccaaagaaatgggacgtcggtcatcagatactgaagaagaaagcagaagcaagagaaaaaagaaacaccgtagacggtcctcctcgagcagttcttcagatagtagaacatacagccgaaagaaaggaggaaggaaatcaagatcaaagtcaagatcttggtccagagatcttcagcctcgttcacattcttatgatagaagacgcaggcatcgatcaagcagtagctcttcttatggctccagaaggaaacgaagtcgaagtcgttcaaggggtcgagggaaatcctatagagttcagaggtctaggtcaaaaagcagaacaagaaggtccaggtcaagacctcgtctccgttctcatagtcgtagcagtgaaaggtccagtcacagaagaacgcgtagtcggtctcgggatagagaacgacgtaagggcagagataaagagaaaagagaaaggagaaggataaagggaaggacaaggaattacataacatcaaacgtggggaatctggaaacatcaaagctggattagaacatctgccaccagctgaacaggccaaagccagactacagctggttcttgaagctgctgcnnnnnnnnnnnnnnnnnnnnnnnnnnnnnnnnnnnnnnnnnnnnnnnnnnnnnnnnnnnnngaggaagaccaagccaccctggtagaacaagtaaaaagagtaaaagaaattgaagctattgaaagtgattcttttgttcagcagacattcagat

SEQ ID NO: 255411 - DNA, 1364 bp, Homo Sapiens
  misc_feature (221)..(233): n is a, c, g, or t
gacaaatgcagagatataagtctctggtctttaatcactgtgggggccattttgtaaaacacacatactgtccagcagactcctttggtcatcccaaatacctctgaactccagggaagatgcattctaactccacgaacttacctattttgttaaccttgattagaccttctggagaagtaaccaatttgtccatcttaggagcaatttggaatgagagnnnnnnnnnnnnnctgtaacgcccatcctgcctgcagtagaccctttgggcttaagaggtcctacagattctaatagtttcctctttgtagatgtgttaacatatttaaaatacttaggacatggcctggtacgtgacagatggtgtttaacatcattgtcatatgaagaacactctctgtgggccaatggaggtgtgccttaaaattcttcatcttgcctgattttgtttgcataacttctggagagtctgtgtcctcctcatctaggccacctttccattttttgtgaaagatgaccttgtccctgcagtctccgccaggagtcacacagcttttcacagcagctgccatctttaattctttttcctgagattccagcaaggttgtgacattgtcacttttttgttctagactcttttaaattttctgcatttgcctgaaaagcacccctgtaagaatagatttctcatggctctaaaaattattcccaagaataccttacttggttcaaaagcagactgtttctcttcatttcatctcaaatcagacttctgggcaagatgttctttagagtaagcaaacctacaacctaaaaatctcttcaagaggcatctctggtcttgtgacgagacctcttcaaaaacccacagtaaaactcccctccctccagttggccaccagtctgccaccaaacatgaacaaattctgctgctaatcggtttcccttgtgatctggttcctgaggtcttcggatctgtgcaatgaattatttattgttttattaaaccgacagtggtgtcccagagaggacccataaataaaatggaaatctggtgctgtgataaagtaataactagcattaatgagacctggttttcctttcagaaagtccagtatacctgtaacaaaggttaaagcaatttatatttaatttgcattctgatgttaacatttaaacagcaattctaacaaaaatgcatcgagtctaattcttacctctatcaaaaaacaactgtataaatttatgaccaacattaaaacaaaaacaaaatgtaaattttctctttagaaatgattaactggaaatgagtgagacagcaccttgtgggttttttagtaataaaaagctcttttcaaccgaaa

SEQ ID NO: 255412 - DNA, 464 bp, Homo Sapiens
gttattttttacaatggtttaggttgttaagtctcctttcgtatgtaaggtagttttttcaacatctaaaatttttgttttagccttcaaaaccaacttaccaacctcagtccagctgggaaggcagcgttgattatggtagtttgtcaagaatatatggacctggaaacactttctctctctgtccacctggtagataaattgtcctgttgagaatttttagatctggactggaactgccaggaccaccgcctccagggagtcgctgggcacctgggaggtatcgtcgatgcctctcccccatctttagaaaattttgctcttctgaggtcattattattttgaagaatgattaggattgataagggtcccatgaccagcatttatggaaaatgccgagagtggggaagggacacagttttgaggactttcccttagaaaaaagttgaaagtttaggggttag

SEQ ID NO: 255413 - DNA, 594 bp, Homo Sapiens
  misc_feature (431)..(431): n is a, c, g, or t
  misc_feature (436)..(444): n is a, c, g, or t
ccacggtaggcgtcattcccgagatgggagccagtccaggggtcagcaggagccagcgctgggcacacgtgccctggctgaggccagcggcatcctgggtggcccaggtccatcctgggcagcaaaggcgtgtccccttctgtcagacagcttcacagagtgtggcttcaccagtcagagggagcagtccggagaggcaagatgaccccaccgggactgcagagcctcctccttactaacaaggacctgtccgcagccgcgaggtccttcactcccaccctgtaattgtggggggagtgccagcaacaggcctgtcccctggcaagttggccacggaacccaccatgcactgcaaggctgtgacagcctgggcacccctgcttctcctctgcttgtacggttcccccaataaatcctattttccatctcgnaactnnnnnnnnncccggtcccgaatttgcctataaggaggggtttacattgaatggccgtggtttacaaagccgtgacgggaaaaaacctgctgtccccaattaggcttgaagacatacccctttgccaggtgggctattcgggccggcgttgcccttttcc

SEQ ID NO: 255414 - DNA, 1407 bp, Homo Sapiens
  misc_feature (898)..(914): n is a, c, g, or t
gggagtctggtttccaggttgccgtttttgggggctctgggtgtggcggttgccgtagctgaaattggctgcaccatgtcggccttcgagaagcctcagatcatcgcccatatccagaagggcttcaactacacggtgtttgactattgaaaaggccaaacctattaaatgtggaacatttggtgcaacatctttacagcagagatatttagctactggagattttggtggaaaccttcatatatggaatttagaagctccagagatgccagtatattctgtaaagggccataaagaaattataaatgccatagatggcataggtggactaggaattggagaaggagcacctgaaattgtgactggcagccgagatggaactgtgaaggtgtgggacccaaggcaaaaagatgatcctgttgctaatatggaacctgtacaaggagaaaacaagagagactgttggactgtggcatttggcaatgcttataatcaagaagaacgtgttgtttgtgctggctatgacaatggggatatcaaactatttgatctcagaaatatgccattacggtgggagacaaacatcaaaaatggggtgtgtaccttgggagtttgacagaaaagacataagtatgaataagttagtagccacatctctggaaggaaagttccatgtttttgacatgagaacacagcatccaaccaaaggttttgcctctgtttcagaaaaggctcataaatctactgtgtggcaggtccgacacctgccgcagaacagggagctctttctgacagctggaggcgccggcggccttcacctctggaagtagtaagtctgccagtgcacactgctccttttaaagttacctgtgggtgtaaagtaggattagattgaacnnnnnnnnnnnnnnnnncctgctttgacttagttcattttgatatgatttaaaatttcatggtgttacataacttgttttctaaggcattttgtatgaatatactttacacttagtagagtgtacactaatcttcttttgatacattttagtatatcattttagttgtgtcttctaagtatgaaaaagttggcccaagacttttatcagatacttatcttgaagtgattagaacactcactgcctctaaaagatggggaaagggttccttgcctaaatttagataacatcattgtgatagaccccaacagagcctgaggctgctgattggtctcccaggaaagatcttatcactgaatttgctttctgcatatctaggcagggtgagttacaatgaaagcttttactatgcacaccactttctgaatcccaagggcgctaacatcacagatactagatcatttaaaaggttctgatatcattgctcagggttggcctgtgaaaaggaccc

SEQ ID NO: 255415 - DNA, 2222 bp, Homo Sapiens
  misc_feature (1304)..(1312): n is a, c, g, or t
cggcggctgctgccatggtggctggcggccgggtaagggtctgagtggatctcctgccaggccagagcgccttcgggggccgcggcggaaggccaggagtttgcagccagggcgccgggtttgtggtctgcagtgtcgtgaggctgaggtgcagcatgtctagactgggagccctgggtggtgcccgtgccgggctgggactgttgctgggtaccgccgccggccttggattcctgtgcctcctttacagccagcgatggaaacggacccagcgtcatggccgcagccagagcctgcccaactccctggactatacgcagacttcagatcccggacgccacgtgatgctcctgcgggctgtcccaggtggggctggagatgcctcagtgctgcccagccttccacgggaaggacaggagaaggtgctggaccgcctggactttgtgctgaccagccttgtggcgctgcggcgggaggtggaggagctgagaagcagcctgcgagggcttgcgggggagattgttggggaggtccgatgccacatgggaagagaaccagagagtggctcggcggcgaaggtttccgtttgtccgggagaggagtgactccactggctccagctctgtctacttcacggcctcctcgggagccacgttcacagatgctgagagtgaagggggttacacaacagccaatgcggagtctgacaatgagcgggactctgacaaagaaagtgaggacggggaagatgaagtgagctgtgagactgtgaagatggggagaaaggattctcttgacttggaggaagaggcagcttcaggtgcctccagtgccctggaggctggaggttcctcaggcttggaggatgtgctgcccctcctgcagcaggccgacgagctgcacaggggtgatgagcaaggcaagcgggagggcttccagctgctgctcaacaacaagctggtgtatggaagccggcaggactttctctggcgcctggcccgagcctacagtgacatgtgtgagctcactgaggaggtgagcgagaagaagtcatatgccctagatggaaaagaagaagcagaggctgctctggagaagggggatgagagtgctgactgtcacctgtgggatgcagcgctttgtggtcagctggctgagcatgagagcatccagaggcgcatccagagtggctttagcttcaaggagcatgtggacaaagccattgctctccagccagaaaaccccatggctcactttcttcttggcaggtggtgctatcaggtctctcacctgagctggctagnnnnnnnnnctgctacagccttgcttgaaagccctctcagtgccactgtggaagatgccctccagagcttcctaaaggctgaagaactacagccaggattttccaaagcaggaagggtatatatttccaagtgctacagagaactagggaaaaactctgaagctagatggtggatgaagttggccctggagctgccagatgtcacgaaggaggatttggctatccagaaggacctggaagaactggaagtcattttacgagactaaccacgtttcactggccttcatgacttgatgccactatttaaggtgggggggcggggaggcttttttccttagaccttgctgagatcaggaaaccacacaaatctgtctcctgggtctgactgctacccactaccactccccattagttaatttattctaacctctaacctaatctagaattggggcagtactcatggcttccgtttctgttgttctctcccttgagtaatctcttaaaaaaatcaagattcacacctgccccaggattacacatgggtagagcctgcaagacctgagaccttccaattgctggtgaggtggatgaacttcaaagctataggaacaaagcacataacttgtcactttaatctttttcactgactaataggactcagtacatatagtcttaagatcataccttacctaccaaggtaaaaagagggatcagagtggcccacagacattgctttcttatcacctatcatgtgaattctacctgtattcctgggctggaccacttgataacttccagtgtcctggcagcttttggaatgacagcagtggtatggggtttatgatgctataaaacaatgtctgaaaagttgcctagaatatattttgttacaaacttgaaataaaccaaatttgatgtt

SEQ ID NO: 255416 - DNA, 789 bp, Homo Sapiens
gggacggaaagcgggagggacaaattgccaatgtttggagtctggtttccaggttgccgtttttgggggctctgggtgtggcggttgccgtagctgaaattggctgcaccatgtcggccttcgagaagcctcagatcatcgcccatatccagaaaggcttcaactacacggtgtttgactgtaagtgggtgccctgcagcgccaaatttgtgaccatgggcaacttcgcacggggcaccggcgtcattcagctgtacgagatccagcacggggacctgaagctgcttcgggagattgaaaaggccaaacctattaaatgtggaacatttggtgcaacatctttacagcagagatatttagctactggagattttggtggaaaccttcatatatggaatttagaagctccagagatgccagtatattctgtaaagggccataaagaaattataaatgccatagatggcataggtggactaggaattggagaaggagcacctgaaattgtgactggcagccgagatggaactgtgaaggtgtgggacccaaggcaaaaagatgatcctgttgctaatatggaacctgtacaaggagaaaacaagagagactgttggactgtggcatttggcaatgcttataatcaagaagaacgtgttgtttgtgctggctatgacaatggggatatcaaactatttgatctcagaaatatggcatttacggtgggagacaaacatcaaaaaatgggggtgtggtagctttggagttttgacagaaaaagacattaggtta

SEQ ID NO: 255417 - DNA, 1898 bp, Homo Sapiens
  misc_feature (452)..(468): n is a, c, g, or t
  misc_feature (637)..(638): n is a, c, g, or t
  misc_feature (930)..(942): n is a, c, g, or t
atttattcaacactccggaaaaaattttcataaacaatacctcctgttacccaaactcttccagccgcccacattattccagctatgtggtaaccaccacgtaaacgaccgtgaaaaggttttaataatttaccctatgagcccttttaaatctcccctagtaaggtaatttgcgcccaagtaatggtcaaccacccccccacagagaagtataaggttctccttctcccacaagagtctccccaagcgatataaccacattcgtcctcctcacatcaccgacacgttgttataacagaccgcgcccactctcccctagcgctttttattccgcgctcccctattatagggagcccaccttttaacaaaaaaactctgggtaacccctataactcttgggcccctctcgcagagggaataatctctctctagagagcgcgccgcccctctcnnnnnnnnnnnnnnnnngcacgaaataaattttatttttaattttcagaaagtaaaaaaaaggttataatactttaactgttaacaagggcttaagttgatatccagttaacctaatactgcattaatgtttttattcttttcttgaaaatactcaaatacacctacattgtgctcttttaaaaannaaataaggatacttacatttaaaaagttttttgaggaagaaaattgtacaacattcatgtttttcatgacactgaatgatatatcaatttatctcttagaagaaaaagtagcataattaaaatcactggttccctaatcttcaactctctctccacaaataaaacctacctcttttcacaataaaaaagcaaaaaataatatacaatcaaaaggagctaaactgaaactctttatcccctttgtcaaaagataaattaattgtgggagatcaacataacaatcatcactgannnnnnnnnnnnnaccatttagctctggttcaaaagataaataataatctataatccagaaatgtatacaaacttcttatcacattttcccttattctgtaaaaaaggaaaataggtttaatgtttaaaagaagcattagtgtgatattattaccgaaaaacaattttgctattatcacagctcaaaaagtacccacaggaatctttcaggaaacaggttactgtacatttcacaaaacgtgaaattaggtgatcataaatacacaagaaaaacaaaaccattttttgtccttagttatattgatccctcccagcctgaaattcagatgaagactaaacaacttctgcagatcacatctatctattttagcaacttaatggaaatgaaaagcaatcttcattttaaaataagtatcataacaccatttttgaaacgcaaatgaaactctcatcatataagagcatgtcagtatcaaatttttgtatcatgacaattaggtaccataatcaatgaatataatttgaagctctcaaattatttattttcaattcaagtgaagacaattaggccactgcagtcatttcctcatctgaatcacttgattcatcgtttagttccaattcccccaaatcttggtctacagttataatagttttcctcttgcacgtcttgggaattgcatcattagcgcaaatttttctcattttaatgtttggtaatttcttcagatcaaagtcccattccctaaatgttttcagattacttgcatttagaatgtctggaatctcaaggccatatccctcaaactgctgtcgctcccgctccatcgtcagcttgatgacggtctcccgggaacagtgccgcctcccctgcctgtccctgatactgttatgtaactcaatctgctccagctcacctcgtgccgctcgtgccgaattcttggcctcgagggccaaattccctatagt

SEQ ID NO: 255418 - DNA, 1040 bp, Homo Sapiens
  misc_feature (183)..(286): n is a, c, g, or t
  misc_feature (298)..(429): n is a, c, g, or t
actatagggaatttggccctcgaggccaagaattcggcacgagcggcacgaggtaatctggctcttcccaaaattatggtgaccacgttgtcattaatataattggtaacaggtatttggtctgcaacatgtttgtgggttttgttgttgctgttgtttgagaaagggtgtccctctgtccannnnnnnnnnnnnnnnnnnnnnnnnnnnnnnnnnnnnnnnnnnnnnnnnnnnnnnnnnnnnnnnnnnnnnnnnnnnnnnnnnnnnnnnnnnnnnnnnnnnnnnngtgttgccactnnnnnnnnnnnnnnnnnnnnnnnnnnnnnnnnnnnnnnnnnnnnnnnnnnnnnnnnnnnnnnnnnnnnnnnnnnnnnnnnnnnnnnnnnnnnnnnnnnnnnnnnnnnnnnnnnnnnnnnnnnnnnnnnnnnnatgagccactgttcctggctttctaacttaattgtttctttctcttcctctgtttttgatgtgtgaatatgaaatttgaaaatccccgttcttcattaaaattacagtagccatttaacagaattaatattctttgggaaaaaaatatggaaatattgttttcaggtaaacaagacaaagcctcaaaatgaaaatggttttgccccttatcctatacccttctcagtcatacaccagccatctgcattctcctcaaggagaaggaaggctgagtgctgatggaggtagagtaggcagaatggacttctcaagaggatctgccacatcccaaactgcagcctccggacttgctattatgtgagaaagataaacttccctacttgttttttagtccctgtttttcagattgtcgttacaaaaatttttctacctgacagataagattgttatttttcactgggaatagaatgcagcatttgagagtgaatcttccattttcatggcttagaaaaacttcatgaaaacctttttccactgctgaggtggatctatttagttcatgttgcctgagatacaaaatgtgggaataaaagtagaattatgacctgcta

SEQ ID NO: 255419 - DNA, 861 bp, Homo Sapiens
  misc_feature (76)..(98): n is a, c, g, or t
  misc_feature (120)..(221): n is a, c, g, or t
  misc_feature (234)..(306): n is a, c, g, or t
gaaaatactagttaataatctccggttaatgaaataattatcttagataaatttactgaacttaatgtagaatatnnnnnnnnnnnnnnnnnnnnnnngagacagggtctcacttgtcannnnnnnnnnnnnnnnnnnnnnnnnnnnnnnnnnnnnnnnnnnnnnnnnnnnnnnnnnnnnnnnnnnnnnnnnnnnnnnnnnnnnnnnnnnnnnnnnnnnnngtgtgtgccactnnnnnnnnnnnnnnnnnnnnnnnnnnnnnnnnnnnnnnnnnnnnnnnnnnnnnnnnnnnnnnnnnnnnnnnnncctgagttaaagcagtctgcttgtctctgtctgccagagtgctggcattataggcatgagccaccacccccttcttccactttcatttcaaacagttatgaagcagccactgaaaccggactctcgacaatgccaaaggaggttttgttttcttgtctttccatgtctttgctgtggtttgctctgaaactagaattaaacagctttttaaattgataaaaaagaaccaatgcaaataaaactacggtctgtagagtaaatggaaaaagttgtagaagtaataataaactacttttaaacaaatgagtaaggtagtagatattttgcaagaagtaaatagccaagtgtaaaagctgtcagttactttcatcaatcaggttagttgcagtcacgcaaattttaggtgattatataaggaactcaaattaggaatctttaaatgtaaatgacctaatactaaaaactacccaaaaaatatattcaaagataaatagaagaaatacttatgcatttgaaaaaatcgatcattccacagttcctctgaatcaaaggtaa

SEQ ID NO: 255420 - DNA, 450 bp, Homo Sapiens
  misc_feature (25)..(25): n is a, c, g, or t
  misc_feature (65)..(196): n is a, c, g, or t
  misc_feature (208)..(272): n is a, c, g, or t
ccacatcaaaaacagaggaagaganagaaacaattaagttagaaagccaggaacagtggctcatnnnnnnnnnnnnnnnnnnnnnnnnnnnnnnnnnnnnnnnnnnnnnnnnnnnnnnnnnnnnnnnnnnnnnnnnnnnnnnnnnnnnnnnnnnnnnnnnnnnnnnnnnnnnnnnnnnnnnnnnnnnnnnnnnnnnagtggcaacacnnnnnnnnnnnnnnnnnnnnnnnnnnnnnnnnnnnnnnnnnnnnnnnnnnnnnnnnnnnnnnnnncaacaagctgtgatcacacttactgcactgcagcctgggctggacagagggacaccctttctcaaacaacagcaacaacaaaacccacaaacatgttgcagaccaaatacctgttaccaattatattaatgacaacgtggtcaccataattttgggaagagccagattacctcgtgcc

SEQ ID NO: 255421 - DNA, 889 bp, Homo Sapiens
  misc_feature (853)..(853): n is a, c, g, or t
  misc_feature (857)..(857): n is a, c, g, or t
ccagttgatttggtaactgctacggaccaaaaagttgaaaaaatgcttatctcttccataaaggaaaagtatccatctcacagtttcattggtgaagaatctgtggcagctggggaaaaaagtatcttaaccgacaaccccacatggatcattgaccctattgatggaacaactaactttgtacatagatttccttttgtagctgtttcaattggctttgctgtaaataaaaagatagaatttggagttgtgtacagttgtgtggaaggcaagatgtacactgccagaaaaggaaaaggtgccttttgtaatggtcaaaaactacaagtttcacaacaagaagatattaccaaatctctcttggtgactgagttgggctcttccagaacacccagagactgtgagaatggttcctttctaatatggaaaagcttttttgcattcctgttcatgggatccggagtgttggaacagcagctgttaatatgtgccttgtggcaactggcggagcagatgcatattatgaaatgggaattcactgctgggatgttgcaggagctggcattattgttactgaagctggtggcgtgctaatggatgttacaggtggaccatttgatttgatgtcacgaagagtaattgctgcaaataatagaatattagcagaaaggatagctaaagaaattcaggttatacctttgcaacgagacgacgaagattaattaaggcagcctcatagtcaatcccagttgcttttccccagatttggtgactcatcaatggatatgtgtttttggatgtatgatatgccttgctttaaattctccttggtcaggtcaaaaaaattggaacntggnttcctaattttaacaatgcctaaggtttgcca

SEQ ID NO: 255422 - DNA, 1953 bp, Homo Sapiens
  misc_feature (1123)..(1144): n is a, c, g, or t
  misc_feature (1253)..(1310): n is a, c, g, or t
  misc_feature (1558)..(1558): n is a, c, g, or t
  misc_feature (1748)..(1748): n is a, c, g, or t
  misc_feature (1765)..(1865): n is a, c, g, or t
  misc_feature (1868)..(1868): n is a, c, g, or t
gttcggggtatctccgccaggctgctggtacctgcgtccgcccggcgagcaggacaggctgctttggtttgtgacctccaggcaggacggccatcctctccagaatgaagatcttcttgccagtgctgctggctgcccttctgggtgtggagcgagccagctcgctgatgtgcttctcctgcttgaaccagaagagcaatctgtactgcctgaagccgaccatctgctccgaccaggacaactactgcgtgactgtgtctgctagtgccggcattgggaatctcgtgacatttggccacagcctgagcaagacctgttccccggcctgccccatcccagaaggcgtcaatgttggtgtggcttccatgggcatcagctgctgccagagctttctgtgcaatttcagtgcggccgatggcgggctgcgggcaagcgtcaccctgctgggtgccgggctgctgctgagcctgctgccggccctgctgcggtttggcccctgaccgcccagaccctgtcccccgatcccccagctcaggaaggaaagcccagccctttctggatcccacagtgtatgggagcccctgactcctcacgtgcctgatctgtgcccttggtcccaggtcaggcccaccccctgcacctccacctgccccagcccctgcctctgccccaagtggggccagctgccctcacttcctggggtggatgatgtgaccttccttgggggactgcggaagggacgagggttccctggagtcttacggtccaacatcaggaccaagtcccatggacatgctgacagggtcccccgggagaccgtgtcagtagggatgtgtgcctggctgtgtacgtgggtgtgcagtgcacgtgagagcacgtggcggcttctgggggccatgtttggggagggaggtgtgccagcagcctggagagcctcagtccctgtagccccctgccctggcacagctgcatgcacttcaagggcagcctttgggggttggggtttctgccacttccgggtctaggccctgccccaaatccagccagtcctgccccagcccacccccacattggagccctcctgctgctttggtgcctcaaataaatacagatgtcccccagnnnnnnnnnnnnnnnnnnnnnntacacaccccccaataaccacaaaaacaacaccaaaaccctatcacccataccataccaaaccaaaccacttaaacccacacaccaaaagatacccaatcccccgtccnnnnnnnnnnnnnnnnnnnnnnnnnnnnnnnnnnnnnnnnnnnnnnnnnnnnnnnnnngctcctttcccctccaacgttccttcgtttgcgcgctcgctcgtccgctcccacgaaaccccgtcttttcaccgcactttttcccttttcgcttggccggccctctccccggcgcgagacagataacggccgcaggtctctcgcttccgcgttccctcgaccacaaaagcctccgcggggccgatcgctaaaagcgccggtccttcgtttagccgctccccctactccccatccacaataaaggccanacgcctcgcggttgccgcggcgcggcccaaagaccgtgaatgctcgcctcgcgcgaaacaacacagcgctttccccgccgagtgttaatccttccccgtgttcgcccctacccatctccgccgatgcctcaccccgccacacattatcgccctcccctcacccagaggcactacccccctttcactatanacgccctggccacctcnnnnnnnnnnnnnnnnnnnnnnnnnnnnnnnnnnnnnnnnnnnnnnnnnnnnnnnnnnnnnnnnnnnnnnnnnnnnnnnnnnnnnnnnnnnnnnnnnnnnngtnttccaatttaccgccctcctttcccctccccgctatacaccctccccagtttcccccctgtcgcctgtattccgtcaccccccgg

SEQ ID NO: 255423 - DNA, 942 bp, Homo Sapiens
gggggggccgcgcggctgcctgggaggctccgggccagccgcggtccagagcgcgcgaggttcggggagctcggccaggctgctggtacctgcgtccgcccggcgagcaggacaggctgctttggtttgtgacctccaggcaggacggccatcctctccagaatgaagatcttcttgccagtgctgctggctgcccttctgggtgtggagcgagccagctcgctgatgtgcttctcctgcttgaaccagaagagcaatctgtactgcctgaagccgaccatctgctccgaccaggacaactactgcgtgactgtgtctgctagtgccggcattgggaatctcgtgacatttggccacagcctgagcaagacctgttccccggcctgccccatcccagaaggcgtcaatgttggtgtggcttccatgggcatcagctgctgccagagctttctgtgcaatttcagtgcggccgatggcgggctgcgggcaagcgtcaccctgctgggtgccgggctgctgctgagcctgctgccggccctgctgcggtttggcccctgaccgcccagaccctgtcccccgatcccccagctcaggaaggaaagcccagccctttctggatcccacagtgtatgggagcccctgactcctcacgtgcctgatctgtgcccttggtcccaggtcaggcccaccccctgcacctccacctgccccagcccctgcctctgccccaagtggggccagctgccctcacttctgggggtggatgatgtgaccttccttgggggaccgcggaaagggacgaggggttccctgggagtctttacggtccaacatcaggaaccaagtccccatggaacatgcctgacagggttccccaagggagacccgtggtcagtaagggatgtggtgcctgggctggggtacggtggggtggtgccagta

SEQ ID NO: 255424 - DNA, 387 bp, Homo Sapiens
  misc_feature (87)..(87): n is a, c, g, or t
atgcctaaaatatctcaaggtactcactgaataaagccatgccacctgctttggtttcctatcctgcaaatgaaatgccctaactcnagcccccttaacccaagaaagcctaagcaagtataatccatgaaaatcccatggggtaataagttcctgtttttcctacaagcactgtcccaggggggtacacacctgccttaaaatcaactaaacccttgctcttcaaaatatggtgacagaagtctataaagaaaaccccactcaaggctgatctcattttaatgagatccctgagtaactcatagactcattagaagctgccctagattgtgtgcaagtgcaggtcccggtgctccccacggccacccatttttctgttgacagttc

SEQ ID NO: 255425 - DNA, 768 bp, Homo Sapiens
ctcgagccctggtgccgaattcggcacggagggaaaaagcagatgtgagaactcaaggttcagggctgctcttctaagaaacaagtctgccataatctccatctgtgttggaatctgttaactaatgaactggtctctgtgcaaatcctgagtgctaaagcttccaacaagactgatgctagctcgtgtcaccaggaagatgctacgtcatgccaagtgttttcagcgcctagcaatttttggttctgtgagggcactgcataaagataatagaacagcaacccctcagaatttctccaactatgaatccatgaaacaggacttcaaactggggattccagagtatttcaactttgctaaagatgtcctggaccaatggactgataaggaaaaggctggaaagaaaccttcaaatccagccttctggtggatcaacagaaatggagaagagatgcgatggagttttgaggaactgggatctctgtccagaaaatttgccaatatactttcagaagcctgttccctacaaagaggagatcgggtaattctgattctgcccagggtcccagagtggtggcttgcaaatgtggcctgtctgcgaacagggacagttttaattccaggaaccactcagctgacccagaaagacattctctacagactacaatcttcaaaagcaaactgcattatcaccaatgatgttttagccccagcagtagacgctgttgcatccaaatgtgaaaatctgcactccaagctgattgtatc

SEQ ID NO: 255426 - DNA, 800 bp, Homo Sapiens
  misc_feature (90)..(90): n is a, c, g, or t
cccgggctccagaattcgggcccaaaaaatttctagaagttaatgtagaaaaaatctagatgcctttagtttggggatgcctttttaaancacccccaaaagcacaatccttgaaagaaccaattgataagttctgggtcattaaaattagaagcttctgctctgcaaaagaattgtcaagagaatgacaatacaagctacagactaggagaacatatttgcaggggacatacctgataagggctttacattcaaaatacacaaagaactgttaaaactcaatagaaaacaacccaattaaagaatgggcaaacgatctgagcagacacctccccaaagaaaatatacacatagcaaataagcataaggaaagatgctccatatcatatgtcagtagccatttcaaattgaaacaataatgatgtaccactactcacctattagaatggctaaaatccaaagctgacaacatcaaatgctgacaaggaggtggctcaacaggaactgtcattcattgatggtgggaatgcaaaatgacacagctactttggaagacaaattggcggtttcttgcaaagctaaacatattcttaccatgtgctacagcaatcatgctcttcggtattaacccaaatgagttgaaaacatatagcaacacaaaaacctctgcacagatgtttatagcagctttattcataattgccaaatcttgtaagcaaccaagatgttcttcaacaagtgaatggataaatgaactgtaatatgttcatacaatgaaatacggcagggcttgatggctc

SEQ ID NO: 255427 - DNA, 1590 bp, Homo Sapiens
gggctcctcccggggtttgtagcggaggaggagcgggcgccatggcggttctactggagaccactttaggcgacgtcgtcatcgacttgtacaccgaagaacggccgcgtgcctgcttgaatttcttgaaactgtgcaaaataaaatattacaattattgccttattcacaatgtacagagggattttatcatacaaactggcgatcctacagggactggccgtggaggagagtctatctttggccaactgtatggtgatcaagcaagcttttttgaggcagaaaaagtcccaagaattaagcacaagaagaaaggcacagtgtccatggtgaataatggcagtgatcaacatggatctcagtttcttatcaccacaggagaaaatctagattatcttgatggtgtccatacggtgtttggtgaggtgacagaaggcatggacataattaagaaaattaatgagacctttgttgacaaggactttgtaccatatcaggatatcaggataaatcatacggtgattttagatgatccatttgatgaccctcctgatttattaatccctgatcgatcaccagaacctacaagggaacaattagatagtggtcgaataggagcagatgaagaaattgatgatttcaaaggaagatcagctgaggaagtagaagaaataaaggcagaaaaagaggctaaaactcaggctatacttttggagatggttgggagacctacctgatgcagatattaaacctccagaaaatgtactgtttgtgtgtaaattgaacccagtgaccacagatgaggatctggaaataatattctctagatttgggccaataagaagttgtgaagttatccgagactggaagacaggagagtccctctgttacgcttttattgaatttgaaaaggaagaagattgtgagaaagcattcttcaaaatggacaatgtgcttatagatgacagaagaatacatgtggattttagccagtcggttgcaaaggttaaatggaaaggaaaaggtgggaaatacaccaagagtgatttcaaggagtatgaaaaagaacaggataaaccacctaatttggttctgaaagataaagtaaagcccaaacaggatacaaaatacgatcttatattagatgagcaggccgaagactcaaaatcaagtcactcacacacaagtaaaaaacacaagaagaaaacccatcactgttctgaagagaaagaagatgaggactacatgccaatcaaaaatactaatcacgatatctatagagaaatggggtttggtcactatgaagaagaagaaagctgttgcgagaaacaaaagagtgaaaagagagaccgaactcagaaccgaagtcgtagccgatctcgagagagggatggccattatagtaatagtcataaatcaaaataccaaacagatctttatgaaagagaaaggagtaaaaagagagaccgaagcagaagtccaaagaagtccaaagataaagaaaaatctaagtatagatgaaagatgaagaggcagaattgagaggctaacatatttactcttgtctaacttaagagtgccagggaaagc

SEQ ID NO: 255428 - DNA, 925 bp, Homo Sapiens
  misc_feature (913)..(913): n is a, c, g, or t
gccgctgccgcccgagcccgggtcgcgtacttgctgaggcaactgcaacgcgcagccccctggactttcaccttctgggaaaacaacagattatgcctttgagatggctgtttcaaatattagatatggagcagcagttacaaaggaagtatgaatggacctaaaaaacatgggtgctaaaaatgtgtgcttgatgacagacaagaacctctccaagctcccttctgtgcaagtagctatggattccctagtgaagaatggcatccactttacggtttatgataatgtgagagtggaaccaacggattcaagcttcatggaagctattgagtttgcccaaaagggagcttttgatgcctatgttgctggccgtgggtggctctaccatggacacctgtaaggcctgctaatctgtatgcatccagccctcattctgaattcctagattatgtcagtgcccccattggcaaggaaaaccctgtgtctgtgcctcttaagcctctaattgcagtgccaactacctcaggaacccggagtgaaacaactggggttgccattttttgactataaacacttgaaagtaaaaattggcatcacttcgagagccatcaaacccacactgggactgattgatcctctgcacaccctccacatgcctgcccgagtggtcgccaacagtggctttgatgtgctttgccatgccctggagtcatacaccaccctgccctaccacctgcggagccctgcccttcaaatcccatcacacggcctgcgtaccaggggcagcaacccaatcagtgacatttggggctattccacgcgctggggattcgtgggttaagtatcttgaaggagggctgttcaggaaatcccgatggatctttgaaaggcaaggtcttcatattggcatttnggcaagtgtttt

SEQ ID NO: 255429 - DNA, 639 bp, Homo Sapiens
gcatgctgaatgtactggacacactgaggcatcttcagtgtgcacccatgtatcgggatggcctcaggcgagagagcgtgtgacttcaagtacggtagactattgactggccggacattatacaataaattctcgtctatgtggtcaacttatactagctataaggcacagtcagcagcttaactgatgttcctcgacattcgaagaagttctccgtagtactactttatggatctgaacggaagtcatgtagaatatcactgtcctgtacggactgtacttactagaactgccctaatcgctatatgttagatactagtcgataagactctaagattgcgctacacatactgacaatgtcctaacttacattgactcaatctgtccatgactcatcggactgatgagaattctgcggtgatgcctgataccttgagatcctaggtatgtacctataggagaccattggccgctgaatgcacatctatatcagtgcagaacaactgcgttaccgcacacttgcacagacggatgctagcttttagtagtctaagaccgtatgtatacgtcatggctaatatctcctttccaccttatctgatccttaacataaggccattataggccttcactggcttc

SEQ ID NO: 255430 - DNA, 644 bp, Homo Sapiens
gggccatgggcaacactatatggtgagtgatcagcatcagtgtgatgatggagtatatctaggctagatggtatacaatagcgcacgtacacctcctaaagcagtgcggatctgagcagtgtgtggtgtataggcagttcattcgccttgatgttagatgtgctatatagcgtctggctagtgtccaatagtctcgatagcctaggaggtctggtgagtcaagcattactgtcagaactcacatcagtccgagtatcatggatagattgtgtcagtgtgagtagtaagactgtcaggttcgatcgcaatggcagagtctttcctacaggagctgacatataccgattagcgcagttctagcaggtacagtacgtataggacactgatattcgacagtaactatcgactcagagccataaaatagtactacggagacatttgtcgacatgagaagcactatcagtgaagcagcgaactgtgcctgacacaaagtaaagttgaccgcatagagagaatgtaatgtataaggcccggcaagttaatagtcgaccggacttgaagacataccctatgtagcctgaggccataccaataaataggtgcataatgaagatgcctcagtgtgtccagtacatacagcatgc

SEQ ID NO: 255431 - DNA, 1750 bp, Homo Sapiens
  misc_feature (1297)..(1309): n is a, c, g, or t
  misc_feature (1384)..(1575): n is a, c, g, or t
  misc_feature (1578)..(1578): n is a, c, g, or t
  misc_feature (1585)..(1585): n is a, c, g, or t
  misc_feature (1635)..(1635): n is a, c, g, or t
  misc_feature (1693)..(1693): n is a, c, g, or t
ggcctgggtggcgaattcggcacgaggccccatcatgggcagccagagctccaaggctccccggggcgacgtgaccgccgaggaggcagcaggcgcttcccccgcgaaggccaacggccaggagaatggccacgtgaaaagcaatggagacttatcccccaagggtgaaggggagtcgccccctgtgaacggaacagatgaggcagccggggccactggcgatgccatcgagccagcaccccctagccagggtgctgaggccaagggggaggtcccccccaaggagacccccaagaagaagaagaaattctctttcaagaagcctttcaaattgagcggcctgtccttcaagagaaatcggaaggagggtgggggtgattcttctgcctcctcacccacagaggaagagcaggagcagggggagatcggtgcctgcagcgacgagggcactgctcaggaagggaaggccgcagccacccctgagagccaggaaccccaggccaagggggcagaggctagtgcagcctcagaagaagaggcagggccccaggctacagagccatccactccctcggggccggagagtggccctacaccagccagcgctgagcagaatgagtagctaggtaggggcaggtgggtgatctctaagctgcaaaaactgtgctgtccttgtgaggtcactgcctggacctggtgccctggctgccttcctgtgcccagaaaggaaggggctattgcctcctcccagccacgttccctttcctcctctccctcctgtggattctcccatcagccatctggttctcctcttaaggccagttgaagatggtcccttacagcttcccaagttaggttagtgatgtgaaatgctcctgtccctggccctacctccttccctgtccccacccctgcataaggcagttgttggttttcttccccaattcttttccaagtaggttttgtttaccctactccccaaatccctgagccagaagtggggtgcttatactcccaaaccttgagtgtccagccttcccctgttgtttttagtctcttgtgctgtgcctagtggcacctgggctggggaggacactgccccgtctaggtttttataaatgtcttactcaagttcaaacctccagcctgtgaatcaactgtgtctcttttttgacttggtaagcaagtattaggctttgggggtgggggggaggtctgtaatgtgaaacaaccttcttgtctttttttctcccactgttgtaaataacttttaatggccaaaccccagatttgtacnnnnnnnnnnnnnctaactgctaaaaccattctcttccacctggttttactgtaacatttggaaaaggaataaatgtcgtccctttannnnnnnnnnnnnnnnnnnnnnnnnnnnnnnnnnnnnnnnnnnnnnnnnnnnnnnnnnnnnnnnnnnnnnnnnnnnnnnnnnnnnnnnnnnnnnnnnnnnnnnnnnnnnnnnnnnnnnnnnnnnnnnnnnnnnnnnnnnnnnnnnnnnnnnnnnnnnnnnnnnnnnnnnnnnnnnnnnnnnnnnnnnnnnnnttntgcggtnctctccatttattaaaaacaaaaatgcgtaaacggcgcgtccccaaccanacccggagagaaaaaataaagagggaaaccccaaacaaaataaataggctcccccggnccccggagtctttctaaaaacaaacccaccgcgggcacccaaagaccactttgtgtg

SEQ ID NO: 255432 - DNA, 830 bp, Homo Sapiens
ggggttgcaggtcactgtagcgggacttcttttggttttctttctctttggggcacctctggactcactccccagcatgaaggcgctgagcccggtgcgcggctgctacgaggcggtgtgctgcctgtcggaacgcagtctggccatcgcccgggccgagggaagggcccggcagctgaggagccgctgagcttgctggacgacatgaaccactgctactcccgcctgcgggaactggtacccggagtcccgagaggcactcagcttagccaggtggaaatcctacagcgcgtcatcgactacattctcgacctgcaggtagtcctggccgagccagcccctggaccccctgatggcccccaccttcccatccagacagccgagctcgctccggaacttgtcatctccaacgacaaaaggagcttttgccactgactcgggcgtgtcctgacacctccagaacgcaggtgctggcgcccgttctgcctgggaccccgggaacctctcctggcggaaaccggacggcagggatgggccccaacttcggcctgcccacttgacttccccaaaatcccttcctggagactgaacctggtgctcaggagcgaaggactgggaacttgtgggctgaagaagcagagctagcctttggccaccagtggggggacgttacccctgtgtcccaccccaccccccaagttctaggggctttttcaaaaccggggaggtggtggaaaagaagtgggttgcctcttcccaaactaatggcccacggggggccggggaaagagacttgggtcttcttggggcccccccttgtgaagaaagag

SEQ ID NO: 255433 - DNA, 952 bp, Homo Sapiens
ggggcgttgcaggtcactgtagcgggacttcttttggttttctttctctttggggcacctctggactcactccccagcatgaaggcgctgagcccggtgcgcggctgctacgaggcggtgtgctgcctgtcggaacgcagtctggccatcgcccggggccgagggaagggcccggcagctgaggagccgctgagcttgctggacgacatgaaccactgctactcccgcctgcgggaactggtacccggagtcccgagaggcactcagcttagccaggtggaaatcctacagcgcgtcatcgactacattctcgacctgcaggtagtcctggccgagccagcccctggaccccctgatggcccccaccttcccatccagacagccgagctcgctccggaacttgtcatctccaacgacaaaaggagcttttgccactgactcggccgtgtcctgacacctccagaacgcaggtgctggcgcccgttctgcctgggaccccgggaacctctcctgccggaagccggacggcagggatgggccccaacttcgccctgcccacttgacttcaccaaatcccttcctggagactaaacctggtgctcaggagcgaaggactgtgaacttgtggcctgaagaaccagagctagctctggccaccagctgggcgacgtcaccctgctcccaccccacccccaagttctaaggtcttttcagagcgtggaggtgtggaaggagtggctgctctccaaactatgccaaggcggcggcagagctggtcttctggtctccttggagaaaggttctgttgccctgatttatgaactctataatagagtatataggttttgtacctttttttacaggaaggtgactttctgtaacaatgcgatgtatattaaactttttataaaagttaacattttgcataataaacgatttttaaacacttgtg

SEQ ID NO: 255434 - DNA, 689 bp, Homo Sapiens
gagagaactagttcctggagtcctcaccgtccgagatgctgggagctggtggctagctgtgcctggagctgggagattcatcaagtactttgttaaagggcgccaggctgtccttggcatggtccggaaggcaaagtaccgggaactgctcctatcagagctcctgggcccgcgggcgcctgtcgtggtgcggcttggcctcacctaccatgtgcacgacctcattggggcccagctagtggactgcatctctaccacttcaggaaccctcctccgcctgccagagacatgaagattctgctcatcattgctcagctcctcagagtgggccgggaggggactagaagagctgcatgatggtggctgagacagggtcaccttgggaaggcttgggagccaggatgagtgtcgggctctcgtgtgtgcaaaaggtcagatgtgactgctgctgtttgcctggtttctgacccagtggtggggtttgagcaatgcttctctgcccttccatggaaagtggaaccagaaatggtgccaaggctgtggctgttccctttcgtgtaaaatggtgctgttattactctgtcttgaaataggaaggtgggatttctggggaggctggtgaaggagggcagggttcttttctctacgtgtcatgttaaaattgccaaataaagtacctctgcctgttc

SEQ ID NO: 255435 - DNA, 803 bp, Homo Sapiens
  misc_feature (715)..(715): n is a, c, g, or t
  misc_feature (721)..(721): n is a, c, g, or t
  misc_feature (726)..(726): n is a, c, g, or t
  misc_feature (741)..(741): n is a, c, g, or t
  misc_feature (767)..(767): n is a, c, g, or t
ggaactcggggagcccacgggctgcgccacctctgccctggcagctgaagcctgggagagtccctgcgtggtgtaattggcctcagcccgctttctctgtgccgtcgcacctcagtgtttctcatagcttgtccccacgtgtcactttccatccacgggaaaaacaaatgccccttctccatctatcattgcgacttcctcccaggaggcctctcaggttgggtagagcaggggcctgcagtggtcaggccaagagcaaggaagacctggctgccccactgtggctgctcgctgattaaatcatcctgccacccgaggctccaaaccaaatcttggacgcaaattcattagcttcataaagcccaggttgatttatgtgacagtctggaaccgcccagccatggagtcggtggccgtgttccctgccctggaaggaactggccagcagtgaccacatcgctgatgccaagtggggaccctcaccactgccgttgtctagctgctttgctcctcagtgtcctcctgctgtaagtcagatgaggtcaccttcctctccatcgatgccaggcttctgcgcttgacggcaatggggcttggggccaggggaggagaaccccaacagcaagagagccccaggtgatgctggctctccacgtggcatccggcagtttttcacttgcagccattcattcaacttgggcaaagtagggcaagnttcagnttgtnggttttccatttttncagatggggcccccggggttcagttnatggggaaggaggcaggaagaggattgccagcccag

SEQ ID NO: 255436 - DNA, 681 bp, Homo Sapiens
ctcccggcgtgggcgggggcagcggcgacgaagcgaggtgcggccacgcccccgtccagcagacgtgtctggtccccacccagagtccacaaggtggagatgggcttcggtggaggtggaggagcaaactgaaggggcaggctactggggtggggtagctttcgggaaagggaataaggagcacgatgcaagggcgctgtggcccccgggtgatctcccaccacacttactgtcttcctttatctctgtggacttgtatatattctggaaggggaaccacagtttcaccatcgcccgcccattctactactcaacccctcccccccaaggtatttccagaactaaacccttcctttccctctgatgggtacactgaagcccctgctccacagagtagattgcacatggagggagggagagggggcgtgttgaacatcctgcagtcacagggtcaggggtcaggtggttgtagtctgtgcctgaagtctgtgtttgtgttgtcgtggagacaaggcctttgagccccacccttgtcctagaacctaccccctctcaaggatgcgctctttatttctaccctgtctctccccgccacccccgacttcccgtggaaattcccaactcggttctcatggaggagtgggtggagacaaggagggagtaagtcgtaggagtacaagg

SEQ ID NO: 255437 - DNA, 723 bp, Homo Sapiens
  misc_feature (479)..(622): n is a, c, g, or t
aggctgtggctctgttagcttccgtcagccgccttcccaaggctttggccagctgctgtcctgtttgacaggggccctgtgctcccctggtgcagggaggtcacttgggatcatctggtttgtttttgttttattagttcatcatttcccttttgttttaactgtgtttcagtcacagagctgtgttagagaagtaatatctagttctacttttgccaatatttgggcaacacttcctatctgctagttgtctcattgcacactcgtatttatggtggttttcctattttacaggtgagcaatctaaaactcagagatgcttgcctgaggtcactgtgttaagtttggagctgggattctgagtccattggtttcttctcttgtttatccaatacctgcttccatggatatcttgttccaccttgtggctttaattaccgtctctacaagcagacatctcagctgtaattgctcgtgcnnnnnnnnnnnnnnnnnnnnnnnnnnnnnnnnnnnnnnnnnnnnnnnnnnnnnnnnnnnnnnnnnnnnnnnnnnnnnnnnnnnnnnnnnnnnnnnnnnnnnnnnnnnnnnnnnnnnnnnnnnnnnnnnnnnnnnnnnnnnnnnngtacaaattccacaacatacgaaccggagcataaatgtaaaggctgggtgcctaagagtgagctacctacattaatgggttggctactggccgtttccagc

SEQ ID NO: 255438 - DNA, 1493 bp, Homo Sapiens
  misc_feature (506)..(506): n is a, c, g, or t
gggagtcgcggcgctgcgggtaggagccgggttgcgggagaccccaggttcggttgggattcccagccagaacggagcttaagccgggcaggcgagcgaatgacggagtagcgagctgcacggcggcgtgctgcgctgttgaggacgctgtcccgcgcgctcccaggccgccccgaggcttggggtcttcgaaggataatcggcgcccggggccgaacagcgggggcacacggggcgctgccgaagtgcaaggccacggccagagctcgagcccgacgcgctgtctggagtcgtaggaccctgacgtggctgaagcggccccgggagcatgagcgggcagcgcctggacgtcaaggtggtgatgctgggcaaggagtacgtgggcaagactagcctggtggagcgctacgtgcacgaccgctttctggtggggccttatcagaacaccatcggggccgccttcgtggccaaggtgatgtcggtcggagaccggactgtgacattangtatttgggacacagcaggctctgagcgctatgaggccatgagtagaatctactatcggggtgccaaggctgccatcgtctgctatgacctcacagacagcagcagctttgagcgagcaaagttctgggtgaaggaactgcgcaccctagaggagggctgccaaatctacttatgtggcaccaagaatgacctgctggaagaagaccggaagcgccgacgtgtggacttccacgacgtccaggactatgcagacaatatcaaagctcagctctttgaaacatccagcaagacaggccagagtgtggacgagctcttccagaaagtggcagaggattacgtcagtgtggctgccttccaggtgatgacagaggacaagggcgtggatctgggccagaagccaaacccctacttctacagctgttgtcatcactgagtcagcactcacctggcctgggggaattaaaggaattccccgtaagcgcgggacccagctcctttctgggcttgggtagtcaaatgtctgagctaccccaggtcctcatgtcagcagagtggcgcctgcctgtgctggcccatggaacggagacagcattgggctgactgtgggcatgaggagggataaggctgatttggaccccaggcttctgccctggacagcacttgtgtctgcagattatttaagtggcttttgatctgtaaataaaatcagtgcactgtgcatcacacccagcccctttccctgctgtgtggattaggtgtcaagacacctagttcttcctggggccacccggctggcctcactgcttatattaaggctcctcccaactctcattttcctttggaaaacaagacttttttccccatggttaccgctgagatactggggctgtagtagtataaaagctcacagttccttctgagtgctgaaaagagtgcatgagttgcttcgaaataaaagggtcaagcattcctacctgagacaggtt

SEQ ID NO: 255439 - DNA, 1167 bp, Homo Sapiens
  misc_feature (502)..(502): n is a, c, g, or t
  misc_feature (638)..(638): n is a, c, g, or t
cgccccgaggcttgaggttaaccatttagacttggaaccaatgctaaaggaaagcatttggcaatatttattataatttaattttatataaaaatatttaatttcctctggatagtcaaacctgccagatatcaaacctgaggaaggcagaagtgaatttggagaactagggtagagagaggttgctataaaacgagcatttggagggcccacggcttcactcaggacctgctgggcttgtgtaccccaggagcccttttaagtatcttttgtacgcttttcaccccacccccaagtcctgggagaaatgcaggcaacactgagacatgggagaggccaagatatgcttgacagaaagggtgattttgaggctcagttaatatttcaaaattgtaaccgtagcaaaactgcattggtatttagaaaaataaaaaatttccaatatgtagtgctgtgttatacctgcctctgccatgcagcatcatagcctgtgggaaccggnagggcttcccttacccacccagagcagaggaggaaaggtgatggaatatggggtgaggggaggaacctggtggcccctccctgagatggccagaaagcccttggcctcacctgggactgaccaggcagccctagtnctaagcacaaggtgccctttcacccttcatggctgtgggaatatttcctcttactctttttctcccatacagctactgccaaaatgcccaaacttgggccaaatgttgcccaaacttgggccaaaaatgttgcccaagagaccaaaacagaggaaaaccagtttccaaatctatgtagatcatgagcagaaatctgaggcttgaataaagggctgagagggcaggagctctttggggtgtccagagcagacgcccatcccaaggacttccatggagtggggggaaggctgggtaggtttgagttttatcgtcaatataataaattaatcagaagctttcacaaaacaaacaccgcggctccgctgaagataaaatggggctgggaaaaaccaaacaccaagtagaaaccagctgaccagtgtgaggtgttgtagtccagtctcccgggcccagcagttcagtggccacgtagagattcaagggcctcttgttggctgttctccaggtttccaagaaccggtcagtaaag

SEQ ID NO: 255440 - DNA, 916 bp, Homo Sapiens
ggggaccctgcgggaccggaaaaagaaattcccgggccctggcttcttggcgcgatgaggttccggttctgtggtgatctggactgtcccgactgggtcctggcagaaatcagcacgctggccaagatgtcctctgtgaagttgcggctgctctgcagccaggtactaaaggagctgctgggacaggggattgattatgagaagatcctgaagctcacggctgacgccaagtttgagtcaggcgatgtgaaggccacagtggcagtgctgagtttcatcctctccagtgcggccaagcacagtgtcgatggcgaatccttgtccagtgaactgcagcagctggggctgcccaaagagcacgcggccagcctgtgccgctgttatgaggagaagcaaagccccttgcagaagcacttgcgggtctgcagcctacgcatgaataggttggcaggtgtgggctggcgggtggactacaccctgagctccagcctgctgcaatccgtggaagagcccatggtgcacctgcggctggaggtggcagctgccccagggaccccagcccagcctgttgccatgtccctctcagcagacaagttccaggtcctcctggcagaactgaagcaggcccagaccctgatgagctccctgggctgaggagaagggtgttccaggcctgtgtggagccgccctgcccgtatggagtcacgccctctgaactgctcttcgggaggcagccctggttctaggatgctgaggccctggcccggactctggcctcccagatccccagctgcctcacttctctcttgagaacttggctcagggctcctgaggacctttcccagcattaccttcccttcccttgaaaggcaattgttggctgttttcataagcaggaaaaataaacagaagtata

SEQ ID NO: 255441 - DNA, 505 bp, Homo Sapiens
  misc_feature (433)..(433): n is a, c, g, or t
accagcatctgaatcaaaaaggtcagtatacccttgagtgtgaaatctaggaacctgtaattagtagaggaggaaactgaggctcagaaaggtaaaggaattttatgctcagggtcacacacataaaaatgatattctcaatgtcttagaaagattggctgtaattctgggaacatgcagtgtcacagggagaattgtggggcctttgctggtgaacagcacctcttcccattgttcaactgtctcttttgttggagtgctggagctcctcagagcctagtggttttctgagacacattcccttccttttacttattctcatagctccaggcacaggttctaaacttgggtccaaggacccgagccaggcctggggtctctttatgcagagatgagttttctgcactcagcccccatgggaggagaaggattnagcgaggcaaagcccaactttgattgaaaaataacttccctgcagaccactttatgggctctgcgcctcttc

SEQ ID NO: 255442 - DNA, 543 bp, Homo Sapiens
ctccattgtaatatttccttaaaaagtttgcagacatggtctgaatgatttagagtgatgtgtaacagtttggacaggctggttgcacccctggcctcctttgtcattgccagctaggatgtcatctgtttgaactggtctttttcgtgtttgcctagggtgagtagagagtggtgatttagtagagctgttggctgcttcctggctgctgtaggaagttagtttttctggctatatgtgtatgaggcgggaagcagattgttaggagtctttaatattctaattttacctctgagttcctttaccaccccactcctcgccgccttctccttctctttgtcctcttacccatccctcccctttcctcctttgtctggattattagaagaggttgaattcagaaatgtgactaatttttacagattgtgtttttacagactagtttttagaaatgtgacagtttttacagattgactcccttcactgaagaaggaactttctttgtagtctagatttttttagttttatgatacatgtctagtg

SEQ ID NO: 255443 - DNA, 580 bp, Homo Sapiens
  misc_feature (268)..(268): n is a, c, g, or t
  misc_feature (359)..(359): n is a, c, g, or t
gttgcataaccctgccgggcgtgtttctccgggcctccctcctcgggctgtagcgaggggtaagggaggtcatacgccctgtggaacaccccaaagcctgggtccctgggatgcatccacagattgtaggcctgagtcttaacacactcaatctggattcaaatgactcctgcctggttccagtgctgggctgttcccctgtctgagctttggtggcttttgattgaccccttccctgcccaagcatgaaggtggagtagccagaagngaagggatgcgggtgtataaagatgtcatcggggctgtctgtggatggtgggtaaagagacagcacctgtcatggtggaagggccacaagnaagcgtggaggctgtttctggggccacctcctgcctccaggaggaagcagggatcctcctgttggcatcttggtcccatcaggtgtcttggatggggctggggctgggagtgtttctctccctgagcatttaagccaaggttcattatttagaatggaaccatttataggccgggcgccattattacattattcctaaagtgttaggattacaggtgtcat

SEQ ID NO: 255444 - DNA, 609 bp, Homo Sapiens
gcacgagaggagagtcaaatactgtgaacatcaatcacacgaggtggaggaaacctgtgatatagctagagaatatacacacggttgtcttccatatagagtgcagaaaccaaaccatgctttgtgtgaaccttaaatatgaaaggtggttctcaaggtcccctttggccttcggtgctgccatatgaaatcttacaaggaaggatgaagaaaagcctggggggagggtcttctcggaaatgaagtgggtttttttggtattaaatagaacgtggctgtgggtcacaggtacttaacgaatgtgtagaagaagtgtcttaaggaatcagaggcctatataaaaggcaggggaggttctcttctaacctaaattaatattaaaaggtcaagggtattttttgtgttctaaattaagactttatatggctttaacacagtgggtctcataatttacatatcattaatttgatgccctcttacaaagaaactccttagagattataaaccatcaatgtaaaggagccacatgggatgtatccacacagctactctcaaatagaaatgggagataagaaatatatatgtgcacaattttggcatggtagcacc

SEQ ID NO: 255445 - DNA, 746 bp, Homo Sapiens
  misc_feature (163)..(185): n is a, c, g, or t
gtcccatggagggggcctcattgtgtctcccgtgcatgctctgcagcattgaagtatggtgtgttcacgtagttctagcagtccccagctgagtgagtgggagagtacctgtgtgtttcgtaacggccttgatccccttgatagatgtttggatattttttgnnnnnnnnnnnnnnnnnnnnnnnacaaatacatgtgtatattccttttgaagctttatcgaacgtggtctgattttgaggtttagcaatagctagctatatatggtaggtgccgcctacagtttttatttagcatggggattgcagagtgaccagcacactggactccgaggtggttcagacaagacagaggggagcagtggccatcatcctcccgccaggagcttcttcgttcctgcgcatatagactgtacgttatgaagaatacccaggaagactttgtgactgtcacttgctgctttttctgcgcttcagtaacaagtgttggcaaacgagactttctcctgcccctgcctgctggagatcagcatgcctgtcctttcagtctgatccatccatctctctcttgcctgaggggaaagagagatgggccaggcagagaacagaactggaggcagtccatctagggaatgggactgtgaggccatacttgtgaaacgtctggactgctattctagagcttttatttggtgtgttcgttgacagctgtttgaaatgtttaataaagctttataaactttaaaa

SEQ ID NO: 255446 - DNA, 943 bp, Homo Sapiens
  misc_feature (14)..(14): n is a, c, g, or t
  misc_feature (42)..(42): n is a, c, g, or t
  misc_feature (55)..(55): n is a, c, g, or t
  misc_feature (96)..(96): n is a, c, g, or t
  misc_feature (113)..(148): n is a, c, g, or t
  misc_feature (197)..(197): n is a, c, g, or t
ccccattacctaangtacaggaaaaatattttaatatttatngaataagttgtancctccgggaccttaattttaaagagatgtgttcatcacttncttcctttccttttttnnnnnnnnnnnnnnnnnnnnnnnnnnnnnnnnnnnnttcaatttaatccataagttccctttagctacgtgtgaggttgtgaaanggaagaaagctaaacactctaagctagatactctaacagtcttaaacattaagctaaatactctaacagtcttttcctacagatctttgactacacaacaaaggtgaggatgtaggaggaggtaggcgcacaggaggagaaaatgggaagttgcctgggaaaagggaagcaattagttcaagggatttcaacaaccaatatagtaaaacctgaaggagaaaactgccaatcaaagatgcttacctttacacccctcacaggtcagtgcattatagtggtatccagaggctctgtctccacaaacaacacacagctcatcccctttgatcctccctgctgacgcgcccatgcggggcttctttgttacaggcatctctgctacctcagtttctccctggtagagagtctcagctggcatacgcctgagttcatatattccaggagagtaccactcttcaggctgctgggggtagaaacccaggttggaataataggatgacgaggaaatctgtggttgaacttggggaaactgaacattgctgtattgcgagtatggttccacttccaggttctgtcccagaggacctgccacttgttctgttaaaacacctttcgcgggcttcatactcatcatttccatgaaaaatcctgacggcgtacagctgcagtgaggactaatttgaattggattttctaacccctgaaactgcattaccattcttagcttactcacagccactgaaaat

SEQ ID NO: 255447 - DNA, 765 bp, Homo Sapiens
ccgtaatgaagttaatcagtaaaccacacaacctctgtcctctctcactccttacctagtctcattttcagtggctgtgaataagctaagaatggtaatgcagtttcaggggttagaaaatccaattcaaattagtcctcactgcagctgtacgccgtcaggatttttcatggaaatgatgagtatgaagcccgcgaaaggtaggacactgttcacaggtgctttcaggtcgagctcttgcaactggactgaggaaatctggggactttggttggagatgacagtaacagatgtctgtcaaagatagtggctcagtcagacccacgaagactggaatgagagtttgggttggggtgatttttatagggttctaaacagacgaatatcttatggggatgaaatccaaggatgtttcccctaatattcttcatagactcttatgtcaaattatcactattcttccaaaccaaacattagacaattctaatattaatatcaatggacacttgaaaaaacattttaacagacattatttaatgcagtgctcctaaaatggcaagtctcagttcccaggggatcacaaaatttatttagtgtctcgtgaccagcattaaaaactggattagaatataatagaatagaaatattagtgtccctcaaggagtaaagacaagtggtatttcatgaaattttgtttcagttacatgtgtataagtatgtacgagggatatgagataaaatgtatctaaaaccgtaggttgtggt

SEQ ID NO: 255448 - DNA, 289 bp, Homo Sapiens
  misc_feature (172)..(172): n is a, c, g, or t
  misc_feature (177)..(177): n is a, c, g, or t
  misc_feature (213)..(213): n is a, c, g, or t
  misc_feature (235)..(235): n is a, c, g, or t
  misc_feature (250)..(250): n is a, c, g, or t
ttgtaatataagctattattacttggctctttctttctctctttctcaattaactaaagtacatgaaaaatatttttaaatatttattgaataaagttgtattcttctagatcttaattttaaaagagatgtgttcatcactttcttctttcttttttaaaaaaacaacaanaacanacaaaacctacaaaaaatccaatttaatcataagtnccctttagctacgtgtgaggtngtgaaaaggaagaangctaaacactctaagctagatactctaacagtcttaaac

SEQ ID NO: 255449 - DNA, 882 bp, Homo Sapiens
ctgaatctctctatgaactttccattcaaaactttccaagtttttccttatgtggaaccgaaatctttctttctcccgtgaaactttactactatcagataattgaagacagatctctttgtattctcttcaagcccaaaccaattctgttccttcaatctaaatagtggtaatatgaatgtttaagaaatgaaataagaaacatgtgcaggcactttggaaggtgctaagtgactgccctaaggaatgaaaagcaagggccaggtgggagtagcccagcgaaggcacttgggctgccaggaacaggaggcgtgggaaactctggcttaggaaaacatgaacacaggggcaacagaggcaaactgttgttcgagttaaatataaatctcaggctctttaaaggtaaaaggtttaaggataatccatttggaagaagaaaagagtgaggctgaaagtaaagccacatgacaagcatataaataaaaatgcagatgatacaaatatgaaagaggccttcagtgtttgtttattaagaatcttaatgcagtttactgatggattaaaaacagctaacattgtctgaaaattatgttacctataagaagttggaaataaataaaagcataatcactagtgatgtgtatgtatttatatccacttgcaaactgtccttgaagcatgtgaaaaggagtaagaatactatctatgggtagcgttcctccccttaatgtgaaaaatgagaactaaagcaaaaagcatcactcactgtacatatacaatgtattttacgtagtgtaaaaaatatggtttagatagtgaatatattaatgaaatcatatgtaaatttatttttagtggctgaataatttaaaacattatgtg

SEQ ID NO: 255450 - DNA, 960 bp, Homo Sapiens
ccaaacgccttcccaatcagtcttccaaccaagccattgtgtgccaagattttcagaggaatctcttcggctagtttggtctcatctgcctctttctgcatgatttcaagaatcatgcggcatgcttcagaagtcccctctggggtggcatggatggtgacaggcttctctgcagctccagagttctcttttctatggatatctacccgggactgggtctgcttagtgatgttctttatggtcaagccctcctttccgatgatggcaccaacaaactgggtggggaccaggatccgcagcgggaaatcaatctgtctggcctgagaagtgcccccagggggcgtggccttgctcccgggaagagtggtccccacgctgggctcgctgagggggcgaaggggagctcacctcttcatccgggatgtaggaaatcttgaaggagtagttctcaaactgatgcccgcttagcttctccatggctatttttgcttcttctcttgttgcatatgtgacgttgacaacggcggtttctgtgtctgtgttgacttgttccacattctccactgtcccatattgagccaaaagtccatccaacacctcccactgcaggtgaggagggatgtttcgaatctgaattttcctgctccttagctttttagagactgagtaatcaacttccatgattttcccatgcaattccactttacccgagagggtctcgatggcgcggatggcccagttctggtcggggtagtccacgaaggcgtagccggacttcagcaggacctgtcccgccaggggcagcttcctgtccccaaagagctgccggaggtcgtcggcggtgacagcggggctcaggttcccgatgtaaagcttgttcatcatccgtctcttccccgagagcccgcggctcccccggcccggtacccggcgctcctcgcctcctccgctgccctcccc

SEQ ID NO: 255451 - DNA, 1071 bp, Homo Sapiens
  misc_feature (35)..(35): n is a, c, g, or t
  misc_feature (136)..(136): n is a, c, g, or t
  misc_feature (216)..(216): n is a, c, g, or t
  misc_feature (940)..(940): n is a, c, g, or t
  misc_feature (966)..(966): n is a, c, g, or t
  misc_feature (1015)..(1015): n is a, c, g, or t
  misc_feature (1033)..(1033): n is a, c, g, or t
  misc_feature (1038)..(1038): n is a, c, g, or t
  misc_feature (1045)..(1045): n is a, c, g, or t
acaaacaggccggccaaatggcctgtactctcacnctgggtctgatttcttaataaaaaagttcagggcaccaaatccaaccgtctttctatgaggggaatcattctcccgggattattatgctgctcaacagccncaggacaggtaggtgggaaggagggtgaatgcaaaagcgaaagggtcacagaaaagaatgaggctttcttgaacaacccnatagcaaggcagaatggtccagacaaaccacccactacaaactccaaacatgcacacccaaaactagaggggaaaggaaagagctcctgggggactaggggagacaaaagatggtgacatagaacagcagacttgcctatgaacgtttctcaacttcctaacactggaagatgtttaattaaaaagttgctgttcaaaattgtactgaaaacatatctaaaaataggtctgtagtcatcttaaaaataaaaggtcacttctcagataagaggagtgacagatattctcagataccaacacttcaggtatctttgatgtaaatttgaaaaatggcctggtagagaaaaaggaaggaaaggaaggagagaggaagaaagtgagggaggtagggagagaaattcagagtacaacaggaaaggcaagaaaactgggaggaacacattttttaagcccatgcttatctatcccagcagccaaacaaagcagatccacaaaggaaaaaaatgcagttcttttctaaggaacattctgaaaatcaacttcaaacttcaaaacataagaaactgcaatctaagaacaacttaccacaatgctcactgggactttaaaaatgacgactggagaccggggtactccaaatggggtccacgttcttcagcggtcattccttaggcattatctgacagaatactatgatcaggccttacccaccaagtggaagctnaagtgcccctattacttgggtatggncctgccctaggagcagacaaatcccttgctttccttgaagtccagaggnctctgccagcacgagttncagcngggaggntttgcgaagaagagcaacttggttcc

SEQ ID NO: 255452 - DNA, 1246 bp, Homo Sapiens
aggcaagtctgctgttctatgtcaccatcttttgtctcccctagtcccccaggagctctttcctttcccctctagttttgggtgtgcatgtttggagtttgtagtgggtggtttgtaaaactggaccattctgccttgctatgggttgttcaagaaagcctcattcttttctgtgaccctttcgcttttgcattcaccctccttcccacctacctgtcctggggctgttgagcagcataataatcccgggagaatgattcccctcatagaaagacaaaagcatccatcccctcatagttaagtagccactggtgtcctgggaatttctggttggatttggtgccctgaacttttttattaagaaatcagatcccagggtgagagtaacaggccatttggccaagaaagaaacctgtttgtttttcttttgaactatgaaaagaccctgtttgtgaatatattttagaaagagaggaaggatgtctgcagaactttgttctgttttctgccacaaaaatgtgaatagttcagagtgaaaaccttttgtgatggttgatgtctcaggaataagctggatctccaatgttttggggatgctttgagtctcaaaaaaaattgataatccccccacgcactccctaccacccttcccatctcttccgccgcccacgctcctccctgtacccaatattcgctgttggccgccctcgccctcacaaaagttttctaaaccattccgtttggggcccggggccccagaaggcaaagggcaactggctaatagcctggtttcccaaggaaaaccccggggccatcgacaagcggcttcgccattcttccccccaataaaaacaacccccccggcggggcaaacccgcaggcggtccttgcaaccaatattccccgcaatgggcggtttccgggaacgccccttttcccgcgtcgtccctcttccacaagggggaggcctccagcggggcagcttccaattattccaaatgttcccgccccccggcccgttggcccaattccgtttgacaaaaaactgggtgggaacctccccatttacaacccctttctggccccggacatgggacatccccccccaccacaaggggtattggaagtgacacctcgaaatcccccctccgggcattttccccctcctctttgcgcccccctttgggccaacataaattccggccaccgggggcggaacaaacggggcggccgcaaacacatttct

SEQ ID NO: 255453 - DNA, 735 bp, Homo Sapiens
ggggaagggatacagagcttggtgggcctaacaccattcatattccttaccctctgtctctcctccctgtatcccacctatggttcagtgttgcaagagtctgggcttggggtctttaaaaccagcagggggaaatgataaaaagagagctgctttcccttttaccttgaggtattcgtccctcgggacagagcacagcttgtgcaactctggtagcgttaccctgtgacactgttttgaggtccacttcctttctttcctctgggaggaatgtcttctgtctttggtattatagttcatcttcccattcttttacttagtgcatttgtgcagatatttttaactctgtacatcagaagagagcccttggtaaccagttttgctcttcttctgccactcctccctgcttgcatctcgttgctggcagagtcctcttgtacttcaagaaagcaaagtgattttgtctgctcctagagcaggtccataccaagtaatagaggcactctagcttccacttggtgggtaaggcctgatcatagtattctgtcagataatgcctaagaatgaccgctgaagaacgttgacccattttgagtacccgggtctccagtcgtccattttttaagtccaagtgagccattggtggtagtttgtttctttagattgccaggtttcctttatggtttttggaaggtttggaaagttggaatttttccagaaaatggtttcttttag

SEQ ID NO: 255454 - DNA, 459 bp, Homo Sapiens
  misc_feature (68)..(77): n is a, c, g, or t
cctctcatgctctcttcctgccttcctcactcctcaatcatttcctttactctttcattctttcctcnnnnnnnnnnaaatagctgaatcattgggtcaccttaaaccttgtgaccaaatccacatggtagaagcaggatgctcttgactcatgttgagtgccactgaactcaggaagagtggtcaaagcaatgtttcagaatcttgcagactgtgtagtggggttttgctaattttgtcttctctgtgctgtgagggagactaggaactctagacttcccttttaaatcatctttgtcgctcacggtaagttcagtctgggtttcttacacttcactggttttggtagaagctggacatggtgacatatgcttcttcttgatttgatcccagggaagtaagaatgggctgaccctgagaaactgggttcaatgtcaggattccagattggagagaaaa

SEQ ID NO: 255455 - DNA, 862 bp, Homo Sapiens
  misc_feature (62)..(71): n is a, c, g, or t
  misc_feature (756)..(765): n is a, c, g, or t
aaagactcgaccaaacagttcagttattataacttttacagtatacagaaatgttgcacttnnnnnnnnnnccttcagtttttttaaaacacaaactgtaaactctaagatactgaatcaatcacgttacctataagtgccaacagtgttatttttgtcatgctgatttcaatggtattttttaaaaagggaaaatatcaacaattataatacaaagggtttgcaaatatacaaacagatataggattttcataacaattcaagaactaagcgggacccaattcaaattacaaaagttcactttttattcaaaacctcagcatgtgtcttggacacattccttggctgccaataaattccacagttcattctctttcttaaaatattttttaaaagctaggtttgtcatggtttcttttggggaggggcagggtaggggaagttaagtgttatatgtggttcctccagttctctaattagagtgctcgacttcacctaaaaattttggtcaccacttgtaagtgcgtttccatcatctttgagttgccttttaaagttttatgtcttcctatggtattttcatggactcagttttaattcttgcagaacatatattttaatgatacacagtttttaagaagccaagattatatcaaaacttattatagaaccacagaataaactggtttggaaccagaaaagtacaaaaaagaacagctagaggtacatagacacaggaccaattaataatttggnnnnnnnnnngacttactttctccattctgctaattgtctcccaatctccttaaatgcacttttagcaatatttttcaaaaatttaccaaaaaaacccacgcgtccg

SEQ ID NO: 255456 - DNA, 727 bp, Homo Sapiens
  misc_feature (542)..(542): n is a, c, g, or t
gttgatgtttgtataccgttcagtataaaagtgtcctaagcatattagccaatcttttcacagtagagcatacttaaggctgcttggtactgagtatacttaaatataactccagaatccagggacttggtgttaaaacaggattagagcatgtaaaggtacatctagattcatatttgaatcttaaactgtatttttctcttagtattgctaatgagtaaagaaaagtctcataaggtagccaaatgaaaaagaatgaaagggaaagtgaaaaattaaggggacaaaagatgggatgtgaaaagaagaattctagtttgatggtgactcatattcacgataggatacaaagtgtgatttgttggaaacatgtcccaaatttctaaaattctgcttctctgccaaaagcaatgtctttcttggttgatatttgagttttaaaagggtcaaatctttctaattttttgtatctctagagggcagcactagaagaaatcagcaggtctaatcccaccagtaagaaaactaccacttcttgattnttacagatttaaaaaaatcttttcagtgacctttctttttaatgtaaatacaaatttcctaggcttaatataggcgtttcccctttcacccaagtgatgtcacagttcgatgctcaatgatccagtgatcgtgggtattacagtgtgttttggagctggctctgtttgtgtgctatgatatgcag

SEQ ID NO: 255457 - DNA, 683 bp, Homo Sapiens
ctctctagagaaaaatgtgaagagatgctccaggccaatgagaagaattagacaagaaatacacagatgtgccagacttctgagaagcacctgccagcaacagcttccttctttgagcttaggtgagcaggattctggggtttgggatttctagtgatggttatggaaagggtgactgtgcctgggacaaagcgaggtcccaaggggacagcctgaactccctgctcatagtagtggccaaataatttggtggactgtgccaacgctactcctgggtttaatacccatctctaggcttaaagatgagagaacctgggactgttgagcatgtttaatactttccttgatttttttcttcctgtttatgtgggaagttgatttaaatgactgataatgtgtatgaaagcactgtaaaacataagagaaaaaccaattagtgtattggcaatcatgcagtaacatttgaaagtgcagtgtgaatgtgaaacattatggaatcaagggtccacagttttctgtagggggtaaatcataaatactttatactgtgggcctatggtttctggtacatatttggtttttaaacaaccgtttataaaggcaaaatcattctaaattttgagccaattgatttgggccggtggtcataacttaccaccccctgatggtttttttgttattaa

SEQ ID NO: 255458 - DNA, 753 bp, Homo Sapiens
aacattcaaataggtgaccctgtattccagtccttctttttgccccaaaagccctagactagaagataaaatggtcaggttgttggggaaaaaaaagtgccagcctctctagagaaaaatgtgaagagatgctccgggccaatgagaagatttagccaagaaatccccagatgtgccagacttttgagaagcacctgccagcacaagcttccttctttgagcttagtccatccctcatgaaaaatgactgaccactgctgggcagcaggagggatgatgaccaactaattccccaaaccccagtctcattggtaccagccttggggaaccacctacacttgagccacaattggttttgaagtgcatttacaagtttctggcatcactaccactactgattaaacaagaataagagaacattttatcatcatctgctttattcacataaatgaagttgtgatgaataaatctgcttttatgcagacacaaggaattaagtggcttcgtcattgtccttctacctcaaagataatttattccaaaagctaagataaatggaagactcttgaacttgtgaactgatgtgaaatgcagaatctcttttgagtctttgctgtttggaagattgaaaaatattgttcagcatgggtgaccaccagaaagtaatcttaagccatctagatgtcacaattgaaacaaactggggagttggttgctattgtaaaataaaatatactgttttgaaaactttga

SEQ ID NO: 255459 - DNA, 372 bp, Homo Sapiens
aatttcaaccccagattatcttcaaccttgctccctccaccaatcatactttgacatttatctatttccttctccacttatggatgtaattggcttgctatagaaactacagaagcatattttggcttcagctttaagataatcttatgacaagaagggtcacactgattcacttaataaattccattcttacctaacacaaggtttagttgataagcacttggacaaaaataatacttttcaaaaatgtaaagcaaactagtgaggacaaaggattttgtcctcatctcaacaatgatcagctattggaactgcatgaaactgaacaatttaaacctggagctggtaatgttcttaagaccaattcagaac

SEQ ID NO: 255460 - DNA, 926 bp, Homo Sapiens
cactcttcctcctgtcccaccctctgtgagtgatttaaaaacggaaaaggtcaaagcccagccaggcctacatttagagaaattttaaaaaaatttttcctttcaattttggccaattatttccaatttttattttattcttaaaacttaagcatggtaaaatgttaagctgttttcatccactgatattattctactataaaaagcccttcttgagcagatttgatgataaaaaggagaacatttctaaggtataattagagaagctgttgcatgagaaatcatgtctccatctccattttgctatgcgttatctgaggattgtttctgaaagagatctatttaggcagtgtatgtatgtgtcagcatgtaaaaagtaaagaactgaaaatagacaaaccttgtaaatgcacttcaaaaccaattgtggctcaagtgtaggtggttccccaaggctggtaccaatgagactggggtttgggaattagttggtcatcatccctcctgctgcccagcagtggtcagtcatttttcatgagggatggactaggaaaatgaagtgtctattataaggagagttcctgtaacttaaggagcaagctcactacaaaacccagctacctgcttatcgtagtggccagagtggtagaagagatacggagtaggaattaaaccacacaatgttatttagggactaagccatgcccctaacaagaaaacaagccaaaaggaaagtattaggcattctctgggaaggcatgcatttttttcccatgtctctggggccaaaaaccttataccaagtacctattggcacccgaatatatttgtagaatgaatgaatacatgaaaaaaaataaacagtaacctttctcctatattctactttccaagccaattaataagcaagtgtcttttcgtcatga

SEQ ID NO: 255461 - DNA, 502 bp, Homo Sapiens
  misc_feature (12)..(12): n is a, c, g, or t
  misc_feature (52)..(52): n is a, c, g, or t
  misc_feature (57)..(57): n is a, c, g, or t
  misc_feature (80)..(80): n is a, c, g, or t
  misc_feature (113)..(113): n is a, c, g, or t
  misc_feature (118)..(118): n is a, c, g, or t
  misc_feature (155)..(155): n is a, c, g, or t
  misc_feature (192)..(192): n is a, c, g, or t
aaaaacccctgnaaaatgccaccttcaaaaaccccaattgtggccctcaaantgtanggtgggttccccccccaaggccngggtaccccaatgaaaaactgggggtttggggnaaatnagtggggtccatccatccccctccctgctgcccccancagtggtcaagtccatttttccatgaggggatggganctagggaaaatgaaagtgtcctattaataaggagagttccctgtaacttaaagggagcaagcctcacctacaaaaccccagcctacctgccttatccgtagtggcccagagtggtagaagagatacggagtaggaattaaaccacacaatgttatttagggactaagccatgcccctaacaagaaaacaagccaaaaggaaagtattaggcattctctgggaaggcatgcatttttttcccatgtctctggggccaaaaaccttataccaagtacctattggcacccgaatatatttgtagaatgaatga

SEQ ID NO: 255462 - DNA, 1176 bp, Homo Sapiens
  misc_feature (625)..(716): n is a, c, g, or t
gcaccgaccagcccgagggccgctatgtcatcatccccacaaccttcgagccaggccacactggcgagttcctgctccgagtcttcactgatgtgccctccaactgccgggagctgcgcctggatgagcccccacacacctgctggagctccctctgtggctacccccagctggtgacccaggtacatgtcctgggagctgctggcctcaaggactccccaacaggggctaactcttatgtgatcatcaagtgtgagggagacaaagtccgctcggctgtgcagaagggcacctccacaccagagtacaatgtgaaaggcatcttctaccgcaagaagctgagccagcccatcactgtacaggtctggaaccaccgagtgctgaaggatgaatttctgggccaggtgcacctaaaggctgacccggacaacctccaggccctgcataccctccacctccgggaccgaaatagccggcaagcccagcaacctgccaaggcacgtgtggcccgtgcacattctcagcagcacctccctcatggctgtctgacaacctgcccacctacctggctctgaccgttcccaccaccatctgcatgtccccactgggcctgagtctagcctgnnnnnnnnnnnnnnnnnnnnnnnnnnnnnnnnnnnnnnnnnnnnnnnnnnnnnnnnnnnnnnnnnnnnnnnnnnnnnnnnnnnnnnnnnnnncgagggccccgaagcattccattctcgtggaggagtttccttgctgagatttcaaatagtcctccccacctcaactgtcaccactgctaagggactctatccattgagcacattttcctaaggccctgctgtctgccgaggagcgccaagaagatgtcacttgtttacacacgaactgccacatccccaagctccgttcttgcccctcgtgtcctaggcccaacccagcctcccagacctcactttccccatcagcaatacctggtgttctcccaccttgaaaggactcttggctcctgccgggttcctgctcaggctggaattgggaaaatatgcaggtgacatttgttcattctctaatcccatcctctcacccatccatttcctcactcagtggagatttgccaaatgaataaacgacacctttgaggccccaggtaaaacggggccctactccggc

SEQ ID NO: 255463 - DNA, 672 bp, Homo Sapiens
  misc_feature (534)..(534): n is a, c, g, or t
  misc_feature (543)..(543): n is a, c, g, or t
  misc_feature (613)..(613): n is a, c, g, or t
gaattccggaagatccccacatcgatgaaagcaaagcgaagccaccaagccatcatcatgtccacgtcgctacgagtcagcccatccatccatggctaccacttcgacacagcctctcgtaagaaagccgtgggcaacatctttgaaaacacagaccaagaatcactagaaaggctcttcagaaactctggagacaagaaagcagaggagagagccaagatcatttttgccatagatcaagatgtggaggagaaaacgcgtgccctgatggccttgaagaagaggacaaaagacaagcttttccagtttctgaaactgcggaaatattccatcaaagttcactgaagagaagaggatggataaggacgttatccaagaatggacattcaaagaccaagtgagtttgtgagattctaacagatgcagcattttgctgctaccttacaagcttctcttctgtcaggactccagaggctggaaagggaccgggactggaaagggaccaggactgaacagactggttacaaagactcncaaacaatntcatgccctgtgctggtacagaggagaacaaaatgctttcacgcaggatttggatggtatgagaactaangaaaacagatgggctggagatgacatttatccagggtcactttgtcaggccctaggctt

SEQ ID NO: 255464 - DNA, 420 bp, Homo Sapiens
ggcacgagctgaattccggaagatccccacatcgatgaaagcaaagcgaagccaccaagccatcatcatgtccacgtcgctacgagtcagcccatccatccatggctaccacttcgacacagcctctcgtaagaaagccgtgggcaacatctttgaaaacacagaccaagaatcactagaaaggctcttcagaaactctggagacaagaaagcagaggagagagccaagatcatttttgccatagatcaagatgtggaggagaaaacgcgtgccctgatggccttgaagaagaggacctgaagagaagaggatggataaggacgttatccaagaatggacattcaaagaccaagtgagtttgtgagattctaacagatgcagcattttgctgctaccttacaagcttctcttctgtcagg

SEQ ID NO: 255465 - DNA, 939 bp, Homo Sapiens
  misc_feature (742)..(756): n is a, c, g, or t
  misc_feature (764)..(765): n is a, c, g, or t
tgaattccggaagatccccacatcgatgaaagcaaagcgaagccaccaagccatcatcatgtccacgtcgctacgagtcagcccatccatccatggctaccacttcgacacagcctctcgtaagaaagccgtgggcaacatctttgaaaacacagaccaagaatcactagaaaggctcttcagaaactctggagacaagaaagcagaggagagagccaagatcatttttgccatagatcaagatgtggaggagaaaacgcgtgccctgatggccttgaagaagaggacaaaagacaagcttttccagtttctgaaactgcggaaatattccatcaaagttcactgaagagaagaggatggataaggacgttatccaagaatggacattcaaagaccaagtgagtttgtgagattctaacagatgcagcattttgctgctaccttacaagcttctcttctgtcaggactccagaggctggaaagggaccgggactggaaagggaccaggactgaacagactggttacaaagactccaaacaatttcatgccctgtgctgttacagaggagaacaaaatgctttcagcaaggatttgaaaactcttccgtccctgcaggaaaggattgatgctgatagaagagcctggacagatgtaatgagaactaaagaaaacagatggctggagatgacatttatccagggtcactttgtcaggccctaggacttaaatcgaagttgaacnnnnnnnnnnnnnnnaaccaaannataggggaagggaggaggggaaagggggacaaaaatatttccagcctggagattgctattggattgatttttagaatcaataatggttatttatttgccctattacatgcctgaaaaagtgccacatggtgttaattgaaattcagaaggtagatgttcagcactcataatata

SEQ ID NO: 255466 - DNA, 572 bp, Homo Sapiens
  misc_feature (403)..(403): n is a, c, g, or t
caaagatgccaaattaatactgctttataatatcctctagtagtttgtaagatttttgttctaggctttctctctccccatgtgttctataataaattgaagctgcaaattaagccgatccctccagaatatccagtttccagttagcctgtttatgcccttttgactgtgcctctgggggcactagcagagtctgcactcttacagagagaacaccttagagcctggatagccttgttcaagaagcgacttttccaatggagcaaatgtccatgaggctctggataaaggaactgagatgtcagtgtaaatggctgctgtgggctgggccccaagctccccagggtgaaggggccagcacagtccattgaaatgaattcccaaggccagcccttgggtatangtggggggaaaccctgtggctttcctcttcccttctctttatcagctcaggcgccccaattgaagtgggaaaggagagagggagaagttagaaaactccatgagaagaggctagggttggtgctcacgcctgtgatccagcacttttgggcccagggggcagatccctg

SEQ ID NO: 255467 - DNA, 458 bp, Homo Sapiens
  misc_feature (15)..(15): n is a, c, g, or t
  misc_feature (36)..(36): n is a, c, g, or t
  misc_feature (48)..(48): n is a, c, g, or t
aaggcctcactcccnaccctcctccgggagtgcccnccctatggctanggcagcatggaccctacaaggatgagttaagacactaacatgtcacattctgcccaatgttgcccctttaaaaagccctcaaggcctaattacctttgtccctatgagtcatttatttgttaattccatatgcccttcttgccgtcctcagcctaccctccagcaattaatcataagaggcctgaggaaacatgcaaaaacatatgtaatatacaacaatggtcatggtagcactgggataataaagtattgatacattataaacgtctactaaaaagagcatttaagtaaatttaggttcaccaagataatggaatactatgttgtcatttaaaatgatgttttctaagacaagttaatgcttatgctccaattataatctgaaaaataaaagcatttaatggtttata

SEQ ID NO: 255468 - DNA, 1545 bp, Homo Sapiens
aagtagcgaggcctgggtggcgaattcggcacgaggagccagcttgctggaggcgggcgaggagcggccgggggagcaaagccagggcacccagagccaaggttccgccctccaggaccctgagtgcttcgcccacctgctgcgattctacgatggcatctgcaaatgggaggagggcagtcccacgcctgtgctgcacgtgggctgggccacctttcttgtgcagtccctaggccgttttgagggacaggtgcggcagaaggtgcgcatagtgagccgagaggccgaggcggccgaggccgaggagccgtggggcgaggaagcccgggaaggccggcggcggggcccacggcgggagtccaagccagaggagcccccgccgcccaagaagccagcactggacaagggcctgggcaccggccagggtgcagtgtcaggacccccccggaagcctcctgggactgtcgctggcacagcccgaggccctgaaggtggcagcacggctcaggtgccagcacccgcagcatcaccaccgccggagggtccagtgctcactttccagagtgagaagatgaagggcatgaaggagctgctggtggccaccaagatcaactcgagcgccatcaagctgcaactcacggcacagtcgcaagtgcagatgaagaagcagaaagtgtccacccctagtgactacactctgtctttcctcaagcggcagcgcaaaggcctctgaactactggggacttcggaccgcttgtggggacccaggctccgcccttagtcccccaactctgagcccatgttctgcccccagcccaaaggggacaggcctcacctctacccaaaccctaagttcccggccccgagtacagtctgtatcaaacccacgattttctccagctcagaacccagggctctgccccagtcgttagaatataggtctcttctcccagaatcccagccggccaatggaaacctcacgctgggtcctaattaccagtctttaaaggcccagcccctagaaacccaagctcctcctcggaaccgctcacctagagccagaccaacgttactcagggctcctcccagcttgtaggagctgaggtttcacccttaacccaaggagcacaggtcccacctccagcccgggagcctaggaccactcagcccctaggagtatatttccgcacttcagaattccatatcttgcgaatccaagctccctgccccaaataacttcagtcctgctccagaatttggaaatcctagtttcctctccttcgtatcccgagtctgggacacaaaactccgcccccagcctatgagcatcctgagccccgccctcttcctgacgaaactggccccggatcagagcaggacctcccttccgaccctctgggaacctcccagaggtccagcccatctcggagcatcccggaggaaatctgcagagggttaggagtgggtgacaagagcctgatctcttcctgttttgtacatagatttatttttcagttccaagaaagatgaatacattttgttaa

SEQ ID NO: 255469 - DNA, 548 bp, Homo Sapiens
tatctataaaaagatatatttttattctttatttttaaaatttatgtatgttcgtgaggcacaagtgcaattctgctacattgatatcttgcttctcagtcccacacaaggaagctgtctcacactatagagaaaatattcatgaacaaattcgtatcagtcacagtgagaggtaacactctaaatagcccatttcatgctcaagacatccaagtcaaagaaacccaatagcacagctaagtcccctctgttcccccccaacaccccactcacatcagggcccctgccctggagtgtcacctttattagctgtgagagacaccccagagccctgggcactgtcagtgattggggtagaacaaaaacaggacctggtcagagcccacagatgtggctagaggaactgtggggtgggtgagctccctcataggctcctgaccacaatatcccaacaatctcagggatcagcctccttcatcttacctgcagcctgagagtagctccctctgtttctatctatgggaagaaaatgtcctgtgagaggccag

SEQ ID NO: 255470 - DNA, 590 bp, Homo Sapiens
  misc_feature (224)..(248): n is a, c, g, or t
  misc_feature (449)..(523): n is a, c, g, or t
gaaggggaagagcctgacaagtgtcctgctttggctcctcagtgccatggtggtcatcagtcctgctactgctgctgagtaatacgtcacggtggtgctgggctggttgctgctggacatgctggtggagaatactgaggtcctggatgacgccgtgactccccccttcaccgcctcctaggcctggagacctctcttcagctccagcgaacagccccccatannnnnnnnnnnnnnnnnnnnnnnnngactgctgctcctcaggatccgcgggtttctcctgtttgatgctaaccaaagactgcaagaacccccaggaggtcctctgcgaggggaagcccgcggctgacgccgccggctccttcttgaaagtcatgtccggggctggcgaaggggggggctcagcggccggggcctggggaaaggtgggttccatctctgccctcctnnnnnnnnnnnnnnnnnnnnnnnnnnnnnnnnnnnnnnnnnnnnnnnnnnnnnnnnnnnnnnnnnnnnnnnnnnntccgccgccactcaggaacccactgccgattttcataccccggaggaggcctgggggtcccgccgcc

SEQ ID NO: 255471 - DNA, 578 bp, Homo Sapiens
aaattaactaggatatcagcaaatcggggagtccctgtacttatagttgctaaccaaacaagatttgaggaactcattgtcactgtcagaaattgagaaattgttagcaatgggtgaactgagctcatcaactccttggcatttgcagcctacctgtgcaatcataggagatggcctaaaggaaggacttgagaaactacatgatatgatcattaaaagaagaaaaatgttgcggcaacagaaaaagaaaagatgaatatcaatacctattatatctgtgtggagtaggttttctctggtctgattttgacaaatagaagagtgtctacagcgtggtttgcctgtctgccctcctggatgctattaaagctttgttttgttgaacaatcagatgcccaactctgttgccttgtggaagatgagtaaatgcagtgcttcttaaagtggtctcttctccctaccccacaaatcttttggtactaccatttggggaagccaagcaaggatagtaaattgaccagaacacagttgtgggaatttggtctgaagttagtgaaataaaactttaaagagtgaaa

SEQ ID NO: 255472 - DNA, 763 bp, Homo Sapiens
  misc_feature (60)..(60): n is a, c, g, or t
gatcaagatagagggtaggccacagacaacccatacaggcatggatagaaggacaagagnagataccccctcacctcaggtcttcatgaggaataggagatgataacaatgaatctgattggtgaatgtgaatgatgccagggaaaatgaaaagggagtaagaggcaaaaccaaaccaaaccccgaaaatccttgtggctgctccagggagcttacgagtggagtttgaggttttggggagccctcaagcagagtggcccgtgggttaggggtggggggtggagggctgagtcagaggagcttggggtcctgaagagtcaagtcaaatatcaaaagctttgagccatgtgtttgatgtaaaaagataagtgaggggggaggaacacagattcaagaaggctgatgtggaaatatgaggccacagggctggtctgggttctctagctaaagaatcagccttcccaggactggggagagctcagcagaagggaggcagtgagggacacagggggcatgtgaccatttaaagcaggttgaagtctccagaaaagttacatcccaggctcctcaaaaaacttgcaaatgtgaccttccaactacttactgttgttgagaaattatggaaatgaggataggaaaacaatgtactggcaaaagttcccattctcaaaaagaaagtgtagattctggaaaccataaacttgatctcccctgacatgcatgcatagctccctgataaaattccagctccactcattaaaag

SEQ ID NO: 255473 - DNA, 1973 bp, Homo Sapiens
  misc_feature (1674)..(1777): n is a, c, g, or t
  misc_feature (1811)..(1812): n is a, c, g, or t
  misc_feature (1871)..(1909): n is a, c, g, or t
gggggagagtttaagaggcgtaagccaggcgtgttaaagccggtcggaactgctccggagggcacgggctccgtaggcaccaactgcaaggacccctccccctgcgggcgctcccatggcacagttcgcgttcgagagtgacctgcactcgctgcttcagctggatgcacccatccccaatgcaccccctgcgcgctggcagcgcaaagccaaggaagccgcaggcccggccccctcacccatgcgggccgccaaccgatcccacagcgccggcaggactccgggccgaactcctggcaaatccagttccaaggttcagaccactcctagcaaacctggcggtgaccgctatatcccccatcgcagtgctgcccagatggaggtggccagcttcctcctgagcaaggagaaccagcctgaaaacagccagacgcccaccaagaaggaacatcagaaagcctgggctttgaacctgaacggttttgatgtagaggaagccaagatccttcggctcagtggaaaaccacaaaatgcgccagagggttatcagaacagactgaaagtactctacagccaaaaggccactcctggctccagccggaagacctgccgttacattccttccctgccagaccgtatcctggatgcgcctgaaatccgaaatgactattacctgaaccttgtggattggagttctgggaatgtactggccgtggcactggacaacagtgtgtacctgtggagtgcaagctctggtgacatcctgcagcttttgcaaatggagcagcctggggaatatatatcctctgtggcctggatcaaagagggcaactacttggctgtgggcaccagcagtgctgaggtgcagctatgggatgtgcagcagcagaaacggcttcgaaatatgaccagtcactctgcccgagtgggctccctaagctggaacagctatatcctgtccagtggttcacgttctggccacatccaccaccatgatgttcgggtagcagaacaccatgtggccacactgagtggccacagccaggaagtgtgtgggctgcgctgggccccagatggacgacatttggccagtggtggtaatgataacttggtcaatgtgtggcctagtgctcctggagagggtggctgggttcctctgcagacattcacccagcatcaaggggctgtcaaggccgtagcatggtgtccctggcagtccaatgtcctggcaacaggagggggcaccagtgatcgacacattcgcatctggaatgtgtgctctggggcctgtctgagtgccgtggatgcccattcccaggtgtgctccatcctctggtctccccattacaaggagctcatctcaggccatggctttgcacagaaccagctagttatttggaagtacccaaccatggccaaggtggctgaactcaaaggtcacacatcccgggtcctgagtctgaccatgagcccagatggggccacagtggcatccgcagcagcagatgagaccctgaggctatggcgctgttttgagttggaccctgcgcggcggcgggagcgggagaaggccagtgcagccaaaagcagcctcatccaccaaggcatccgctgaagaccaacccatcacctcagttgttttttatttttctaataaagtcatgtctcccttcnnnnnnnnnnnnnnnnnnnnnnnnnnnnnnnnnnnnnnnnnnnnnnnnnnnnnnnnnnnnnnnnnnnnnnnnnnnnnnnnnnnnnnnnnnnnnnnnnnnnnnnntttccatagaaacacccctaaaaaggaccaaacnnattttttttgtgggggccccctccggcccccaaaaaaattttttaaaaccattcttttnnnnnnnnnnnnnnnnnnnnnnnnnnnnnnnnnnnnnnncaaaaaagttgttttcccaaagaaaacaccggggcacaagaacaaggggttgggttatcccccc

SEQ ID NO: 255474 - DNA, 902 bp, Homo Sapiens
  misc_feature (577)..(696): n is a, c, g, or t
  misc_feature (705)..(759): n is a, c, g, or t
  misc_feature (764)..(771): n is a, c, g, or t
  misc_feature (773)..(773): n is a, c, g, or t
  misc_feature (781)..(782): n is a, c, g, or t
  misc_feature (784)..(787): n is a, c, g, or t
  misc_feature (789)..(790): n is a, c, g, or t
agagactcctacttcaatgtctcttgctagaaacacatccctttcctcacacatccagtcactcatcaagtgtaatctgtctcctaaatatctctggaacctatcttcttttctccaagttaccatcacctcttgtctaaactgctacggaaacttcctaacctgttctcccatttccacttctgacttccatgctgcaatgagagtcagctatgaaaaacaaacctaaacatcgaactttccttagcttcttcagtggcttccaactgcttttggaataaagtcctaaattcaaagatcttgtataaatcaggctcatctcgcaacacccctctttgttctctatggcctagacacactggcctttcagttcattacatgtcttgcctcagaccctcacacactgtcctctctgcctgcaacactcttcctttcactttccacctagctgatcctaaatgttccttcctcagggaggtcttttctgatttcttggtgggtcaagactttctgataaatcagttagcaccatgcattttccagagtttttattacaattgtaaaattatggctgtannnnnnnnnnnnnnnnnnnnnnnnnnnnnnnnnnnnnnnnnnnnnnnnnnnnnnnnnnnnnnnnnnnnnnnnnnnnnnnnnnnnnnnnnnnnnnnnnnnnnnnnnnnnnnnnnnnnnnnnctccaaaannnnnnnnnnnnnnnnnnnnnnnnnnnnnnnnnnnnnnnnnnnnnnnnnnnnnnngaaannnnnnnnanaaaaaaannannnnannccctgtggggccgccctctgcccctcaaaaatcttttcaaaaaccatttctttttggggccgcgggcccccattagggtaaatggaaaatggggctaaagctggtttcccaa

SEQ ID NO: 255475 - DNA, 481 bp, Homo Sapiens
aacaaacctaaacatcgaactttccttagcttcttcagtggcttccaactgcttttggaataaagtcctaaattcaaagatcttgtataaatcaggctcatctcgcaacacccctctttgttctctatggcctagacacactggctttcagttcattacatgtcttgcctcagaccctcacacactgtcctctctgcctgcaacactcttcctttcactttccacctagctgatcctaaatgttccttcctcagggaggtcttttctgatttcttggtgggtcaagactttctgataaatcagttagcaccatgcattttccagagtttttattacaattgtaaaattatggctgtaataggctggctgcgctgctagattgtaagctcacgagggcagagatctttttcacatcttgctcactgctatattctcattgctgagcacacagttgcagctcaataaattttgaatgaactcc

SEQ ID NO: 255476 - DNA, 612 bp, Homo Sapiens
  misc_feature (380)..(380): n is a, c, g, or t
  misc_feature (383)..(383): n is a, c, g, or t
  misc_feature (424)..(424): n is a, c, g, or t
  misc_feature (430)..(430): n is a, c, g, or t
  misc_feature (433)..(433): n is a, c, g, or t
  misc_feature (484)..(484): n is a, c, g, or t
  misc_feature (500)..(500): n is a, c, g, or t
  misc_feature (509)..(510): n is a, c, g, or t
  misc_feature (548)..(548): n is a, c, g, or t
gcctgaaagaactgtctgtggatctggagggcaatataaatgttttttcagtcattcctgaagaatttccaaacttccaccatatggagaaattattgatccaaatttcagctgagtatgatccttccaaactagtaaaattaattcaaaattctccaaaccttcatgttttccatctgaagtgtaacttcttttcggattttgggtctctcatgactatgcttgtttcctgtaagaaactcacagaaattaagttttcggattcattttttcaagccgtcccatttgttgccagtttgccaaattttatttctctgaagatattaaatcttgaaggccagcaatttcctgatgaggaaacatcagatttgcctacattntangttctcttagtaacctggaagaattgatccttcctactggngatggnatntatcgagtggccaaactgatcattcagcagtgtcagcagcttcattgtctncgagtcctctcatttntcaagactnntgatgatgacagcgtggtgggctttcaatcattcacangattacagaaggagggatccagaaattttcttcaagcactggacaacatgcccttgggggttgg

SEQ ID NO: 255477 - DNA, 1236 bp, Homo Sapiens
ctccaggccggcgagtggactccagaaagcctgaaaagctatcatggcagcaaggcccaagctccactatcccaacggaagaggccggatggagtccgtgagatgggttttagctgccgccggagtcgagtttgatgaagaatttctggaaacaaaagaacagttgtacaagttgcaggatggtaaccacctgctgttccaacaagtgcccatggttgaaattgacgggatgaagttggtacagacccgaagcattctccactacatagcagacaagcacaatctctttggcaagaacctcaaggagagaaccctgattgacatgtacgtggaggggacactggatctgctggaactgcttatcatgcatcctttcttaaaaccagatgatcagcaaaaggaagtggttaacatggcccagaaggctataattagatactttcctgtgtttgaaaagattttaaggggtcacggacaaagctttcttgttggtaatcagctgagccttgcagatgtgattttactccaaaccattttagctctagaagagaaaattcctaatatcctgtctgcatttcctttcctccaggaatacacagtgaaactaagtaatatccctacaattaagagattccttgaacctggcagcaagaagaagcctccccctgatgaaatttatgtgagaaccgtctacaacatctttaggccataaaacaacacatccatgtgtgagtgacagtgtgttcctagagatggtattgtctacagtcatgtcttaatggatcccagctctgtcatggtgctatctatgtattaagttgggtcctaagttgggtcttttgtgtcaacgagatcatctcttctagaaatatcaaccttttttgtccagtaaataattgttaggggatctttattggaaaacttttttggagaggctggtatttaagttagatctgattgggctactcatgtcctgtagccagttcatcctcataataagaatgggcaggatctcttgttctctcctgagtgtctttctactctcctgagcgtctttctgctctccttatcctgttctcttatccttatcccctccagtctctgcctaatttttagtgtttaataacaaccgaatgtctagtaaatgactctcctctgagctgtaataaataaaatggtagtaatgaatgcaatcagtattagccaaaataaagaatttatgagtcattaaaaaaa

SEQ ID NO: 255478 - DNA, 1588 bp, Homo Sapiens
gggagtctggggtttggctgtccggacggtgcagcggcgaggccggccgcgaagatgccagtggcggtgatggcggaaagcgcctttagtttcaaaaagttgctggatcagtgcgagaaccaggagctcgaggcccctggaggaattgctacacccccagtgtatggtcagcttctagctttatatttgctccataatgacatgaataatgcaagatatctttggaaaagaataccacctgctataaaatctgcaaattctgaacttgggggaatttggtcagtaggacaaagaatctggcagagagatttccctgggatctatacaaccatcaacgctcaccagtggtctgagacggtccagccaattatggaagcacttagagatgcaacaaggagacgcgcctttgccctggtctctcaagcgtatacttcaatcatcgccgatgattttgcagcctttgttggacttcctgtagaagaggctgtgaaaggcatattagaacaaggatggcaagctgattccaccacaagaatggttctgcccagaaagccagttgcaggggccctggatgtttcctttaacaagtttattcccttatcagagcctgctccagttcccccaatacccaatgaacagcagttagccagactgacggattatgtggctttccttgaaaactgatttatcactctgagttcaagattcatcttcagaatcctgtatactgacaaacgtagaaatgtaaagtttgtattttcaatttattggatggcttaagcacctcagcattccttactatgtgataaaatacatatagaatataagatatactatatacattttgtccataaacgttatgctgaatagttgttgaaacagttctcattttgtagtatttaataatctggatggagcctgtcagtattacagttagttttctagtgactcataaaataagatttcctgtttcatgtagaatagtgtttgtcaactgtcttttctctgtcccagcacatgccgtactcttatatgtaccattggttgataattataatgattcatttggacttgaagaaagattgtccccaggcacagtatctgaatcactggggattatgattcaccctctttggagaacatgctctcttttcaccccccacctcctgagagccactaatgtaagatacagaaacatagctgaggaacaaatagaccatttccatactaaaccagtttgttcactttagattttttccaatagtgtgagtatatccattgctggcagtggagggctcgccatgtttagaaggagaaacttaagtgtggaatgcattatatgggcaaagaagctatgaagatacatgatacactttgtacaactatcctgcagcccattggttgcttatatttatcccttggctcaagttctgccctttggagaaatactgagcaagtctttcattctctgtgtgacagccctctgaatatttgaagttgtttgttgtaacttaaggttataacagcccttagttcatttactctgcatttgttcaataaatatttaactgaattcttcaattatttc

SEQ ID NO: 255479 - DNA, 811 bp, Homo Sapiens
aggagacctgcctaagcaagtcaagctgaacacggcccacctccaccgcgacaaggcgctgctcaaacggctgctcaagggcgtgcagaagaagcggccgtcagatgtgcagagcgccctgctgcggcggcacctcctggagctcacccagagcttcatcatccccctggagcactacatggccagcctcatgcccctgcagaagagcatcacgccctggaagactcccccccagatccagcccttcagccaggatgacttcctgcgtagcctggagcatgctgggccccagctcacctgcatcctcaagggcgactggctgggtctctacaggcggtttttcaagtccccccattttgatggctggtaccggcagcggcacaaggagatggccctgaagctggaggccctgcacctggaggctatctgtgaggcgaacatcgagacctggatgaaagaacaagtccgaggtggaggtcgtggacctggtcctgaaacttcgtgagaagctggtacgggctcagggccaccagctccctgtgaaggaggctacgctgcagcgggcacagctgtacatcgagacggtcatcggctccctgcccaaagacctgcaggctgtcttgtgccctccctagaacaaagccaagggccacggtcccagggccctaggtctgcctgagcctcccactccccagtggtggcggcactgggccaagcacacgctccccttccttgccccccgcccagactgcaggctccccttcctgcaccaccattgtctcagcagtaaaggcgacatttggaaccacaa

SEQ ID NO: 255480 - DNA, 636 bp, Homo Sapiens
atagaaagtcactaatggtttacgttcctttcatggttcacgaatagtttacgttgttaaagggaagctggacgagataataaagatcttcagtttagatcttggaggcatatcaactgtggttctaaatggctatgatgtagtaaaggaatgccttgttcatcaaagcgaaatttttgcagacagaccatgccttcctttattcatgaagatgacaaaaatgggaggcttactcaattccagatatggccgaggatgggttgatcacagacgattagctgtaaacagttttcgatattttggatatggccaaaagtcttttgaatctaaaatcttggaagaaaccaaatttttcaatgatgctattgaaacatacaaaggtagaccttttgactttaaacagttaataacgaatgctgtttcaaacataaccaatctgatccatttttggagaacgattcacttatgaagacaccgattgtcagcacatgattgagttatttagtgaaaatgtggaactagctgccagtgcctcagtcttcttgtataatgcctttccatggattggcatcctgccttttggcatcacagctgttagtgcagctgtagtctatgattttctcttcagactcattg

SEQ ID NO: 255481 - DNA, 1256 bp, Homo Sapiens
  misc_feature (359)..(359): n is a, c, g, or t
  misc_feature (497)..(497): n is a, c, g, or t
  misc_feature (1124)..(1124): n is a, c, g, or t
  misc_feature (1169)..(1169): n is a, c, g, or t
  misc_feature (1219)..(1219): n is a, c, g, or t
tctttccgaggttttcctgctcttagccagaagatgtcaccctttaaacgccaactatccctacgcatcaatgagttgccttccactatgcagaggaagactgatttccccattacacagatcaccaatgccttcagcacacctgaggaccccttctcatctgctccgatgaccaaaccagtgacagtggtggcaccacaatctcctaccttccaagctaatggcactgactcagccttccatgtgcttgctaagccagcccatactgctctagcacccgtagcaatgcctgtgcgtgaaaccaacccttgggcccatgcccctgatgctgctaacaaggttgcagccacatgttcggngaccgagtggggtcaatcttctggtgctgcctctccaggtctcttccaggccggtcatagacgtactccctctgaggccgaccgatggttagaagaggtgtctaagagcgtccgggctcagcagccccaggcctcagnctgctcctctgcagccagttctccagcctcctccacccactgccatctcccagccagcatcacctttccaagggaatgcattcctcacctctcagcctgtgccagtgggtgtggtcccagccctgcaaccagcctttgtccctgcccagtcctatcctgtggccaatggaatgccctatccagcccctaatgtgcctgtggtgggcatcactccctcccagatggtggccaacgtatttggcactgcaggccaccctcaggctgcccatccccatcagtcacccagcctggtcaggcagcagacattccctcactacgaggcaagcagtgctaccaccagtcccttctttaagcctcctgctcagcacctcaacggttctgcagctttcaatggtgtagatgatggcaggttggcctcagcagacaggcatacagaggttcctacaggcacctgcccagtggatccttttgaagcccagtgggctgcattagaaaataagtccaagcagcgtactaatccctcccctaccaaccctttctccagtgacttacagaagacgtttgaaattgaactttaagcaatcattatggctatgtatcttgtccataccagacaggggagcaggngggtaacggtcaaaggagcaaaacagactttgtctccctgaattnagtactcttttcactaatcccaaagggtcccaaaggaacaagttcccggncccaaagtaactgtggagggggtggatttttgaaaag

SEQ ID NO: 255482 - DNA, 476 bp, Homo Sapiens
  misc_feature (421)..(429): n is a, c, g, or t
ggttaaattgtcaccttggatattctagaagactaaatatatcctttagggggaaaaagtgtgattgtaccaaagttttaagcatggagtgtatgggatggtggaaggggaaggcacttggtatctgttggttggcagtgagtaggttgggagagttataatggagaacttagaataactttgatcatttcatgtttttttctgaggatatcagtagaatactaaatattaaaattcctaccatttctttttcctccagtctcaaagagagagggtggtaaaaacactataggtagggcaagcctattatttgctatctacacttatgcagtaaaaacaggtgtaatctgagtttgtcctgggcagaccagggatatgtggtcactcactatagaaatttccaaatcaaattttgagagannnnnnnnnaaccaggacattattggtcattatattttacaattttccaaagcttg

SEQ ID NO: 255483 - DNA, 235 bp, Homo Sapiens
gtaaacccgcacatcactgaatagtgtagaatgaccggttcacattgccaactgatcctaactaagatgcccttgattacctctccaccatgtcctggggccttaccatcaaggtgaggaagggtgccaagacctcccagtgaaagtcagacactggcctatggtctgcttgttaatcatatatgaaataattaagttcatacattatctgaataatctctatgaggcagtgctt

SEQ ID NO: 255484 - DNA, 664 bp, Homo Sapiens
  misc_feature (356)..(373): n is a, c, g, or t
ctttctgacacctcaccatgtgtacgggtgtggccaacgccctcctgctggtacctaatgggaagacctcctggaccaacaccaaccatctcagcttgcaagtctggctcatgggcggacctcattggcacgggcctaaaggtactgtgtccagggattgcagccgttcgggcagggggcaagggctgctgtggtgctgggtgctcgggaaaccgctgcacgatgctgcgctcggtcttctcctcggcgttcggggtgcttggtgccatctactgcctctcggtgtctggagctgggctccgaaatggacccagatgcttaatgaacggcgagtggggctaccacttcgaagaaannnnnnnnnnnnnnnnnnggccggagaagcttacttgctcaaccgcactctatgggatcggtgcgaggcgccccctcgcgtggtcccctggaatgtgacgctcttctcgctgctggtggccgcctcctgcctggagatagtactgtgtgggatccagctggtgaacgcgaccattggtgtcttctgcggcgattgcaggaaaaaacaggacacacctcactgaggctccactgaccgccgggttacacctgctccttcctggacgctcactcccttgctcgctagaataaactgctttgcgctctctta

SEQ ID NO: 255485 - DNA, 703 bp, Homo Sapiens
tccttcctggacacctcaccatgtgtacgggaaaatgtgcccgctgtgtggggctctccctcattaccctctgcctcgtctgcattgtggccaacgccctcctgctggtacctaatggggagacctcctggaccaacaccaaccatctcagcttgcaagtctggctcatgggcggcttcattggcgggggcctaatggtactgtgtccagggattgcagccgttcgggcagggggcaagggctgctgtggtgctgggtgctgtggaaaccgctgcaggatgctgcgctcggtcttctcctcggcgttcggggtgcttggtgccatctactgcctctcggtgtctggagctgggctccgaaatggacccagatgcttaatgaacggcgagtggggctaccacttcgaagacaccgcgggagcttacttgctcaaccgcactctatgggatcggtgcgaggcgccccctcgcgtggtcccctggaatgtgacgctcttctcgctgctggtggccgcctcctgcctggagatagtactgtgtgggatccagctggtgaacgcgaccattggtgtcttctgcggcgattgcaggaaaaaacaggacacacctcactgaggctccactgaccgccgggttacacctgctccttcctggacgctcactcccttgctcgctagaataaaactgctttgcgctctctaaaa

SEQ ID NO: 255486 - DNA, 1221 bp, Homo Sapiens
  misc_feature (381)..(381): n is a, c, g, or t
  misc_feature (438)..(438): n is a, c, g, or t
  misc_feature (490)..(490): n is a, c, g, or t
tcgatgtctcacacgaggcgggggaaaaaaataatctgttcacccgtggacatccacaatagtgtagggcgcggggcgcaacgcgagaaaaaaagaatacgagtggaaactgaagtgtcctcgagcagtggtaagataacccgcacagtcacgagcgtagcgtgtaaccacatatgagcgggtggcgaggagctgaccgcgaggggcttatctataagacgcggtatgggataaagtggagggaaaggcgtggggcgtgtgttaaaagagtgtacgcgcggggtgtcgtcgcggattaagagcactgtacgcccgcataatgagagagggggtcgcatctcgggtgtgtgggaagcacgtgcgtcctatgtgagggggcgnaaattatggtgtgtttagcgcgaagaagagtggtacgttgctcaggggttgtggganaccggcgctgaaaccgagagacaaatgctggaggcgtacaataaaacgtcgnacggtggggctaaagaacagtcccatgccgaacgaggcgacacctgtaaaggtggcgaggtgaaccgcgcaggcggatattttgtgcgccgtgaggggaagaggcacaacgcgttgcgtggagtcccgatgcgtttccgacttataagcgtgtaaagagggggcccccgggggacggccgagaggagaaatggggttcctaggggaagcgctttcttcgagaggaggccagaacgggtggacccgccgcgggccatgtgcccaggccgccgataaccttgcgctccccgaggaggcagggtctgagcaggagggaggcggtccccccattcgcccccagtgggaaagtcgaagggccaggaaggggaagggccggatgacgggtggccacaccaagagtccagcaagggcggtatttcatgggtgctcagcccaggggccagcgtggtggtagcagccaagaccgggagcaggaagccagcagcagcccctgcgacttgcctcggctgtgctcacggctgcgtgcagagacaccactcccagcaccagatgggacagggctgtgctccactcggcccccggcttgggggccatggcacatcaggcggcagtatgtatgaggacacagataggagatactcaacttcggagaggaagaaagcgcagaagccagcgaccaagggcatgcaaatggcgctgtagtacgcccaggttccaggtccccagtactcc

SEQ ID NO: 255487 - DNA, 476 bp, Homo Sapiens
  misc_feature (247)..(311): n is a, c, g, or t
  misc_feature (399)..(399): n is a, c, g, or t
gtgtgagccaccacacccgccccctaaaacttgtttctaacaggaactttgcacttactcttccatctgtctacaatgctctcttcaaacctcagctgaaatgtcaccatcccaaagatgcttttcctgtccctctgtctaaattagtgcctctccctaatcactctcatatcactgttttattatctttattgcatttatcaggttctggaattatctgcttatttatttaagtccttgttgctannnnnnnnnnnnnnnnnnnnnnnnnnnnnnnnnnnnnnnnnnnnnnnnnnnnnnnnnnnnnnnnngagtacccaatgcctggcacgtaggggtacaataaatgctagctttctctctttttattcattggtccctactgcttaacatagtagngcacttcagtagtttaaatgctgaatgagttaaatgagctagtacatattaaatgccaagagaatgggtcttgctat

SEQ ID NO: 255488 - DNA, 618 bp, Homo Sapiens
  misc_feature (377)..(471): n is a, c, g, or t
ctgtctaaattagtgcctctccctaatcactctcatatcactgttttattatctttattgcatttatcaggttctggaattatctgcttatttatttaagtccttgttgctagtctgtttccttccactagaatgtaagctccatgtggacatgactttctatatgtgttctcttctgagtacccaatgcctggcacgtaggggtacaataaatgctagctttctctctttttaaaaattcctgttatgatgcttctttgaactgtttgaaggcaaagacaatattttttcattgttccctactgcttaacatagtaggcactcagtagtttaattgctgaatgagttaaatgagctagtacatattaaatgccaannnnnnnnnnnnnnnnnnnnnnnnnnnnnnnnnnnnnnnnnnnnnnnnnnnnnnnnnnnnnnnnnnnnnnnnnnnnnnnnnnnnnnnnnnnnnnnggcaggtggcagcacacatctcacctcattgtttttaggatttatcctctgatcttttctaggtcctttcttctcccattcttattggggaggggaagagggagagtaggggctggggctcccctcttcaggggaaaaaggaaaggg

SEQ ID NO: 255489 - DNA, 746 bp, Homo Sapiens
  misc_feature (26)..(26): n is a, c, g, or t
  misc_feature (43)..(43): n is a, c, g, or t
  misc_feature (63)..(63): n is a, c, g, or t
  misc_feature (69)..(69): n is a, c, g, or t
  misc_feature (79)..(79): n is a, c, g, or t
  misc_feature (94)..(94): n is a, c, g, or t
cctccaaaaaccatcacagagtgtcncccagtgaagctctccntgagaaagcacaaggacgcnctgttngcaccaaggncggcactgggctccntgtcaccctgggaaggccctagccgacctggccctcagtcaagatcttacccaatgtccttgtgagcaccaaccggctgtgtctcgctcgttgccatcctcctcatgaccttctgcaccatgatctcacgctgttactggtgatctggaaagctctctgtgcggacgtgtctctgtgctgtgcctctgctgatacactttgggaaatgatttaaccttggggcctcagtggcacccgtgcaggaagggttgatggcaggtctccacctcatagggtttttgtgaggcgtgaacagagttactgcatgtgaaggacacacaacaaaaagaacaaaggcaggctgcccccacagctcttcatgccttagaaaaacctttaacctctcatcttcattctttattctgtatggaattctaatattttttttccctaaaaggccagcattcacctgtcaataactggaaatgccatcttttccacacgcaaagatgaccaggtcccaggtcggtgcccagtgcgctggatcctgggctcctggctctgccacgcagccccagcaccagaacatgctttcagctgccacagccttgcgtgaagtcttagctacagtgcaaatcctctatgtcattttccgttttcttagacgttcttg

SEQ ID NO: 255490 - DNA, 1851 bp, Homo Sapiens
  misc_feature (92)..(92): n is a, c, g, or t
  misc_feature (116)..(116): n is a, c, g, or t
  misc_feature (241)..(241): n is a, c, g, or t
  misc_feature (261)..(261): n is a, c, g, or t
  misc_feature (388)..(388): n is a, c, g, or t
  misc_feature (392)..(393): n is a, c, g, or t
  misc_feature (446)..(446): n is a, c, g, or t
  misc_feature (491)..(492): n is a, c, g, or t
  misc_feature (496)..(496): n is a, c, g, or t
  misc_feature (510)..(510): n is a, c, g, or t
  misc_feature (549)..(549): n is a, c, g, or t
  misc_feature (555)..(555): n is a, c, g, or t
  misc_feature (605)..(605): n is a, c, g, or t
  misc_feature (1275)..(1275): n is a, c, g, or t
  misc_feature (1302)..(1302): n is a, c, g, or t
  misc_feature (1305)..(1305): n is a, c, g, or t
  misc_feature (1317)..(1317): n is a, c, g, or t
  misc_feature (1323)..(1325): n is a, c, g, or t
  misc_feature (1331)..(1343): n is a, c, g, or t
  misc_feature (1818)..(1818): n is a, c, g, or t
tgtgcataagaaaatgaacattagcctatggaaggcggaatcaattagtcttgattttggagaccaccaagctgatctcctgaactgcaaanatagcatcatttcaaatgccaatnttaaggaattctgggatggttttgaagaagtttcaaaacggcagaaaaacaagagtggagaaacagttgttttaaaattgaaagactggccttcaggagaagacttcaagactatgatgccagcnagatacgaagatcttttaanaagtctgccattgccagaatattgtaatccagaaggaaaattcaatttggcctctcatttgccaggattttttgtacgtcctgatctaggacccaggttgtgcagtgcctatggtgtagttgctgcnaaanntcatgatataggaacaacaaatctccatattgaagtttctgatgttgtaaatntactagtttatgttggcatagcaaaaggaaatggcattctctcannagcnggaattctcaaganatttgaggaagaagatttggatgacattttcaggaaaanattganggactcaagtgacatacctggtgctctgtggcatatttatgctgggaaanatgttgacaagataagggaatttcttcaaaagatttcaaaagaacaaggccttgaagttctaccagaacatgatccaatacgtgaccaaagttggtatgtgaacaaaaagctccgtcaaaggctgcttgaagaatatggagtcagaacctgtactcttattcagttccttggtgatgctattgttttgccagcgggagcactttcatcaggttcagaattttcacagctgtattcaggtaactgaagattttgtgtctccagaacatcttgtagagtcatttcatttaacacaggaactgagacttttgaaggaagaaatcaattatgatgataaactacaggttaaaaatattttgtatcatgcagtcaaagaaatggtgagagccttgaagatacacgaggatgaagtagaggatatggaagaaaattaagtgtgatccagtttgatatttttaggttgttgaactgggattacttaaccttgaatgatgatatgtatgcacactgactttaagcttcataaaaccatcagtgccaagaaattctctttgtagtaattacttgttactgacaccacagcagtatagcacatgtcacagctcctgtgattcaatgttataaaacaagcagaattttaaaagcagcactatatggcggtggggtatgatngtgtatatgaggttggtgaaaaggccnganggaaaaggaggnattgannnttggtnnnnnnnnnnnnnttctatgctatattgttgatcaagtgtaaatgtgaccttgtacagtttactaaaattactgatatttttcactacattgagacagttactgtgagaataggacacaaacaccagctattgcctgcatctgggaaattgctgaatcgcacagcagtcatgtcataatcagaaaatgactgccaaataattgtaaaatttgtaaagtataaagtatataaagtagatactaaatacagacacttcaatattttgttgaagctattgactgtacaattaaacattttcaaaaggtgtaatttatttaaaattgtctcattttggtaaaatttatgtgaacttttaaagctaaatattaaacttaatatgctatgtaaatatatacatatatacatttaatgatgtatttttttaaaacattggcttgcttttgttaaagtgcaagtgttacatatggctttgtacattaaagttgaanaggggttttacattttccattaaaaggacttta

SEQ ID NO: 255491 - DNA, 1310 bp, Homo Sapiens
ggggcagtcgctgcagccgccgcgggaggcgtccgtgacaagatgaagctcatcatcctggagcactattctcaggcgagcgagtgggcggctaaatacatcaggaaccgtatcatccagtttaacccagggccagagaagtacttcaccctggggctccccactgggagtaccccacttggctgctacaagaagctgattgaatactataagaatggggacctgtcctttaaatatgtgaagaccttcaacatggatgagtacgtgggccttcctcgagaccacccggagagttaccactccttcatgtggaacaacttcttcaagcacattgacatccacccagaaaacacccacattctggatgggaatgcagtcgacctacaggcagaatgtgatgcctttgaagagaagatcaaggctgcaggtgggatcgagctatttgttggaggcatcggccctgatggacacattgccttcaacgagccaggctccagtctggtgtccaggacccgtgtgaagacgctggccatggataccatcctggccaatgctaggttcttcgatggagaactcaccaaggtgcccaccatggccttgacggtgggggtgggcactgtcatggatgctagagaggtgatgatccttatcacaggtgctcacaaggcatttgctctgtacaaggccatcgaggagggagtgaaccacatgtggaccgtgtctgccttccagcagcatccccgcaccgtgtttgtgtgtgacgaggatgccaccttggagctgaaagtgaagactgtcaagtatttcaaaggtttaatgcttggtcataacaagttggtggaccccttgtacagtatcaaagagaaagaaactgagaaaagccaatcttcgaagaaaccatacagcgattagcctgtgctgggacctagtgtcaagtacccatagggaaaggcaggtctttctggaaattgtctttagaagaaagaattgtatttctttaatctagtatggttactccagataagtgggtgaacttattgttcttggccatgaggctgggagcctagtcacggagtttagctatagggagaatgtttgtaacttaatcagaaaatatctgctttttggtctgcttcagccatggttcacacatatgacacactcccgtcaggaatttctctccttacacgcactgattttcaagtgggagggaattaggggcttatgtatattggataccacctcttgagagtccttcttgcacaggcctgccccttggttgagaaccattgttccaagtgggccctctt

SEQ ID NO: 255492 - DNA, 1432 bp, Homo Sapiens
  misc_feature (72)..(72): n is a, c, g, or t
  misc_feature (283)..(292): n is a, c, g, or t
gtggaagtaagttccacccggtgtataagccccttccaggaactctccctttttggcgtattgtgttttccnaaaacggtttgggattaaccgcccgcgggcgcgttcttttatcgtggggaagaattccaaagcccgtgtgttcactgagccaggattttccttagggaagacaaggtattggcccaaggttccattttcccttctggggcccggggcgccaaagcaaaatgttttggaaaagttttttggaggggcggaggggcccggccatattaataannnnnnnnnnaatgggtggggttagaaaatactggatttaatagaaaatatcacatggtaaacaaatccattgatccatgagcttaaaacagaatgacggcacaatcacatagaaaagctaaagacaaaacactggtaccaaacatagcccttaggcctgggctaggctctcaaaggtctttcccagaaatggaggcagcagtagcttcaaacaggcacaaaaacagccaggaggaggcagcatccactccatgaaggcctaagacaatgaaaggaagccagagcaacagaccaccttgggatccggggagaagggtaaatgggcaaaagggttgtatttcctgatgctctcagaacatcagaccacaccatgtgaatttaagcaggactattttaagtggggaaacaatactagaagcatttggtgtattttcctggcactcacctcctaggtaagcaggagagcgggacactcaggagttgtgactaaactcacacttaagctgcctgtccagaccgtccccttggctgaacacaacactgaaattgtggcagtgtctgttgccccagtggacctcccacttactaatgagtatgtaaaacagaggagccacagtgaggcctttcacaaaaacacagggctctgggggaaaaacggcttccaccttctgccttttggtgctggagagtccctgagggagagaagtttgacgtggctgggccccttgaggctctggatttatcaatagaagcctcctctttgggccccacccacccaaatccacccccaggttctcctagttcagagaaaagctgtgaaagtggaagaaggaagggatcgttttctttccattgcacttgttactgaccaaagagactgcttccttgcacttattttagatattgagagtttgtgccttcacttggaacaatggttctcaaccaaggggcaggcctgtgcaagaaggactctcaagaggtggtatccaatatacataagcccctaattccctcccacttgaaaatcagtgcgtgtaaggagagaaattcctgacgggagtgtgtcatatgtgtgaaccatggctgaagcagaacaaaaagtttaaaactcccaacctgggtttggcagacatcaaaatgatggagtaca

SEQ ID NO: 255493 - DNA, 1810 bp, Homo Sapiens
gcagtggaagaatcagttgtctggaaacctgctgaggaaattcaaaaacagcaacgggtggcagaagctgtgggtggtgttcacaaacttctgcctgttcttctacaaatcacaccaggacaatcatccccttgccagcctgcctctgctcggctactcgctcaccatcccctctgagtccgagaacatccagaaagactacgtgttcaagctgcacttcaagtcccacgtctactacttcagggcggaaagcgagtacacgttcgaaaggtggatggaagtgatccgcagtgccaccagctctgcctcgcgaccccacgtgttgagccacaaagagtctcttgtgtattgatggccggacacactcgtttccgcagtggctgctttcctggaagacgtttcctttcttctgtattaatgaagcctggtaaaattaacacctgtctgaaaatcaaaaacatggcttcccagcagctctcctgtctccacagccgcgttttttaaccccgacctctcagcgtctgaatgaacagcgctcccacctccagtcctggcatccgctgggggcgctgttctttagctagtgccagtattaaaacattgtcattacgagagtgccaaatgacatcttccctccaccctgcccctgaaaaacagtacacacacatccgttcaacacaagacagggcaagtgtttttcttcctaaaaaaagttctttcttttattattttcacctattggctgctgcattttacgaagtggacttcccggtgtttgtttgtttgtttgcaatacactcagtgcagccttaagcaaatgagatcattttcagatttcattttatttgtttttcagtctttctacttttgtaataataggaagttagtaggactcacttctctgattaataagcaatttgcagcacacagcgttccactgcggggtttcacgctcacctgaaaacacctgttcccaacctacttcttggtgcaagttgaccaaatcgttttaagtggtaactctttccaaccgtagcagggttgttttctgttaagcaaagccgagatccagtgcaatacctggactgtcaccgtcctgtgagtggtgtacacaatgggaagataataagccgtggtgttttgctgtctgtctgtgtcacaagcatgaaaacccgtgtgtcattgatcagcaccatttgtggtatgttccgtgatgagcgtttagtgagcctgctggctgcagagcactatgaaatcatggtacgtagtccccggcacctgtcgttattcctatatcctcctgcaactgtggtttgaaactgcgcattctctagtagtatatatcgtgcctgtcttcaaaaacatttccctttttatactcattccccccaggcatggggtagtgtcagtcggactgcacagggaacacggtttccagtggctttggcccctactcgggaaacgtctgcctgttctcgatggtgatggggtggctgccattcccttggttttcctaagccctttctaacgagagtctcaaacaagcggaggcgagggccaattcaaccccattctttccagcgccccgcaccatagcacctgcccacctgagaaccaggaacgcaccctctctgtggagctctgactggtgtagctggaaacaaacagcaacttgcaaacggacgaagagcctgccgtgtgttaatcatttgccttacaagatgtaccagacggtttccagtactaacaaagggaataaaaatacctcacgccacaatccagcatattgatgttttaaggcaaaacaaca

SEQ ID NO: 255494 - DNA, 1014 bp, Homo Sapiens
ccatcccccacagcacaacaagagacacaagtttgaaaggcttttacatccccaaggggcgttgtgtctttgtaaaccagtggcagatcaaccatgaccagaagctatgggtcaacccatctgagttcctacctgaacggtttctcacccctgatggtgctatcgacaaggtgttaagtgagaaggtgattatctttggcatgggcaagcggaagtgtatcggtgagaccgttgcccgctgggaggtctttctcttcctggctatcctgctgcaaccggtggaattcagcgtgccactgggcgtgaaggtggacatgacccccatctatgggctaaccatgaagcatgcctgctgtgagcacttccaaatgcagctgcgctcttaggtgcttgagagccctgaggcctagactctgtctacctggtctggttgggcagccagaccagcaggctggcctatgtggtctaaggttcagcctgaaactcatagacactgatctggctgcagttttgctatctgggctgtgggcaagcctaagggatcctgcctgcccctaccctggacttgcctctgcacacacctccagagacaacaggtaaaacagggccacatagatgctgatggagccttcccaagttgtgcttgagccaggaggcctgctagggttaggaggtccttaggcctctgagaagctctgaagaactctctggaagcccctgggcccagtacctagctggctctgtgagggtgctgactggcttcagcaagttagaactagccaaaccaggaccctgtcccaatctttgacaattggggagctgccaagagtgaaagggaaagagacagcccaggatactggcacagaggtagtctcactgcttgaactaggctgagcaatctgaccctatgggtctaggacacagttcctgggaacatcacattcctctgcccttcctgcaggcaggaacaaacagggctgccttctggccttgtaagacccttattgctgtcct

SEQ ID NO: 255495 - DNA, 591 bp, Homo Sapiens
  misc_feature (13)..(13): n is a, c, g, or t
  misc_feature (33)..(33): n is a, c, g, or t
  misc_feature (51)..(51): n is a, c, g, or t
  misc_feature (77)..(77): n is a, c, g, or t
attccaaccgaanggggtcctaacccttaggantttggtgtcagggttttnagaagaaataaagccaatttaaattnccctacctcacttctgtaaattccaacccctaaaaaattaaaccgacccaagattggatgccctatgtgtcctattacccttttatatcctgtaattaacttaaagctgactcatattaatcagttactggggcctaaggttatacaggacgacataacaatttaaaacattacaatatgatttaagcagccgaggaatgaagctaaagcctctactttttttagtgattcccaatggactaaaaagtaataggctgagtagcaattacatatgttaggcttaacctagagcagtaaatttatattaaccattaacgaatatcaatcttcagcttggtactagctgaatgggatcacttacaaaaggtcaaagtaacacagttaattaacatttggaagactgagaggtggcttcattttcttcaagttatgaaaagagataatatgaggatgaccttaatttacactttcccatttctactgtatatagtataaaaaggcaagaaccttaacc

SEQ ID NO: 255496 - DNA, 904 bp, Homo Sapiens
  misc_feature (67)..(67): n is a, c, g, or t
  misc_feature (82)..(83): n is a, c, g, or t
  misc_feature (93)..(93): n is a, c, g, or t
  misc_feature (122)..(122): n is a, c, g, or t
gatcaatgagcactaccactccgcgtctcatcatatggataggccacaaggtctcctccatgagagncagaaagcacaaagnnaatatccatnatcccacttcatatcaacagatgattatntggaccaccttctttctcattcacgtacactatcctatccaggtctggaaagttccggttcagatctattccctgggcattgcttcgacccacaaaccagtccttgagttcaccaggctgagacgctgccttctcaaagccatctgggttcagggaaggcatgatgtgaatgcgggtactgtggatcaggttgacaattgtctcgttccccttctggtattcgttgcataggtactgggccaagaaaatgagcagttctcgtccaacagcctcattcccatgcatattcccaatgtatttaaattcaggctcaccaggctcatggacgccagggttgtcggacagctcgatgaccaggagctcccggccctcgaagctgcgccccaccgtgtaaatcctgctgatggcggtgcactgcagccacacggacacgagcgcctcgcgcagctcggggtagcggtggtactcgaaggagatgccgtcctcttgctgcagccgccggcgccgcctcatgcccgccgcgggcgccccgggctcctgggcttcggcgcccaggagccacccgcaggcagccagtgccccgcacagagccagcagcgcgctgccccctcgcccggccatcgctgcgctccgccgccgccggccgtgccttcctacgcgggcggcctcttttgtctgcccggccctgggcttagcccgccggcgctgctgggggcggcaagttccgcaccagcctctactcgcctcaccttccccggctgaatgagtgtcagcccgcgcac

SEQ ID NO: 255497 - DNA, 1205 bp, Homo Sapiens
  misc_feature (1072)..(1072): n is a, c, g, or t
gagactggggctaaaagactcagtgctggctgggctcaaggcagtgttccccctcctatatgtccggcgaattgagggtgaagtgaatgagatcctgttctgtcagctgcaccctgagcaaaaacttgccacaccagagctcctagaaacagcccaggctttggagcggaccctgaggaagcctgggaggggttgggatgacacgtatgtcttgtcagatatgctcaagacggtgaaaattgtgtgactgcttaggccaagcagccctcctgcctagactgaccttggactcccagcctgccagagaatgaagaaatacaacgcacagtacttttgaagcttcgtatttttcttggtttcacactcagctacatgtgacctccagcttggtgaggttgcctgaagattagggaaaataaaaatgtccttcccatcttgtcctcttcagtaccacttgggttggtttgtctttgcttcctacaccacgtccttgagtggagttccctgctgaagcccctagcacacactgcatgccttaacaagtgtgtgcaagcccctcagaactcaagacatccaaattttattgcgtctctacttatactggtttgcttttgatttattcctctattagttctataggagtgatctcaagtgagatagcagagcaagatgccaaaagaccataaatagagtaaggtttctatagatgtgagacagatttgagagagcatttactctgtctccctgtggatgaaactgctgctgaaatggttccaatttttaggaatctgcttacccacttcattatttgacagctttccttggtgacccaaaccttgtagcctaagccatttgtctctttctcagtggagggagtgtatggacctggccccatggctttgcatgttagagacctggcagactaaagtctctagtgtttgtttgctcacatttgctgagtgacagctatgtgccagactgcataaagggtggtggcagaagtgaaaatgtttaattgaccaaaaacattagtaatgaaagttaatgtgttccaggcattcttctaagtggnttacatgcactgtctcatttaatctgagataaaggatacttaagcccaaactatatctaaacccaaatctcacttggctggaaacatcaatcttaaccatttattcagaaccattaaaccaatgatttccaag

SEQ ID NO: 255498 - DNA, 802 bp, Homo Sapiens
  misc_feature (71)..(79): n is a, c, g, or t
ggaggttgcagtaagccgagaccatgcgcatagccctccagactgtgcaacaaaaatgagactccgtgtcnnnnnnnnngtatgtcaattcgtaacaggttattttggacacaccctgaagcttttggtttgaattaagaaatgagtttcaggaattgacaaaccatttgttaaccagctgtcctgggctattgaagaagatttcattttccgcgcattcacttgttgcaatccaagtcctctagtgcaacgccatagcaaatataaagatttactatgcacgtgatacattttatggagagcctcaagccaagatagtgaatttatatgaagggtgtgaaatgtatttctttactactatagtagtttagatataactttgcatgtataattgagctttctcatctgtcaaatgctatgggtttcttttaaatgttattgggtttagagtcagtcattggctctgtcatttaccctctgagagttccacaagtggtagtagagagggttaacgcctttcctctaggactaccagtattcataaatgtataccccttactgtaatttgttcctcttagaagtcagatcatctgatttatagaggattatgaaaaccagagtttttgaaaaggcttattttatacatacgtattatatagagaaacaaatgtttttattaaatgtttcattgacccaagtaatttaaaagtaatatgttacctatgtctttcaggaaaaataattatagcagctgatctgtaaatgactttaaaagctattttagtaatttaaataaatttac

SEQ ID NO: 255499 - DNA, 569 bp, Homo Sapiens
  misc_feature (18)..(18): n is a, c, g, or t
  misc_feature (21)..(21): n is a, c, g, or t
  misc_feature (67)..(262): n is a, c, g, or t
tttgtttgactctaaaanccnccctgttagtgcaatggcacaaacactgttcactgtaaccttgacnnnnnnnnnnnnnnnnnnnnnnnnnnnnnnnnnnnnnnnnnnnnnnnnnnnnnnnnnnnnnnnnnnnnnnnnnnnnnnnnnnnnnnnnnnnnnnnnnnnnnnnnnnnnnnnnnnnnnnnnnnnnnnnnnnnnnnnnnnnnnnnnnnnnnnnnnnnnnnnnnnnnnnnnnnnnnnnnnnnnnnnnnnnnnnnnnnnnatcggcatgagccactgtgcctggccagcctgctatttttggaataaaaatggggttcatttacattcttgactacgtttatttaaggtaactctttaataccatggaaacatgcagtgaagttggttcctatgatgtcacaggcctgtttgttgctagttattgaaccgtgctggggctgaggagtcccgagtaaaggatgagagtgtggggacacaccagggtaaaataccagctcagttatagcttcagttagtaaaggaaaaggactttcctgataaacagagaaacaaagcccaatgcagaa

SEQ ID NO: 255500 - DNA, 462 bp, Homo Sapiens
  misc_feature (32)..(32): n is a, c, g, or t
cccttcttgtttgaaaggcacaaagcccttcnattaaaaaccagagagccccaggcttaagaagcaaaaggccttagtctattggggagaagagtgccttgcttaaagccagaccagtttcctgcttgggagggtcatcccagcgccggcccctcagttttaatttggacatcaccattgctcaggacattgagggtttgagggaaaagtctagaaaaatgatggggcgggtcacacactaattacaattggaaaagctaaggtgagttccaagtttggcttcaccagagaaaactaatttgtgtggcattccagaaagacctgccaaactcgatgagtgaacaggcagcccttcttcattcatgcaagcattcagtttttgaaccaggtaagacttaagatctcatgtcaaataagtcttaagcggccaaataggtttttatcaaacaataagagaaaatt

SEQ ID NO: 255501 - DNA, 680 bp, Homo Sapiens
  misc_feature (403)..(535): n is a, c, g, or t
ggctcagaaatctgagaaatttaataaaaaatctaaatagacctataacaagaaattatagtaatgaaaagtcctgagtcttcctacagaaagcttgtgcccacgtggctgccactgtatactgtcaataacaccaaccattcacaatcttcagaatgtggaggatgagacacgcccatctgagtctaagaggctaaaggcagcgaaaggcatcataatccgtgcccccaccccacagaacaatgtccatcatgaatacagacataaagatccttaacaaaatattagcaacccaaactcggcaacatcatacaccaagaccacgtgggtgtatcacagcaaagtgaggttgcttaaacatctacgaagcacttaacgtcataagccacattaatagaaaaannnnnnnnnnnnnnnnnnnnnnnnnnnnnnnnnnnnnnnnnnnnnnnnnnnnnnnnnnnnnnnnnnnnnnnnnnnnnnnnnnnnnnnnnnnnnnnnnnnnnnnnnnnnnnnnnnnnnnnnnnnnnnnnnnnnntagccaggcatggatgggagtgcatgcttatggtcttagctactcacaaggctgaaaccagaggatcatttgcgcccaggaggtgcaagtccagtgagctgagatcgtgccactcactctagcctgggaaacagccagagcctgt

SEQ ID NO: 255502 - DNA, 1007 bp, Homo Sapiens
  misc_feature (104)..(117): n is a, c, g, or t
  misc_feature (790)..(790): n is a, c, g, or t
gaaaagaatttattgcaaatacagtgactttttatattacagtagtacattccaatcagccatatggccataatttgcatacatttcaaatataaaactatacnnnnnnnnnnnnnnacatatagtacaatttccagtgtgatgacatttcaatgggaaaaagattgtgcatttgcaataaacaccatcattcctgagtccacagataaggtccccggagaaggggcttcccctcctttctcgctgggttgacgttcccagcgagtgaagccttttctggaatgtgtgtacgcaccctccaccaagagttctaataagctaagcttaaagcagaacagtgaaatggcaaaactgtacagagccctgactttacatttcactctgacagccagggtcggaagcaccacatggaaagtgctgtccataactgctcacttacctgctccttgctgacagctcccaggatctggctccagagagtggcaaaactgggaattttgccaagggaaattactcaggaccgctaataaaaacgccggcttctgcaacatgcatattcccccagcccccaccttcatcttggccagggcagaccattcattaactatctgcggggtgaacaaagaaatcccaatcctcagatgtcccaggactcatggctcatgacccacggaatctaaggcagcacagtggcttaatttaaaagatgtgcttttgaatgaatcctagaaaataatctgtctttacacagagagggctgcgggggcaatccctactgacgagtttgttngagagcgcgaactttttcttccaagaggcggctttgtttctcggcgcctcgctgcttctcctcggtggcctgaagtgctctcaccaggtgggcgttctccacgtacagctccttcagcagcaggtcggacttcgtgttcttttcaaactgctccttcagcttatccactttctcttggaggagcatttccatattcttcagaatcatctccgcctct

SEQ ID NO: 255503 - DNA, 735 bp, Homo Sapiens
  misc_feature (65)..(65): n is a, c, g, or t
tttcaaactgccgcattctgttaaattgaccaagcctttgagaatgggcagataaccagcagaanattgttagtgaacggtgtttaaaagaaggagcttctggtaatgaactgtcatcgacctggcgggattgtaagcttcggtcaccccagggctctccaagaaaggctgcaagggccgcgggtgccctggagctgcctgcaggagtcaggcactaagtcagtggaagccaaggtggaaagaagacccccttccattccatcctgaatgactccatgggtgagtgggacccaggacggctgcccttcagagctcagcccagttcccagagacgagacggtgagatggttaccaggatggtccctgccccttggccccggcctctgtttccagctgctccccttagcatctgcacaattgcctagtgaggccatcatgaccctgtgggcacagacttctgggactgatgcctgtggttgtggcacccccaccctcaccccttctccccacaggctgaactttgatccacacttttcctttgatttcaccgtctcctcccacgcctaaaataacatacaggcctttggctatttccaaagggtttctgggaactgcgccccagtgaggaggcttcccagcagccttggccttcccttcaggcagactcctcatccacagtcaggagcccacaggtctcagttcactgacctgctgagaaagaggaaaaaccttcaa

SEQ ID NO: 255504 - DNA, 194 bp, Homo Sapiens
  misc_feature (133)..(149): n is a, c, g, or t
ttacagataatgtggcaagcatattttggattctatgaattatttctggagaataattttttcttctttgatcgttatctgaaacccatgattctgaggtaatcatatttaacaattttgtgccatacatacnnnnnnnnnnnnnnnnncgttgagactccatcaaaaccaacaccaccaccaacaaaaaaaaa

SEQ ID NO: 255505 - DNA, 648 bp, Homo Sapiens
tattttatttttggaaaaagcaagaaccgaaaaacttttaaaccttcattagttctacacaaaacacactcggtcaatacatttcataatggttcctctttcaacatagttctccatttgtgctacttaacctactttgatgaacttatcaattatttctcccaaccaaaatgagagattttccaattgggtattatgacaagttaactctttgcttaagccacaatatctttacccaagattactttataataaatgtattaacgttttggaatcacagacctttctgcatgatttccaatccccagcagaatgtattcaggtaagctctggtctctaagagtcagagttaggaaattgaaagctttttgcagcttttctcagccccgtctttctgcccctacttctcatacacacccttcttgggtcacatggtacctttattctctgttagtcatactcgatagtagcattttataatgtaggggaagaaagtactatgctttctatttcacaagaagattgcacctgccatttaaagttatctgatgggcggtttttaaaagatattgttttcctcagcctttggctttctaacaatgttcttttagcttgaattgtctgccttagagaaagttgcatatttca

SEQ ID NO: 255506 - DNA, 530 bp, Homo Sapiens
agggccaggcattcttctcatggtgagccaaagggttattttaaggaagtgcttctcaggtcatttaagctgaatgacgggaaagtaaggctaaatatccaaaaagaacatttatgcattccttcatgcattcaacaacttttattgagtgcttcctgtatgcccaaaattgatcaatggccctaaagatcccaggttagggtttgatacatttttgaagtttgcaaagtccccatttgagttcataatggatatttgtaaaaaaagcggtggctttgcgctctttttatgtttatttaagataaaagcagtataccctttgaaagaattatatgtaatccttcccatttgaaattaaaggattggagccagccgccctggcatgtccctgtaatcccagcttctggggagccttaggcagaaggatccctttaccccagcagtttgaaactgtagtcccctataattgcacctgtgactagtcactgcaccccactctgggcaacataaagagcctccctttttccctt

SEQ ID NO: 255507 - DNA, 557 bp, Homo Sapiens
  misc_feature (135)..(162): n is a, c, g, or t
aaggcaatgccgtctgcaagcccagggcagaggcctcaggaaccagccctggtgacacctggaccttggacccccgtgcccaggacagtaggagaattggagccgcctggctgcagtccttcccgatggcacccnnnnnnnnnnnnnnnnnnnnnnnnnnnntgttgggaaaagggcttgtggaatgcctgtataaactggccatgaaaatatgggacaataagttgtggaaagccacaagaggcctctgaggaggaaagcctcctaattgccatcatgttcgcatgctcagggcgagacctgctgtcttatctgtaaacaccgtgttcaaggagaaagacattccttcgaagcactggactgtggacagacacacgagctcctggttaagcccgctcccaccagctcctgtccgataagttaaagatacgctgtttgagcacaaaggagattcattgaaaccgctattgctgtagattacgcctgtgacgcactgcctccctttcactgtttcgccctgaatatctgcttctcagatctaagtgactgaactcaat

SEQ ID NO: 255508 - DNA, 710 bp, Homo Sapiens
aataaaaaaaggagatgaaaaacttccacttcttctcagtggttactgtagaagatgtctctttactaaaaaggggttttctacattttaaatgagattcaggctatcttagggaatgagcatttgtcttttcatatgattagtgtctaccccaagaatagttccattgatgaagattttctatattttttcatatctagctatgctatttcctcatgaaagtccaagactttttatgactgtggtaattttagaatatacatgaatgatctttcagagtcacaattttgccatatcgttaaaaaaacttattcccgtttcatagtctctgtattagccttctcctggtctatactaatccatagattagaaagaagaaatctgcttattggtgccatacaagcaaacaaacagataccagagttaatgatccttctgaagtcataacgaaaatttgtgagaatagaaggaacgttaggctttaataacatcccagaggtcaatcaaaattattcaaggctgtcaagaaaacatacgctatgagataataataactcattaccagccatttgtgttggtgtgtgaaaatgattctttgactctgatggtagaaacaaccatgaaaaccaatcccaggtttcttgccctttgggtgctggctcaagtgctgtagcactaaggctcaataaagctggtggaacatgaatgga

SEQ ID NO: 255509 - DNA, 593 bp, Homo Sapiens
ccagcctggaaagtgagtttccaaatctcaacaagcccttaacatcatgcaaattctttttgagctgaaaaagaaaaaacagaatgccacctttttaaaacaactttcttcgaaacatggggggaaagtcaggttttatataaatcagagagatagaaatagggcccataataaaaaacttgaaatagatttggaaagtttccgaaacttccaaaaactagtggtccaaagtgggcaatattttttgtgtgcattgagaggcccttcctgtttccttggtccatgctggtgtcttgccccgttccaggaaccctgggctcccctgtgctgagcagcccccacacctcagcccaaagcctcaccccttgcctgaccacaccccatttcttttggcacagccttccccagacttacaagatgtccttgaagtgactgaatggagttagtgttcggcaggactggctaggtaactactgggacttggtgcagaatgtagatgtagggctccttgttcaaaaattaggaagaatttcaagatagccacagcagagcattaaaacaaacccaggttggctaggtgtggtggcacactc

SEQ ID NO: 255510 - DNA, 713 bp, Homo Sapiens
ctggtcttatactaccatctatttgttagtaaaagaaggttacatgtggcctaagtggtttcttggcacttaaatattttttaaattatttggttcttggctgggaacttagtccaatatgtctgctaaagtatttcccatttcttgccacctctacaatagtgccataatttccaagttgatttgacatgtatcatctttattctcacaatcctgagaggtatatagagcaagaattaagttctacatttaacaaaagagaaaacacacagagattgattggctctaggttatatagctaactggtaacaaaccaatttttattaaaattaattttaaaaatttaacttttaaagtttatcttaaatgatgaacatcgcttgtgtttttcttgcatgtagtttctattttaggagaatttgcctaggggtagttctgaaaccaagtaaaagtaattggattatgaaggtcttctaccttaaactagctgtcaactttaaactcaaccatttaataattaaatttaaactttacatttgtttaatttagtaatgtttcttcacattaatcaatttttcaaattaggaaagtaataaatgacaaaaatggaagaacatttattaaagatagaaaaaatgtttaatggtcttgtacatataaatggtgttaatgttttggcttcattttaataaagcttttattaaatagtgaaa

SEQ ID NO: 255511 - DNA, 1003 bp, Homo Sapiens
gcagctctgatgaccattaattgtgattctcaactagctagatgtgtacatacttgcaaatttacacaaaattttagggaagtgaaaaaaaccatgtaaaatttgttgtcttctgctaagcacgaaaagttaagatatctgctcacattgattttgtagacacattaagtcaagatttggaatttaagtcactggcaggtatctgtgcattcatagaacttataaaggtcccaggatcacttttaagggatttttattagtttaaaggtaaataaagtcagctgaatctacatgtctcttgttttatttctctctaaacttgaaaacagtaaatctgcagatactgtgaggcacaaattatactgtcaacctactgttgctatggttatatactcccacttcatacattaccaagagtcgatcactgatttaaaatttttaatttctatagttaagatttactgcataatatagaatataaagttaagttaacatactaacatttctcctttggaggaagttttaatctacttcaggatgcatattattatcaagatactttcatatacaggatagcctaattttatttgtttaaatatgcttaatatgccccagattgcaaatgcatccagtcagtaatatcactgtctgtatgtggaggacatgttcccatggatcatatgtgaagatgtcaataagcttgcattaagccacctgctttgtaagtggattgattaataaataacttatatttctattgtctttgtgtttcataattagtttttataaaaacagtttacattaaacatcttggaattcaacaatagtgatctcactcaaattgacatttgcataatttgacatttatattcattcagttatgactacttgcccttttcttcatattagtaaatgttacactgtagtagttgtcaatgttaacaggcttcaacatagtatgtgtgcagatggacgatggatttaaagagcataccttatgatt

SEQ ID NO: 255512 - DNA, 712 bp, Homo Sapiens
ccccaaggggaaaagtgcttaaattgtcccggtttttttaaacccccaaaaaacctttgtggtgctataaaaccctccctttgttcttgccaccagttgccttttttttaaaaatggtgccaaaccccaaatgaaaaagaagtctcttgagctcggggcttccaaccccaaaaaacaaaaacccaggcccctcattctcctctgaactgttatttggatggttcaccaggagcacagctcctgtgttccccgctcgctccccctaaagcccctaaagacaccataatgttgcctgccactgtgggaatgacacgctcccctggtctcagcctggacgggtcctgacaggttcagtgaaaaaacaaagcgtcattctaagggtgaggaatttcactcaccagcaaacatgtgttgggggtctgctttgtctcaaaccccgtacaataagccgttacatttaccccatttcacccttgtgacaatcctgtgaaataggaattcccatgtccccctaaaaaatgaggaaacccaggctcaaagggacagggaacatccaactggtgaggggccaaaacggttttaaaacacccatcttttggcatcaaggagaggacataggaatcccctagcatgttactgggaggtccaaacccccaaatgggaatttgcttctccctctaaaaagccccccaatttagcaaataaaagggcc

SEQ ID NO: 255513 - DNA, 540 bp, Homo Sapiens
tgagctaccacacccagcctagatgtactcaacacaaactttatcccagcaaaagcacagacttgagtctagagattttcagtgtcttgatcttagctataggatcaaagacaccatcggaccaggacacaggaaggtcagtcaggcagatgacagcacccaggtacagtgtcttgggtacacagacccattaaccccatgccgccagagtttgctttctagaagcctcaggatatggtggtttggagaggagtggagatagcaggtaggaagcaagctgcagaagcccctgacaggcaaggtaagtaaacaccttgagccttatggaggggagcctggaaggctcttgttaagaagggatttgatcagagctgtgattagaaaaagcaaccattcccttttgaccctggcctttttctaacaaaggccttactggttaaattgagtgacaattttgtttacgatggcatactgagaagccaggaggaaatcctgtgtgttgggtatactgacacagagggtagaataacagaactgtgg

SEQ ID NO: 255514 - DNA, 735 bp, Homo Sapiens
  misc_feature (95)..(103): n is a, c, g, or t
cccaatttcgccaccgtcggcaaattttggaaatttgcctgaggttgattgattaattccaaggataacacctaccacctttggggtacccaatnnnnnnnnncctttttaaaatatatctgaacggtttgaaaaagaactgcccaccaagtggttaattctttttaaagcaatgaagtcccgtatggcccaatcaacaacatgaagaatgtatttgcagaaccccaggtattacacaatggccccgttatggagatggagcatccaactgtggggaaaatttccgtcccaggcccagctgtgagatacagtaagttcaaaatgtcagaggccaggccgccccccctgctcgggcagcacacaacgcacatcctgaaggaggtcctgagatacgatgacagggccatcggggaactgctcagcgctggagtggtggaccaacatgaaactccctgacaaaggaaaagggctcttcctcataacctcgatccgaatacactggcaaaggcaaccctttgcttggacccttctccccagttctgatacccctaagaagaaaatttagagtaactccagatttcttacatggcatctccagaatggctctgggattaatgaatctagggccttttaaatgtatcccacgttttgttccccaccatcttttttttcagatgatgatttcattatggatttgtgggatttttaaaaataaaaatttaatttttttcctgg

SEQ ID NO: 255515 - DNA, 802 bp, Homo Sapiens
ttcttcacaaaatgaaggtaactcttaaaagtggcctcaagatgctgtcttgtagtgaccatagaacgatgttaaaatgttgcccccataaggtcatatttcaaaggacaagaataatgtctttgacagtgtttaaatctgaaagagaaaaaatccaagatttctgaagtggccctaaaaaaatcaagtaagtccctggtgactctgatttttatgaattctgtctctcaaaaaccagggtgcccccaaaaagaactgagacaaactgagtttcttgaacatttgaaaatgaggagcaggctcaggatccacagggtgtaaccatcccgtgaggccctgcctgagcagccagccagtcagtgaggctcttcaccttacttccatttctctgattccatctatgtacaacttacgaaaacttgcattattatagactgggagttcttaaattggaatctgtgaatctaaaggggccagaggatagaaatcaggaaatctgaaaacttcgatggaaaaaagtttttatttatttccatcaggaaaataggcaacaaaccacagcagtattagtacctgtgtctctgtcatcactaggaatcacagatatccacgttacagatatcttaaaatatttatgtacagcaccactctgaaattatggtaataattagatccaccccctaggtcttgtaatctttaatatgttaataaagaagcacatctattatgtgacagatttaaatgtttaagaatttgatttcaatgaaattgcatttcaataaaattggcttcctttgcaaaa

SEQ ID NO: 255516 - DNA, 407 bp, Homo Sapiens
gtgcaaaagcacttatggagatttttgacttcacagaaatggaagataacctctttagacgtgtgcctgcaagatggctgtcattgtagtgagccatagaaacgatgctaaaatgttggcctgccataagatcatattttcaaaggacaagaataatgtcctttgacattgtttgaaatctgaaaggagaaaaaaatcaagaatctgaagtgggccttaaaaaaatcagtaagtcccttgtgactctgatttttatgaatctgtctctcaaaagccagggtgcccccagaagaactgagacaaactgagtttctgaacatttgaaaatgaggagcaggctcaggatccacagggtgtaaccatcccgtgagccctgcctgaagcagccagccagtcagtgaggctct

SEQ ID NO: 255517 - DNA, 545 bp, Homo Sapiens
  misc_feature (57)..(57): n is a, c, g, or t
  misc_feature (158)..(213): n is a, c, g, or t
cgcccgggctcaagtctgtctggcaaagctcggagcccaagcccaaggctttgacanccaggcgttcctccttacccacagggccaattgggcgcccgtcccaggccccacgcaggaccccaagcccgcgaaggcaccgatgcccgcagagcccgcannnnnnnnnnnnnnnnnnnnnnnnnnnnnnnnnnnnnnnnnnnnnnnnnnnnnnnntggcggaagccccacggcggtgaggtccatcctgaccaaggagcggcggccagagggcgggtacaaggctgtctggtttggcgaggacatcgggacggaggcagacgtggtcgttctcaacgcgcccaccctggacgtggatggcgccagtgactccggcagcggcgatgagggcgagggcgcggggaggggtgggggtccctacgatgcgcccggtggtgatgactcctacatctaagtggcccctccaccctctcccccgagccgcacgggcactggaggtctcgctcccccaagcctccgacccgaggcagaataaagcaaggctcccg

SEQ ID NO: 255518 - DNA, 681 bp, Homo Sapiens
  misc_feature (26)..(26): n is a, c, g, or t
atttcttgattgagaaccaggttccnttgaagcaaaaaagaactcaggggcgaggacattttaaacagaaattttttaaaagttcatggaaaaacaaacggtggggcgtataaaacttaagtaataagtcaccagatgtgataaaaatacttaaagagataaaatatttatggcaacaatctttttttcaggtacctatagttaccctacaaaactaaaaccaccaaaaactttaaaagataaatatttttatatcttaaaaccacccttggatgtccatgtctaatagttgtgcacaggagtttattctagagttcctcttcctttgtttaatcacaagggtgtggatcaagtccagctttgtttggctcaacacaaagcagcactcaggtaaccaaggaaccatccctcctgatgtcatctcttccttaacaaccacttcaaaatcacatgaaacagtaggcctgcccttcctttatagaatcagatgctgaaggccactgggcttttagccacagctcagggaaggcagagaaataatttcaatcccagctgttaacttaccttgaagaacttccatggggagaacagtccaggcattctccaggtaggaaatataaatatagcgagccgtattgcaggccaggccaatgtacagaccccttaagcaagatggtaaga

SEQ ID NO: 255519 - DNA, 707 bp, Homo Sapiens
aaaaccaacgcttgtttaaaaacctacttattcgccccttatgaaagggaaaaggttttttcaaggggaattccaagaagaaaagtagaaaagtgaagaggagggttccaagtgggctttccctgggtccaagtaggggctcaagaaacctgtgaaactccctcatttcctgcatgcggactacttttggtcctggatgaataatattaaggatatgtgcttaaaacattcctaacaccagaatttgcgcctgtgttttcttccccaagaaagctataaacagcgaaaattttgttgtaagcttccctgtgtcctctctccctctctcccttccccctcccctgaaactaaaaggaatgttaaaagcccacttttctgtgaccagcagaccttatctatggtcccaattccaattccttgtaaacacaatttgtaaaatcccgtgagatcctgtctcctttgccatcccgctgcaaggttataagtagagaaaacttaagttacaattccagttttcctcaagatctgagacatgttaattgtctttgtttctccctctggtaacatcttcccaccacacatatttcctgccttagagagtttaaaaggtgataaaaaaatctaacactggctaccccgctcgggaccccttccacgctgtgaaagctttgtactgtcactctgcttaataaagcctacagcttttt

SEQ ID NO: 255520 - DNA, 801 bp, Homo Sapiens
  misc_feature (142)..(142): n is a, c, g, or t
tttaacataaaaagacaaaggggttccccttatctcatcaagtgttatgtccctttggggggcctgaccggcttcataatcccagtttttctgtgtttagggtgttcgtataggccatatagccttagggccaggtagtgcnctcctgcattttctcttttcacagcaggaaaatcttaccgagtccaaaatcgtggcttagagagctttctgatggtacagtatgcaaacatctacttgttttggattggcaacattgttctgattcataaggaatttaaaggaaaatacattgtagaattaatattagttaaccaaccaaaatttattaaaggatatgttggtgaaggagttgaattatttgaggaaaaaacatctgctctcttgtcaggacttttctgtctccaggagcttctcaactttgcagatactctagaatggtattgcatgcaaaataatgaccgccaagatgttcctgccctaatccccagaacctatgaatatgttatattgcaaagaaattaaggttcaaacagaattaaggttgccaatcagctaaacttaaaatagggagactctcctagataatctgggtgggtctatttcaatcagtggaaaggccataaaagcagagttgagtcttccgtgagatgaaaataaattttgtttaaggacagcagcttcagcttatgccccagaattccagcctgcccctcctaactgcctgctgtacagattttggacttgtccagccacgtttcaaaactgagtaagtcacttccttgcaataaattgattact

SEQ ID NO: 255521 - DNA, 1123 bp, Homo Sapiens
  misc_feature (705)..(1036): n is a, c, g, or t
  misc_feature (1070)..(1070): n is a, c, g, or t
cttggtttcccaggtgaatggctctccccaggatatattggaacctgttccccaagtcctgcattaccatgggccctcgggccggcgggtttggcctcctggggtcttaggggccaaaacaaagcccaagccaagttgaccttgggtgggaagggcctataggaggataaccagctcgctggggcttcaaggacaccagggcccccccaagtcccaagtgtcctactcctggcaaggagttgggtttggaccaaaagtgtttaaaattaatatgttggcagtgattagaacacccctgtttacataaaaaccatttttctaattctaacaagttagaatgtgaggaaggaatgaacttgagtgtttaggaacctgccctttggtgctgggctggcgtcccgcactggggtgtcctcgctgtctgggggctgctctgctgccccggcccaggtccccttgtggtgttgccaaacgggcctcatggtctcctgtgcagagaaaggcaggaaggatccctgaaaagtcttggagaaaaggttctgtgccctcaggtggggcttacccccccgtatttataatcttaatttatatagtgaccaccgtggaaacaaacgcctcttgtattgtcatgtacatagtccatacctgagtgctgtacataagttgttctgtgtataaataaaacaagcctgtttttgatcttcnnnnnnnnnnnnnnnnnnnnnnnnnnnnnnnnnnnnnnnnnnnnnnnnnnnnnnnnnnnnnnnnnnnnnnnnnnnnnnnnnnnnnnnnnnnnnnnnnnnnnnnnnnnnnnnnnnnnnnnnnnnnnnnnnnnnnnnnnnnnnnnnnnnnnnnnnnnnnnnnnnnnnnnnnnnnnnnnnnnnnnnnnnnnnnnnnnnnnnnnnnnnnnnnnnnnnnnnnnnnnnnnnnnnnnnnnnnnnnnnnnnnnnnnnnnnnnnnnnnnnnnnnnnnnnnnnnnnnnnnnnnnnnnnnnnnnnnnnnnnnnnnnnnnnnnnnnnnnnnnnnnnnnnnnnnntcttaaagaacggggcttcaacggaaaggcgganaaccgctatagggcgaaggccactactgaacatccctaataagttttgggggg

SEQ ID NO: 255522 - DNA, 1221 bp, Homo Sapiens
  misc_feature (203)..(221): n is a, c, g, or t
  misc_feature (875)..(875): n is a, c, g, or t
ttttaacttgaccacagtcttcccctgaagaagggcatgcatttcatgttacagaaatgcgatagagtaaactgtaataaattatttacaagcacctagtttgtttaaccttatgtggaagccatcactgttggaaaacaatgagaatgtatcttttagcaaaacggtgctatctggaagcttcattgtgaagatgctttcgnnnnnnnnnnnnnnnnnnncagtcatgaggcactgaagaatgagttgtgctgaaattaactcaaaggtcagcttgtctggatgagcataactttggttgagatttttctcccttaaaaaagattttcaaagcaccagttaattacaaaaagcatgcatatttatcctcacagtgagttaagtggtgagagagctagcaaatcatacattgcattccccaaagcatctgaacgtacttctagaaaacaaaccaaccaaaagggaaaataatgcaagagaagccgtattttctttgcttaggttggcaaagcagcagctctttgcagcaatgacaggcagggcagagtgtcgactgggaagcgagtcccaatcttgaataatggtgagcttgagtaatccttaatttacaatttaaaggatgaaaaaaagagactagtgaaatgtttgcttccccagataaggaacacccaagactccctgggtatcctccaaatgtagccaagaaaagtgttcttctaccctagtcagtaaaatggaatgctaaaacatgatatctcattcaacatcagagctactacaactgacaatgacttcatggtatacatcaattcctataaagaaaaaatatattttaaatgcagaacttgagagggatcacaaacagcatagcattnattgcctatgagtttcaaacatggtatttcatacaatgtgaaatatccaatcagcatccctccctctcccaaaacacacattactcatgagatactatcagtgtttaaaatccaagcttatggaagtacaaacttaattctcagtacttttatactaaattcaaagaatctatgtaacactcatctggaaaaattcttaattccataatatcttggagataagcaacagtaaactgttagaaaacgttttaacattacatgatatttaaaaaatcaccataattaccataataaaccaataattatgctccctgctcacaaaaggcacctaccaattatgaacaga

SEQ ID NO: 255523 - DNA, 603 bp, Homo Sapiens
  misc_feature (77)..(133): n is a, c, g, or t
  misc_feature (163)..(300): n is a, c, g, or t
ctaagtcgtgtctttcagtcttgtgacctaggcctacccccatgctccatacatactgtatgactgcatttattaannnnnnnnnnnnnnnnnnnnnnnnnnnnnnnnnnnnnnnnnnnnnnnnnnnnnnnnnaggggcctcgtgtaggagggattgaccacnnnnnnnnnnnnnnnnnnnnnnnnnnnnnnnnnnnnnnnnnnnnnnnnnnnnnnnnnnnnnnnnnnnnnnnnnnnnnnnnnnnnnnnnnnnnnnnnnnnnnnnnnnnnnnnnnnnnnnnnnnnnnnnnnnnnnnnnnntgattacacattcttcctttcatcctcactagcagaatcctcattttgcttagcagcagcatggtctggcctgggaaatgtcagtgaaaattccttggtggtgcttcctggagagctctttgataggggcaaattcaggtggttacatgccttttgacattcctctttgtcctacctataataaagaaatgatactggagttgccatcccaaaacagtgagacgacaggcaaaaggaacaaagtcacccatgaagcatggagaaacaagaaggagcataagtttaaataaaacatcactgtag

SEQ ID NO: 255524 - DNA, 687 bp, Homo Sapiens
  misc_feature (30)..(30): n is a, c, g, or t
ggcacgagttatcttgcttctctgtagttntgcatcagctgtttaactttgagctgagtgaggggagaggggtaaagagaaagaaacttaagttttcttccacagaactccacaattgtgggctttaagagagccctaaaccatggtacctagtggtacctagtgacttccaaccaaagcctttgagtatgcactaaataggtgagaagaaaggagagaaggtttttaggttagaaacctttaaccgatagaaggatatggtatgttgtaaagctggaaccaagtttgcatttttgagggcttgagatgaagggaagactcttaccagatagtaagacagctgagttttcctcagttttctcgtcttaacactagtggacaattcttagcattttgtttggaggatttcagagttaacctcatggaattcaggattttttagcaagtttgcttttggttttatcttggcttttagtaatcatgttggctggtctggtcacaggtgactgtgaaacagatgccctggtcttgctttcatcactctaggatcatgaagtgctatgctatttcctggttatgaatattaaggttggaattacatttttattgattgtttggatcagagctcagttcctgtagaaaacgaactgtaaaagaccatgcaacaggcaaaataaaacttgaagt

SEQ ID NO: 255525 - DNA, 565 bp, Homo Sapiens
accacctcctggtattagaaacagcctttctgtgattatgcctatgggtgattgagtagtaacacaatgacttcatttccatttcccagcttcctgtgggaaggtttggatccagcctgcaagagccatgattgtaggagtataatgataactgatgtttatacagtactttacaattttcacaaggatttccatctattggcttctcactacaccattattaccattcccacttcacaggcaagtaagctgagtcacaggtaagcaaggctaacagagtttgcatagataatctcacagagctaacaccagaactcaggtctgtagtgcttcttctaccttccacttatgtggaatagtttgatgtttaatattttaagcaggtaagtatttgagtcctctctaccccttaccagcactgttacctggaatagctcctgaatcttcagcttcctcatgaaacagaggaaataatactatttatgagatttgaatggactaaattatgtaaagcactgagaacattgcttagcccatagtaagtactcaataaaatgtatttgtc

SEQ ID NO: 255526 - DNA, 363 bp, Homo Sapiens
atttcgggcacagagggaaagcaaacatgtccttcttcacatggcggcaaaagagggaagaatgagcaaaagaagaaaaagccccttataaaaccatcagattttgtgagaactcattcactatcataagaacagcatgaataactgcccccatgattaaattacctcccactgggtcccttccatgacacatgggggattgtggggaactacaattcaagatgagatttggggtgggggacacagccaaaccatgttcaacctgtgttcacccttgaggggacttggggggtcaaaggggaactgggtgcaggacatggaagcttcaagctttcctgtttgtacccttgaaaaattaagttc

SEQ ID NO: 255527 - DNA, 1046 bp, Homo Sapiens
gggaaagcaaacatgtccttcttcacatggcggcaacaaggggaagaatgagcaaaagaagaaaaagccccttataaaaccatcagattttgtgagaactcattcactatcataagaacagcatgaataactgcccccatgattaaattacctcccactgggtccctcccatgacacatggggattatgggaactacaattcaagatgagatttgggtggggacacagccaaaccatgtcaacctgtgtcacccttgagggacttgggggtcaaagggaactggtgcagacatgaagctcaagcttcctgttgttaccatgaaaaattaaagtcctttatctctcaatccagagtctcatgtcttctgcccacatccataaaactcgctagcctccatgtaggataatatcttagaccagcacagttcttgacactctagaagtgaatttgttggatcaaaaagcatgaacaattgctaaaactcttaatatgtcttgtcaattagctctccaaacaaatatgagtcattgcctgaaatctcttttgtcctcaggaagggatagagctgcttgactcagatctcccaggtggccttagaccgtaatgtcttcctttcgtgcagagctcttaccatcctaagccactactcctacctaatattctataaaaagctttttctccctacccagtgtctccaatgagctgactttcttttctggattactcttttatgtaataaaaagtagacatgagggtcaaacagaaagggaaaaaggggaatttgtttaatttctaccaagtgccaggcatagtacaaagaacatttagataaggcagaaggcattaattatttttatctacccagaaccccctgccccacctaagcaccccagcccctgacctgcccacgtgggtggctatgtgacccgagctgaaccaatcagagtccttccctgggatctttttcacatcataaccacatgagaaggtctcccattatgaaacagagaagcttgttggcagccatggttctagccaaggatgg

SEQ ID NO: 255528 - DNA, 699 bp, Homo Sapiens
  misc_feature (431)..(431): n is a, c, g, or t
  misc_feature (512)..(512): n is a, c, g, or t
  misc_feature (549)..(549): n is a, c, g, or t
  misc_feature (591)..(591): n is a, c, g, or t
  misc_feature (620)..(620): n is a, c, g, or t
  misc_feature (678)..(679): n is a, c, g, or t
ggctgcaggattcggcacgaggtcagtggagctctactgaatactctacatggactgagagccgctggaaagatatccgtgcccggatatttctcatcgccagcaaagagcttgagttgatcaccctgacagtgggcttcggcatcctcatcttctccctcatcgtcacctactgcatcaatgccaaagctgatgtccttttcattgctccccgggagccaggagctgtgtcatactgaggaggaccccagcttttcttgccagctcagcagttcacttcctagagcatctgtcccactgggacacaaccactaatttgtcactggaacctccctgggcctgtctcagattgggattaacataaaagagtggaactatcccatcaccccttccccatttcctcttccttctctactcatgccagattttgngattacaaatagaagcttcttgctcctggttaactccctagttacccaccctaatttgcccttcaggacccttctactttntccttcctgccctgtacctctctctgcttctcacccncacccctgtacccagccaccttcctgactgggaaggacatanaagggttaatgtcagggtcaaactacatngagcccctgaggacaagggcatctctgggctgagcctactgggctcttccaactggcnncttctcaggccctcagatgg

SEQ ID NO: 255529 - DNA, 1390 bp, Homo Sapiens
  misc_feature (1313)..(1348): n is a, c, g, or t
cccacgcgtccggaactttgtaacagacactgccaaggccctggcagatgtggccacggtgctgggacgtgctctgtatgagcttgcaggaggaaccaacttcagcgacacagttcaggctgatccccaaacggttacccgcctgctctatgggttcctgattaaagccaacaactcatggttccagtctatcctcaggcaggacctaaggtcctacttgggtgacgggcctcttcaacattacatcgctgtctccagccccaccaacaccacttatgttgtacagtatgccttggcaaatttgactggcacagtggtcaacctcacccgagagcagtgccaggatccaagtaaagtcccaagtgaaaacaaggatctgtatgagtactcatgggtccagggccctttgcattctaatgagacggaccgactcccccggtgtgtgcgttctactgcacgattagccagggccttgtctcctgcctttgaactgagtcagtggagctctactgaatactctacatggactgagagccgctggaaagatatccgtgcccggatatttctcatcgccagcaaagagcttgagttgatcaccctgacagtgggcttcggcatcctcatcttctccctcatcgtcacctactgcatcaatgccaaagctgatgtccttttcattgctccccgggagccaggagctgtgtcatactgaggaggaccccagcttttcttgccagctcagcagttcacttcctagagcatctgtcccactgggacacaaccactaatttgtcactggaacctccctgggcctgtctcagattgggattaacataaaagagtggaactatccaaaagagacagggagaaataaataaattgcctcccttcctccgctcccctttcccatcaccccttccccatttcctcttccttctctactcatgccagattttgggattacaaatagaagcttcttgctcctgtttaactccctagttacccaccctaatttgcccttcaggacccttctactttttccttcctgccctgtacctctctctgctcctcacccccacccctgtacccagccaccttcctgactgggaaggacataaaaggtttaatgtcagggtcaaactacattgagcccctgaggacaggggcatctctgggctgagcctactgtctccttcccactgtcctttctccaggccctcagatggcacattagggtgggcgtgctgcgggtgggtatcccacctccagcccacagtgctcagttgtactttttattaagctgtaatatctannnnnnnnnnnnnnnnnnnnnnnnnnnnnnnnnnnnaatatatatataatgagtttcattaaaatagattatcccaca

SEQ ID NO: 255530 - DNA, 703 bp, Homo Sapiens
aaatgggatccccaccattgtaggtcggtccccagtttatcttctaaatctccaacctccccttctgccattgccattaaaaatcaactaagtgcttttaagtctttccatggtcagggtcaaccttgttaataaccaggtgcccgtcttaatggtgtaaagatttccaatactcctttaaaaacccagtgcgggttattttatgtcttggacgagcataaccctggtatcgtaacgaaattcttttttgccaccacaagaaattgctttcaatttcttaaccttcaaacacaatgtcagtgttgtcacctgtgcatgtgatagccacagcacaagtattcttcaggagcataaatcctccagccttaaatggaccattgtccagctcctgtgaaaaacttaatatttgagaaagacattcaatggtacatgttttcggtacacttcatgagtagttaagattttcttgtattaaggttaatcactaaaaaggtgtttacttgggtttcgtaaactaaaccccctaaagatgttttccattttattgttaaacacttggtgttagcaagggtcagcacgagaaaaggcccaatggcaagaatttctgcaaactctgtaaagctgactgaattcatttgtcatgtaatacattgctgagtggcgcttcaataaggaaacaggcaataaatttacttatttaccc

SEQ ID NO: 255531 - DNA, 708 bp, Homo Sapiens
atattttccttttattagtatttcccataacaccttatatacatattaatgcatacacggaaggagccaaaaagtacttgtcaaataaaaaagtaaatttttagaaaaatcagaaatgatggacacacttatatgtataacgtaattttcctgtacttttacttttcccctatgtttatttgaacaaacctaaaattgtacccatttgcacctagctaaccaccataaaaatttggagttctccagctgttttgtaacagctgtcctcctcaaatatttttttgagaaacaaacatagacctacgtttctctatttttctggactaaagagagatcatctcaaaatcacagaactcttaaaaattgaaaacaggatcatgtagtctaaaataagttcttatttaaacttgggaggtgaggggggcggggctgacatctagaaaggtgaagtactttgcctgtaggcacacaccaagtctgggactcaacacacaggctcgcctcttttgcgtctctccctccttccaaaatacattttcctccctctcaaaagctttatcacgctttggaggtgcttaattatctatgtcaaacctaaagagcaactgatgacactcaaaaaacatcgcccaaagttctgaaaaaccagataataagataaactggcagttttaccacatcccaaaaatggccaacaaagaaagaagg

SEQ ID NO: 255532 - DNA, 493 bp, Homo Sapiens
  misc_feature (67)..(67): n is a, c, g, or t
cgttgaccatgccagtggggtaggagttctacagtgtctcgagcatatgttggggcagtgagaagcnaagtgctgagattcacaagcaattcccacacaaacccataatcttgattggctgaacacaagaagcttgggtggcctgtcatgtgtcagtaatggagtatgtcactgcagttgtctgccttgggtttcctctgcttactgtggatggccccagaggggatgtagatgatcccctcttggatatgaagactccagtcctctttgtcattggtcagaattcccttcaatgtcaccctgaagccatggaggacttccgggagaagattcgagctgagaacagcttggtggtggttgggggagctgatgacaatctcaggtgggtggattctcccagagctgcaagagagctgtgttacagtgttagagataagcctggaagctggcaatgtaactacagaccagtctggttcagttaaaagacagcatt

SEQ ID NO: 255533 - DNA, 771 bp, Homo Sapiens
cccctcccctccatgggttgctttaagttaaggccaccctcaataaggccatgaagtcttgtatatataaagtacaaaatttgtgtttcccgggtaaccaaatttaatattcatagaccagctttccgggttgggaaaagtataatttaaagtgcctgtaaaatagtaattttaacaaaacgtatctacttatgaggtttagtagatcatttcttttagttaatgagattgtttttcatgcatattacttttcatttaggtagtcaaaccacacactccattaataaggtttcctgacagaagagacaatcctaaacccaatgtatcagaagctttgagatcagcagggctaccatctcactcttctgtaatttcacaacattataaaggaagtaaatcaccagatttgctgatgtatcagggtccaccagacactgcagaaataataaaaacattacctcagaaatacagaaggaaacttgtgtctcaagaagaaatggaatttatccaacgtggaggtcctgaataaccatggtggctgctgtttgtcatcagacaatagaattgtctttacaataaaggacttccaaaatgacagatgagaaactgtatattaaacacctttaataaatattatgaaaaaaatgaaatatagaaaatttagatggacacttgtatttcctaatttatgtatcttggtcagcttctccacaagcttacctaattgtttatatactttatacttattaaagtatacatttttaaaaaaaa

SEQ ID NO: 255534 - DNA, 619 bp, Homo Sapiens; identical to SEQ ID NO: 7124

SEQ ID NO: 255535 - DNA, 781 bp, Homo Sapiens
ccagggtaaaattggcccttctgtcctttccccaaagaaaccatatttctcccaagtggggaactcaccatggcgggaactaaacctcaacccaatgtggtcgcgggggcgatttcttttcggggcccctttatcttaatttcagaggcaagttccagaaaaagattgatttaattatgggccctaatggaaaccctcctgggaccgacaaatgcaaaatgccttatactgaggcagttttgcatgaagttttaagattctgtaatatagttccattagggattttccatgcaacctctgaagatgcagttgtacgtggttattccattcctaaaggcacaacagtaattacaaatctttattctgtacactttgatgaaaagtactggagagacccagaagtgttccatcctgagcgatttctggacagcagtggatattttgccaagaagaaagctttggttcctttttccctaggaagaagacattgtcttggagaacacttggctcggatggaaatgttcttgttttttacagcattgcttcagaggtttcatttgcattttccacatgaactagttccagatctgaagcccaggttaggcatgacattgcagccccaaccctacctcatctgtgctgaaagacgctgaaactgcctgggatgttttcgggaacaagaatgtatatttgccttatccctgaacttggtttaatcaaatcaatgtgtgtattagaataaaagtcacagcatcaaaaagccgaaaaaaaagaatcgccg

SEQ ID NO: 255536 - DNA, 1258 bp, Homo Sapiens
aggatgatgatgaaacagaaaatggccccaaaccaaaaaaacgacgtccaccaaaagcagagaagaaaaaggctcccaagccagaacgtctgcctccatcaatgaagggaaaaataaaatccaaagccataatttcatcaagtgatgactcttcggatgaggataaacttaaaattgctgatgaaggacatcccaggaacagcaacagcaacagtgactcagacgaggacgaacaacgaaagaaatgtgcctcatcagagagtgattccgatgagaaccagaacaagtctggcagcgaggccggcagtccccggaggccacgaagacagcggtcagatcaggactcagacagtgaccagccatccagaaagagaaggccctccggttctgagcagtctgacaatgaatctgtgcagtcagggagaagccactcaggagtttctgagaacgactctcgcccagcttctccaagtgccgaatcagatcacgaatcggagagaggatctgataatgagggttctggccaaggctctggaaatgaatcggaaccagagggatccaacaatgaggcctcagatagaggctcagaacatgggtcagatgatagtgactaggttttatttcatcaataagcttcatctctggaggaactttttttaatatatgaaagctgtgataaaaatgtttcagatgtttagtcaattgtgaaatttttcttaaggcaattttcttttctatcagtttgtatataactaagccccaagagacatttcctgtgctagagtccaatatttgagtctctcgtgcaaatgagactattctttgtggtacaattccacctatcatatgtgaaaactgcagtaaaaataaacccagatgctaaatcattcctacaaaggtttgactgaaactgtggcagatgtctcatcttctttatatgttaagcagccatactcttctgatttttattgcaatccttttacccaagtggtgcacaaacttggtattgatgtctttattccattttgagtttagattgagaatatttttattttctgaaggcagagatatctactgtataattgcaccaaagtacatttgaaaggaaggttttcaatagtgtaatactgcagcgatgtagataaaatcacaaatgtataatgtgttaggttgaataaggtgtggaaaatgcttttctgttagtagaatgcaaaaacctacctaagccacataataataaaattcttttaccaacttt

SEQ ID NO: 255537 - DNA, 751 bp, Homo Sapiens
  misc_feature (41)..(41): n is a, c, g, or t
  misc_feature (60)..(191): n is a, c, g, or t
tcattgtcttccctggacactcagtacttagattcttgcanccgccactaggacgagctnnnnnnnnnnnnnnnnnnnnnnnnnnnnnnnnnnnnnnnnnnnnnnnnnnnnnnnnnnnnnnnnnnnnnnnnnnnnnnnnnnnnnnnnnnnnnnnnnnnnnnnnnnnnnnnnnnnnnnnnnnnnnnnnnnnnattcttgattcttaatacggggttttgaggtgaaagcatttcatgacaacttaggttcatacacaagagcatcatgaatcttctaagaaaggtatctgtgctttttttgtgcgcacaaaatattacttcttatggaatgtttacactaggtgaggaaaagttcattaattacctttaaaccgctccctatcttttttacagattttaaattgtattttggcttttgcctccagtatcctttctggttgctctggtttgaattaagttcctattatgctgcagcacatatcaaccttccctaagtaaccatttcctggaatgtgaagcatcggtgccattagcagaccatatgcagaaatgtcgtgtacttgcatttcttttttgtgcactctataaggctggttgtgactcagatcagcttaactttttatattatgttatttcactaactgctacagtcaaaatgatcaaatctttgtacaatagaaaattatttaaattttatttttctactgacatttctaattctagtgtaaatgtttatcaataaaaaattactt

SEQ ID NO: 255538 - DNA, 552 bp, Homo Sapiens
ctgtaagtaagcatgctctgtgtatagcagatatcactagtaatagcatttagtaagtgatgttcacacatgctgctgtcatgaacactatctcatgttgtgtaacactttcatttttccaagaactttataatcagccgacttgaaactcacagtcgtcccctcagaaaggcagggcaaatgttgttatttccaatttgtcagaagctcagaaagcttattctgttgctgacagtccttgcaagggtcagaatcaggaccggagccccagatgcgctggtgtcactgatgtccccgtgccgggcatgagcccttctgtgcaaggagctccaatgtctcccggccagtgatgatgtgaaaacatttagaaccgacctacacaataaggcagattttcattctgtacccaaaacaggaacacagatttaatgcagagcaaaagggctttaatcaacagatatgttcatttttcacgtagacctattttacaagctaacttgtaagccagaaaatgacattagaaattttcaagtgagaacaaatgatttggtc

SEQ ID NO: 255539 - DNA, 604 bp, Homo Sapiens
  misc_feature (207)..(249): n is a, c, g, or t
  misc_feature (353)..(390): n is a, c, g, or t
agtattatagatataggacagtactgtatcatacctctgtgaatgtaaaatatcttgtacctgctttatgatacgtagtagtgaccgtgctttatcagagctgtttttaatgatgttattctagaatgttttctttccagatgatgattcagaagctaattttaaaaaacggtgccaggtaccacaacagtaacagaactttgcaannnnnnnnnnnnnnnnnnnnnnnnnnnnnnnnnnnnnnnnnnnaaatggagtgtgctggatgtctctataattttattcagatgactgcagaacctggaaaagctgttgctgctattgatgcataacatactgctattggtcttttnnnnnnnnnnnnnnnnnnnnnnnnnnnnnnnnnnnnnnatttgaatttttggaaactttagctgtgctgtcaactttggaaaaagtatcccggtttactgtgttgagttggcattgtacagaaattaacagccatattggtctagaaacgttaaacttaatttttttccatttgtacaggggtaacgcactgtattaaatatgtaaggtcttatctacatgggtttgattacagaaactaataaagtattct

SEQ ID NO: 255540 - DNA, 516 bp, Homo Sapiens
aaccaagtttgtgttcttgaaacagtaggtcccttggaaaatttaataggttgttcaatcccgtgaaattcctttgggctaaaatgaaattttaaagggacttgagatttgataatgcagggtccttctgctttaagaatccttgtgcaaatccaaaacttgataaataatacatctggattaagtggtattggaaagggttttttcgttttacgggaattcactgctaagttccttctctttgtgtgcaggaatatggattgacctgtcttttctttagttgtttaggtgaatggtttatgataattatctatctaagataattcacaaatggcagcaaatacctcatttaatagctgtctacctgtacatttatgggttggacatgtggatttttacaagcaaatagtgaagtagaggtgaggtggaagaagcatggactttggccccccagatttaggttgaagttgccatttcctcactgtgcgacctggaatagttatgtaacctcattag

SEQ ID NO: 255541 - DNA, 720 bp, Homo Sapiens
cggatttcttttggcccaacattaataagaagcttatagaaccaggcccatccctccttttagtgatcttgagggtcaacaccagtccctccctggggtatccctttattctctgaactctctcacaagcatttgatcagagctcattttgctgtaatgtcatcaaatgcaatgttttattttttcatccaaaataagtacattcatccctttaccatgagacctttaccacacccccattctcatgcctataacacttaagctccgtaaagttggttctcttagccatctaaatggttctaaaaaacagcaaaaacatctttatgtctaagataaaacaactatttggccaatatttgtgccctctggacattagtaggctttggtaaatgtgagaaaacttttgtagaattattatataatcaattttgtaatgctttcttaaatgtgttataggtgaattcccacacaaagctaaaagctatgtaattttgacatacttaaaagataaacatatcagtgttctaagtagtgataatggatcctgttaaaggttaacataatgtgtatatatctgtttgaaatataatttatagtattttcaaatgtgctgatctattttgacatctaatatctgaatgcttctgaagcaagcagtttgttttcatagacttcaattcataaactttaaaaaacttttaataaaatattttccttcct

SEQ ID NO: 255542 - DNA, 434 bp, Homo Sapiens
gaagcaagcacgtcttcacatggccggcaggagaggaaggtggggtgctacacacttttaaacaagcagcactaggaggatggtgctaaaacattagaaactgcccccacgatccaatcacctcccacgaggtccctcctcctacactgaggatcataactggacatgagatttgggtggggactaagaactaaaccatatcaattggttttatcctttttcatgcaagatctcaattcctacagcagctcttaagagcagttactatcattcccccaacttacaggtgaggaaactaggcacagagacttgaaaactttgctccaagtccacaggtccaatgggtctaagggaggtgcctgggggggagtccttccatctttacaaggcaaaggtttaaggcccagtttgagacgaccgaatctttttactgg

SEQ ID NO: 255543 - DNA, 566 bp, Homo Sapiens
caagcaatgtacccaagttcccacagctaaaaagaattctgtctgtcctcagagctgtgccctgaaaccctctgccctgctgaagaatggagaggactcccccaccagcacctccacctaggacacatgggaactgtgggacttggagcaaagttttcaagtctctgtgccttagtttcctcacctgtaagttgggggaatgatagtaactgctcttaagagctgctgtaggaattgagatcttgcatgaaaaaggataaaaccaattgatatggtttagttcttagtccccacccaaatctcatgtccagttatgatcctcagtgtaggaggagggacctcgtgggaggtgattggatcgtgggggcagtttctaatgttttagcaccatcctcctagtgctgcttgtttaaaagtgtgtagcaccccaccttcctctcctgccggccatgtgaagacgtgcttgcttccctttcaccatctgccatgattgtaagtttcctgaggtctccccagaagcagaagcctgtatagcccacagaatcatgagctgattaaacctcttt

SEQ ID NO: 255544 - DNA, 542 bp, Homo Sapiens
cttcagcctcgccaaaaagtccatggaaactggatgcgtcccatcagcggtgccccaccgtcaggccaaggaatttatgtcctcttggactgacaagagcccatcgggtctggcctcgtgccgaattcgcacgaggctcattaacaaagcttatggcctggtgttgaatgccgtactggcccccggcgtgtatccggcgaaggtcgggggcccctgcacccgcgcgctggccacgctcaagctgctgtccatccccctcgtgagcctggacatcccctcaggctgggacgcagagaccggcagcgattcggaggacgggctgcggcctgacgtgctggtgtctctcgcggcgcccaagcgctgcgctggccgcttctccgggcgcccaccttcgtggccggcaggttcgtgcccgatgacgtgcgccgcaagttcgctctgcgctgccgggatacacgggccaccgactgcgtcgcggcactgtgaccgccacccgcggccacaccgcagggaccctcgccaataaacagccctccccccaa

SEQ ID NO: 255545 - DNA, 805 bp, Homo Sapiens
tcttgggtatattattccatgaagctcattccaccagcctgctaatatctctgtgagcaaatataataatataatatgccccaatatatttataaatttctaggggagttcaataaaaggttccttgggaatcttcaagcggtgatttaaagttttacaaaaagcagagctttttcataagttacttttcagttaggtacgtgtgtgatcaagttcttccagcgtgcttctataatgaggcacatattaatacagtttttatatggtatctatgaaagagttcacttcatagagaataatacttgagcaaatgtatccaagaaagcaagcaaatgaaaagaaacctatttatggaataaactccagatctgaaattcagtattttagaaaaatgccagctcttcttactgtatttattaaaacttgtaataatgtgatttttttcaaggatattagttcaaattgaaatggtttcacgccacacggaaatctttaagttatttgttgaggtaccatatatttagggtgctaggggcaagtaatgttaatatgtgcaataggaactactggtttgaatgtgtaaatgggtgatctctctgagtcctggcaacatccagcaaaactactgcttattctccaaagaatattgggagctctcaatcctcggtgatatgggaaagagaactgagtatttgccctatgactgagctttctataggaattttattaaagaatgtttaattttgttgtccttcttaatgttctcagtcaaataaatgagtgagctggtttcggctgctcttgg

SEQ ID NO: 255546 - DNA, 832 bp, Homo Sapiens
tttaccaggcccaaactaaacattcacatactcctcctttgagaagcaatgtgtgaaaacactaccacccattaagtgtaggctaatgccatttcagtggctttctggataatggagtaacggaaacagatttgtactgagccagacactctctattccccttggtgcaaaccctaaaaaagacatgtatattctggccagggactggggcattctcttagggaagccaagcagactacacctgtaacaatacatacatgctccaaccacatagggcaacctaactacagaaatgactggcagcaaaatactagcttcatgcccacttgtatctacttgatctttatggctcaaccccaggagtgacctctttagggaagccttctaattatcaccaacaccttctcatacacacagatacaccttcaaccatgctctctgatgaagttaagtgctctccaaaacacatactgcttaccagaattgctagttttgtttttctttctcctatgaaactgtaaactccttgaggccaaatacctgtattagtcatttctgtcaatcttgccatctaacaccatgcctcatgcacagcagcattcaaaaaaatacttggttgaaatacaatggatagaatgtgtgcataatttcaccaatggccacatgaaaatgcaaagcacacgacatgtcctaaatccacaacatttcaattacttggtggcaaagaattaaaaaggagtctagggtcaccggatggcatctatgacctgaaccagaaggccactcttcctagaaaagggtggcttgggaaacacgggcaggattaaacaag

SEQ ID NO: 255547 - DNA, 747 bp, Homo Sapiens
aaatttaatagcaatatcataaaataaacacacatattaaaaaatcaagtatttagtttcggatattagaaataatatacataataaattcaacatactgatagtgctgcaagataagattttatttttcaaattacatattatgccaaccagcctgctttggactcagaggttcaaaaactttgcttttattacgaagaacatctggactgtagacacctctaacgaaaccaggttatacttggcatattgtgattgaagctgtgtgatcaacatcttaatgacctaactaaatcctctcataacagaaagaagttcaacaggcaaacatttccctccctaggatcctagttaccaaaactgtcacagtgtcaaaataaaaataattatttcctcctttttaacatcttattgtccttgaagcttatgtatggaggaagttaaaaaccaaaagagcaactttaagctatatgctaagtcagtgttaaatccacagactaatttttcgatatagtattcctggttctggtccttaaagagaaataaaggcattaaaccaactttttatatgtcaagaaatataattttgctattctttcataatcaaatctttcaatgatttctaagactgtttctacagcctgtgtgctagttcaggagacacactgattgtaaaaggacctgagaatataaactttaggctaaaaatttcatcttcaaaatgtatagatgtcaaccgaggccctt

SEQ ID NO: 255548 - DNA, 744 bp, Homo Sapiens
aataaaaatttaatagcaatatcacaaaaaaaacacacatattaaaaaagcaagcatttagtaacggatattagaaataatatacacaataaattcaacatactgatagtgctgcaagataagattttatttttcaaattacatattatgccaaccagcctgctttggactcagaggatcaaaaacttagcttacattacgaagaacatcgggactgtagacacctctaacgaaaccagcttatacttggcatatggtgattgaagctgtgagatcaacatcttgaatgacctaactaaatcctctcataacagaaagaagttcaacaggcaaacatttccctccctaggatcctagctaccaaaactgtcacagttgtcaaaataaaaaaaagtatggcctcctttttaacagactagtggccttgaagcttacgtatggaggaagttaaaaaccaaaagagcaactctaagctatatgctaagaaagcggtaaatccacagactaatttgtcgagatagtattactggctctggaccttaaagagaaataaaggcattaaaccaacgtatgatatgtcaagaaatactaaagttgctattccttcataaatcaaatctttcaatgatttctaaaactggttctacaagctggggctagttcaggagaacacttgatgtaaaggacttgagatataacctttaggttaaaaatttatcttcaaatggatagatgtaacacgag

SEQ ID NO: 255549 - DNA, 704 bp, Homo Sapiens
gagccaccgtgcctggccggtcacagaattttgagtaatggttcatacccagtatttctgccatctccaggtgtcgctctggaaacatctgggccgtgaaagtgaacaccgctggggacgtgagcaccacagaaaggccatggggctggggagaaacgaaatgcggtgaccggcagatgacaaagctgttcttccctgcatattctagatgttaagttactttaccccatactctaagcaggcgagaattggcaaatatatttatagaaattgggatgattataatatttaattaaataatttattcttatgattttaccaccagtgggtgatccacattgtaatcctttgctttatacatcttcactaaacctgaaattgggtaagacattccatggctagaaaagaaagaaaatccttatgttcatacacagttatcaaaattcaagtcaacaatagaaagatactcttatggggatgcctgtcacggcctctagacagtatcattaactgaaaaagtgatatgttctgttttcttggatataaggatatattatgatgtctagggacatgtaggtgcattcattaacaaaacctctggaaaatgctcaaattcaaatggctcataggaattgtatggacatttaaaaaggtattggatcccggaggtaggctccctggaaccccattagggttaaccatta

SEQ ID NO: 255550 - DNA, 373 bp, Homo Sapiens
gtttagtgaagatgtataaagcaaaggattacaatgtggatcacccactggtggtaaatatatttgccaattctcgcctgcttagagtatggggtaaagtaacttaacatctagaatatgcagggaagaacagctttgtcatctgccggtcaccgcatttcgtttctccccagccccatggcctttctgtggtgctcacgtccccagcggtgttcactttcacggcccagatgtttccagagcgacacctggagatggcagaaatactgggagccgacacccgcactgccaggatccaagatgcagggctggtgttggcagacacgctccggaaattcttattcgatctggatgttgatgatggcctagcagc

SEQ ID NO: 255551 - DNA, 1434 bp, Homo Sapiens
  misc_feature (273)..(281): n is a, c, g, or t
  misc_feature (1372)..(1372): n is a, c, g, or t
ctcgtgccgaatacggcacgagcgtcaacagcactgacacatgaagaagaagaatgagtctcagggcaccttcctggagtggccctcgccatccagggaccagcgcgttgcctcccccggcgcttttacatcacatgagcagctgacagcgtatttattatgcctttgctgaaacagttgatgagaaatatgtttcccttcagttttcatttagaagacaaggcgtcgtttgaataacttgcctgatttttcttcctaccgagtagcatttcnnnnnnnnncaccatatctttccctaaggcagctccttattctgtaggaattgccaatgttgatgtgttattgttaggtatttatatcattcacagggctgtcagaaatcccgatgatcttgaagcaaggtctcatatgcacttggcaagtgcttttgctggcatcggctttggaaatgctggtgttcatctgtgccatgggaatgtcttacccaatttcaggtttagtgaagatgtataaagcaaaggattacaatgtggatcacccactggtgccccatggcctttctgtggtgctcacgtccccagcggtgttcactttcacggcccagatgtttccagagcgacacctggagatggcagaaatactgggagccgacacccgcactgccaggatccaagatgcagggctggtgttggcagacacgctccggaaattcttattcgatctggatgttgatgatggcctagcagctgttggttactccaaagctgatatccccgcactagtgaaaggaacgctgccccaggaaagggtcaccaagcttgcaccccgtccccagtcagaagaggatctggctgctctgtttgaagcttcaatgaaactgtattaattgtcattttaactgaaagaattaccgctggccattgtagtgctgagagcaagagctgatctagctagggctttgtcttttcatctttgtgcataacttacctgttaccagtataggtgggatatacatttatcttgcaggaaattccccaaagctcagagtcccagttccttccataaaacaggctggacaaatgaccactatgttagacccccaggctcgacttcaggggtcagtgttcctgtcccaaaccccacacagaatactctgcctctgcttcatgtagcaaatgagcaaaaactcagtatctatcaaaagtgtaaattatatttcctatgcctagtaattcacttcatgtctaaaaatttatctgatagaaacactagcaccagtacatacagaagcatggcaaggatgtttctggcagcacttttctaataataaaagatttgaaacaaccttaagtattcattattggtatatagntcacttatagtatactagacagtggaatactatggtactgttaataaagatgaagtaaatct

SEQ ID NO: 255552 - DNA, 695 bp, Homo Sapiens
  misc_feature (54)..(54): n is a, c, g, or t
taggcaaaaatctaaaactcgtgccctccgtggtacatggggttttaagactgnatgtgtaataggagcacttgccttttgccaaatcaaatgagtgacagggttaactagaaaatgtgacaatcacatttcctcttagctcaaataattctgttttttccaaagctttagcagcttaattaaatctgttggactgggggaggagagagctgttctctagtggttaacatggtattctttaagaagaaaaaacaaagccaaagaaaactcattatctggcatgttcgccttaaagatggtactgggtagaatctggagttttcatctcttttcaaagctgcatatctctcatatttggtattggcctctaagtctaatattgcagttggaattcttgctgtattattttttaagcaagtgttaggtgcatttaactgctttcttcatccatgacgacattcccaccatgggggtcttgacaaagcagagtaaaaatatgctgtttacattgtttacttacaagtaaggagcctgaaataacctgtagtttcgaatgcaggccctgatttactggcgttgtcagtttcaattatgaaactgaagtttggtgcctcctctttatcatgttttttcccttgtagcagttgtgtttaatgtcattaaaaagaaataaaagttctttgtcagtgaaaaaa

SEQ ID NO: 255553 - DNA, 810 bp, Homo Sapiens
  misc_feature (535)..(535): n is a, c, g, or t
  misc_feature (550)..(550): n is a, c, g, or t
attaaaaaatgctttaatactgctgaagtctttcaattctagagcaggcatagaatatatagaatgtttaccttatgaccagatacaacctcccaagaaaaactggatcctgcagggcagctggtcttcacagttcctgctgggactacagttgcagaagtcattccatcacttttctctttttaagggagttaagtacaggtaaaggaactcttctagcaaagatcttaataatctcttgattatcgatgtccgtggaggctttttagtccttcctttgcttctgcattcttgacccttggcttctttcactcactctctcctaattctcctgtctttctgaatgggccattccagttttcaataggtgacttctatttcttcctgtgttggatgttgcctatgggtctgctgtgtgcatttctgatatatattaacactctgggaagtcttattgacagattccaccattacttaaacattgtcaattctggcctagatcgctatgttaaactctggtccctatctccaactntatgggcttttgttnttagctataccatagctggctcaaattaaaacttggaaactgaatgcatcattttcattactaccaccatcctctaattctctgcccctctaaaagcagcctcttcctgctggattttctgacttttgggatggcccgactgtcttacatattaatcaaaaaccttggcgccgaatcggcccgagctcgggccgaatcggaccaagggcggtttgcccgttgctctctcgcccggttggtctgggcccggggttggggct

SEQ ID NO: 255554 - DNA, 758 bp, Homo Sapiens
acctttcatctttctagggcgggggttaccgggctttctctttattctccggcatgtaataaaatttgcaacaggtctgttctgtgggactcctccccgaagctcaactgcttaggccttcccagctctgggtttgtgtctggtggacttcttcccgaagctcacacgcttgaggcattcaagctgtgggcttggtgaatatcgtgcttttatcctcatttataggtaagaaagctgactcaagagaggttaagcagcttggtctgaggtcactgctttacgggtggtggagctgggcctgcacacaggggtctgatgcagagctggtcctatctgctttataagctgtggctcacagggcactccaggggctcgagaggacctggcgggctgagatgaagactggtgaggcctgggaggcaggtgcttgactgaggtgggaagtgggaccttggtgccaagcattcccagggccacggggcaggcctgtagggtctggtgggtatctggggtcccggagaagcccttggcacggggcttcatgagagcatagacgagtgccgcgccctgcagttgagcacgggggatgtcagctgtcgcagtcgcttttgaagagtgaggggtgaggcctgcagttgctgcccgacgttgtttacaagtgagcaagttttacaaaaaacatggacagcatcagggctgacttgaattttttacttgaggcagcagctcaacctgttggtttcctcaattgtgaatta

SEQ ID NO: 255555 - DNA, 707 bp, Homo Sapiens
aacttttaaatcgtacaggtctttgtactccaactaaacctacccatccattagcaagtgtacagagatatcgtcctggcaaattgtgcatctttctcctttgacctagcagtgtgcatggcagattgtgccaagatgaggcctgtccagggacccatgcaataaaaggttagattcttttaaagctttttgataattattattatttccagaaagatatttttgtttgccccatttaaaaaaggttaaattgagtcactgtcttcattttcatgagtaccttgtagaaaactattaataatgataaataactaaacttctctagattaccttaatttttttgttgttgttctcagtacatctaagagagtagcatataggccatgtgtatgtggtgataaatgaaaatgcaggggtcttacttggttatttaggacttaagattttatctagtcattttcaactgtgattgaacacttccctttaactcccttcagaaactccaagatcatattgtatcccaggtactagaatttctgttcagctgtttataggcctccaccacaagaaattggctccaaacctattcccattacatcatcacccactaatgtcattacaccagaatgaaatctgctttgaggcttgtattgttgttttccttcctttctttcccctcatcatttcctttagaaggaaaagggaag

SEQ ID NO: 255556 - DNA, 704 bp, Homo Sapiens
  misc_feature (82)..(262): n is a, c, g, or t
tgagagggagtttcgctctcggggcccaagctggagtgcagggtgcgatctttgcttacttcaaccgttgcctgccaggttnnnnnnnnnnnnnnnnnnnnnnnnnnnnnnnnnnnnnnnnnnnnnnnnnnnnnnnnnnnnnnnnnnnnnnnnnnnnnnnnnnnnnnnnnnnnnnnnnnnnnnnnnnnnnnnnnnnnnnnnnnnnnnnnnnnnnnnnnnnnnnnnnnnnnnnnnnnnnnnnnnnnnnnnnnnnnnnnnnnnnatgagccaccgtgcccagcccccattattgagtcttaatgccagaagaaaggtgaggatttttaaccaacagaggacattactgtttttctaaatttagagatttggaatgaaatttatctttaaccctccataagaataaaagaaatgtctctaccaacaggatttttggaacatagtctctctcatcacagaaaccatattcaaggcaattttggtatactgggttggccacactgaaaacataagacacgtcaaaataaatacaaaagccattatctagcaaagacagtaaaacttgcaaagggtagccaggaaaaaaagacttaaaatctgtactagacaaaacgtgaaagagcaaaaaacctgaaaaaatgaaacatccaaaactagagctattattaactaaattaccaatggccattatgggatatttacagctt

SEQ ID NO: 255557 - DNA, 808 bp, Homo Sapiens
ttggtaatgaactcggcactaaagcaccttcaatgaactttaataaaaaaccacattttttaaagtaaaggctactataatttaaccccacataacctatcccttaaattctagacttcttggaagtattgccgaaaaaatagagtaatacccatgaaattgaaagaaaattctttcaagtcacacaaagctcaatttacatctgtctctcccataaagtaatctcattctggatcgcctataacttggaacctacaatataaaggagtctctcataagacatttactttcttgtggaaattaatctttttccatatgcagaagaaatacatacagattagttctagcacaaggagagggtcaaaatggccaggcgcaaaagacgtatgtgaaattcaaggtattagtcaagaaagcctccagtgagaaaaaagggctcgacatcagaagaatagcccatcactatagaaagttaaatattcggagctccaaattcacatagggggaaatagcattgctctatcctcatatatgacacaggagagaatgttacagcttgagtcttgtcatgcttacaattcaaagatgaataaacaaacaacacatagtgaaatcaaagttaaatgaagcaagtatgacaccttaagaataagaattaaactgaatgtgcatgtcatcatacttctgaaactgactttggtcagagaggaaaacttataaggaagaactcaagaagatgaaaggtagcatggaatctaaaacacaagagacagaaagtgtaattaggaaaaagatagagatgtaattc

SEQ ID NO: 255558 - DNA, 661 bp, Homo Sapiens
  misc_feature (165)..(271): n is a, c, g, or t
ggagacggagtcttgctgtctcaaaaggagacagagctggactacaatgccacaagatcgggtcactggacatttcctttccacaggagacaagcaattttcttgactcagcctcctgagtaggtgggagtacaggtacctgccaccacgcccggctaatttttnnnnnnnnnnnnnnnnnnnnnnnnnnnnnnnnnnnnnnnnnnnnnnnnnnnnnnnnnnnnnnnnnnnnnnnnnnnnnnnnnnnnnnnnnnnnnnnnnnnnnnnnnnngtgtgaaccagcatgcctggctccccacaactttctattatggaaatgtttcatacattcagagaaacggaagaccagtacagcacactcctgtacatctttcatttaaatttttaaaaatgttaatattttctctatatataatactttaccaatatcatcgtttcgttggtggtgaccctttgaaagttacagcaatcatgacactttatccccaaatattttcagcatgtatcttttaagaataagaacagtttcctgttataccagaaaattaacactagttgacctaaatatcaaatagagaggcactctaaaaaaataatattcatctgggtatgtatcattgcaatgggaatatgcatgccatagtgaactatgtaaaggtta

SEQ ID NO: 255559 - DNA, 555 bp, Homo Sapiens
attgcaggatttcggcacaagttcttgtggtcccgcccaccaggttcctcaggtggatgaattgcatgggcatggcatgttaagtatcatctcacctgtaatcacccccctgctctctttatagcctgtgggacagagtgagatcctgcgcatacacaaaaagaccgtaagcaagcacctaagtcagaaaggcgtgcataggcaaagtgagtttatttttgggacatcctaaatgttaaatgctgttccggacttccaagtagaagggtctaatagtcaattaaatatatggatctggaacttggtacatgatgtagttaaaatgtcctaacattttaacttgcatattaatattatatgtgctgcacgaatggcatctgttttaattttggcaatgtcacagattatcaacaaaagtaattgttaaaaacaattagtcaataagttgttccattatggggcttgatgtcttcctaaaaaattctcttcaaaaatgcataaaagcaaatattaaaatcacccaaaccaaaatattaaaacatttttccaacactc

SEQ ID NO: 255560 - DNA, 1281 bp, Homo Sapiens
  misc_feature (353)..(361): n is a, c, g, or t
  misc_feature (1061)..(1061): n is a, c, g, or t
  misc_feature (1078)..(1078): n is a, c, g, or t
ccgtgtgcagtgttttaatttatccatgtacataggcaattatcataatttgaaggacactttttacttattagactataagaaaaactgtacagaaagtttatactataaaattacatccctaagtgattagggtcctcagtaacacagaaataagaaattgaaaagggtcattgctcggcaatccacataactacagagtagagcgcaagctattgttcgtgatcagaaagagacttcataaaaacatcttcacatattccctagcattatgccctactagtaaaaggaaggcctatgacaatgccattgtttattttgtgtaacgcagcccttctatttccctcaaaagnnnnnnnnncctgctataagataaagaaaaggctgtatccctaagatatatacctaatgaagattatctcaacagaagctccaacgttttccatttttcactgtctttcctgaagttcacctggatgttccacagcaattttctaaccctttcattgttgattagcctactaaaagtagaattctttagcaacacacaatacaaaagacacaggctaaaacaggcctcacaaatacactttgaaataggtatatttggatataaatataactttccagtccattattttttctaatgactaaactctaaatttttaaaaatggaagttttcaaaccaacgatgtgttaagcccattctcatgacacattcattttaacttctcattcagtatgggaaaattttatttcttccctttgtcttgcagaataatttaggttcccaccctgggcacgattcaccaaatagagtaagaccacagataaaagtgacaaagaaacacaggcaatgaagaacacttccaaaaacaaatacccccgagaatccagtatcataccagcaatgatggaaatgatggccaacccaagattctgaatggactgcatgaagccatatgcagttcccagctgatgttcaggaactacaaatgccaccattggccacaatgcacaggcaagcaatgagtaggagagtcccagagacacatagcantcaagggttccacatcngtaaggccagcatcatgtgggacacaagagtggctgctacttggccaaggacccagatgatggttttccttgtttattcaccaggagcccaaacacccgggacatgggagctgatatgacatatacaacacttggtaaatgacttgcttgcttggaagaaaattcaaattctcttgaaaggaaactttcccaaggccattaaa

SEQ ID NO: 255561 - DNA, 694 bp, Homo Sapiens
  misc_feature (24)..(25): n is a, c, g, or t
  misc_feature (75)..(75): n is a, c, g, or t
  misc_feature (78)..(78): n is a, c, g, or t
  misc_feature (81)..(81): n is a, c, g, or t
  misc_feature (84)..(84): n is a, c, g, or t
  misc_feature (88)..(88): n is a, c, g, or t
ctataaagtcttatttaccagacnnggtgtatttaatatgcacttctaccccttaagtacactttgtgcttgganagnagnagnatgnaaatggttcccatcttatctatggcttcaaggcaagctgtgtagctttcctatgtgtgtattcaggcagggggctcagccctgagagaaagtgggcctctggcacacctgggacagggaagatattccctggcaagctctcaggcatctcaggctggcacttctttgtatccatggcaatttgctttcccctcactgaactgagatcagaatgttactctgttggtggctcccccaacagtgaaggggtgactcagtgacaatagtgctagaagtatgagtcaaaacactgtacaacttgagaaattccccgtttgcactacgcttggaagccaagaggagatgttaaaaagaaaagaataattctttctgaagacatttcccatcattgcacttgatgggttcaactgggaagggttactagactctggaagttgaaaactgcccacataattaaactgtacaacagctactcaggattaccttgcaagttttaacctataaaaatttaactttatatagcacttccaaaatagtttgccataatacctactaatctggatttaatttttaaaactcatccttttaacttaagatttaaataaaa

SEQ ID NO: 255562 - DNA, 672 bp, Homo Sapiens
  misc_feature (267)..(275): n is a, c, g, or t
tggaagaatatggcaaagctgatgcaagatgggtttattttgatccaaccattgtgtctgtggaaattctgaccgtcgccctggatgggtctctggcattgttcctcatttatgccatagtcaaagaaaaatattaccggcatttcctgcagatcaccctgtgcgtgtgcgagctgtatggctgctggatgaccttcctcccagagtggctcaccagaagccccaacctcaacaccagcaactggctgtactgttggctttacctgnnnnnnnnnaacggtgtgtgggttctgatcccaggactgctactgtggcagtcatggctagaactcaagaaaatgcatcagaaagaaaccagttcagtgaagaagtttcagtgaactttcaaaaccataaacaccattatctaacttcatgaaccagaatgaatcaaatctttttgtttggccaaaatgtaatacattccagtctacactttgtttttgtattgttgctcctgaacaacctgtttcaaattggttttaaggcgaccagttttcgttgtattgttgttcaattaaatggtgatatagggaaaagagaacaaatttgaatttgtaataataaaatgtttaattatacattttatggctggcattaattgttccacattagtaaaaccaattatcttag

SEQ ID NO: 255563 - DNA, 735 bp, Homo Sapiens
  misc_feature (386)..(398): n is a, c, g, or t
  misc_feature (650)..(650): n is a, c, g, or t
tggtttaataaatataattattaaataaatgttaagactttaaatactaacccaagaaaaatttaaaaatacaaattcagtaagacttttgctctaacaacaatttttcaaaacgaatcaacaacaaaaaagtatccagggtttcttttcttatgaagattattaataaaacacagtattggtaagcacattttaacagtatgcttttcttttgtagggaaaggagatatggctatgtctaacatcgtgggatccaatgtgtttgatatgttgtgccttggtattccatggtttattaaaactgcatttataaatggatcagctcctgcagaagtaaacagcagaggactaacttacataaccatctctctcaacatttcaattannnnnnnnnnnnnagcagttcacttcaatggctggaaactagacagaaagttgggaatagtctgcctattatcatacttggggcttgctacattatcagttctatatgaacttggaattattggaaataataaaataaggggctggggaggttgatattattaatagggttatgcagaaaatatgaatggcagggaggggcagagagaaaaatccatttcttcatttaaatcaaattttaaaaatcttgaaccctagaatctaanacttaccggatttaaaaccaacccaaatccattctcatttttctggccctttttttcctgaaaatacatattataaacagaagtt

SEQ ID NO: 255564 - DNA, 1154 bp, Homo Sapiens
ggtcggggagggagcaggaggacacagagccaaagcctttctgaaccaagagggacaggaattgggtgaccgttaataacttgtaattttctgcctccaggattcagagtttggttggagaaatgtcttcttgctttcagctgctgttaacatatcgggcctggttttctacctcatctttggccgagcagatgtgcaggactgggctaaagagcagacattcacccacctctgagcaaaccgagagatgtgctagatcctggtgcttagttcatcattgttttccctcacagacatttctctttcatgcctgcttgactgataagccattagctagaccctgactatgtaacgctaaagattttaccatgcctggaaattttacaggggaagaaaacacgctagttatttaactgcaagctactaaaagcataggtgtgttgagatttctgtgttctccactcttccactgttatcctagtaaaagcatcaggggctgggaacaatttctttccaaagcaaaagagaaagccagaccttgggaccgagaactaagaatcacaaggaagttgcgcccaacatacagaacatgaatcctctgagctgtcctcaaaagaaagccccaaacaacagaaagcacagtgttttccattgttggtgaaaaatgtcaaggaggaaaaaacaataatgatcccatcatgataagaggaatgaacgtgtctgcaactaatgggagcaagatagtacactttaactctttcagacaacttgcattctgtggatgccagctttggaatcagagccgcctctggaatacctgtgcttccagagttagcttttggacagttaccttctttctggccatcttgacttctgccccacatctgctttttggctttgtgcagatctttaacatgttagtgaacagacattgcccagtgtctcttctagcccctccaacagttcttcatgtagcactgcttttggacagtgacccatgatatctgccttcgtttgcccctctgactgttggaatcccacgcaccattcagtaggattcaattcaatgtggaaccattcaacattcacctcattaacctaaaatgtctcccaaagatgtatgtaagacacacactgccctaacctcactccaa

SEQ ID NO: 255565 - DNA, 704 bp, Homo Sapiens
  misc_feature (196)..(196): n is a, c, g, or t
  misc_feature (199)..(199): n is a, c, g, or t
aatgcctaaaagaaaagattgttccgggcctataaaagtgagattacacccagaatggaatcttaagttctccaaggaaggaaataaaaaaatttttggaatttggtaaatataaaaagactagtttttcatgataagatctttaactacacagagacctgttaaagcaaaaattataacattgtcctgtggtgtntantaatgtaatatgtacagatgtaatccatatgactttatagcataaagaatggaggcagtggcaaatggatttatacaggtgcaaggttttccaattttatatgagatagtataaaattaaatctaagtagactgtgaaagatcaagaatatacgttttaattcctagaaaaaccaccgaaaatccaaagataaaatagaatcctaaattaagaaaaaaatgatccaaaagttgcagagggaagaaaaagaaaaacaagaagtggaggagcaaacagaaaacatataataaacttgcagctctaaatgcaatcatatcagtaatcagactaaatgtcagtggactaatcactaattaaaatgtagcagtgtcatagcaaaattctacctgatgtacaaagaagagctggtacaattctactgaactattccaaaaaattgaagaggagcaactcctcccaaactcattctgtgcatcaccctgataccaaacctgacaaacaccca

SEQ ID NO: 255566 - DNA, 687 bp, Homo Sapiens
  misc_feature (486)..(486): n is a, c, g, or t
gtctgtaaaacctaacacgccctcttggccattagcacaaatggactaacattgggccttacctaatcaaggcctttgagagctaggatatcattgggtattttgtgaaatcttttaataaaattcacaaattataagtatatacgtatttttctaggggtaataaattgtggctgactaaacaatcctagttcttaatcttcgttttggtaataaatactactgtagttattgattcaggtaaattgtagtaattgttattaaaataatatcaggaaaacaacaaccacgatataatttcttttgctgacttttaatgttaaaaatacagtaattttatttgtgcaactgataactttttcaatagttctgtgaccttaaattcattacagaaactctaaatatcagattctgcaaagaaaggatgtagcaaagcatgaagctagtggctacatacaaaaggtactggttcttaggtaaatcggntattactattttcttagtttttaaaaatttttctgatgttatttctgcctgaaatgccatttcttttctggttacttttctcccgaatctctatactacgaaatcactaccaatattttaaagtgctctcaaatccaatcaagatgaaacttaaaaaattttaaactcagaatcattctcttcaggttggctgcccagatt

SEQ ID NO: 255567 - DNA, 734 bp, Homo Sapiens
  misc_feature (623)..(631): n is a, c, g, or t
tttataggatgcgttcttaaatgccatctttaaaattgggccccaggacgtgcataaaattcgttggttcataagccataaaggcttgggacatctgaggattgccattcattgttctaccccgcagatagtcattgaatggtctccactgtcaaaattgaggtgtggggctggggattatgcaattagctgaagccgcgttgtgcataagcgctctgtagattttccagtcgcaaattcaccagtagacccactctctggagcaagataatggttattgccagcatgaaccaggtaagtgaccagttaggcccagcccttcccttatggcgctacaggccctgtctgtcatagtcaaatgtcaaagccagggccgtggccagttttgccatttcactgatcagccttaacctaagcaaattaaagctcttgatggagggtgcgatctactcatcccataaaaggcttcactcgctaagatcgtcatacccagcaaaaaagaaagggaagccccatccccttgcggcttgtgatgtgattactcaggaataatggtgttcattgcaaatgcacggtccttttcccattgcaatgtcatcccactggaaattggcctatatgtnnnnnnnnngaaagtatacttttacatttaaaatgtacgcagactccgtccatatggctgattggaatgtacacctgtaatataaaaagtctctgtatatgcaataaattct

SEQ ID NO: 255568 - DNA, 719 bp, Homo Sapiens
  misc_feature (46)..(46): n is a, c, g, or t
ccccaagacttaaaagtcgtgaacatgtcttttccctttaaattcnccatttgttaattaagctcacgttaatagtggattaaaatgaatggctttttatttatttttcaaatttccacaggattgttccaaattggctcaggtattgggggaaaaacgccttattctgtgtctttagaaaactgtaatattggtaatctgaaaatctcttgctgatagtcccagacctaaatcataatcctcactttgctccttgacttaatggtatctcaagcattaaagccatttatctgtagaaaattgaattcagtaaggactttgtggattacttaattttttcagatttctccatactaatgatttgtaggtatgcatgtgtctgttttcctgtggctgttccttttgtacaaggtaaaatatgctgaaatctctcttaaattgcagcctttttccttttcattctttttgcagagctagacccaatacagaattgatttgaaaaacagtgtgtgagttcctctgaaagatccttacaatgtctaatgttcatcattaaaggtttgttctcaagagttgcctctctgtatgtaaaatgtaaatacatgttaaaggcaatgcttgtagaaatgaccctttgttaacaagtcagtgtgaattaatattttagttgctgaaatataggaataaaatattttgtggattttgtacagaaaaattaa

SEQ ID NO: 255569 - DNA, 539 bp, Homo Sapiens
ttgagtgggcttgtgaataaaccttccacaccataagcttcctacgaagaaaggtgatccctaacacaaagcaggctggtgtactcaactggttccgggtacctctgcactcactggcttgcctagggctccttgtcctccatgacagtgatcgaaaaacaggccctcggaatatgttcagcatttgctctgctgtcatggtaatggctctcctgccagtggtggaactcttccccgtggtaaggcataatgttaagctgcgggtaccttcacctactgaggagccctatgcccctgagctgtaaccccactccaggacaagatagctgggacagactcttgaattccagctatccgggattgtacagatctctctgtgactgactttgtgactgtcctgtggtttctcctgccattgctttgtgtttgggaggacatgatgggggtgatggactggaaagaaggtgccaaaagttccctctgtgttactcccatttagaaaataaacccttttaaatgatacccaggaccgccgcaag

SEQ ID NO: 255570 - DNA, 749 bp, Homo Sapiens
  misc_feature (123)..(123): n is a, c, g, or t
catttttaactattacctttgtgtcagtgggtttctgcatcacagggcatttctcttacaaaacacttcccaccagaaaaaaaagtccaagccaaaaatattatatatatagtattgacatgnagatttcttcaactttttagtcttagtatgatcatctatttttatatctatgtatatataaatcacagattttactttcttaattccaagctcagggttgacacacctttgtaagaaaatgttttgtcaaccagctcttcttgttttgtgctgctcaaagaagggattcctcagtgatcggtgagcaccaagaatcaagaaagagaactttttatgtatctaactgtccatttattaaaaatttgccagggcacacccttctgcatgagtgtgcttcagcctgggtgctccagactacacccaaactcatgggatgagcccattggtgtgcagggctttacccggtgatggaaactgtatgtgtaaaagaatgttattcatgaaaaacccattgctttcatgtaaaaacaccttcggccctaggattcctgcctggcacttggatacattacctaactcaataggccagtttagagccacagcctaacctgttcaccaagtaggccaaagccaggcctttcgctccccctgacagagagaagcaaaataaaccaaactgggggctttatgaatacagttggctatccatatgtttcttagtttttatgatgcatctggagtaggga

SEQ ID NO: 255571 - DNA, 747 bp, Homo Sapiens
  misc_feature (554)..(554): n is a, c, g, or t
  misc_feature (557)..(558): n is a, c, g, or t
  misc_feature (571)..(571): n is a, c, g, or t
cccgcagaagcgcagccattcacggcctcaccaatgcgacacttccgcctgcacaagttcttccggggcggaggtcaccatggcagcttccttggctcggcttggtctgcggcctgtcaaacaggttcgggttcagttctgtcccttcgagaaaaacgtggaatcgacgaggaccttcctgcagacggtgagcagtgagaaggtccgctccactaatctcaactgctcagtgattgcggacgtgaggcatgacggctccgagccctgcgtggacgtgctgttcggagacgggcatcgcctgattatgcgcggcgctcatctcaccgctctggaaatgctcaccgccttcgcctcccacatccgggccagggacgcggcgggcagcggggacaagccgggcgctgatactggtcgctgacagcgccaaagagaccaacaagatgattttagcgtggactaggacacttaacctaagaagagtttcacttaatcattcaaatcactatctgaagggtcacggagcgcaaaataaagtttaaaaccctgctaccacntcnnaaattacactcancccttcctttcatgtcggccgcctcggcccctccagaagcctttctagaaccattcgttttggcggcgcggggcccccgtaaggtaaagggaaacatgggccataaacctgtctcccctacggaaaatcccgtggtccatgaaacaacggggctttgggatttccctcaccacaat

SEQ ID NO: 255572 - DNA, 695 bp, Homo Sapiens
  misc_feature (658)..(658): n is a, c, g, or t
acgggttagtgtaaagtaactcgtgagggcaagggccataccgtcgctgggattcagatgaccagccccctacaccccggatgtatatcctgtcagaagggggtttcgttggccgtgtacaacctggtttggggaggcccctctattggataagctcttccagagctggcataagctgtgaagatcacactgacaccagcaaggcaggtgctcgtcaatcagtgctgtgacaggtgctctcactgcaatgcctcatcttactactcgtcattcattcatgctgtccagtctcacatttggctccagccgagaggtctctagcagccactgttactgtcatccacatgtgctgaccattctgtgtcttaactgtcacggtcttgagggtagctaaggctcagtcctgagctaccttaagattactgaatattcaagcgacccttaagagatccttgcaaagggctacctgtaaagcaaacatgatgaccttatactatgccgggcattctcttaagtgctgatgtgaaggattatcgctccttttactgaagcccacacaggttaagaaactcgctcaattgacgtctcacagcgtgtaaatggcagagctgctggtatgacagggaaatccagagcctgtcttatccaccctacagtntcgtagcatgagcttacataagaactggaagcctcga

SEQ ID NO: 255573 - DNA, 696 bp, Homo Sapiens
  misc_feature (75)..(75): n is a, c, g, or t
  misc_feature (200)..(200): n is a, c, g, or t
  misc_feature (268)..(268): n is a, c, g, or t
  misc_feature (612)..(612): n is a, c, g, or t
ttgggcttactttggctaaaggggatctcatttaccttcaggtaaagtgggttaacaaggaagccacccggcccnaacaggtctaaaatggttgaaccagcaaaaaaaccgggaaaatagcccaagagaaggcctccagttaataaataaggattcaaatctgtcctccccgtgaccaagtgccttccacacatggcatntttcaaggggtgagtcaaagggagtagctgctcaccttggattggtatggcaagaaaaggtacttagnctgcagccttagcaaaggtgagtatgcatggatcccacgaagtcaatgcaaaagcaatttgaaaatccctgcttttcaaataggtgtaagggtttctgtccatgacaaggctgttctacttcagtcttttaaccatgtatccacacagtcccagagatggtcactagtgtcttcctcacctttaacttcctccttggaaataattttcacatgctacgttcttgacctaccaggacaaattctatgaattcttcacgtatgtgtcctgggaaggaatagccaaaagctttgacaagaataactaagtctgggctgggtgtgatgctcatgcctgtaatcccaanactttgggagccaaggcgggtggaacacgaggtcgggagttcgagaccatcctggccaaagatggtgaaaccccttctctgcta

SEQ ID NO: 255574 - DNA, 639 bp, Homo Sapiens
  misc_feature (267)..(267): n is a, c, g, or t
tgcctgtctggtcacatgagtctgtctccttactttagtccctgggcaatccttgcttaatgctttgttgactcaacaagggcccgaggccttaggttttctattaaggtctctgccccaggcatggtgctctatatcttggccaaataaattactttccttgaatatccaggaatcttttagtctaaagcaatgaggagttatcacctcatcctcaaactccaacaagatctatgcccttagtgttgtttatgttgtctgctttgnatgtaaaaagcaagagtaatttggagcaagaagctgcaatgcgccaaatacacaataggccttttctttatcattcatacgacatttctggtttaggtgtatgtagttgggccatgttacttgtccagaggaagagactaaagatataagaataattttttagtcctaaatgctgttttgtttactttctgtcaagatatttacccgtgtcaaattcaaactacagtactgtgtaattatgtataaagtttttttatttatttgaagttagactagatatacgtttttaaatttaacatctggctggacagtgttctattaactcattgaatgtgtttcctttgtcttgtgttaataaatattgatgcctga

SEQ ID NO: 255575 - DNA, 549 bp, Homo Sapiens
caattcaggttttattaaagttgtttctgaatattttttctcagtgatccttgttctgatgaatattacatttcatccattagttttgctcatttggattttgctttagtgtttaaagaacttttatttatcaaatcctttgccatgaatgagagcaccaaataacatatcaatacccaactgcctgattcctttacagcagtaagaaaagtcagtaaaacatttgtacagtccaagtactacaacaccaagatcccctcttcaagtgagagtgagccaaagcttccttagtatcatctcaagtcaatgtcttttcactataccattaagatgaaaataactaagagcactaacacaattttcttgctctttccatctaaaaatgtgggtttcctgtggtgtggctaattttaaaaaccagaaaatggaaggaaaataagtcagtgaatgattagcttacaagtttttttctactcatcattaaccagtcttcccttttccctagactttagacagccataaaaaggcaggaaaaacaatgtgcataat

SEQ ID NO: 255576 - DNA, 705 bp, Homo Sapiens
aggcaaatgggccttaatgggcagggttcattagtgccctgcagttacttgtggctcttgcagggcaccctgcccagaatgccaagaaaagacccatgcatacctgccctgcatttagagccatgagctgaaggctgtggttcgtgcaacaaagaagcatactgtctggtgtcttgtaggcatctgaagaggaagagggcctggataggacctggaagaaagataattttcaactatggggcttcagtactgcagcgccccgagccaggctctgtgcttctgcctttaaggcctgttctcagcacaatgtctcaaaaataggtcatatcctgccactcccgtcgcagagccctttaatggttccaaaccctaagtccacacatagcccctggctctggcatctctccagccccactggccccgagctgcttgactcaccggcttcctatttgatgcacccaggcccccttgtggccaactccctccccttctcactgaggcagaagcactgaggtgggctggacatgggtgccctccacgtccctcatatccccaggcacactctggcctcaggttttgccctggccatgtcatctacctggagtgggccctccccttcttcaggccttgaatcaaaagccactttgttaggcgaggatttcccagaccaaaaatcacattaaaaaatattttgaaaacatgcag

SEQ ID NO: 255577 - DNA, 790 bp, Homo Sapiens
  misc_feature (648)..(648): n is a, c, g, or t
ggcatgactctctcacccaagctggaatgcattgacacgagcatggtcacggctcgctgcatcctagacctcctggggtcaagtgatcctcccacctcagtttcccagagagctaggactacagtaggcacacgccaccacgccccgctaattttaagtagagacagagtttctgcatgttccccaggctggcctaatgcgatgcaatctgctacctgccaccctacctccaaaagcgctaggattacaagtgagagccaccatgtccagcctgaagttgctattaaatggctgaaataacataagtaatctcataaaacgcttcctcttgggttataaatataagtgcatattgataaatacaaaacttgtatttactgtttaaattgacaaaaactgcatatatatagggcatacaacatgaggctctgaaacatgtcttcatcgtggaagtggctaatcacactaattcatgtgcattacctgacatattcatttggagcgagaacatttagaatctactctttgggcatccatcaagaagactatgcactggcatgaacttgtgacagcatgctgttcaatggaactcttggacacggtccttactgcaactttggaccttttgatcaatggttccaagtcccnccgcaccgcaccaaatattttttactccccttcaagaggtgaactacgtggaaaatgatggtaccggagagaggaggtgcccttcacaggggaaaacccttttcgagggctccaagggtacttgcgcaatcatgttctagtg

SEQ ID NO: 255578 - DNA, 1266 bp, Homo Sapiens
  misc_feature (464)..(464): n is a, c, g, or t
  misc_feature (860)..(895): n is a, c, g, or t
cacgaggaggaagaaaaagcaagaacttgatgaacatgagaaaaatctcaaactaatagaggaaaaactaggtatgactcccatacgtaagtgtaatgactcattgcgtcattcaccaaaggttgagacgacagattgtccagttcctcctaaaagaatgagacgagaagctacaagacaaaataggattataaccaaaacagatgtatgagaggtgacagagagaagaggccattggtctcagtaagaatgccctgctttctgcatctctgtttcagaagaccaagagggtgacttaccagactgagtatttctggggacaatacaagtacctgggcatgaatttccatttcgattcagatgggactggaaacaaccattcaattttatgaatcttactggacattatggatttactggaattattccagacattatgccctttggttgtcactaccttgcanatgtgtaagagaaaaatgtgctaatgtgccagtgactgtaaaactgcaacatggcatttattaatcctgaagaaaagtacatgtactatttttcaatataaatataatgaacatgtcagaactatttcttaaaaacctttttattacttttgcgtgaatttatttaacaaagatgttttgtcttttgtgtaaggaaggttctagaggctagatgtttaattgtaaatatgtgaggaaactcaatgcagaattcaggataaaaattttaaaagcacaggtatttgggaattgaaatgttaagatacccagaacaacattaaatcaatgagtgaacttgtgacagtggtagcatttcaaatttcaaaagacttatcctgtgtgtgtgtgtgtgtgtgnnnnnnnnnnnnnnnnnnnnnnnnnnnnnnnnnnnnaaatattcagcagcaccaagttttataactattgtttgtttgactttattaatactagaatatgtagtctcagccttaattttacatttacattattttgtaattttttattactatttttaaggggttaaagagaacatacattctcacattagtgtactttctggtagaaagttgctgcaaaaacatttgaaatgtatattaacctaatgtatgtcatatatatgtctttgtgtaagttcaagactattgatctgtgaagttattttgtaaggacatacatttggtaagtaagtttgtgtcccaggaaatgtatgtgtttttaaaccctttctaaatatgcaggccattaataaataagattgtttctt

SEQ ID NO: 255579 - DNA, 907 bp, Homo Sapiens
aaacattttacagtccttgattagaaaccagacccaatctccttataacaccacagcgtatcctgccattgacagtgtaatcacaattctccctttttcatttagctgcttttttattattactaaatgttttggattgagcatttttccctctgtaattttcttccttcacgtttattttaactcttgtagtattttattgttgttaatttacaagtttaaaaatattaggtactattaataatggttaaaaatagaaaaaggcatatttttgtatgataatcaaatgtaaaatacttttatttttgctggacagttgttatatcatgattattgtgctacagtttattgtggcataatatgaaaaacaactatgacagccttcagtcgggccagggtgaagctgcttataccacctctgccgtcagagggacatgtggtgacagcagtggtgtggctgcacagggcgcactagagagagctcagcacccctgctgcccgccagcagagcccgtgctgagggaatgccgcacagatgctgatgcactgggtgaaatttctagtattgaacgtaaaggtgtacagtgtcttgctgttattttatgatggaaactgattttgaaaccaaaaatagctaactaactttatttaaggaaaggatattaatttgtactaacagagggtgaaagctgttcacatttgtcaacaaaatctgcttgctgcagtagtaacctcaagtggttaaaacttgatttcccgagaaaactaaaacctttgtgcctaaaattgatgacttgagttcaagtgggatgagcaagaagatgtgttatcttgttgttcaacagtattgagtgtgaaggaaattttgatggcttaataaaattccacagcgactgttaaaatagaa

SEQ ID NO: 255580 - DNA, 431 bp, Homo Sapiens
cacccccctggtgccccggcccagcagagccccgtgcctgaggggaatgccccgcacagatgcctgatggccaccggggtgaaatttccctagtattggaaccgtaaaggtgtaccagtgcccttgcctgttattttatggatgggaaacctgattttgaaacccaaaaatagcctaacctaactttatttaaggaaaggatattaatttgtactaacagagggtgaaagctgttcacatttgtcaacaaaattctgcttgctgcagtagtaacctcaagtggttaaaacttgatttcccgagaaaactaaaacctttgtgcctaaaattgatgacttgagttcaagtgggatgagcaagaagatgtgttatcttgttgttcaacagtattgagtgtgaaggaaattttgatggcttaataaaattccaca

SEQ ID NO: 255581 - DNA, 1330 bp, Homo Sapiens
  misc_feature (254)..(262): n is a, c, g, or t
  misc_feature (836)..(899): n is a, c, g, or t
  misc_feature (919)..(941): n is a, c, g, or t
  misc_feature (1044)..(1052): n is a, c, g, or t
  misc_feature (1272)..(1272): n is a, c, g, or t
  misc_feature (1276)..(1276): n is a, c, g, or t
atttaattctccctggggtatgccaagaagggttgaaatattccaggcgtccttcttttgaccaagaaacccggtggtaccttttccaagccctgcttaaagagaatataagtgaagccacctgcctagttaggccggtatctttagaaattcttaaaggctcatcctctgaatcccaaaaccagccttgatttgttaaagcacacacttgcacaaaaaccagtgatggtggcattaccatttcctgggtcccnnnnnnnnntttccaaaaagcaaggacttaacgctttttgccaaagcctttgagaagttaccgggatcataggaagcttataacaagaatggaagattcttaaataactcactttctttggtatccagtaacagtagatgttcaaaatatgtagctgattaataccagcattgtgaacgctgtacaaccttgtggttattactaagcaagttactactagcttctgaaaagtagcttcataattaatgttatttatacactgccttccatgacttttactttgccctaagctaatctccaaaatctgaaatgctactccaatatcagaaaaaaagggggaggtggaattatatttcctgtgattttaagagtacagagaatcatgcacatctctgattagttcatatatgtctagtgtgtaataaaagtcaagatgaactctcaaaaacccaataaaacgacgtaaaatggccctggcgtgccgcattgcccctccagaagctgtcgacactcttcctcttggcttcctccccccacctctgtcgcgtccccgcctctatctccccgccttcgcgccgcccannnnnnnnnnnnnnnnnnnnnnnnnnnnnnnnnnnnnnnnnnnnnnnnnnnnnnnnnnnnnnnncgttcctactccctagctannnnnnnnnnnnnnnnnnnnnnngtattaccctaaacctgttccgcagcggacgatagacgcccgcccctacgaacgcggcggcttcctagacccaaccactgcgcatattaaccccgccgcgccnnnnnnnnnctctcattcgccgcctttttttcgccgtcccccgttactagtatttccccctgttccccccgcccctctctctcgcattcgccttttcccgtgattcctattactcccctatgttcgccgcccgctaacacctccctgtgtgacgctacgcctccccatattctccccaccctatttctctcccgccccgcgcccgcactctcttcatatcgccgcgccntgtnttgtctgcggatattattcgtgctgccgactcgtgacatcccaccagcggcgcc

SEQ ID NO: 255582 - DNA, 932 bp, Homo Sapiens
aaaagatgcagagtcatggagggaagttgtgagggtaggcatagcagaaattacagtaacccccgtcctaacaacagtctgatggtaggtgtcctgtctgcgcttactcaccactggacacagacctagatagtaggtggtgaatgaataatcaagtcccttatcccagtaagtgtcacaacaactctgcaaagctaatttgtcattatctaataaacggatccccagagaggctaactgacttgccctgatttctaaatatagtgggtgctttgggaccacatcccatgacccttcatcgtgagccctccactgggccctgaatagtccttctggctggagcaggcctgatgcagacccaggggtcctctgggagagcagtgtggcaggtgcacacagagcagaacatgattctcaggataatattgcaaagcattaagccatgtggaatgtccaggagaggtctttagctctgctctctgaaatactccggggtcatacaaataaaactgtaaagagtctgtggactctcttgggctttgttttcatatctattctgggccccaggcttgtctggtaaagagcagagtgacaaatgtgtgcaggcgacactccatatgcagaacatcattgtgtggaccttgcaggcggattctgagtttggattgctggcatctgctctccctctccctgcactgattctcgggttcttgacctgagcagggtctcaccactgagacacagccctggagggtgggcttacatgaaaacatggccggatggggagtggacggcagaggagaccagaggacaatatccagagactcccagtttagctgcatgcagagacctgttgtttgtatatttttgctttctaaaagaaatgctagagatagctgggcccagtggcatgtacctatagtctcaactac

SEQ ID NO: 255583 - DNA, 561 bp, Homo Sapiens
aagcagaattatacctggaatatatttttaatatatataggcattttcctctagaaatatgaattgcctgccattgtgggagaaagaagaattattggaaaaaggaaaagtcacattccctctcatttctcccatattgctctctcattgtttctccatgacccagaacactgtctttaaaaagtcagtattaattcataaaaagacaattcccacagcacaatataactttattatattcactttaggtttttattttgaagagagaaatgctacttccatcaaaacttgtgtttttattggttagcaagtgccacctttgtcttcaaatggtaaaagtaaacaactagctattttttaattctgatgaattaaaagtatttttctagagaaaaatttgtgaaattattcatctgtactttttgaattgtatgtagccttggcaaaattgcctactaccttgtgtttaagaccttcagacattgattccttattgtgataattctgagtttttcaacaaagtttttcaaaatttgtttttgaataaaatgttgtattgaa

SEQ ID NO: 255584 - DNA, 810 bp, Homo Sapiens
  misc_feature (588)..(608): n is a, c, g, or t
  misc_feature (756)..(756): n is a, c, g, or t
  misc_feature (782)..(782): n is a, c, g, or t
  misc_feature (791)..(791): n is a, c, g, or t
gtcattaaaaagtgttcttataggcatgtggtgtcataacattggttaagaggacatttgcttagaataaagtaggttgtgtatagcatggtgaaaaatgagggctcttaagccagactgcttgaggttgaatctcactttgagtactctgtgactttgtgcaaattgcttacccattctttttgcctttcttgactgtgaattctgagtattaataggagctaccttatagggctgttaggaagatgaaataagttaatgcatttatgttacttattaagtggtcaacaagttagctattattaatgtaaaaacattaacctgctcttgaaaaaatatgttttcttctctttagtggcacactgtgcatcttctcgacaaatcatttcacactggaagaattgtacaagacatgattgtcctgtgtgtctccccctcaaaaatgctggtgataagagaaatcaacagcgtaagtgatgaaatcttttgaaggtttatatgaaaagttttaaagtctcaccagtgccatttatagtactacttgattatgtgagggacctgtggtgttgtactatgttgaataaatgnnnnnnnnnnnnnnnnnnnnnctgcttccctagtgcatagaattgaactgcttagggagtttacggctgcagtgagctatggtcatgttactgcgcaccagcatgagtgatggagtgagaacctgcctcaattacaaaagaaaaaagaaaactcgaggggggtgctgcnacggagcctacaacgctatcccatgngggcttganaggaggcagagcgagcgtg

SEQ ID NO: 255585 - DNA, 1735 bp, Homo Sapiens
  misc_feature (1112)..(1115): n is a, c, g, or t
  misc_feature (1117)..(1189): n is a, c, g, or t
  misc_feature (1194)..(1204): n is a, c, g, or t
aggaagagggggtcggccagtatccccgaaagagggctagggcgcatgaagaccagcgcagagctccacgagcaggaaaagcccccaagcagccccagggcgactggaccgggccgcttaggccacgcccggggaagagggcctgacgcgctgcggggcggggccgcggggccgggtcgcgcgagcagcggagcaccaagggaacggaaaatggcgcctcacggcccgggtagtcttacgaccctggtgccctgggctgccgccctgctcctcgctctgggcgtggaaagggctctggcgctacccgagatatgcacccaatgtccagggagcgtgcaaaatttgtcaaaagtggccttttattgtaaaacgacacgagagctaatgctgcatgcccgttgctgcctgaatcagaagggcaccatcttggggctggatctccagaactgttctctggaggaccctggtccaaactttcatcaggcacataccactgtcatcatagacctgcaagcaaaccccctcaaaggtgacttggccaacaccttccgtggctttactcagctccagactctgatactgccacaacatgtcaactgtcctggaggaattaatgcctggaatactatcacctcttatatagacaaccaaatctgtcaagggcaaaagaacctttgcaataacactggggacccagaaatgtgtcctgagaatggatcttgtgtacctgatggtccaggtcttttgcagtgtgtttgtgctgatggtttccatggatacaagtgtatgcgccagggctcgttctcactgcttatgttcttcgggattctgggagccaccactctatccgtctccattctgctttgggcgacccagcgccgaaaagccaagacttcatgaactacataggtcttaccattgacctaagatcaatctgaactatcttagcccagtcagggagctctgcttcctagaaaggcatctttcgccagtggattcgcctcaaggttgaggccgccattggaagatgaaaaattgcactcccttggtgtagacaaataccagttcccattggtgttgttgcctataataaacactttttctttttaaannnnannnnnnnnnnnnnnnnnnnnnnnnnnnnnnnnnnnnnnnnnnnnnnnnnnnnnnnnnnnnnnnnnnnnnnnnnaaacnnnnnnnnnnnttttggtggggcccccctcgggcccttcgaaaaaagttttttccaaaaccatttcctttttggggcgcgcggggcccccatttggggaaaagtggagacctcgtggcccctaaaggctgggtttccctaagggaaaaccccccggggcccaaggacacataggggggttgtgggatttccccacccccaaataaaaaacaagcgcccggggggggaacaaccgcaagggctttttggaaaccaaatccccaaaggggagtttccttgagggtccttttagcggggatctttctcccccgggggggttccaagcgggggcctccaatatatcaaattatacgcccccgcccccggggccacttttttccaaaaaaccgggtggaaaattcctttaaacatttctcgcccgcacggggaagaccccttccccaacgcgggttggtgaaaccctgaaatcccccccgggggatcttacacacctgtggtcccctcttggatataaaattttctcccccatgggggaaaaagcgg

SEQ ID NO: 255586 - DNA, 616 bp, Homo Sapiens
tatatgtacctttcatttattagccacatcatttgaaatataattttttaatttatagttattttattaaatgtacatacagtttgaaaattgctgaacctggcctttgcccttcaatttgaacaatatctttataatattgtaaactataccagctatttgtttaaaatatacagagagaaaaattacaaagaaaaagtaattaaaattccaccatggaaaagtaactaacatcatttagtgactgtatttacaaagagatagtcaatgttatttagtatctaatctttccgttttccaatggcttattatgtcaaaagtatcatgtattaaatgcatttatataggtctctatttctggatttattttgatttctggttgcatgtacagtattgttttgacttttgcaactttatgaattcatcacatggtgcttcatacaccagccagccacatcctaattctgtgattttcttttgtttctgaatcatcttatctactagtaatttattgataaatttgtaactttttaaaggacttcccaaaaatatcagattgctcaagagattacatgtccccacaagttaattttgaaaaaaaatggtggagcggcgg

SEQ ID NO: 255587 - DNA, 661 bp, Homo Sapiens
  misc_feature (182)..(223): n is a, c, g, or t
aaaatttgaaattagattagactagtagtttcatattacagaagagactttcctgaggttatgcaggagttggtggcagagcctgggctagaacgcaggctccaagtgcaatgtttgatccatgctgcctgtgaggaggatgtccaggaaataatccagggccccaggagccccagagcctnnnnnnnnnnnnnnnnnnnnnnnnnnnnnnnnnnnnnnnnnnccaactcacatggccgtgggcaggtcactccgggcatccaacacaaggtcagggacacagtgctcatcctcattgcagccgttccagaagggcacctgggccagggagagccaggtgtgggcagctgggtagggacccgcagcccctcgccctcaatgtacaccagctctgtctccaccacactagacatgggctggctttcctgcactgtccccaaacaccacactgctctgtcttgtgcttttccatagatgcttccctctttaaaacgatgctcaaagctcagctcctcctggctccccttcagttcataactgaactgatggcacaaaacccccacccccactcacccagcagaacggttctggtcaacatttattgatcatctactgggtggggggcaaagggcttttgtaacttggggatacaaaacaaaag

SEQ ID NO: 255588 - DNA, 681 bp, Homo Sapiens
  misc_feature (152)..(152): n is a, c, g, or t
  misc_feature (205)..(205): n is a, c, g, or t
tccatcctccaatatcttctggaagaaggaactacccttttgttcgtcatttatttcaagctgggtacaaggtgggtatttgggaaagtttccagattattaaacttagccccttccctccagaggttttcattttagaaaggaagtatatnaatgtattctagggttaatttttttaaagtccacttcagaggaatcaaagtanttagggattcaaaggcagcagaggcagagtcaggtggtgtaaagtgtgagctctgcagtcactgccttggtttgagttcctgccccaccgcttcctacccacagaactctggccagtgcttgagccctcctggtctccaggactttgttggcacagtggacatgccaaattttttgatgagagacatgacgagttagtgctggtggagtgcacaccaccgggcccagtgtgagggtcagtcctggtgagctgctgtgctctgtgcgttgcctgaagctttccagcaggccttagctgatgctcatggatccaaaacatcaatagtaagttactaagccttatctgctgctccttaaattgacagagtcaagaattaggtaaccagggaggagccacagaggtgtgtgaatgggaaactagacccagtcctggaagatgagcaggaaatggagtgggagacattgataccccaagac

SEQ ID NO: 255589 - DNA, 775 bp, Homo Sapiens
tttcattgcaaccactgggctccctttgaacccggcccaatctttggtcccagcattttcccactccagtgtatccagggtgttccaggtgagctggggaaggaagtgagcatggcctcagctgcagatctcctggagcagcggcatcatggcagacaggccctggatgtgctggatttggtacccgtaggcctcattaatgctccggagctcagccagcaggcctagcaacttcgcatacagaaaccgatcccggggccttcgctgctggcccttgatgtagctttgcagagtcagtgccatctcctcttgcagctgatcaatctcatctctctgggtaactccaggtcggtctgtaagatagggagctgggaaggacaagttgggtggcaggggtgggcctgcgtggtgccccggggactgaggctgggatagacctagtctgcaggtttgatagctaggctagaaggcctgggtggatggactcaaggagctgagtatttgggcagaggtggtgcagcaaaaggctctgggctttgggaggtgctcaccaggagagcgtagtgttccatggaagtgaaagagcaactccaaaaactctacctggaaccccactgtgggagatactaggattaggagcctctaggtcacctgaccacatcctgtaccatgaggacacatgccccctattgctctagcaccatctcaccacgggctccatcttcaattgtgtagcgaagaggcccgcagaggaagttttgtgtttggagacaga

SEQ ID NO: 255590 - DNA, 1584 bp, Homo Sapiens
  misc_feature (80)..(80): n is a, c, g, or t
  misc_feature (1560)..(1560): n is a, c, g, or t
aacaaaaacgcttctcatgcgtcatggaatatgggggtcacctaagaaaaagttgtttctgaagcacagaaaatgtaagnagaacctcagggtaaaggtaaaaaagccctctggaatggtgggcccacttcctgagacaaacatctagccttcagccctactttccaagcttgggaggctctgggatggaaaacaggatggtcagctaatcccatgcaggattaacaaaggaaaaggaagaaggaagcctgagggcaaggggtgccggggaattcagccataccccttaatccttctcccttagtccacagccacaagagcatggggaaggtgatactggggctggtagcagaggggggatcctcaaacctctgcctcatcaactgcccctgtggcagctccagttctgaggagggcatggtcctgtccaccactctgctcctgggtcctagagatcacccagcaaggtgggctctgaagaggggcctagtctttggccctagggcacctgactcagaggttccagctgctgtgggggctggctctggacaacctcagcccacagtgatgctgaagccacaatggaatctgttgcgccagtgattgaggaaggctccaagggctagggtgacaggcagagggggcatcttcttctccagcacagcacctacacaccagttactatccaccaagcctctaaataccatgttggcctggggcagagtcaggtggtaaccaaaggagaatgttgtgtcttgtagccttgtgtttgcctcaaactccactccaacctgaacctgttcatttgccctgtggtagtaacttgcatggccccgcctgatcccacattcaatgtagctacccagtgtacagccgagtacttcccagccagtgtcaagatggccccctcttcgcctggccgccggtgataaactagctctcctcccagcaccagccgatgagtgaggctctgcaggaagtgagcaaccatgatcaccgactccccaatcaggtcaggatttcctagggtcagagtggctgtgtagtcatctccccgatactcgccatcaaactgccatgtcaggaacttggcctgctgcgtctggaagacagccttagctcggagccgctctgccaagaggagcaagacctgggcgttcaggctgccactgctgtccatatcccctaccacagtggggaacacctcagtgggactgagctgccaatcccctgcataggccgcatggaggtgatatcccggcaagcccagggcactcatgtgtatagtgtgcgccacctggaaatggctgctcagaaccttgttgacaacgagcttcactccctccatctgtgctgggaatacatctttgcatagacggtgcagctcatcgaagctcccagggttgggcaggggttcctctcggcgggggctccggcggggcaaagtccccattggtgccaggcccaatgtgttccccattttagtccagaggactgggaagagccgaggttagcctgtgaaagcctcgtgccgaattcgccacccaggcctcgctaccntacgccgtgggagtactgtgctcg

SEQ ID NO: 255591 - DNA, 1752 bp, Homo Sapiens
  misc_feature (1643)..(1652): n is a, c, g, or t
caagcacacacctctcaccgacgacccgcccccgcccacgccgaccccaaggttgggtggcgaattcggcacgaggcctagcccttggagccttcctcaatcactggcgcaacagattccattgtggcttcagcatcactgtgggctgaggttgtccagagccagcccccacagcagctggaacctctgagtcaggtgccctagggccaaagactaggcccctcttcagagcccaccttgctgggtgatctctaggacccaggagcagagtggtggacaggaccatgccctcctcagaactggagctgccacaggggcagttgatgaggcagaggtttgaggatcccccctctgctaccagccccagtatcaccttccccatgctcttgtggctgtggactaagggagaaggattaaggggtatggctgaattcccccggcaccccttgccctcaggcttccttcttcctttccctttggttaatcctgcatgggattagctgaccatcctgttttccatcccagagcctcccaaggctgggaaagtagggctgaagggctagatgtttggtctcaggaagtggggcccacccattcccagaaggagcttctttacctcttagccctgaggtttcctccttcccatcttctgtgcttccagagaacaactttgttcctatggtcacccccactatccccatgaccgcatgaagaggcagttattgctttagtctttcattgcaaccactgggctccctttgaacccggcccaatctttggtcccagcattttcccactccagtgtatccagggtggttccaggtgagctggggaaggaagtgagcatggcctcagctgcagatctcctggagcagcggcatcatggcagacaggccctggatgtgctggatttggtacccgtaggcctcattaatgctccggagctcagccagcaggcctagcaacttcgcatacagaaacctttggaggaagtagtggggttgccaggaaaacaggagggaaataaggcagttgggagtcttgtctctaggccctgatcccctgaactattcctcagtgaagccaggtctgaacattagagaaaatcatgctctggtatgacagactatcagaggttccaaaggtcctccagggggcctcggtctgacactgtcttctctcaccatgctcagttttttctgaacccagagctctgagagccgagtgtgaagaaagctccagacttggccagaactccaaccatgtggaatctgagggcctggccttctagagcaggttctagaaggtggatgtgttctatggtataaagcatcccctttctggccaaactagctcttggaggaacgagcaaaacagaagcggtgcatacctcagagcctggataaatcacagactattgaacctggaactggctttgaccatgaaactgtgaatggccctaacttcaagggaaatgagaaatcgaaggaattggcccaatggcgaggagaggaaaggccaagggaagagaaaagtctgcgttagtctggagaagttggactagtgaggtaatggatgtcatcaatctcaggaatgctattacccagagcctctgagctactactttgcatctgtactgaatnnnnnnnnnntctggaaaaagtgagatgaaacagcagtatccaaatacagcaatttggatgctgaaacgatgtgagacagggatggcatacgccaggatagacccacaga

SEQ ID NO: 255592 - DNA, 473 bp, Homo Sapiens
tggagttgctcttcaccttccatggaacactacgaaaactgcagctccaagagcctgagtatgtgctcttggctgccatgcccctcttctctcctgctccccatcttacagaccgacctggagttacccagagagatgagattgatcagctgcaagaggagatggcactgactctgcaaagctacatcaagggccagcagcgaaggccccgggatcggtttctgtatgcgaagttgctaagcctgctggctgagctccggagcattaatgaggcctacgggtaccaaatccagcacatccagggcctgtctgccatgatgccgctgctccaggagatctgcagctgaggccatgctcacttccttccccagctcacctggaacaccctggatacactggagtgggaaaatgctgggaccaaagattgggccgggttcaaagggagcccagtggttgcaatgaaagactaaagc

SEQ ID NO: 255593 - DNA, 537 bp, Homo Sapiens
acatttcttctagcaccatttatagaatggctatgctgctaccatttcattacctttgcacctgttttcaaaaatcggttaagcaaaaatctatttttggtttctttattctgtttcattgatctatttttctatccctccaccaataacattcgtgataactgttgctatgtgttagaattttcaaatttttaatataggttacctctacaggatgagcttaattccaaattttttccctagcatttatttgccacaagttttatgacagcatgattcattcattctacaaatatttaagtccatattttgctttttgtactccagatacattaccaaacaaaatgtgaaagaatccctgacttcttatggcttataatctaataaaatggtcatacagttcacaataaccattataaatgcataaactatattggatgttgaaagtaatatgtactaggagaaaaatcacattaataaaaaaataaagatcaaattaaaaggaattggtgaaaaatgagtttgaaatttgagcgg

SEQ ID NO: 255594 - DNA, 726 bp, Homo Sapiens
  misc_feature (605)..(605): n is a, c, g, or t
cctggtagtttgcgtgtaagaaagggagaatatagttttagaggaagctgaactatgacgatgctgggcgaagcggtctggaaatggcagagtgaaacttattccaagctttcaaaataatcttttaagaagccaggattctccggtctggaatttctgagtgagtcctttttttatggtgtcctccctctgtgaatgtacaggcggaactgtacgaacagctcccttccatccatttttaactctttcggaaataacacctcacagcagcttcgtgcttttgtacagacctttgtaacaagtgtacagaaaactcattttgtttgagaaacaggagttgatgaacccatcatgctggtttttctctgagcacaaagttttaggctgtacacagccagccttgggaatctcgttgagcgttcggcgtggatccacggggccaggccaccctgcgggagcgccacacgcatccacttcggattcagtgggtgaagacagaactctgagagtctgcaggcggctcctgtgctttttatttctgggctcttcggatgtcttctaggacatttactattcactgcacctgaaggaaaaaatcacttttnaccttcctaatttaaaaagacaaaacagaaatgtacgttccttcgctagctttagtctttctgttcccatttttataaatctgagcattgataatgttctatctaaatttgtacagtgtga

SEQ ID NO: 255595 - DNA, 873 bp, Homo Sapiens
  misc_feature (22)..(22): n is a, c, g, or t
attagtttgagattacaggtcntatcatgcctcattctctgcatccactgaccatgctgctcaatcttcacagagtggatctttctctgcagtactgtatccacacgagccaactgctgtatttaacatctgcctgcaaatggacaaagtacttgatatggaggttgttcataagaagcttactaactgtggtttgcaccctaacactctggagcaacttagtcaaataccgttacttgggaaatcatctttacggaatgtggtgctgagagactacatttataattggagatcctgaacaccaaagtaagcctaaaaggaatctttgaggaaaaaagccttctagcaaggaaattcaagattcttgaagttgaaggaatatactgaaatgtttataaacataacttttactacagtagcatctaaggttttaaatgtgttttactattttcagattagatttttagatataaagatgaaaaactcagataactcaaatgagatatctatatccctacaacctaattgtatattgagcagaaactgaattaatatgcttccttgcaaatgggaaatcacatagcagttaccccatggcattgtgactaatggcatcagggcaaaaatatgttactttacgatttacctgttagcaggttcttgtttcataaaggtagaaaataaatacagacaacatctactgagctagttgattggtgatgcttctaccttaatatctttcctactgatttataattcctttattttcacatatactaaaactttttaaatgcatgttaattcagataaaaaggcattttgtattccacatagaatagtgttaagaattgtgaagtacactgagctgtcacg

SEQ ID NO: 255596 - DNA, 652 bp, Homo Sapiens
  misc_feature (516)..(516): n is a, c, g, or t
  misc_feature (601)..(601): n is a, c, g, or t
tgagccaccataactggccgtgaaggcatttaggttacaattttatatttccatggcctttttacacacacacatacgtgcgcgtgcacacaaacaaaaaaacacctcacagtttgtctttgccattggtagtgagatcaccagattccgagggagggcaaaaacacactcctaaagaggctccacaggttctttcccagagtagacatgctggatgcaattcatgcagccactcagtgaggaggagcaaacatttatgtagggcctactctgagccagacacagggctcgggactacaggtaccaagataagtggttgctgctcttgagtttgcagcccagagcagaaacacaaggcattgaagtgactcagatacaggtttaaaagggctgcctgctctgaaatcatggatctttgaccaaatctgaagtccgcgcttcctgcacgaaagcagctgcatttaatacattcctacgtgccaagtgccatgcaaagctgtgggatatacacaggtnctgcttcctagggctcagtgccagtggggaaataaaacaagggcattattttggatataataaggaaatgagagaaagtcatggngcgacaactacccacaggaacccaagaaaatgtagttctggccctcactgc

SEQ ID NO: 255597 - DNA, 735 bp, Homo Sapiens
  misc_feature (36)..(36): n is a, c, g, or t
taaagcagtcagatatatccatggtggacaaaggtncatagcactcatacttaagccctaggttgtccagcatctgagtgaggtcattccacagcttgtcccagccactgcttcctgacacaccataatgagcatcttagcattggtacctaagagactatggaagattttcagggtagctgggatgtcttttacataatacagcatttgaatcatatgaataaagtcccacttttgaagctcctttttctccaacattctactttggtattcagatgatgtctccttatgccaagcaaactttacgttctcgaggttcgatgtcttggctacaagctctttgtatttggcaatttgttcagcacttggctcaacaacttcattgttgatacaaactcctgggtattgagcctgaactttggagagaatttgaagatcaatttcacctgcacctccgcctatgcttagaatcttaatttctgattttgtgtctccaatccttcctattatgcctggcagcttcttgtccatgaattcctgcatgcactggtgttccgtggaatggttgagaaacctccggaaagattcaacatatttcccgtggtcagaaaacaagctcctcatggaagatgccatatttggtttttgttttgtcagcaaagccacaagtaagttccaagtgggaaagtgactgttcgaagtggcaaacaccaggataaagaggacagctacccc

SEQ ID NO: 255598 - DNA, 1561 bp, Homo Sapiens
  misc_feature (1511)..(1519): n is a, c, g, or t
cccagttttcggcacgaggttttctgacccgggaaatatgttgaatctttccggaggtttctcaaccattccacggaacaccagtgcatgcaggaattcatggacaagaagctgccaggcataataggaaggattggagacacaaaatcagaaattaagattctaagcataggcggaggtgcaggtgaaattgatcttcaaattctctccaaagttcaggctcaatacccaggagtttgtatcaacaatgaagttgttgagccaagtgctgaacaaattgccaaatacaaagagcttgtagccaagacatcgaacctcgagaacgtaaagtttgcttggcataaggagacatcatctgaataccaaagtagaatgttggagaaaaaggagcttcaaaagtgggactttattcatatgattcaaatgctgtattatgtaaaagacatcccagctaccctgaaattcttccatagtctcttaggtaccaatgctaagatgctcattattgttgtgtcaggaagcagtggctgggacaagctgtggaaaaagtacggatcacgctttccccaggatgacctctgccagtatatcacatcagatgacctcactcagatgctggacaacctagggcttaagtatgagtgctatgaccttttgtccaccatggatatatctgactgctttattgatggtaatgaaaatggagacctgctttgggattttttgactgaaacctgcaactttaatgccacagcaccacctgatctcagagcagagcttgggaaagatctacaagagcctgaatttagtgctaagaaagaggggaaggttctttttaataatactctgagtttcatagtgattgagggcataactatcaatcacaaaagtatattcaaaaattatattttgaacaactcgaatcactcatttatttccatattaaaatcacaaactcatccattaatgtagataaagcactgtttggatatgagatgtagcaaattccaatacattattggacttccatttggaatcatatgggatactgctggtcttatcctgtccctcctccaggtagagagaccacaagcaggctcaacataacataagctagaaaaattagatgactgaatttctatggcatattgataataaaattcattccatttgctgattgtctgaaattttctagaatactaataaaatacatactatagattctttattagtgaagtatgcactaatcaatactttgaacacaaagcctgtgttactgatttggccgttttgtgaagaaacatttatctttgtacgttcttctattgtgctttctatctaatttttattaatttgtaagagtaagcacctttagaatattaaaaattaattctttatcacatgttgtcatttcttcccattgtgttttctcttgtaattttatctgtgaattaatagctttttgtttgtctttttgatatactgaagttttctattatattcagccagannnnnnnnnaagtctcggcttctgatacattttaaaagaccttctaaaacc

SEQ ID NO: 255599 - DNA, 441 bp, Homo Sapiens
  misc_feature (17)..(17): n is a, c, g, or t
  misc_feature (54)..(54): n is a, c, g, or t
ggataaaggcactgttnggatatgagatgtagccaaatcccaataccattaatnggaccttcccatttggaatccatatgggatactgccgggtccttatccctgtcccctcccccccggtagagagacccacaagcaggctcaacataacataagcctagaaaaattagatgactgaaattctatggcatattgataataaaattcattccatttgctgattgtctgaaattttctagaatactaataaaatacatactatagattctttattagtgaagtatgcactaatcaatactttgaacacaaagcctgtgttactgatttggccgttttgtgaagaaacatttatctttgtacgttcttctattgtgctttctatctaatttttattaatttgtaagagtaagcacctttagaatattaaaaattaattcttta

SEQ ID NO: 255600 - DNA, 486 bp, Homo Sapiens
  misc_feature (67)..(189): n is a, c, g, or t
  misc_feature (380)..(380): n is a, c, g, or t
  misc_feature (406)..(406): n is a, c, g, or t
  misc_feature (414)..(414): n is a, c, g, or t
tgggttaaagcaattatcctacctcagtcttttgaggaggcgggactacaggcatgcgccatcatgnnnnnnnnnnnnnnnnnnnnnnnnnnnnnnnnnnnnnnnnnnnnnnnnnnnnnnnnnnnnnnnnnnnnnnnnnnnnnnnnnnnnnnnnnnnnnnnnnnnnnnnnnnnnnnnnnnnnnnnnnnntgagccacagtgcctgggcccatttatacttcatgagttcattttcaatttagaggaccaggtccagattaaacacaatggattaaaaagacttttaaatttacttttatgataatcattcttatttgatgacccataagcttgctagagctatttctggtactttagaaaaagcccgcatattaatatantaattgatttcttttcacataatggntaattggnacttattttcctccctatggaatatctaggcaatctgcaataacatcagtgataaccaactaattttcttgg

SEQ ID NO: 255601 - DNA, 582 bp, Homo Sapiens
  misc_feature (48)..(48): n is a, c, g, or t
ggaaaagaccaaaggataccaaaaagcaatattttaagatagtgaagnatggtgtaattattcagtaaatggttctagaaaaattggttgaccattttgaaaattagattattaatactgacaagtctcatatgaaacccagagagatacagatgaaattgagataccattttcttcctgagatttccaccgtgacaaaaaaatatgatgattattgttggtgaaggtttggggaaattctcaaacactgctggtagcagtataaattgctgtagacttttctagaggacaacactatgtacttcaaggaacacaccttaaggatttcctattggacaggtccttaaagataagaataatcattacagtattatttatgtaagtgaaaaactgatagcaacctaaatatatgccaccatgggactgcttatggtacattcatatagtggaatgctaggtagaaaagagatggagacaggaaagtcatgtttattgacataatacagtgagtttcaaaaaagtccaggattaatgcttttgtttggtttaaaaacctttatgtcggactgggcgtggttgctc

SEQ ID NO: 255602 - DNA, 585 bp, Homo Sapiens
tttcagaaaaatgtgggactacttccacagtgttcttcttataaaacatgccacagaaagaaatggagtaaatgtggttagtggaccaatatttgattataattatgatggccattttgatgctccagatgaaattaccaaacatttagccaacactgatgttcccatcccaacacactactttgtggtgctgaccagttgtaaaaacaagagccacacaccggaaaactgccctgggtggctggatgtcctaccctttatcatccctcaccgacctaccaacgtggagagctgtcctgaaggtaaaccagaagctctttgggttgaagaaagatttacagctcacattgcccgggtccgtgatgtagaacttctcactgggcttgacttctatcaggataaagtgcagcctgtctctgaaattttgcaactaaagacatatttaccaacatttgaaaccactatttaacttaataatgtctacttaatatataatttactgtataaagtaattttggcaaaatataagtgatttttttctggagaattgtaaaataaagttttctatttttccttaagtcccct

SEQ ID NO: 255603 - DNA, 2632 bp, Homo Sapiens
  misc_feature (1306)..(1315): n is a, c, g, or t
caaaatttgaattaactttatttcccctacagtcaacaacttctctgcattgaattttaaagcaacaaagtaaaataaaatcccccaaatgacaaggtatcagaaatccagacttcgttacactctatttgtgaaaatgttcagccattttattgttctgtaaaggaaccatcatctgggtcaaaaatgaattctataaatcaaagaatattctacaccttggaaaagaaaatcagcagtaacattctcactgaatattgtaaattacatttttcttcataaaaggtacatactattctgcacttttccaccaaaagcagtggtgtgttatgcttgttatataaaaaaaagttatatcctgtggcaggaaaaaccctttctctttcacttttactaaacaactggagaaaatgttcaagtctgtataaagttgcctataagctggaaagtgaacttgttcaatctccatttacattttagtgcattttttgacaattgtcacatttttaacaaaagtaagaaaatgcatatagcactaaagagtgtttcatcaaatgcttaagggattaaaaaatatggagcagagaacaaaatcattgtgaatggatgaactgttgtaaaatgaaaaaagtccaggcaaagttgttacaagtcttttgtcactttgatgagtcacagaaaatgaactttggatacctgtccactttaagggttttttccttaatcttttgcatgtaaacatagtgctaacttcagtactaagataccaaaactccgtcctggtaagcaacatcctgtgtagttgccatgatttccaaaaaatataaatttagcccttgaatgaatgatgtatgaaatctgctctgtaagtacctggtgaaaacgactgctaacagcagtaataatgtgtcaacataaaaaaactacttgaatcaattagctactcagaggtccatctttgaaacagcagcttcttctcagagcaaacagtaagcaacagaaaatatacatttgatgaaacattctttgcattagagaaacatgaaaataaatataattcaaggaagtataatgattcttctaatatgtctttctcagacctgtactagtttaccggttcaagaagctctcatcacattttgtcacttgtattttacatattgctattcgggtaattcaaataaaatgcaggtcttgtaaaagaataaaaacattgacaagtatgcatgtgccagggaccaaattagagggttctttggtgcagttagtccaaattctcagatttgaaggataatatgtaccaatnnnnnnnnnntctgctgctagacatttacagcagtgctctgtcttgcttcacattagaaatcgaaaacagctgttctcaacaagccaattttatttttttaatcaggcattgccagaaaattttgtacattaacctggaccagtgatggttctgtaccctctttgctgtgaaacacgacatgagctaaaggcaaagaccggttctcacaaggacaactgcttcaagttaggaaccagaacagtgcatttaaacagtcttcttagatattttcttgcctttcttaaaaaccagcttatttttaatgtagccacgcttccttttggtagtcttctttgacaaatacttctgttttgggaaaatgttggtgactcgaggtttgtgatctaatgtctccctgttatcaggtgcttttactttatatatcctaacaagccagtgttctgatgtaaaggcttcttccaaatgtttgaatttaatgtccttatttccaatctcagcattacgtgttcggtcaaaacctgggggtgtacgaaaatccagctgcatttctccaaatctgtagtatgacattttatacataaggcaattcaacaaagtaggggatcctgctttgtctacacggaattctccctgtggggtaaaatagtcactttcccgaatgtctttgggatgttctccttcagctatcctaaccatccagagaaatttgttgatatcatcaccagaatagccaataacccctccaaaaataaccaaaacataatctacatctagagtcctcatgattttataggctgctgtttcattagaagacatagcttttcccaccagtgctatgtggctgttattccaggtgttattatccaccaacgtagttctattagccattccagctatctgatagccataatcccaccaagacattactcgtgcatgttcatctgtattttgccttagccaaaagtaagcttctctaaaatcatctaagatattcctggtgccatcatgattgtatgaggccaggactacacttggactagagtaggcattgcttgtgacccaggtacagtggacagcaaacatcatcaatagcatcagcatcaacatggtgacaatgctttttatattagggcctaatccctcttcagttttttcctgttcagttgcatgtttcctcactttacctgccttatcatacaaatttccttggtttcttttgtcatcctcatcactgctgtcctccacaggtggattttccctatttcatgtcatcccccaaatagtgctcaaaaacatttgaaaaggcaattgcagacagcatacaca

SEQ ID NO: 255604 - DNA, 799 bp, Homo Sapiens
  misc_feature (145)..(145): n is a, c, g, or t
tcaccccgggtcaatctcgggcgaattgggccagagcttggattaaaaagttctccggggtggttaaaccaaatcaaaagttaagccatggaccccaagagaaagtgtttctagaaggtgcattgacagcttataattacaggcncagttcccttgcacaacaatgaaggtccttgagaccctcggcaggttagccacagtgggttggcgggagtgaaagtcggcttggaataacttatggaccccgtgaaggtcaggatgtaaggcgggaattgcaaccccctctttgagaagggttgcctgactcagagacacagatacaggtccaggcatgggaagagatgtgcagtgaaggaaggtttgcatttgagaaaggaagttcgagaacacactgggacattgtaacacatttgagccatcttctgatagaaaggtgttggcctcctaataatgggaggtcagggccaggtcctcgggcatagggagagggtccggagaatgctgcagacccctgcccactgcccacggtctccgctccctgcacctgcctctgatggtgcagctctgattccgtgtctctcctcattgcagatttatgaaggtgcctaccatgttctccacaaggagcttcctgaagtcaccaactccgtcttccatgaaataaacatgtgggtctctcaaaggacagccacggcaggaactgcgtccccaccctgaatgcattggccggtgcccggctcatggtctgggggatgcaggcaggggaagggcagagatggcttctcagatatggcttgct

SEQ ID NO: 255605 - DNA, 795 bp, Homo Sapiens
  misc_feature (653)..(661): n is a, c, g, or t
aaagatccattttagagtgctaaaaacctctggaaagcactttgctttcatgggctcacccatgaaaacctggcatcccatcctaaggaatggtctggttgttgcttctaatacacgattgcagctccatggtgcaatgtatgaaagtggaatctttcttaagccaattgccaagcatatcattgggttacccaggaatgaacaagaaacaaaaggttgtcagccaaggacgaaccagcttcaagcagtaaaaacagcaatacatcccagtcacagaaaaaaggacagcaatcccaattcctgcaaagccgtaacttaaaatgcatagccttatgtgaagtgatcacctcatctgacctgcacaaacatggagagatatgggttgtccccaatactgaccatgtctgcacacgattctttttcgtctatgaagacggccaagtgggagatgcaaatattaatacacaagaaggaggcattcacaaagagatcctccgagtaattggtaatcaaactgctactggttaaaggaccaccatttaattaacatgattcgaaagccttcctcgggttcaaagctggattttgaactgaagaagattataaaattatttattgttattataaacaaaattaaccctttgaaaactgannnnnnnnncttagtatttctaagtatctcattaaatacctaaaatggtataagatttatcaattgtagggttatggaatctagtaataaaatttcaacagcacttaaactgaagtttgggttgctcatacaataaacagatt

SEQ ID NO: 255606 - DNA, 1199 bp, Homo Sapiens
tgaaagttgtgtagtcatttatgtgcaaaatgaggtgactgtggcaaattatagagcacagcgtattattactgttgccaggattttctgacttgatttctgtaatttccagaaacccagacttctcatttccacacctagagatggaaacaggcaagtaactgacatgtctatttccttgggagcatgtgagaacatagcagtagggaccaaaagtctcagcacacttacctccgattatgccttaaagagttgattgtgaagaaccagtaactttgtcccaaatgcttctttggctgtttcatgcaggacttaattattgcttttaaaaattcacaatgaaaagacgattctgctgtatttgtaaacgttgacatttggttctagggccttgagtatgtgccacgtgcttgtgaaatgctatgattcacatgtaacatttaaacattaatttaaaaagggaaccttggagaattcttttgttcactagttccttttttctctacatttttaatttattaaacttgctgtgaaaacactttgattttctaagaggaaggtactttaagttccaggattgaacatgtagctgcactatgccagaaattaatgagggaagactttcttcctaagtgcttatgttttaacttatgttagtgaaaccactacaaggtgtttcaggcgctgataacatgcttcacacctgcccttggaggtcacagtactaatttacttcaaatttagttatgacagtgtcactgtatcctagttatgtttacagcacaaataaataatgactgtcatacatccagaggagaccgaacctgcccagctgatgtactgttttatggaataaagtcacttgatcagaaggaattgaaacaatagatcattttgttacctactggagggatttttgtcttgaatttgtttccttagaaattctacaaaaaaatgttgttaataaatgtctgctttgtaaaagcagttttgcaattttttaaagatctatttctgttataatttaggttctgcagaaatatgattcttaattgaaacatataatttgcttaattacgtgaataatgaaatgtaaaatccgggtccataagcctttatttcatacagtcctaggattaagctgtttaactgcttggatcccagttggtctctggcagtgggatcctggagaggagaaa

SEQ ID NO: 255607 - DNA, 415 bp, Homo Sapiens
ctgttatgtacttagtgttagagggtcaaaataatctttctgcttagcatctcttaaaccatacctgcaaatatagcaggattattacatttacagtactttaatacttgtataaactatgcagaaatttttaataaagtgtaatatattttataagctaataagactgaatgggtaaaggtttttagcatgcgttagtatacttgcagatactgaaacattttggtaatctttcttactaaagatgtgaatgtttaatgtaccttctctgtttctactctgtagtccaatgggaattcagtaatgacattttgtcatgtcaaactgtgaacataaatttgtactgtacagtcctcatatactatatacagtatgcaatatatattatatacttgttaataaaaccatcagaatt

SEQ ID NO: 255608 - DNA, 625 bp, Homo Sapiens
  misc_feature (303)..(323): n is a, c, g, or t
catgattgctgtctttctcaactgatataccatgtgacccaaagtccccatcctaaatcatatacttggtctttctgtcctggccagcactaccctgaattgtctcattagcaacaactgtcaggtttggtgaacatacccaccatgagaaacaaagattcctaccaggaaattccaaggatttagaggttcacctcaggagctgggacaaaaggcagaactcttaggataaggccaaattccttactacacaagcagttaacatttttttaaatattcacccccaataggtaaaatactgannnnnnnnnnnnnnnnnnnnnccattctagaaattacagaagacatccccgtgaagactttgaatatgaagactgtgtatgtttctgtgttaccaacaacagcagacttctagcatgtacttatcaatgttgttcggtcagcccttccctaattacacctatcccctacacatacatgcacatagacacacacatgaacacactgaagatatttccttcaggtgtgtgtagacctcacagtaatcttcacacttaaccttagacacctatgcagtcatgttgggagcaagttacaatggtactttaacccacagtttatttct

SEQ ID NO: 255609 - DNA, 2845 bp, Homo Sapiens
  misc_feature (57)..(57): n is a, c, g, or t
  misc_feature (2525)..(2618): n is a, c, g, or t
aggcagggctggtccggtcgcaatgctcgggatatcgtcgacccacgcgtccgaatngcacagctccgtgtaaatggcacttcctacagttgtgtagtgggcagtcttggactttgatccacacatactggagttttggcttttctcactgaccaatgggaattcgcatgtggctcacatggtgatttttttgtgtgcacccctaaacactctgactgccatgtagcacatcctcaacaaacagtcattatgtgattgattcatttgggttcttttctccttagtaagtggaggcacttggatggaaggagctgccccttctttgtgtatccaagcctctccccaccccagatgcctggtaacccacttgctgcctgattgacttgtcttacttttagcttataggctttatactgtggtgcctcgcctggtcaagtttgtagatattctgaccaattggtatgttagaatgaaccgcagaagattaaagggtgaaaatgggatggaggattgtgtcatggccctagaaaccttgtttagtgttctgctttctctttgcagacttatggctccctacacaccttttctcactgaattgatgtaccagaatctaaaggtgctgattgaccctgtttctgttcaggacaaggacacactcagcattcactacctcatgctgccccgtgttcgagaagaattgattgacaagaaaacagagagtgcagtatctcagatgcagtctgtgattgaacttggaagagtgatcagagaccgaaaaactattcccataaagtatcctttgaaaggaaattgtggttatccatcaagatccagaagctcttaaagatatcaagtctttggagaagtatatcattgaggaactcaatgttcgaaaagttacactgtctacagataaaaacaagtatggcattcggctaagggcagaaccagatcacatggtcctggggaagcgtctgaagggagcctttaaggcagtgatgacgtccatcaagcagttgagcagtgaggagctggagcagttccagaagactgggaccattgttgtggaaggccatgaattgcacgatgaagacatccgcctcatgtacacctttgatcaggccacaggtgggactgcgcaatttgaagcacactcagatgctcaggctttggtcctcttagatgtcactcctgaccagtcaatggtagatgaaggaatggctcgggaagtcatcaatcgcatacagaaacttcgcaaaaagtgcaatctggttccaactgatgaaatcacagtgtactataaagcaaagtctgaaggaacatatctgaatagtgttattgaaagccacacagagttcatatttaccaccataaaggctcccttgaaaccatatccagtttctccatcggataaagtccttattcaagaaaaaacacagttgaagggatctgaactggaaattacactcaccagaggatcttcccttcctggtcctgcttgtgcatatgtcaatcttaacatttgtgcaaatggcagtgaacaaggtggagtattgctcctggaaaatccaaaaggtgacaataggttggaccttttaaagctgaagagtgttgtcactagcatttttggtgtgaaaaatacagagctggctgtcttccatgatgaaacagaaatacaaaaccaaactgacttactgagtcttagtggaaaaacactttgtgtgactgcaggatcggctccctctctgatcaacagttctagtactcttctttgtcagtatatcaacctacagctcctgaatgcaaagccacaagagtgtttaatggggacagtgggcactctcctgcttgaaaacccacttgggcagaatggactcacccaccaaggtcttctgtatgaagcagccaaggtgtttggccttcggagcaggaagctaaagctgtttctgaatgagacccaaacgcaggaaattacagaagacatccccgtgaagactttgaatatgaagactgtgtatgtttctgtgttaccaacaacagcagacttctagcatgtacttatcaatgttgttcggtcagcccttccctaattacacctatcccctacacatacatgcacatagacacacacatgaacacactgaagatatttccttcaggtgtgtgtaaaatatgctgcttggattgaaattcaaatgggattgattagtcaagtaacttgagacctcacagtaatcttcacacttaaccttagacacctatgcagtcatgttgggagcaggttacaatgttacttcagcccacagtttatttctatacttgagttcttaagtacagaagatagaagtgatttaaatggcatagtatatatatcattttctggccttttaaaatttatttgagacctcttgatgaaatggacatattatatatttctgccacctggattttcctggataatttgatggaatattttaagtttcagtaaatcagaacaataaacaaactcagatataaagaaccannnnnnnnnnnnnnnnnnnnnnnnnnnnnnnnnnnnnnnnnnnnnnnnnnnnnnnnnnnnnnnnnnnnnnnnnnnnnnnnnnnnnnnnnnnnnntatcctgtaggccctttgggtgggggcgcctttcgcccccccgaaaaaactttttctcaaaactttttcttttggccgtcgcgcggggccccttcccgcggttattgggacaccctgtccccattccgcttgtttcccccagggagacaccccgcggtcaagcaaattaagcgggtggggaattttctcccccaaataaaaaacactccccgggtgctaacacttta

SEQ ID NO: 255610 - DNA, 610 bp, Homo Sapiens
  misc_feature (22)..(22): n is a, c, g, or t
  misc_feature (135)..(135): n is a, c, g, or t
caacccaagccgggaatttatnccaggtcacttctgagtgtagccttaaaatttgttttcctttattacaattgttaatctccatgtattcactgtcagaactgtgcatttttatatttaagtattttttccctntgagtttctctaaaatgttttctcatagaagtgtttttgcatctttaacaaattctgcttcactggcttttttcttttaaaccttaaattttcttcatggttctgttctgtctcttctcttccttctctgcacactaagtggtttcatctcctctaatacttttcatgattccatctagtatctgtacgtagatgatctcagttatctctcaaggctgaatctcttttaagttcttgacctttgtttctaattgcctaataaaaatcagtttacttcaaacttagtatcactaaaatagaactactctcacatcacttcttatctagttttcatatttctgttcatcgtaccaaccacctctcagagacaccttagcatggacatcatcatctttgactctttaatgttcccccagccaaatctgctcagtttgccgggtcttattttaccttggtaatctctcttgaatatatg

SEQ ID NO: 255611 - DNA, 1319 bp, Homo Sapiens
  misc_feature (460)..(473): n is a, c, g, or t
  misc_feature (986)..(986): n is a, c, g, or t
gtcactgaaaattcttactcagaattaatacctgtccagagggaaacagcctgttataaaagctttctgttaatatattttttaaggcaggaaaacaatcattatttccaaacacactttgtttgtctaattctaggagagaatcaccaatttcttcaaggtccaaaatgatcagaacaagaatgacaacagtgtcaaccaaatgatgcctccaactccttttaatgattgtgccttggtacacatttcctcaaagataatggctatacttttcccacaatctttttgcttttgttttctcccagtgtggtactcatggagtatggaagggacataaggtttagagaacataggaagcaatttgcttccatcaataaccagaatgatggattgacataaatcagcacaaaaagataagtgtaattctattcaagtcccttaatgttttgccaattaaggnnnnnnnnnnnnnngaaacaacaacagtgtaatctttaacagggatgttaaaggtaagaagtcaggaagataaaccaaaatgattgagtatgataaagaattttgcatggcgattaaaatagaaaacctataaatgtagaaaaagcaggtctggacttagcaaagaaacaatatagtttggagaaggcatgaaataagttcttttcatgttcactgctggtcacagccataacagagagtgatgtggagagctttgggaaggtttcacgttgagttacatcagtggtcaacaatggagcaacaagactccgtagaggatgccaccctgggagaattgcaagggaaaggaggctgaagcacaactggtaatagccttcagatatttaatggatatgcaaataaagctctgattaattgtattttcacttattatatatcatctttggacctttctaaaagtgggacactagaaaagatatactgaaactcaaaaagaatacttcagctcgagttgaatggaattcaangatgttgtggagggttcagtgggttggttataccaaaaaatgctatagaatttccatgccccaagaactgtgagaggagtatagattttttcaccaaggaagttactggcatggtttgagagatagaaggaattgattaagaaacctctcaaagtttcttccacttaacctggctctgagactctgggtctttggaaatgagaaaatacccagggaagagaaaacgaacaatttaagaagcaggaaatgactctagatcagtatttctattacagccgtttaagacattttcttcctaatcatctctcccttgcaccatcaccatgaaatttt

SEQ ID NO: 255612 - DNA, 472 bp, Homo Sapiens
ccttaaaagccaagccctagttcgggtaccaataattcttcctttccatctccggtttccaaaaccacaggtttctaaaaccaccaagaaattttcacccggttaattccgttgggttttggttccggttttttggtcaagggtaaggcccaagttgacactgagtattctctgtaaaactctcaaaggagcaacatgtgatttcacagaaataagtctcgatacactatattcatggctgtaagttctatgctgctcacccattcatttgtccattcagtcactcattcatgagacatttatcatctgcctcctggaacataccagggcctacaccagaaaacaaggaaacaagtaaacactagtaaactttaaacaggctctccccacaagcaactgacagaccagtggagaagacagatatgtcaacagatgattacaataaagtttcaaggccgggtgcggtggctca

SEQ ID NO: 255613 - DNA, 339 bp, Homo Sapiens
tatattcagacacgattacaactttttgactgtatgatgcatttattgggaggtaaccccatggtaagtcaagaagcatctgcacacgggaggggatgtatgtagagccatataaaggatgcaggccccttcctgaatagggaggccatctgtcatctttatctttaaagcaccatgcctggctatgctggtacctaactgattaagggttggatttacaagggcactctctgtccacgtttaaggtaagaggcattggggtaccgggccttaatgcttgcttcataaatcacaacatagactcgggagtttaaggatttggagaaacaatcgtttgcg

SEQ ID NO: 255614 - DNA, 678 bp, Homo Sapiens; identical to SEQ ID NO: 60326
  misc_feature (439)..(439): n is a, c, g, or t
  misc_feature (516)..(516): n is a, c, g, or t

SEQ ID NO: 255615 - DNA, 822 bp, Homo Sapiens
tgtccggatcccagccggaatatgggcccttctgtggaagcgcccatcccaagagctctgagggcaaggaaccagcattctgaagggaaagctttgtcctggtcattccagagtgttaaggcaaggcctaatggtctaaaagcctcattttctggtttggcatggtgagtgttggggttgacatttagacctttaagtctcacccattatctggaatattgtgattcggtttattcttcaagaatgctgaactcctggttagcccttcagattgttaggagtgattctcatttggtctgccagaatactgggttcttagttgacaacctagaatgtcagatttctggttgatttgtaacacagtcattctaggatgtggagctactgatgaaatctgctagaaagttagggggttcttattttgcattccagaatcttgactttctgattggtgattcaaagtgttgtgttcctggctgatgatccagaacagtggctcgtatcccaaatctgtcagcatctggctgtctagaatgtggatttgattcattttcctgttcagtgagatatcatagagacggagatcctaaggtccaacaagaatgcattccctgaatctgtgcctgcactgagagggcaaggaagtggggtgttcttcttgggacccccactaagaccctggtctgaggatgtagagagaacaggtgggctgtattcacgccattggttggaagctaccagagctctatccccatccaggtcttgactcatggcagctgtttctcatgaagctaataaaattcgctttctaaagttaaaaaa

SEQ ID NO: 255616 - DNA, 571 bp, Homo Sapiens
ccatttttcctttgtggccctgggaactttccccgccttgccacaaggtacttctttccctgggaaggtcgaaactttaaaaaagggtatgcctgtaaagatgccataaatgctccaaatatgtcatctgttaatatttccaacagtaacatcatctgaatcatcagtattgtctgcttttaacagctgcatttttcattgtcccaaatatagtcacatacatttgaccattttataattattgaataataaattcgttctgctattttacaatgaaaaataatgctgcagagagcatttttgcacatgtatcgtggcagatgtaggccagaggctcttcttttatccatcctatggccaacctatgaatgtatacacgtttaatgagattttgccagcaatcaaagccttcagggaaaatgtccctagctctttactacatcagatcaaggactctggataattggcataacatcctggaatagctgaaacagagatattattctctgctctcctctgttgtctttgtcttttcacgtcttaataaaagtgctggtgacaagagtgaaaa

SEQ ID NO: 255617 - DNA, 540 bp, Homo Sapiens
ttcctacccatgctgttggcagggattaacatcattgcaattctctgggtagaccttgagaggttaaaacaaaccagtgacccctatcatcctagctccagagattggcttaggaatagtcacccaatgcaggcaaatgcaaggtgactttgcaaggggcttctgggaaagaagtttcctttctctgaggaaatgtgaatgaggacatccataactcaggttgtgtctggcagccatcttgtgatcatctggcaagacagcccaagaataaagccgtcaccatggagactaagaagagacagaaagacactgggtcttcattgtctcgtccagctgttcatgaggccttatctgaagcccacgtgacctccggactactcacttacatgagagaataaagctcttttttgtttagaccaaataaatacataatacaattacataatcccttattcctttttatgactgagctcagagactatattttgtcattttaaatcacctttgtctaacagtttatttaactgaaacaaataaaca

SEQ ID NO: 255618 - DNA, 967 bp, Homo Sapiens
gggaccggtctggaattacgggatatcgtcgaccacgcgtccggtgagtgtgggaagagcttcagcaacagctccagctttggcgtgcatcaccgcacccacacaggtgagagaccttatgagtgcactgagtgtgggcggaccttcagcgatatctccaactttggagcacaccagcggacccacagaggggagaagccctaccggtgcactgtgtgtgggaaacacttctcccggagctcgaatctcatccgccaccagaaaactcacttgggcgaacaggctgggaaagattccagctgaaggagagccccatttagagtgagggagagagagtgagagaccctaacctattggaggaagatcttcagcatcttttgctgctaccttgacctcaagcccttcatcccactttggagaatggttttgtatagcctctgaagtcaggatctcaggaagtcctgaggagggactctggaataaaaacccttgcctctttccaggccaatttctcgtgttggaaagtcagaagacccagtcttggctttactttcttggggtgaaagagaaatagggtaggctcagaacatgctcatgttattaaggcagcagtccccctggcctttgaggaagtacttatgagatgggtgtcactgtctgaaggttctccaaattgtctgtgaactgcttaggtaggagtgcactgcagtttcctgctagttcccacctgttgtgccccaactttgcttctagatctctggggtgggaggagtgaccttctcaatggaaggggcctccttggtctggagaagagatctgaggtcccaccttagaaatgaaagggaaaccctcagggagccatgacccagggaccttcacactcccccatgtttgttacttgttatccctcccccaacctgcctctgttttccccagagtgattagcagtaaaacccttcaatgtaaa

SEQ ID NO: 255619 - DNA, 719 bp, Homo Sapiens
  misc_feature (27)..(27): n is a, c, g, or t
ctaaccttctaagcatttgggggtggngggaaataccccaagacaaggtgttttttaatttgaaaagagaggaatattggccgggtgtcaagtttgttccaaaacaacgactccaaagtaaaagcgcttggaacccttcctattgtcccggaattacaggcattgggacctggcggccatccctttgggtttttttggcctggaagcccaaccgccaattctccccctttcctggaaaaattttgtttcataaacacatattttccccaaacgggtctattttactcaataaatcatatattagacccgcctatagtcaaataatttttgttaaaccataccgtctttagaccagctgtgtagtgattagtcgcaatatgtctcaaaatgtatgctccaagcactctcatccattttagcttgatgcacggttttttcacatagcttaaaaagatgcgctcttgtacatagttctggaacgtagcttcattctccagataactatcatggacacactttagggcgcttgtttcaggtaggggtgtatacatcccacgggagtggagatgagcactccacggagcaagtagaaagatgatttctttgtatttaatctcatcctatttaattgcgatttttgtgtgttttataatgtacataatatgttgaacaattgcacacttctattacttataaaacaacattaattggtgcatcaa

SEQ ID NO: 255620 - DNA, 749 bp, Homo Sapiens
gacatgcatgagccaccacacccagtttggatcaactttttgccaagaaattatcctgaggtagcaataaggtcgtgttgaattttataataattctaattttattcaacaacaaatttaatttccaatatatatggtattcttcttttagagcataatttaaggaccactattagaaagttaaatgaccaacaaaatcagtattaaaatgtttgtagtgaaagagcaatttattacacagatgaagtagctatgctcctcagattatgccttgctattccaggaccagtaaatatagtaataaagctaatatcttaaccaagggatagaaaagaaattatggatgtctacagttcttacactgcacttgattagaagaacaaaaatattctaacacgctgctctatgaaatgaattctcaaaaaagaatggggtcaggtccactatttccaaagggaaaaagggacaactgaataaaaactggaggaaaaaatttctaattgtaataaattttaaaattcttattgaaaacccaagcctaaggttatcatctactacataacacaacacacacccttcccacaccccttctaacatgtatatcaatatacttttcccaaaagtttagattagaataatctggacagttcacatctaaaaggaaaatggaaacaccctatcaaaactcttaacaccgtgcacttaagcattattctggcttcaaaacagattaaccgaaggagaaggtt

SEQ ID NO: 255621 - DNA, 1249 bp, Homo Sapiens
  misc_feature (765)..(768): n is a, c, g, or t
  misc_feature (770)..(770): n is a, c, g, or t
  misc_feature (773)..(777): n is a, c, g, or t
  misc_feature (782)..(783): n is a, c, g, or t
  misc_feature (795)..(795): n is a, c, g, or t
gggccttctcgcctctcactccgcagcacttgggcggtagccagtggccatgtgctcccaaccccaatgcgcagggcagtctgtgttcgtgggcacttcggctggaccccatcacgatggaccgatgttccctttggaccctagggcctcaaagggtgtgcaccttggttctcccttctcctccccagagttccccggatgcaataactggctggcgtcccagaacacagttgttcacccccccaccagctggctggccgtctgcctgagcccatggatgctttctcaatcctaggctggttactgtgtaagcgttttggagtacggggccttgagcgggtgggagctgtgtgttgaagtacagagggaggttggggtgggtcagagccgagttaagagattttctttgttgctggaccccttcttaaaggtagacgtcccccacccggagagacgtcgcgctgtggcctgaagtggcgcaagcttgctttgtaaatatctgtggtcccgatgtagtgcccagaacgtttgtgcgaggcagctctgcgcccgggttccagcccgagcctcgccgggtcgcgtcttcggagtgcttgtgacagtccttgcccagtatctagtccccgtcgccccgtgcaggagacgtaggtaggacgtcgtgtcagctgtgcactgacggccagtctccgagctgtgcgtttgtatcgccactgtatttgtgtactttaacaatcgtgtaaataataaattcataatgacttctannnnanacnnnnnccccnnacaccccacaanaaaaaccccaaaagcgggcacgccgcgagggtcccccgggcccaggcggcatcgctcgcccccggcgccgcggggaaaacgcgacgggagcctcgcccgggcgcgcggcttcgccgctggagaaggctcgccgcccccgccctctccggtggggccgggtaaagccgccagtgccggtatgcccctcccccgtctgtggcggcgcgtgaggtatgccggcctccgcgccgccgctcgccggtgacagggagccgcgggtggggcgctgggagggggtcgcccccctccccggggagagggagcgccggcgccggccgctgtgccgcgagaggccatggtgatggccgcggcggtgctgctctaccataggaggccccgggggcgggccgcgcgggctggatgaatgcgccggggcgaccatatactggcggctttgggcgcacaccttcgacct

SEQ ID NO: 255622 - DNA, 1318 bp, Homo Sapiens
  misc_feature (164)..(172): n is a, c, g, or t
  misc_feature (200)..(215): n is a, c, g, or t
ggggggcgcaaccgcgagggctgtgtttattgaaacgagcgggggtgcctcagaggggcgggttggtatgttgttgggagggaggcacaaagtttggtggccgggcgggtatttatttgggagaaaatagggggaggtactgggagtgttttattagggtgggnnnnnnnnnacgaaaggtggtttaagagatgttgttnnnnnnnnnnnnnnnnccgcaaggagggaagttttggtgggcgtacgtggttgtggggggaggatgggatttttgcgatgtgtggggggcggtggggggatggtaaagtgatgggatataggagggccggagggtgggggaacgcaccatctgggacgaaagatggggggggtgtgaggggaggttagtgttgagggggaaaggattggtttttggaaacataagtataaatttactatccacctagtggtagctaggtaaaattgcaggcataaagataaaaaagaaatcatcaactttgtagttcctcagcttcaaacccaaacctgcaagggagaggagagacccagacgcctcagggaccaggcagataatacaaataaatgaaacaggccaggtgagagagtacaagtcttgccaaaagaagaaacccctacttagtttcaattgattgtcctcttctgaaaatgcagatcagaattgccacacattttgaccaatcgagagaggccagaaattctaattttaatgtgaaacctcttgatttcttagacggtggctcaattttcttgaaaacactaggtgagctaaataaagctgacagtccaccagttttcaatactcctcttgcagagagtgaatggcatctcccctaactgtagtattagaactgcactcaccagcacagtttgcaactgcaaaagaggcataaactgacggggatctcctgctttactatgcacacacagctgaactctccagccatggagaacaactaactctataggaaaaagtagaaggctaagttgagccatccagggatggcggcaggggctttcatggctagctgctggcctgtaggcactaaattgcagactgctcctgcaggaagccttcagggcttgggaggcctttatctggctcagaagctagggctgcttctcgaaggacttccaaatgctcctcagcagccgacagagattggtcaatccagtccaggcctcccgtcagatggcaggcattccttgtcaccagcaccaggtgaatgacagacaggagcagggcagtcgtccgtgcgtccaggagtttggggtccaacggagggtacatcgtcttccc

SEQ ID NO: 255623 - DNA, 731 bp, Homo Sapiens
ctatggggttatttaaatgccaaaatattttaagtcatatataaaaatacctaatatggtgaatttaatggattaccataaaaaagacccagaattgaaggtagaatgatttttaatattaataatatagtaaaatgaaccaagatgggttatcaaaaggttgttccattaaaacctaagagagttcaattatttctttaatcagattaattgggaataaatgccaattttcttatcaaaaccatttaattttgaaataattcaatagttaatatataacctagccaatgtatatttcagggtagtattgtttttctataaatatgttctagtgacaatctcaaacaataaatttagcttttgcttccatttttgtttctggatggtgtatataagaagaggaatatacaaaacacttactgaccaagtcttgaaatagttctcattgatttaagaataaatttgtttaagttaaccggtagtatctaaagatagatttcttgtgtaaattctaaaacaagaacaataatgagttgaagattctgacaaacttgaaagtacaatgttatttttgaccagggttattgtaatagtattgtagaagagcattactgtttctacacatttatgaggaagttgtatattttatttttcttatgcatgagatttcaagaatgtaccattagtatcgacacaaagaaaatattaaaggcaactttagaataacaaaa

SEQ ID NO: 255624 - DNA, 718 bp, Homo Sapiens
ttttttttaatgtactgttcttctagaaaattagcacaagatactatggaacaaacatgttttgaccaatgctgagctaagggagcttcacatgaaagcctacaaatatgaggaggaaaaacctagccacggcacatttccaacaatttcttaataattcctcttttcttaaccacagaaataaatcagagcctttaaaagttaccttacagataccagcttctcagaaattattttgcagttacgtgagagtatgtgccttcacaatgtcagcaccaacatctttagtattttaagaggaaaagtcaagtccactgaaggaatttaacagatttttccagaaacacttaagacatctataattaggttttaaaaggagtgacagaatgtcttgaatcacaaattaatctgaattcaggacaataataactttaactcttacccacttttataagccattattcccattaatggctgacaatctatatttcccaatttccatgccaaatgagctgagcttccattcttttgaggatgaaaaacagaatgacttctggaggatctgctatttgccagtatatcagttaacttttgctggctaacaacttgctaccaaaacttagtggcttaaaacaacatctatttgaactgttagaaggtgatagaccattatcaatatgtgaaacaaacaaaaaacacacggctcaacttatcggtg

SEQ ID NO: 255625 - DNA, 640 bp, Homo Sapiens
ccctttaaaaggctcggcatccagtgtggaagaccagcacactcacgtcaggagaccttacctggagccaggatgcccctgatcatctctgataactttaaaaggaaggcctcagaagcagccccagaagcaaaaagttctctctgaccttctcctgccctcttgtttctggcttttcattctcccccaaggctacccatagaaactagaatccctcttccccaaggcaggtcatcagaaaccagaaccggttttaccccaaagccagccataaaacctaaaaatagtcctctcactccccattcccctttctgtgtaaaaactggttggaaagaaatgatctgacctaccgtgtttgactgtcgtaagatacccattccagagagggtcccaccccgtgcccagaaggaaggaatcctgcacagagaggccaagaagaatctagacagccttgctgggtttcccctctcagtctattactattagatcatacccttcttgtccaatcatatttctacacagtccataatctgttgaacctaaacataaaaatggacaattcccctgtatcttggggtcttcattctgagggctcacatacaattatgatcaaataaatttgtttgctttttctcctgtt

SEQ ID NO: 255626 - DNA, 884 bp, Homo Sapiens
gggtaataatgaggctccagttgttcattcattgtccaatggtgaagtaacaaaaatggttctgaatcaagatgatcatgatgataatgataatgaagatgatgttaacactgcagaaaaagtgcctatagacgacatggtaaaaatgtgtgatgggcttattaaaggactagagcagcatgcattcataacagagcaagaaatcatgtcagtttataaaatcaaagagagacttctaagacaaaaagcatcattaatgaggcagatgactctgaaagaaacatttaaaaaagccatccagaggaatgcttcttcctctctacaggacccacttcttggtccctcaactgcttctgatgcttcttctcacctaaaaataaaataaaatacagtgtacagtaaccttttagtcaaaacagcatcatacttggaaactgaaagcctactgttatttgttattgttgcttaacagctgatacaggtattctggtgacactactgtgctggcttacttaacctgaatacactatttttttcgttgtattactggtatgtcattttttttactgttaagtacttatgtgtgaataagtgtaaaaaaatgattgcttatcggtaacatataaattcagaatcaggaatgatggtgatgccaaacaatcacagatcgtccacatgggtggcggagatgttaacaccttttgctttctaatggttcagtgtatcccacactttgtttcatgccaaaaattatttaaaatattgtatcaaattaccttcagtctatgtgtataaagtatatatgaaacataaatgaactttatgtttaaactgggatcttatcctcaagctatctcattgtgtatgtgtaaatatttcaaact

SEQ ID NO: 255627 - DNA, 709 bp, Homo Sapiens
  misc_feature (119)..(135): n is a, c, g, or t
  misc_feature (593)..(593): n is a, c, g, or t
ttttaaataaggggcaagtttccaaagatcagtgtggagtgctacagaaataattataggagaggaaatcataatcacagaaggtataatgcttgtttgaggctccggaataagaactnnnnnnnnnnnnnnnnncactggtttcatgcttacggggtacacactttggtgcatcccgtgaacacaaattttaataccaaacaatccttgatgcttcacctggggctgccaagcagtttgtaaaacagaggaaaacatttagtgcagtctgtattatccttttccaacttttctgtttgtgcaagtttttgaagattcattggccaaacaatgaacaacaaaggttttctgagagaagacaaggtggacttttcattttgttagtaaataccagtggcactgttgaacgaaacaaatacttttatctcagtctttcaaatcagtattaatgtctgtgtttccttccactgacagctcttcttctagtttcactgaaaaaagggtgttagtatttttatcttggacactctcttccaaatccttcagcagctcctcttctttatattctgccacatcgacctctaaaaccgaantgtccttcagtttgccgtggtgcttgagatagtaccgctggtcctgaaaagacttgatgatggtgtacttgggaaagtcgagcctggcaaaacagagtctggatggcctcttcgta

SEQ ID NO: 255628 - DNA, 770 bp, Homo Sapiens
gtgtgatgtttacaccagcacttaaatcaatttactgtaatcagatgattaatagcattcatatgaagagagcatatggcactaaaacaccagaatctgccacagtcctcttctccctatcttaacacaggaaggcagtaggcaggaattgttagaaaaaagcacaaacacacaacgattgagaatccttgttgggccttgaatttgctatgggagtcctgcttttaggatacttaacatttattacagcttcaatttccacatctgaaacgaaggtaggaggcagtagttttcaaagcaaataagaattgcggagatatacatcaaagagataacttggcagagatttctactgaattccctggcagagggattcctggcctaattctggaagggccacaggctccccatgttgtctcacacaagaaatttatccttaattacctgcttcattttcttcatttgaaaaataaaggaaatgaaggttggcaaagcctgattgaatagcccgaaaaagatctaaatttggcaagattcagagccaatcaccctccattatagctcttaaccagtttttaatacaaatggaatagctaaaacttcagggccctagggagagggggcaaaacctggcctttagaatgtaaagtgattttgagggagaacataggaatacaaggggttaacttacacattggcacaggtaaatcaggcacgaaagaacctttattgcccggtgagggaatgtgtccaggataaaaaaagggaat

SEQ ID NO: 255629 - DNA, 670 bp, Homo Sapiens
  misc_feature (16)..(16): n is a, c, g, or t
  misc_feature (39)..(39): n is a, c, g, or t
  misc_feature (80)..(80): n is a, c, g, or t
aatgtcgaacaaatgnagaaagttgcaggtggggctagnaaagctgtattcctgtggattactctagctggtcatttgcnccgatttgtgaactgcttgaaagaaaaacgaaacttctaagatgtttgtcctttcatgtcctttctgtggggattttttatttggtgtgcgtgaatgaggagcttcgccctgcttgaatgggacccctctcagtggtgtcagcttggggaggaggagatggccctggagactaaatacttgtatgctttcttaccctcttaggtctcagccttagatccaaggacagtccaaggaagtcctaagaccatggagttggtgatctgggatctgggtttgctgatatttctcaccgtgaatctcttggtggtgtttgtgggcacgagaggggcagagaatggagagtgaggctaccacatgaagcgtcaccagagctgctccctgctgcctgctcagagcaccccggatccactgttcaatctgcacaagattcggggtccagacatgggagacttcagctgcctcagaggaccgtggacagggaaggccagcctcgcatccctctgtccatgcctggaatgactttaataaccaagagttttatttttgaatttgtagctgtcgttcactttttacccacccattcaataaa

SEQ ID NO: 255630 - DNA, 634 bp, Homo Sapiens
  misc_feature (64)..(64): n is a, c, g, or t
  misc_feature (260)..(260): n is a, c, g, or t
tggtgtgcgtgaatgaggagcttcgccctgcttgaatgggacccctctcagtggtgtcagcttngggaggaggagatggccctggagactaaatacttgtatgctttcttaccctcttagggtctcagccttagatccaaggacagtccaaggaaagtcctaagaccatggagttggtgatctggaatctgggtttgctgatatttctcaccagtggtgagttgatgccaagagccagaacccaacaaccagaggctcangcatggtccgtgtttatgcagatgggaacctcaaatcactggtctcacttgtcctttgtttcagaatctcttggtggtgtttgtgggcacgagaggggcagagaatggagagtgaggctaccacatgaagcgtcaccagagctgctccctgctgcctgctcagagcaccccggatccactgttcaatctgcacaagattcggggtccagacatgggagacttcagctgcctcagaggaccgtggacagggaaggccagcctcgcatccctctgtccatgcctggaatgactttaataaccaagagttttatttttgaatttgtagctgtcgttcactttttacccacccattcaataaaccttacagaattgca

SEQ ID NO: 255631 - DNA, 558 bp, Homo Sapiens
tgtcatttgaaagtgtaataaaaaataatgactaatgcactggtattatcacttatattaagtttatacagtgacactaacattaagattactttctagttttataaatgatctccttccctatttcttaaactttttaccaatctctataaaatctcaaaattaaaaaagaaataaatttgaagacaaaaagattttagttaaatcaaaaactgactggaaatagtgacacatgctgtcaaataacttaaagtgaaagtgagtaataggcacataaagaacaccagtatctgctaaagcataagctcatggacatttggatttacttaggtaagattttgaaacataatttgggaaacaatacagggtttcaagtgttgtttagctaagtacgggcactgaaaataaaactatcatttattatcaacactggatcatcaaagaaaagtaaaataatacaatctcagaataaattgaagaaatatactatatagttttgtgaataactcactacattgtttctgttactaaaaacgagttaaaacttaatcataaaac

SEQ ID NO: 255632 - DNA, 536 bp, Homo Sapiens
ccccagtgaccacctcaagctttgtacctgaatagactggataattaatcatattttctgagtctcattatttaagtttgaaaaaagccaccagcccaatgaagaagggcaaaaacattgagcagatctcaaaaagatctataaatgtaccgatatattttctatatgaacaaatagcgcaacaaatactgaacattttttgacattggtgaaatgtggatatcatgtattggcaaggatgtgcaccaactggcatttttgtagaatataaatgtatatcttgtttgggatggtgattaactagacatacacatttgtcaaaacttgtgaaactggaaattggacatttaaattgagtggatttaattttgtgtaaaatgcccttctataatatggatttagaaagtaataaatattttgaataacaaagtgttagactttgaattaatttaatattttctttgtaaatttgttaatcttcaatgaaacatgtgccttccttttataattaaatgaataaaccgtttatattaatg

SEQ ID NO: 255633 - DNA, 882 bp, Homo Sapiens
gggaggcgcggacagcgctgcttccgcggcggttggggtggtggggccccgggcggcgttgaccatgacccagcagggcgcggcgctgcagaactacaacaacgagctggtcaagtgcatagaggagctgtgccagaagcgggaggagctgtgccggcagatccaggaggaggaggacgagaagcagcggctgcagaatgaggtgaggcagctgacagagaagctggcccgcgtcaacgagaacctggcacgcaagattgcctctcgcaacgagttcgaccggaccatcgcggagacggaggccgcctacctcaagatcctggagagctcccagactttgctcagcgttctcaagagggaagctgggaacctgaccaaggctacagccccagaccagaaaagtagcggcggcagggacagctgaccagaccacgggcagggcctgcctccgtgtgcccctcagctcagccccagcaagtgtgtgctcagagcatctttgttcttcacggcagcagctaccttccctcactgtctcaggtgccgagaggggcaggtgccagcctccactggcatcagtgacaagcccagggcacagcccacccgggggtcctcgcttcatgctcacacaggctatggggatggtgggctccaggtcagctctgcaaggggcttgtctctgtggcacccacactcctgccctgccagggaggctctggttgtctgagcaccatgggggccccctcaccttgtccctcctcagccagcagaggcccagggcaagggacaggaggacaggggttctccttcaccacagaacccaaacctcaggtctcacccctgtggcctgtgattatgaataaagattatctttgtaaagatcaa

SEQ ID NO: 255634 - DNA, 738 bp, Homo Sapiens
gctgtagccttggtcaggttcccagcttccctcttcaggacactgagcaaagtctgggagctctccagcatcttgaggtaggtggcctccgtctccgcgatggtctggtagaacttactgcaagaggcaatcttgcgtgccaggttctcgttgacgcgggccagcttctcgttgacgcaggccagcttctgtgtcagctgcctcacctcattctgcagccgctgtttcttgtcctcctcctgctggatctgccagcacagctcctcctgcttctggcatagctcctctatgcatttgaccagcttgttgtcgtagttctgcagcgccatgccctgctgggtcaacatctcctggggcccccaaaagtcaagctgtcactccacacaaacactgtgaacaccatctgtaggcaaaggtggctttcttaacttcaggcacaccaatctcttctggctctgggctggcaaccttaaagggccctatagacctcaggcaagtgacgttaaagggaaagagagaaacagatggaaagagacaaagccaggtctacacaaacccttgagaaactaatattaagttagctggagcaattcacatggaagagaaaactctgaaaatgcccagaatttacaaggtggtcctcattagtgaaaaaaagacaattaaatataaacaaccggccaggtgtggtggctcacgcctgtaatccattccctcaatttcaacttctctgtgtct

SEQ ID NO: 255635 - DNA, 616 bp, Homo Sapiens
  misc_feature (11)..(11): n is a, c, g, or t
agaatgaatcnctgtgcttacgccaatcagtatgtgttcggcaacctcctgtgttagtggcattaaacacccacagtaatgtactcacacctgggagtgtgcgctcatgcctgatatcacagcactttggcagttcaaggcaggagggtcgcttgaacctacgagctcgaggacagcatgggtaacacagtcacattttgtgtatattaatgcacactttcggaatgtaattgccatctctttcttcatatatggcttgagaatgataatgtaaaaggaattcttctcttacttcaataaaatgggttttaacataactttaaattcagttaaatatacaatattgaatacctatagttgactttgggatggggactttttcaagtcattaagagtgtttgtttaaggtgatctcattgatggtagttctcagccgtctcaaaaactgcaagctaatcagtcagacattctttaatgaccccaattttttcactttaattgttaccatgttttctatttttactgatttttgctaaagcatgtaagagtgaatttattatagcagtaatcttgtgtttctcctgatgtgcaataaatcaataattcaccagcaaaa

SEQ ID NO: 255636 - DNA, 626 bp, Homo Sapiens
  misc_feature (256)..(267): n is a, c, g, or t
tttttccagggaaggtccccccaaagaggttgtttataaacccaacccaaaccttttcaaagggagcatttctcccctttattgtgtttatcaggattctttttcccccccaaaaattcaaagccattttcaaaattataaaattttgggccagttttcaaagttttcgtggaaggctgtctcccgcttttgggatccacccccatgtggggccaaaatcggttgcaggaagtcatgtttatgaaaagttggtggnnnnnnnnnnnncattcaaactaaaagtgtttttataacgaaaatttgcactttacaactctgcaggccatgcatgcaatggtgatttacaccccttgtttacgtgtaattcctccaggtgatttatcccaatttatgcaaagatcctattttaaacaaacacggaaaagtggtaaccgtttcctaacaacagcaaaaatgccccttccgtttgcctggtgaaaaaaactgacattaacaacagcttggaggcttccagaaggtggggacgtggcctgagctcgggacgggggcccagtgcgggttgtcggagcgtggctccccgcccatgtctctgtatttatcaataaatctcccggttgctctggggg

SEQ ID NO: 255637 - DNA, 755 bp, Homo Sapiens
  misc_feature (306)..(306): n is a, c, g, or t
agcttttcttaaacaaataacccaattcctgccagtctccagaagtctcttaatggtaatgaagaattaaaaggtctttttaagaatataagggctttccaaatagaatattttactttaaagaaacaacaagtggtatctctgaaactcacaacctaaagcccatcttgaaaatatgttgtgcaccaagacaactgcttcagcttcttctcttatccttactttctttaatagatatttattaaactgtccagtgaaaaggtgccacaatgcccagtattgtaaacaacaggtttgcattcatgnaagctttcattcattctggagtctactaatttacctgaatggtgtttgcattctgtgaaatgcctctccacgttgcatatgtcacacttttgtctgcacataactcttttttcacaagaagggtcactgccacaacagcacagtcagcgggtgaattacaggtgcctgctgcctgcctacctgggtaatctgatcttgtctgtatcgccgtgtgctcatcactgaagaattgcaggccactcatgtcagtgaccagatttgtggcttataaacattagcagtttatttatgttttaagatgcaaagatgtgtgtttgatattcactttaataattagaaatggatcttgtaaacagggcatatatcaaagatgaccttataatatgtacccgaatgtacagttcaagaattttgtctgactggaaataaatgcattttgtagcaaaagg

SEQ ID NO: 255638 - DNA, 805 bp, Homo Sapiens
catggccatgaactggccacagttcgaggagtggtccttggacacacagaggacaatcagccggaaagagaagggtggccggagccctgatgaggttaccctgaccagcattgtgcctacaagagatggcaccgcacccccaccccagtccccggggtccccaggcacggggcaggatgaggagtggtcagatgaagagagtccccggaaggctgccaccggggttcgggtgagggcactctatgactacgctggccaggaagctgatgagctgagcttccgagcaggggaggagctgctgaagatgagtgaggaggacgagcagggctggtgccaaggccagttgcagagtggccgcattggcctgtaccctgccaactacgtggagtgtgtgggcgcctgagtgtcctgacagcccttctgcaacgtttacccaccctggttcagagcccagcttctcctggagagccggaccctcagggccctgaaccgtcgctctctggctgctcctctgtcccttgaggggaagaagtcctgggacccagggaggggaggggcctttgtctagggaagggactggtagggaagggacgagtctaggctgagggcaagatgggaggtcagaggtgacagaagcgttcaggggtgcctgggcctccccaggagctgtggactcagttcctgacctctgctttggggttcctggggtgggcttggggtgagtgtagttctggcctagcagcaccctcttgtggcttgttctagcgtgtattaaaacttgacacacacccacacacaaaaacaa

SEQ ID NO: 255639 - DNA, 310 bp, Homo Sapiens
caaattcaaggtgctaggtaagatcacaaatctaattcaaaagtggtactacgctgtttttgggggtagagggagttaatttgataaaatgaatcaaaaataagattttcaataaatagtatatgatactccattacaagtatgtgcacaagcagataaaattacaaattctaccattcctggggttggaattcagattatttttaacctatagtttttgcaattgttaataactaagaattaattattctaataaacaattcattcaacttcttgagctgctgaacaaatttgactacagagtttcgtt

SEQ ID NO: 255640 - DNA, 535 bp, Homo Sapiens; identical to SEQ ID NO: 238853

SEQ ID NO: 255641 - DNA, 419 bp, Homo Sapiens
  misc_feature (71)..(71): n is a, c, g, or t
  misc_feature (96)..(141): n is a, c, g, or t
  misc_feature (165)..(189): n is a, c, g, or t
aaaaataaaaaattaactggggtgtgggggcgggcgcttgtgttcccagttcctccgaagcttcagccaanagatatgccgtaaaccaagaacccnnnnnnnnnnnnnnnnnnnnnnnnnnnnnnnnnnnnnnnnnnnnnnggccagagcgagcctcggtctccnnnnnnnnnnnnnnnnnnnnnnnnntgccatccactccatccgttagtagcaagagcgaatagccatcagaaagagcttttcacgtcagaaagcactacagaagtagtggcatatccccgaaggctgaggtgggagcaattgctgagaggtggcacgtgaccacatccatgtcattcaacaacagaaaaacaagtcatcgagggtgtgaggggccggtgagaaacccagtatggaagaaaacacaactgggctga

SEQ ID NO: 255642 - DNA, 483 bp, Homo Sapiens
gttccttaactgctgagcctcagccagcgtgggtcctgggggaaataccattccaaaggaagccatccctatggggaaattggttttactgggtaaattaatacttttatttcttcccctatcccttccttcctagttgtgataaacatgggagaggagtgactttgactgctggggaatttcctcctaagaaccttattcccaaaataagccagggattatgtcaaggcttctttcaaggaggctcataaaagcagtgacctcatccggggctttggatagagtgagaattccccaactaaattggacttctctgctttatccccttctcttccttcaccatctgcactacatttctggctgatcccaatcagattcccgctaatggaagaagtttagaatctttcaggtggaataaagtcacatgaaaacaaaacacaactatatatattttcagcttttttgccttattgatttttttcc

SEQ ID NO: 255643 - DNA, 745 bp, Homo Sapiens
cctttccctcgttggcaaagagccgcgtggctttcaaccaggcaattaaaaagtgcaagcgctgccagattcccaaaccccccttcaaaaaaaacggaaggcccaagcttggcttctgtgggccaaccaaccttattaattgcaccaggccaagggccaagttcttcgattggagttctcgggttacttcaatatgaaagggacttcaaaaggattccacaagtggtccaaaaagaagtgatcggttttagaaagagaaatccaaggacttcaagacccacgtgatcaagtaccttaaacacttcctttactcacagcagcagctggcaaagtactgggaagccttccttcctgaggcaaaggccatctcctaatggaccaaggaccccagagcccacctgtgtgacgctgcccttttatacactggcctcctcccaccttgatggacccctagtgatgcatcctgcctaggctggacttaaccccttcctccctgtccccacgaccaactgtccccagttactctaaccgttatttcatttagcttcccatatatattttcttacctaagagaatagtttcctgctttaagcaaaagacctacaataggtggtggaattatgggatggggtggagtattgatataaatatataaatacaaatgtatatttttcaggatgtggtttaggaactgggaataacgttttctgttactacaaaatggtgccatgaaaaggttatgtaa

SEQ ID NO: 255644 - DNA, 710 bp, Homo Sapiens
  misc_feature (119)..(119): n is a, c, g, or t
cagcacacatctcacctcattgttttagattaacctcggatcttttaaagcctttcttctcccttcctattggaagaaaaagaaagtaggctggcctccttctcagaaaaagaaagganaccagccatcctatagcggttcttccctgaaaaatggtgacaatttcagaacttgggacaaagctggtgcccaaaaaaggggaaggtcagaaagccccagccaaagcccaggtaacctgcaccaagaacactggccggcacccccgaccctggcttactgcattctctcctgaagctgcttttactttccttcctgaagccagactctcggtggtgctcaaaataaacactggcacaggctgctctggaggctggaatctttagaaaggaagtgcatcctgtccctctggctcctgggaaactcctagactggctggattcccagtaggtttggttggaagtctgggatcctgggaaccttgacaagaaagtaactggaatctgactggtagatctctagggtgatctgttcctctggccctctctaactggttccatgggtttgcttgtcttcctcgctgccctgagtggagctgagtctcagggaggctgatgaggtgaccagggcaggagtctgggagactgcctccagccctggttcctgctatagtaaaaatggcagggaggccagacgcggtgattcatacttat

SEQ ID NO: 255645 - DNA, 1925 bp, Homo Sapiens
  misc_feature (76)..(128): n is a, c, g, or t
acgcgcgccagcaacgggccggtccggcggccgattaacatacccctcgggctgggtggcgaattctgcacgaggnnnnnnnnnnnnnnnnnnnnnnnnnnnnnnnnnnnnnnnnnnnnnnnnnnnnngagctgcaggggccccgggcggcggcgaggccggagaggggcgggcccgggacaccggcacccggcgccctcggagccaaaggcgcgcggcggacacggcggggccctcgcgcgcctggagacgatgccaaagctgcagggcttcgagttctggagccgcaccctgcgaggggcccgccacgtcgtggcccccatggtggaccagagcgagctggcctggaggctgctgagccggcgccacggggcacagctctgctacacgcccatgctgcatgcccaggtctttgtccgcgacgccaactaccggaaggagaacctgtactgcgaggtgtgccccgaggaccggcccctcatcgtgcagttctgtgccaatgacccggaggtgtttgttcaggcggctctcctggctcaggattactgtgacgccattgacctgaacttgggctgcccacagatgatagccaagagaggtcactatggcgccctttctgcaggacgagtgggacctgctccaaagaatgattttgctggccccacgagaaactctctgttcctgtcacgtgcaaaatccgtgtcttcccggagattgacaagaccgtgaggtacgcccagatgctggagaaggccggctgccagttgctgacggtgcacggacgcaccaaggagcagaaggggcccctgtcgggtgcagcgtcctgggagcatatcaaggctgtgcggaaggctgtggccatccctgtgtttgctaacgggaacatccagtgcctgcaggacgtggagcgctgcctccgggacacgggtgtgcagggcgtcatgagcgcagagggcaacctgcacaaccccgccctgttcgagggccggagccctgccgtgtgggagctggccgaggagtatctggacatcgtgcgggagcacccctgccccctgtcctacgtccgggcccacctcttcaagctgtggcaccacacgctgcaggtgcaccaggagctgcgagaggagctggccaaggtgaagaccctggagggcatcgctgctgtgagccaggagctgaagctgcggtgtcaggaggagatatccaggcaggagggagcgaagcccaccggcgacttgcccttccactggatctgccagccctacatccggccggggcccagggaggggagcaaggagaaggcaggtgcgcgcagcaagcgggccctggaggaagaggagggtggcacggaggtcctgtccaagaacaagcaaaagaagcagctgaggaacccccacaagaccttcgacccctctctgaagccaaaatatgcaaagtgtgaccagtgtggaaacccaaagggcaacagatgtgtgttcagcctgtgccgcggctgctgcaagaagcgagcctccaaagagactgcagactgcccaggtcacggattgctttttaaaaccaaattggagaagtctctggcctggaaagaggcccagcctgagctgcaggagcctcagccagcagcacctggaacaccaggtggcttctccgaagtcatgggcagtgccctggcctgaaggcccacaacccccacccccaggactgctgctggagcctggacacgtcctacttaagaaaatgccttttactcagggaatctcctgctacttaatgtggaaagacacgcccatgtcccccttcggcccactctgggggcctggaaatgctgcagtggggagcaggccccaggctggacctgccctgtcctcagcacgcgtgtgcaaaagtgaacaataaatcatttcaaagatgaaaaaatattaaaa

SEQ ID NO: 255646 - DNA, 972 bp, Homo Sapiens
  misc_feature (765)..(826): n is a, c, g, or t
  misc_feature (936)..(936): n is a, c, g, or t
aaaatttctaggcctgggtggcgaattcggcacgaggggctgcggcccggcggcggccccggcgcggtgcgggcgttcgcggcgccccgggagctgcaggggccccgggcggcggcgaggccggagaggggcgggcccgggacaccggcacccggcgccctcggagccaaaggcgcgcggcggacacggcggggccctcgcgcgcctggagacgatgccaaagctgcagggcttcgagttctggagccgcaccctgcgaggggcccgccacgtcgtggcccccatggtggaccagagcgagctggcctggaggctgctgagccggcgccacggggcacagctctgctacacgcccatgctgcatgcccaggtctttgtccgcgacgccaactaccggaaggagaacctgtactgcgaggtgtgccccgaggaccggcccctcatcgtgcagttctgtgccaatgacccggaggtgtttgttcaggcggctctcctggctcaggattactgtgacgccattgacctgaaacttgggctgccccacagatgatagccaagagaggtcactatggcgcctttctgcaggaacgagtggggacctgctcccaaagaaatgattttgcctgggcccaccaagaaactcttctgttccctggcaggtgcaaaaatccggggtcttccccggaagattggacacggacccgggagggtaccccccctgaatggctggaacaaaggggccgccctggcccggttggcttgacnnnnnnnnnnnnnnnnnnnnnnnnnnnnnnnnnnnnnnnnnnnnnnnnnnnnnnnnnnnnnnagggcagattgtcccatgaggcaagctagattcccacggctttggtagcccggacgagggtttggttggggccgaatccccccgctaagaggttcggggcttaaccgcancaatagtgttctcctggcggtcccccagcgcgctga

SEQ ID NO: 255647 - DNA, 573 bp, Homo Sapiens
caagacatacaaaaccctgttactttgtcaagatatgtaaatattttgagaaaaaatacagtataaaaatagttattgaccaaatgctaccaggctttgcagcagctcgggggcttataaaatgttcatagggatgttacaatatatttgtgtgttataaaatatgccattataattatgtaataacccaaaatttcaacctagaagtgttgggggttttttggaaaccgcagtctattagtactcaatggttttatacaccttacttctgacagagcggggcgtatgctacgactacaacttttatagctgttttggtaatttaaactaattttttcatattatattgttgcatccctacttcttcagtcaggtttttttgtgcttacaatttgtgataactgtgaataactgcttaaaaatacacccaaatggaggctgaattttttcttcagcaaaagtagttttgattagaactttgtttcagccacagagaatcatgtaaacgtaataggatcatgtagcagaaacttaaatctaaccctttaaccttctatttaacacaaaaatttg

SEQ ID NO: 255648 - DNA, 381 bp, Homo Sapiens
  misc_feature (136)..(136): n is a, c, g, or t
  misc_feature (172)..(172): n is a, c, g, or t
  misc_feature (194)..(194): n is a, c, g, or t
tgttgggggttttttgggaaaccgcagtccaattagtacctccaagggttttaaaacaccctacctcctgaacagagcggggcgtatgcctacgaactacaacctttaatagctgttttggtaatttaaacctaantttttccatattatattgttgcatcccctacttccntcagtcaggtttttttgtgccntacaatttgtgataactgtgaataactgcttaaaaatacacccaaatggaggctgaattttttcttcagcaaaagtagttttgattagaactttgtttcagccacagagaatcatgtaaacgtaataggatcatgtagcagaaacttaaatctaaccctttagccttctatttaacacaaaaatttg

SEQ ID NO: 255649 - DNA, 743 bp, Homo Sapiens
  misc_feature (115)..(151): n is a, c, g, or t
  misc_feature (258)..(258): n is a, c, g, or t
  misc_feature (309)..(309): n is a, c, g, or t
  misc_feature (581)..(581): n is a, c, g, or t
  misc_feature (587)..(587): n is a, c, g, or t
  misc_feature (602)..(602): n is a, c, g, or t
  misc_feature (666)..(666): n is a, c, g, or t
  misc_feature (697)..(697): n is a, c, g, or t
tatcacagaatttacatatttatatataacatgcacatattaaaatgtttgatcttagaaacaagtgaaaaatacacagtaatggaattatcaactaaatattaccaaggccaannnnnnnnnnnnnnnnnnnnnnnnnnnnnnnnnnnnnataattttaagaacatggaaaaattcacaatctatacttataaataattatatgcagaatgaattcaaacacagagttcttgtctttgggaatttggggattcaganattatattctttatggctttggggggcatttgacaagttatcctcaagganacacattattacttttaataataatcagaataagtactaaataaaatttttatctcccacattagcatttccttacatattttgaacctattccaatacagttctcagttcctagaatcctccattccacttacattattataaaagattccagtaagtttaaatttttgctcaaagcatgctaaagttttggatccttgcattcccgctccagattttttaaacaagagactacattttttgctttatagatattctaagctcactggtgncttctncttttatcatggggntaagaaaagatttattccaatgatcccacaattcatcactctcaccatacacaatatatggatncaaaaacataactttaatcaaaataaacttncttataaaatggtcaagaaacacattcagactggggataagttcga

SEQ ID NO: 255650 - DNA, 400 bp, Homo Sapiens
  misc_feature (340)..(340): n is a, c, g, or t
  misc_feature (382)..(382): n is a, c, g, or t
gccttctggaggcaagggagctgtttcccagcgtttccagctcctagaggctgctagctagtggccctttcctttgtcttcaaagccggcagcacagccttttctaacctctcccactccaggtcatttcacatcaactctttctgcctccctcttgtaagtgtgataccctaccttgttttaacctgaattgactgtcccttagctgagagagccagacacactccattttggctccttcacttgcagccccttacccaccccccttcctcaaggacttaacttgtgcaagctgactcccagcacatcaaagaatgcaattaatggataagatactgtnggcaagctatatccgcagtttccaggggattttgcccagttngattagttacccttaagg

SEQ ID NO: 255651 - DNA, 444 bp, Homo Sapiens
cattcatttgcaagacatcaagggctccttacccacccccttcctcaaggaattaacttgtgcaagctgactcccagcacatcaaagaatgcaattaactgataacatgctgtggcaagctatgtccgcagttcccaggaatttgcccagttgatagtaccctaagcccctgtgtttttgtctggttgatagcacccaaagcccagcatctatcaccttgtgatggatttaaaacccctgcacctggaactgtttgttttcctgtaaccatttgtcttttaactttttgcctgttttgcttctgtaagagtgcttcagctaggctcctcctcccctttctaaaccaaagtataaaagaaaatctagccctttcttcagggccgagagaattttgagcactagccgtctctcggttgccggctaataaaggacttctgaattcaa

SEQ ID NO: 255652 - DNA, 509 bp, Homo Sapiens
agggtctacaatcaactattcttccaaagctcgtaccctcaaatcttttgttttaaatcggttatgaaaatgcactagtgtaagcacatttttatgcaatcaatgcccgttgtacagacagactcatcaagagattaaagtgtgagtggcttgatttctttctggctatgctcaagctcagttttagcagtatgtataacatcttttaatgtgatgtaagtatgtaggtataaagttcctggatatatcagttattaagccacaattataactaagcgtgagttatggcagagacaacttgaaacactgctagtgattctaaaaatttcctaatttgacgaagaaacaggaaacaggtagtatctattttagataatttttttagattttaccattctttaatatttacatttgccaaccagaatcagacaatagaatttctgtcattccagtttaagctaataaaatgtcaagtagaggttcttggctgggcatagtggctcatgcca

SEQ ID NO: 255653 - DNA, 1027 bp, Homo Sapiens
agggtcacagacctccctcccatctgggtgcctgagttttgactccaatcagtgataccagaccacattgacagggaggatcaaattcctgacttacatttgcactggcttcttgtttaggctgaatcctaaaataaattagtcaaaaaattccaacaagtagccaggactgcagagacactccagtgcagagggagaaggacttgtaattttcaaagcagggctggttttccaacccagcctctgagaaaccatttctttgctatcctctgccttcccaagtccctcttgggtcggttcaagcccaagcttgttcgtgtagcttcagaagttccctctccgacccaggctgagtccatactgcccctgatcccagaaggaatgctgacccctcgtcgtatgaactgtgcatagtctccagagcttcaaaggcaacacaagctcgcaactctaagatttttttaaaccacaaaaaccctggttagccatctcatgctcagccttatcacttccctccctttagaaactctctccctgctgtatattaaagggagcaggtggagagtcattttccttcgtcctgcatgtctctaacattaatagaaggcatggctcctgctgcaacccctgtgaatgctgctgagaacctccctctatggggatggctattttatttttgagaaggaaaaaaaatgtcatgtatatatacacataaaggcatatagctatatataaagagataagggtgtttatgaaatgagaaaattattggacaattcagactttactaaagcacagttagacccaaggcctatgctgaggtctaaacctctgaaaaaagtatagtatcgagtacccgttccctcccagaggtgggagtaactgctggtagtgccttctttggttgtgttgctcagtgtgtaagtgtttgtttccaggatattttctttttaaatgtctttcttatatgggttttaaaaaaaagtaataaaagcctgttgcaaaaatgggaaatacatatgtaaga

SEQ ID NO: 255654 - DNA, 601 bp, Homo Sapiens
ctccccgtctgcattcttaggcctcttaggctattaggaactgtcagatacatactagtagctaattttccctagcctgaaattatatactgcatctgcactatgtacctactagggatctgacctcaagtgttttctgagccccaggctcccctggtgtggtgtcttttaccacataaaattattacaaattgcaaatgttggtattgtgatttgattatctgtacaaagaaagaagctctatgcagtgagtttgtggtttaatggtcacaaaaatgttagcactgctaccactcagcacgtgtaaaattttttaaatttataaatattaaaattttaaacttacactaagacttttcagttttatttaaagacccagggatgagtgtactgtttaaatatttacctctattaacataactaatgaaggtataaaattgcatttagtttttcgagaagatgctgcaatatgattttaggaaataaggctatgtattgagccagttataggctgaatatcaggtagataaaattttatttgtatttttaaaattcataaatgggagttaaaatgtgtcttttcactaaatatttttattac

SEQ ID NO: 255655 - DNA, 741 bp, Homo Sapiens
  misc_feature (45)..(45): n is a, c, g, or t
  misc_feature (74)..(74): n is a, c, g, or t
  misc_feature (79)..(79): n is a, c, g, or t
  misc_feature (106)..(106): n is a, c, g, or t
  misc_feature (259)..(259): n is a, c, g, or t
aatagatttccgtgtgtgctttctctcagcttcttctaatgttancctccatcccaatggtcaaattattgaanctagnaatttaccattgcacaatccctattanctacatcttttatttgatttgtagctgttttcccagtaatgttgtttttctggtcgggtattcaatccaggatccatatgtacttgggtctttctgggttttctgttccactggtctacttgtgcatggtaccacactgttttaattatagangactttatagtatgttttaacaactggcaaggctagtcccccttataatttttccctattgtgcttctggctattcatacatgtttgtttttccatgtgaactttagtatcaacttgtctaaattcattttttaaggtacattggtattttattgatattatatgatattaactgatttagagagaactaacatctttaaaatgtggtgtcatcctatccaagaataggagatgtatttccatttattcaagtctattttgtgccttttagcagtgttttaaaattatccttgtgtaggttttgtgcatttcttgctaagcttatccctaagtatttaatttatttgctagtaaatgagatttcctctgccattatgtcttctaactggttattgctctctatataaaagctactgattttgtatgctaatatatcttgctaccttacctaatttttttaaaaaaataaacaacagaaattt

SEQ ID NO: 255656 - DNA, 1217 bp, Homo Sapiens
ataatgattaagtaacgaggcctgggtggcgaattcggcacgaggccgcggacggataggatgggccgcggggggagagtcttggattgcaacatcgctggctcgcgggggtgggggccggcgagcgggcttgttttcggtgccttaaaaccaaaacaagtggactttgaacatgtcggggatcgccctcagcagactcgcccaggagaggaaagcatggaggaaagaccacccatttggtttcgtggctgtcccaacaaaaaatcccgatggcacgatgaacctcatgaactgggagtgcgccattccaggaaagaaagggactccgtgggaaggaggcttgtttaaactacggatgcttttcaaagatgattatccatcttcgccaccaaaatgtaaattcgaaccaccattatttcacccgaatgtgtacccttcggggacagtgtgcctgtccatcttagaggaggacaaggactggaggccagccatcacaatcaaacagatcctattaggaatacaggaacttctaaatgaaccaaatatccaagacccagctcaagcagaggcctacacgatttactgccaaaacagagtggagtacgagaaaagggtccgagcacaagccaagaagtttgcgccctcataagcagcgaccttgtggcatcgtcagaaggaagggattggtttggcaagaacttgtttacaacatttttgcaaatctaaagttgctccatacaatgactagtcacctgggggggttgggcgggcgccatcttccattgccgccgcgggtgtgcggtctcgattcgctgaattgcccgtttccatacagggtctcttccttcggtcttttgtatttttgattgttatgtaaaactcgcttttattttaatattgatgtcagtatttcaactgctgtaaaattataaacttttatacttgggtaagtcccccaggggcgagttcctcgctctgggatgcaggcatgcttctcaccgtgcagagctgcacttggcctcagctggctgtatggaaatgcaccctccctcctgccgctcctctctagaaccttctagaacctgggctgtgctgcttttgagcctcagaccccagggcagcatctcggttctgcgccacttcctttgtgtttatatggcgttttgtctgtgttgctgtttagagtaaataaactgtttatataaaaaaaataatta

SEQ ID NO: 255657 - DNA, 797 bp, Homo Sapiens
  misc_feature (730)..(730): n is a, c, g, or t
  misc_feature (746)..(746): n is a, c, g, or t
ggggctctggctgcgcgcggagcgggctccggagggaagtcccgagacaaagggaagcgccgccgccgccgccccgctcggtcctccacctgtccgctacgctcgccggggctgcggccgcccgagggactttgaacatgtcggggatcgccctcagcagactcgcccaggagaggaaagcatggaggaaagaccacccatttggtttcgtggctgtcccaacaaaaaatcccgatggcacgatgaacctcatgaactgggagtgcgccattccaggaaagaaagggactccgtgggaaggaggcttgtttaaactacggatgcttttcaaagatgattatccatcttcgccaccaaaatgtaaattcgaaccaccattatttcacccgaatgtgtacccttcggggacagtgtgcctgtccatcttagaggaggacaaggactggaggccagccatcacaatcaaacagatcctattaggaatacaggaacttctaaatgaaccaaatatccaagacccagctcaagcagaggcctacacgatttactgccaaaacagagtggagtacgagaaaagggtccgagcacaagccaagaagtttgcgccctcataagcagcgaccttgtggcatcgtcagaagggaagggattgggtttggcaagaacttgtttacaacatttttgcaaatctaaaagttggctccatacaatggactagtcaccctggggngggggttggggcgggncgcccatctttccattggccggccggcggggtggtgcggggtcttcgaatt

SEQ ID NO: 255658 - DNA, 1364 bp, Homo Sapiens
  misc_feature (463)..(463): n is a, c, g, or t
  misc_feature (830)..(830): n is a, c, g, or t
acttcatgcagacactgacccacgcactcacggagcttaaaaataatacatcgaaccacacggatatcatcccctcctccccccagacacagaaagacacttggctgagtgggatggggtccgagggtccaaaagcctccgtcctgggagaaggcagcagtgtgggcccaggtcgggggaggggcagtgtcctttctccccggaggaaaagtgcagagccagggctaaggccccaaggcagggaggcccccctctcacagcagattggcaacgggcaggctgggaaggcgtccttcacagtggccatcccctgaagggccaggccgggccgggcccgtgggctgcagctcttgggaggctcaggagcatggtgggcagcaccctctgggtgccgggcaccccaggctcagtcttgggcactgtccgagcgccacttgagggcgtggtccttgtgggcgtcggngacaatctggttgcgcatgcccccgagcaggctggacgtggcctccgtggccaggatgagcggcttcaccacagttcgggggcagctggcggatcacggcccccccacgggcgcccgtcagccccttctgctcatggccccgcgatgccacgtcacagatggtctgagctgtatccaagatgccctctcgcactgtgtcgtaggccctggccacaccctcccccgcaggtcggcaggctgctggcccctgcgcagccctccgcgcagagccgcttatcctgcagggagcgggagacgggggctgccggggacaggatgtcatacacggtctcagctgtggcctggatagcctgtaccaaccggttgntgattccagggcggcagaggctgtggatgagccaaaggaggcagcccctcgctgcagcccccgcatgaggcggccatccttcctgtactgctcaatgggcagccacagcaggtcccggaacccttggaagagctggacaaccgagtgcatggggcccacgcctcccagcaggccgggcagctggttcttgcggatgtcctgcagccactcgttgagggcatagcccagcaccttgtccacacccaggagcccgtgcctgcaacagagccgctttagcttcagctcggagcagttgagttgggccaggccgatgaggaggccagcaaaagtgcccacctggtccatcgtgacgtgcttgccatggtaatccagccagatggggacctcagacgtgaagcggaactctctgaagtagatgggctgctggtcaggaggggaggggctgtgtccacctcctggggcctcctgcgaaccagtggtctctacgccttcggcctgcccttccagggggctgctgggctgggctcgagtctc

SEQ ID NO: 255659 - DNA, 653 bp, Homo Sapiens
  misc_feature (472)..(472): n is a, c, g, or t
aggatgttcacaagcatggaccctcctccggttgaacttatacgcgttccagacttcctggacctgtgcatgcagtcactctttaaaccaggggctcggatcaaccaggaccacaagcacaaatacatccacatcttggcgtacgcagcaagcgtggttgagacctggaagaaggtaccatcggttctgggaatttgtggattttttaggagacaaatatcctcctctgctttgatattattttggaattttggctgcaagaaatcttgaccctccctagtatcaggcatgtggtttcttgtggttctgtgtagagaaagcactaaacgtctccagaaaatgtgcgtaatggctccaatgctctgcaaaccgtaaattgaaatgtgactaaagaaatgaaactgatttccgtaagacatggacaaacactagtctcaatgcttttcagattctgtacactgtgtgactgtgnaagtttgacagctgaattgactcccaacttaagtagaaatagggaaagtgctttgcaagaagtggccgacaccagaacaccccgacagcagggatatctgccctgtcaggctcaccagcttgtgtgtgtgttttcagaacaagcgagtgagcatcaataaagatgaactgaagtcaacgcc

SEQ ID NO: 255660 - DNA, 1249 bp, Homo Sapiens
gcgccctaccaccccgggtggcgaatcggcacgaggctctttaaaccaggggctcggatcaaccaggaccacaagcacaaatacatccacatcttggcgtacgcagcaagcgtggtttgagacctggaagaagaacaagcgagtgagcatcaataaagatgagctgaagtcaacgtcaaaagctgtcgaaaccgttcacaatttgtgttgcaacgagaacaaaggggcctctgaactagtggcagaattgagcacactttatcagtgtattaggtttccagtggtagcaatgggtgtgctgaagtgggtggattggactgtatcagaaccaaggtactttcagctgcagactgaccatacccctgtccacctggcgttgctggatgagatcagcacctgccaccagctcctgcacccccaggtcctgcagctgcttgttaagctttttgagactgagcactcccagctggacgtgatggagcagcttgagttgaagaagacactgctggacaggatggttcacctgctgagtcgaggttatgtacttcctgttgtcagttacatccgaaagtgtctggagaagctggacactgacatttcactcattcgctattttgtcactgaggtgctggacgtcattgctcctccttatacctctgacttcgtgcaacttttcctccccatcctggagaatgacagcatcgcaggtaccatcaaaacggaaggcgagcatgaccctgtgacggagtttatagctcactgcaaatctaacttcatcatggtgaactaatttagagcatcctccagagctgaagcagaacattccagaacccgttgtggaaaaaccctttcaagaagctgttttaagaggctcgggcagcgtcttgaaaatgggcaccgctgggaggaggtggatgacttctttacaaaggaaaatggtagcagcttcagtgagaaactgcccttacaaacagtcccttctctgctgtcaatccaatactgctcccaaatcctgttttcagtgttcatttccctcaaggcaggcgctgggctcccacgacccctcaggacagatctggccgtcagccgcgggccgctgggaactccactcggggaactcctttccaagctgacctcagttttctcacaagaacccagttagctgatgttttattgtaattgtcttaatttgctaagaacaagtaataagtaaatttttaaaaagcctttctgctgggttggattaatg

SEQ ID NO: 255661 - DNA, 488 bp, Homo Sapiens
  misc_feature (51)..(51): n is a, c, g, or t
  misc_feature (84)..(84): n is a, c, g, or t
  misc_feature (232)..(232): n is a, c, g, or t
ccgaaagttctgggagaagctggacactgacatttcactcatcgctatttngtcactgaggtgctggacgtcattgctcctccnttatacctctggaattcgtgcaaacttttccttccccaatcctggagaatgaccagcatcgcaggtacccatccaaaacgggaaggcgagcatgaccctgtgacggagtttatagctcactgcaaatctaacttcatcatggtgaacntaatttagagcatcctccagagctgaagcagaacattccagaacccgttgtggaaaaaccctttcaagaagctgttttaagaggctcgggcagcgtcttgaaaatgggcaccgctgggaggaggtggatgacttctttacaaaggaaaatggtagcagcttcagtgagaaactgcccttacaaacagtcccttctctgctgtcaatccaataccgctccccacaatgaaataaagttattttctcattcccaaaaa

SEQ ID NO: 255662 - DNA, 1060 bp, Homo Sapiens
  misc_feature (1005)..(1016): n is a, c, g, or t
  misc_feature (1024)..(1024): n is a, c, g, or t
caagtttagaaaaaacaaagcaatgtcaaaaaaagttagaactattacaacccctgtgtcctggtacttatcaaatacttagtatcatgggggttgggaaatgaaaagtaggagaaaagtgagattttactaagacctgttttactttacctcactaacaatggggggagaaaggagtacaaataggatctttgaccagcactgtttatggctgctatggtttcagagaatgtttatacattatttctaccgagaattaaaacttcagattgttcaacatgagagaaaggctcagcaacgtgaaataacgcaaatggcttcctctttccttttttggaccatctcagtctttatttgtgtaattcattttgaggaaaaaacaactccatgtatttattcaagtgcattaaagtctacaatggaaaaaaagcagtgaagcattagatgctggtaaaagctagaggagacacaatgagcttagtacctccaacttcctttctttcctaccatgtaaccctgctttgggaatatggatgtaaagaagtaacttgtgtctcatgaaaatcagtacaatcacacaaggaggatgaaacgccggaacaaaaatgaggtgtgtagaacagggtcccacaggtttggggacattgagatcacttgtcttgtggtggggaggctgctgaggggtagcaggtccatctccagcagctggtccaacagtcgtatcctggtgaatgtctgttcagctcttctgtgagaatatgattttttccatatgtatatagtaaaatatgttactataaattacatgtactttataagtattggtttgggtgttccttccaagaaggactatagttagtaataaatgcctataataacatatttatttttatacatttatttctaatgaaaaaaacttttaaattatatcgcttttgtggaagtgcatataaaatagagtatttatacaatatatgttactagaaataaaagaacacttttggnnnnnnnnnnnntgcctgtngacgtgcagaaagaacagacacgaccagataggtca

SEQ ID NO: 255663 - DNA, 1318 bp, Homo Sapiens
  misc_feature (12)..(12): n is a, c, g, or t
accctcaaaagnaattaacacaaaataaaagaactgaagatggtcccaaaaaaagggaaaggagggaagcccatttgccgttaatttccacgttgctgaagccctttcctctcaatgttgaacaatctgaagttttaattcctcggtagaaataatgtataaacattctctgaaaccatagcagccataaacagtgctggtcaaagatcctatttgtactcctttctcccccccattgttagtgaggtaaagtaaaacaggtcttagtaaaatctcacttttctcctacttttcatttcccaacccccatgatactaagtatttgataagtaccaggaaacaggggttgtaatagttctaactttttttgacaattgctttgttttttctaaacttgtaatagatgtaacaaaagaaataataataataatgcccggggctttattatgctatatcactgctcagaggttaataatcctcactaactatcctatcaaatttgcaactggcagtttactctgatgattcaactccttttctatctacccccataatcccaccttactgatacacctcactggttactggcaagatacgctggatccctccagccttcttgctttccctgcaccagcccttcctcactttgccttgccctcaaagctaacaccacttaaaccacttaactgcattctgccattgtgcaaaagtctatgaaatgtttaggtttctttaaaggatcacagctctcatgagataacacccctccatcatgggacagacacttcaagcttctttttttgtaacccttcccacaggtcttagaacatgatgaccactcccccagctgccactgggggcagggatggtctgcacaaggtctggtgctggctggcttcacttcctttgcacactcggaagcaggctgtccattaatgtctcggcattctaccagtcttctctgccaacccaattcacatgacttagaacattcgccccactcttcaatgacccatgctgaaaaagtggggatagcattgaaagattccttcttcttctttacgaagtaggtgtatttaattttaggtcgaagggcattgccacagtaagaacctggatggtcaagggctctttggagcaggctaaagctgcgaattctttccaatgccgcagaggagccgctgtacctcaagacaacacctttgtacataatgtcttgctctaaggtggacaaagtgtagtcaccataaagaatatatgtgccatcagcagcttttgatggcaggaagctgtcattgttcttggatccctctgttcc

SEQ ID NO: 255664 - DNA, 808 bp, Homo Sapiens
  misc_feature (225)..(225): n is a, c, g, or t
  misc_feature (263)..(263): n is a, c, g, or t
  misc_feature (724)..(755): n is a, c, g, or t
  misc_feature (787)..(787): n is a, c, g, or t
cgtggacagattgtttttgccgttttcgggcaactgcctaccttcctccgcatgtggacatctacagtaccttgccaaccgggccgattcctgagcagccacagggcagtcaaaagggcaccctggaaacttttatatcctggcagaccttgtgctcactcagctgccctggggattgctttcctgggcacgggctccagggatcatctctgggcactcccttcntgcccaaggcctggctctgcccctcccctggggggtgnagcagggtccaggtttcacacttgccacctcctggaggtcaagaagagcagagtccccgtccctgctctgccactgtgctccagcaccgtgaccttgggtaactcgtccgctgtctttggaccgctgtgtttcaatctgcaaaatggggatggggaaggttcaatcagcagatgacccccaggccttggcagctgtgaaattgggggcctaggctggcaactccgggggctcaacggtggaaagaggaggatgctgtttctctgtcacctccacttgctccccgacaggtggggcacagacctctgttcctgagcagagaagcagaaaaggaggttccctctctctgctccttcactgctgacccagaggggctgcaggatggtttcccctgggagaggccaggagggcctgatcccaggagacaccagggccagagtgaccacagcagggcaggcatcannnnnnnnnnnnnnnnnnnnnnnnnnnnnnnnggttttgtaaagaattcttgaccaataaaagnaaaaactgtctgctgcattcc

SEQ ID NO: 255665 - DNA, 907 bp, Homo Sapiens
  misc_feature (303)..(336): n is a, c, g, or t
cactactcacccacaaaggacagcattgggatcaggctttcagatgacctctaagatttttcccatttattgtactcttgttacaaagtactttttaacacatgcagtcaatggctataaaaactattctgtgtacagattctacccagactttagtcttagaattatgttctaattaaggagcctggttacaggttcattctgtcttgagttcttttctgtgctgcctttctatcatggataaatgctaacgctgtattttttcactccaacttgagatagagtagttttgtacccattgcnnnnnnnnnnnnnnnnnnnnnnnnnnnnnnnnnncctgatgtgtaactttctagtaagataatttcatcatgtatgttactggctatttcatgatttcatgtatcacattgtatattttgccttgaagattcctgaaataaggaaatctataataacttcagaaagccaacatgtcccaatttagtggagacctcttgaatgctatttgaattctgcaggatcattttaatgacaattctccttagagaaatacaatgcccaggtacatgctcaatcagtgtgccggaagagtgaattcttttcttcactgcagagtcatcacactgttggaatagtctgctctttacaatgctcaggtagggaaaataggaccaaatatatttcccaagtgcctaccattgtgtcatgttacaagtgagagtttaaatattgttgatgtcctgactctgtgagctcatagggagtatcttcatagtaatgacatttgatcagccataaaatttacattatgttcatatgcacccaaaaaagctagtcaggtaatgaatacccttgaagtgaatagcaattttgatttaggcagtgtgttaggccatccttgcat

SEQ ID NO: 255666 - DNA, 884 bp, Homo Sapiens
  misc_feature (65)..(125): n is a, c, g, or t
  misc_feature (790)..(793): n is a, c, g, or t
  misc_feature (797)..(798): n is a, c, g, or t
  misc_feature (800)..(802): n is a, c, g, or t
  misc_feature (806)..(807): n is a, c, g, or t
  misc_feature (809)..(814): n is a, c, g, or t
gggaccatataaaagcccgctgccccaaagcttgtgggcacatgggcacatacagactcacatannnnnnnnnnnnnnnnnnnnnnnnnnnnnnnnnnnnnnnnnnnnnnnnnnnnnnnnnnnnngtttttctaggtacagctcccaggaacagctaggtgggaaagtcccatcactgagggagcctaaccatgtccctgaacaaaaattgggcactcatctattccttttctcttgtgtccctactcattgaaaccaaactctggaaaggacccaatgtaccagtatttatacctctagtgaagcacagagagaggaagagagctgcttaaactcacacaacaatgaactgcagacacagctgttctctccctctctccttcccagagcaatttatactttaccctcaggctgtcctctggggagaaggtgccatggtcttaggtgtctgtgccccaggacagaccctaggaccctaaatccaatagaaaatgcatatctttgctccactttcagccaggctggagcaaggtaccttttcttaggatcttgggagggaatggatgcccctctctgcatgatcttgttgaggcatttagctgccatgcacctgtccccctttaatactgggcattttaaagccatctcaagaggcatcttctacatgttttgtacgcattaaaataatttcaaagatatctgagaaaagccgatatttgccattcttcctatatcctggaatatatcttgcatcctgagtttataataataaataatattctaccttggnnnnaaanngnnngaannannnnnnccctgtccggccgccctcggcccctcaagaaagctttcctagaccaattctttttggcgccgcggggccc

SEQ ID NO: 255667 - DNA, 790 bp, Homo Sapiens
  misc_feature (138)..(146): n is a, c, g, or t
  misc_feature (307)..(307): n is a, c, g, or t
  misc_feature (705)..(705): n is a, c, g, or t
ccctaccagctgagaatggtgacatttcttcttctctggtctaaatcagaaaaacttgcagcactacaaccaccagagaaggtatatattagcttacagaggtttttttccccctcttccttaatttaaagaggcagnnnnnnnnngaaagatacaatcctgcttccattcctgtctgtgagaaagtgactgtgggcattctcaggcaaaaaataaagtaacttcatttttagagtaaatgccctgttgacaagttggcagggctgccctgtttggaaaaaagaatgtgccagaaaacctcaaaggnataattagtgtgtggtaaccctaacagcatgcagcagggctgtaacgtgtctggcagaggcagatgtggcccacacagttccattaacgctgtaaagtttgtttaattcccagttggggtaattagagaaggctctagaacctgcctagagctccaaaatagactctgatctcagcagcagtggggtggatctaagccaccacagtgggccccaggagactagaagattagaattcctcacaaacccatttgcttttctttgacaatcatctctgcattggccatgatgacagaggggaggaacagcatgatggtcacaataaaggagaatttttaaactggctttaaaatgcacgctatgatgattccatatttaacttaatctctaaactaaattntgcgtaaagcgccaataaaatcacaagaagttctcatttttatagagggaataaatttagtaaaaatggtaatgaagtaattttt

SEQ ID NO: 255668 - DNA, 548 bp, Homo Sapiens
  misc_feature (53)..(53): n is a, c, g, or t
ttgtctgctcctcctagcccttggtcagatggcagccagagtcctcaaggacntgcagcctcgcccggcaaagaggtcttttgtccaggagccaaagacccagagattctgcaacacgaattcgaagcaaacaaacacaacacaacagaattcctggaaagaagacgactgctaagacacggcaggggggcctggagggagcctccgactctgagctgctccgggatctgccgcgttctcctctgcacattgctgtttctgcccctgatgctggagctcaaggagactccttcctctttctcagcagagctgtagctgactgtggcattactacgcctccccacacgcccagacccctcactccaaaatcctactggctgtagcagagaatacctttgaaccaagattctgttttaatcatcatttacattgttttcttccaaaggccccctcgtataccctccctaacccacaaacctgttaacattgtcttaaggtgaaatggctggaaaatcagtatttaactaataaatttatctgtattcctc

SEQ ID NO: 255669 - DNA, 545 bp, Homo Sapiens
  misc_feature (479)..(479): n is a, c, g, or t
taatttaatatttattaggagataaataacttcttgtcaagggcttggacattggataagggattgaattacatatatttaagtccctaaaatttgattctgattcttcatgtacattaataacttataaatcataacatgatgtctgtaacagaactataaagccccacagaaatacaacataaaggtttttgacagagggaatcatttcaaaagaatgtagcatacgagttggggctcggatgattggtaggattttgattgtaatagcagacatctcaagctaatgattaagtgaagttgagtgtatggggattgcaactacactgcaatttaaggacaaaaagggagaattttcactttggctaaactgattcgatcatcttcatgaaatctcagtcactgacaaacgggaggggaaataatgtgtttttattttaacccagaaacctgggttcattcaagattttaagcagttncttaaagttcaagttattacgttaagacccttcagcctctaaaattccaccctttccctacatcct

SEQ ID NO: 255670 - DNA, 672 bp, Homo Sapiens
  misc_feature (89)..(89): n is a, c, g, or t
aaggggtttaccatttaaacccaacggggggttttgtgggggttccgggttgttttttgcgcaaaagtgccatcttgggtgttttttanaccccgacccctaaaaaaaataggccccccagggaccaagttcccaaataggatttccgcgcctaaatttttgaacaaattttgaaatggtgaaggcaattaagttttaaaacctttctaaaatgttttgggttaaaatttttaaattggggcctcttagaataattttgaaatgagatctaccgactcacttgtgagaatatttttcacagattatctttgggccttttcattagaaagctgtttgtttgtccccctgttggtacatttggttacctcattttgccgtttcagattgtgaaagctcacaggggtgttttttggaatcatttgctgagtcattttctcaaatcatattccattgtatcagttaacatatagttttaaatgtatgtattataaatatctgtaaccaaatcatttgaaggcttgataaatttttaacaaagtttgtacattttttatgaaagttactagtaatgctttactaagtagtgcaatgaatttttatttttaatccctgtgcccaattttggagttgagagggttgttggtaataaatgtatgatggcccctttaaccc

SEQ ID NO: 255671 - DNA, 684 bp, Homo Sapiens
  misc_feature (564)..(564): n is a, c, g, or t
  misc_feature (572)..(572): n is a, c, g, or t
cggtctgtttgggcccggaaagaaaatgatatgttaatgttagcagaaattgagtcactctggttgtagagaaacaattttgaatatggaaattgaatgagtatataacaaattactgtaaagctcaaatgtgataatgtatgtgaaaccgtctgttatatgttaaggcctttgcatctggcaggcagcatggttatggaggatgacaccaagtccatgtacctataatccacagagacatttaatagctttgcaagccaaccagtttcaatgatctacacaggaaatcctggcaaatgttgctaacagcaacttgactaatagaaattgcctgatttgagttggaaagcatttttgacgtacctgcctaccctgctttggcagatgtgctcatagctgaagagtggtcactaagtggaagggaggaagcacaccccatgaaaaatctatcaactggtggattaacacctggacaattaatatttgactatattgccaaagtgattggatatttcatagtgaacaatactttgacttcatgtacctagcacttaattactgaangtacattnattatctatttaagaattgtaatgagttactactaggaagaagtttatgtcattggagactattggaaagataaattatgagttgttgttaaaatgaaaggaaatggttcta

SEQ ID NO: 255672 - DNA, 545 bp, Homo Sapiens
  misc_feature (336)..(336): n is a, c, g, or t
  misc_feature (400)..(400): n is a, c, g, or t
  misc_feature (418)..(418): n is a, c, g, or t
gtgtgtgccactgttcctggctcctaacatcttttctagcttttctccttcttacccaagatcaaaccaagttccatgcatggtgtttacggccaatctcagtaatccagagcagtctgtcccacctttctctcccagctacccaatgactgtagaagatgtgaagtcagtattctcataaagtattccacaattttgtgtctaacttaatcttttatcccccatatttccttgtaaatagggaatccaatggactaaattcaggttagacattttttgctagaatataccacaagtgatggtgataatgtcagactgcactacatgagcaccgtnatacacgcttgatccattttcagtgaaactagctttgcccacctggaataagtggagactatanggcacttcatgttaaagngggtcttctttacaatgagaaataatttaaggatgctcttaacaaccctggaattttctgtttcccaaaaaaccttaaccggtggacctggctggattatttcattgagggtaccaaaaggggacat

SEQ ID NO: 255673 - DNA, 682 bp, Homo Sapiens
  misc_feature (65)..(110): n is a, c, g, or t
aataaggaaataaaaaaaatttttgggcagttaaccaataagtgcttaagctaaatgtcatcacnnnnnnnnnnnnnnnnnnnnnnnnnnnnnnnnnnnnnnnnnnnnnngctctaggaagctaaggtcaatttatattggagaaataaaattatttttatgaatttactgtagcctaggtgtacattatttatcatgtctcaagtagtgttcagcaattaggccttcacattctctcaccactcactcactcagtcactcacccagagcagcttccagtcccgcaagctccatttatggtaagtgccctgtacaggtgtaccatttttttaatccattataccatatttttattgcaccttttctatgtttagatttgtttagatacacaagtacccctgtgttacagttgcctatagtactcagtacagtaacaccctttacaagcttatagcctaggaacaataggctataccatctaggtttgtgtaagtacactcttatgatgttcacccagtgacaaaatcgcccaaggatgcattcatcagaacacattcccattgttatccaatgcatgactgtataatggttttatggattaaattttttatgtaattcaactggaaagtatttttatgttattttggaaaaaataaaacaatgacaattgaaatcatggaaa

SEQ ID NO: 255674 - DNA, 871 bp, Homo Sapiens
  misc_feature (151)..(151): n is a, c, g, or t
  misc_feature (858)..(858): n is a, c, g, or t
ttgtctctatcatgtcaccataaactgtaatattttcaagggttatagatcaaagatatttatttagaaatgtacaagataatgaaatttagattccttatacttaaggctgattttattagaagattattttaatgttctattataaatnttaagaatttgtattcaaattgtatgtaaaatatgtaaaatgttgacggtactatattaagtggttctataaaagctattcacaagttctactgtgatggacatcctcatcatagacaaacctcctctgttttatcctcaatttctagttacagaaatttggtgatgcttatttttgccaattttatgtcaaaataagttaaaacttccctcctgttcacctcttgggtctctatcctgtgtaacctctggtgtagtatttgcccataggaaaccagagccacttcctctgaacccaacatctcctggggaccttcgcagcaagaggaaagcactgagacaatagcttgctaagcaggggcccagtggtgtcttcagagaaaccatgggtgtcctcgccacttcccagggagggtgaggtgagctcgggaacataacgatgttttgacttacaataggcatgaaatcgcaactagaaaaattagggcagtttttaaaaatgtcatagttatctattgcatgaactggagtaattcccacctggtggtgaaaggattgttatttcacacatgaaaaattcatccagttttactaaaatgtaattttttctgtcatttgaaagtactgacaactatttgtaactaatcttccttaagaactgtatttgagggtatcaaatcaagcttgtaatttaaaatctgtaccaanaaaaaatttaaaa

SEQ ID NO: 255675 - DNA, 1337 bp, Homo Sapiens
  misc_feature (19)..(19): n is a, c, g, or t
  misc_feature (25)..(25): n is a, c, g, or t
ggaaggtgaagctgaaggntatctngtgttcaagcagccctggccagggatcatgcgcacagtctatgggaaccacgaacgctttgagacaacctactttaagaagtttcctggatactatgttacaggagatggctgccagcgggaccaggatggctattactggatcactggcaggattgatgacatgctcaatgtatctggacacctgctgagtacagcagaggtggagtcagcacttgtggaacatgaggctgttgcagaggcagctgtggtgggccaccctcatcctgtgaagggtgaatgcctctactgctttgtcaccttgtgtgatggccacaccttcagccccaagctcaccgaggagctcaagaagcagattagagaaaagattggccccattgccacaccagactacatccagaatgcacctggcttgcctaaaacccgctcagggaaaatcatgaggcgagtgcttcggaagattgctcagaatgaccatgacctcggggacatgtctactgtggctgacccatctgtcatcagtcacctcttcagccaccgctgcctgaccatccagtgaacatgatcctgacctttacctaggattcctcctgctccaaactttgcccatcctctttgccccctcaggagtgctgagggccagtgttgacccacactaccctcccttgaccagctgtctgggaccggaaaccagctttgtctccaggtagagacaacatcctgtgactgccaggcagaaaggacagggcccaggtcagcctcagtctgctgtgcctccagactgcagagctctcagaacccagaacagagacgaaaaggctacctctcctacccaagttaagtgttcaaaggggatgtgagggcctccactgaagcagggaggcagctgtgtaatcctatgtcagctctcttaggaagccccagtacttatattgggcatgcacttgcccttaaaaacaatgatttgtgagtccaggaacaatttactatttttaaaatattttgctgcttctgttctgggtctgaattcccttttgtgccagatgccagtactgtctgcccattggctccaggggctgtatgggcagattcagtctccagagggtattcagatcatctgcttctttgaaggagtaaatgtgttttgttcctagggccagaggagcttgtcttccttgtcctctgttcccaccctcccctgaacagaacccagcccataagagacattctcagatgaaactctgttttcttgccccagtcaggctcaagccctgtggttgtaggaataaagcctgtgatctccagaaaaaaaa

SEQ ID NO: 255676 - DNA, 461 bp, Homo Sapiens
agaacagagacgaaaaggctacctctcctacccaagttaagtgttcaaaggggatgtgagggcctccactgaagcagggaggcagctgtgtaatcctatgtcagctctcttaggaagccccagtacttatattgggcatgcacttgcccttaaaaacaatgatttgtgagcccaggaacaatttactatttttaaaatattttgctgcttctgttctgggtctgaattcccttttgtgccagattcagtctccagagggtattcagatcatctgcttctttgaaggagtaaatgtgttttgttcctagggccagaggagcttgtcttccttgtcctctgttcccaccctcccctgaacagaacccagcccataagagacattctcagatgaaactctgttttcttgccccagtcaggctcaagccctgtggttgtaggaataaagcctgtgatctcaagaa

SEQ ID NO: 255677 - DNA, 695 bp, Homo Sapiens
  misc_feature (116)..(116): n is a, c, g, or t
  misc_feature (124)..(124): n is a, c, g, or t
caggaaaaaattcggtcggttcaatttgcgtagcgggcccctcccttgggtgtgggctccaaacctcctttctttatgtttgtgggagtggggaccccatcagcagcattcttcanccaaccanccaatgggttctacttagtggtgaatagatgggctatttaattggtaaaagttgctggtctgaccacaccacagcatgcccactgggttcattaaaagatggcctccgtttccaacgttccccacaaatgcttgcttctttcccagtcaagaggggatctcgagactcccgagtggaggtcgtgagcttgcaccccgcctggctgtgtagatcgactgtatagatacatgaagtgggggtgagggccaaggggctattactgctgttgggaaatacttgcctctcgtagatccagccttaatgtttttctgacatcctagtaatagcagaccctgcacaaagtggatatcagacttaatactgtgaggagacaaaataatgagaatagttttaccaaagataatgaaatctcgcatcatgtctgcattttaccatagattggagtgcatccttaggaaactgaatgtaacaaaaacccaggacatttttggaaattgtatgctctctagcaactttgtgtgaatttttatacaaacactgttttatgagttatataaaatgttataaaaat

SEQ ID NO: 255678 - DNA, 754 bp, Homo Sapiens
  misc_feature (727)..(727): n is a, c, g, or t
aaagccggaagccaaagacaatacaaatctgtgcttcctatttcaacacatcaatttcagcaacgactgcttcttttcagaaaccgcataagcatcgtcaaattatttgaattaatagaaggatttttctaaggggtgtggtttcaacttaataccatgatttcttgtaccacttctgccatgcttaaaatgtccggccaaatcaaacaagcagactcactaggctgaagtttgatgacctttagaatactgcagaaaggactgtgctgagttttgcctctttgggtcatatcagacaaataacctcaataatgatatacaaaggaaaatgtaatatgccagagacgtacatcatcattatgcaagacgctaaactttgaggaggccaattttaaaatcatgcttctgaaacatgtttactacataatactgaaaacaatcaaatcttgctgtcatatttggagaagacaagtgggagattaccagtttgtgctactaaagaatgttcccaaaaggaatgatgatagaagctacataaaatgtttatgcagcagagagggcgctttcatttttcatctgggttttggtttaacataagtaggcctgcttgttctctgagccagtaacaggctacctacaatttcacgggcgcttgcctttctgataggagcttgtaccgttgggtctgtcttgctcttctctctcaattcagattttaaacaagttnccaataacccaagaaacttcttggtag

SEQ ID NO: 255679 - DNA, 372 bp, Homo Sapiens
attaaaggcctcccaagctgcaggccctgtgccaggttttgcacagacattacagcaaaacattatgtaaatcaggtggcagtttacttgcctctgtgttcttcagctaaagcatttgcccacgtcttttacctttcttgggtgaacatcaggaacagcacttcataaggtttgggttcagccagcagtgggatcattcaaacagattgaaggcaaaaagacatgcgtttgtttcagcccaaaagtgattaaaaatggactgaggtttcaagtgaggaatgggaaaaatcttagccgcctgtaattaaaagaaaagaagagcatgatacgtacggatcacgaggtgaggagttcaagccggatgaacatggt

SEQ ID NO: 255680 - DNA, 810 bp, Homo Sapiens
  misc_feature (759)..(759): n is a, c, g, or t
  misc_feature (770)..(770): n is a, c, g, or t
agaaaggatttgctgggggctacgtgtctctgcgggattgtttcaaccttttcactaaggaagaagagctagagtcggagaatgccccagtatgtggaggttcacaagggatacagtaagggtgggagacctggggggactccatgtggataaaagggattgcatgatgtcttcatatggggaataatatttatgtatctgggtttgtgttggagtctcagatctgttctagtactcctagagcaaaggggagaagccaagaggatccagctgtaatgaagagcatactaaatttgtatgtggatcggggtgtcagaaaagccaattgaggttaggagcatattaacctaacactgtttgccatttattcaggtgtgtgaccgatgtcggcagaaaactcgaagtaccaaaaagttgacagtacaaagattccctcgaatcctcgtgctccatatcctaatcttcagattcttacttctcttaggatacctcccatacattctctttcctccatgtttccagagaattgaattttccttaggaaaagtctgccacccacttttccacaagatgctcccagtgtgtcgggagtggggagaggacagctttcaggatagaagaagttctcctcagagggcccactgcctcccaaatgctccttaaaccaggggcttaggatctggaattcgcatttttctggcctcccgagggttccattcaaaaaaagtttcagtagggtgttaggacttttcccactgncaggcgaattnaggccttaggggggatttttgcccagttgacaaaggcctt

SEQ ID NO: 255681 - DNA, 1203 bp, Homo Sapiens
agcgccaaaatgggatataacactcggctataagcaggctggtacggtcggaatctgggatatcgtcgaccacgcgtcgcgagctgtcttccagaaatatgttccctccttctctggatacagccagcaggatgcccaagagttcctgaagctcctcatggagcggctacaccttgaaatcaaccgccgaggccgccgggctccaccgatacttgccaatggtccagttccctctccaccccgccgaggaggggctctgctagaagaacctgagttaagtgatgatgaccgagccaacctaatgtggaaacgttacctggagcgagaggacagcaagattgtggacctgtttgtgggccagttgaaaagttgtctcaagtgccaggcctgtgggtatcgctccacgaccttcgaggtttttgtgacctgtccctgcccatccccaagaaaggatttgctgggggcaaggtgtctctgcgggattgtttcaaccttttcactaaggaagaagagctagagtcggagaatgccccagtgtgtgaccgatgtcggcagaaaactcgaagtaccaaaaagttgacagtacaaagattccctcgaatcctcgtgctccatctgaactcgattttctgcctcccgaggctccatcaaaaaaagttcagtaggtgtagactttccactgcagcgactgagcctaggggactttgccagtgacaaagccggaagtcctgtataccagctgtatgccctttgcaaccactcaggcagcgtccactatggccactacacagccctgtgccggtgccagactggttggcatgtctacaatgactctcgtgtctcccctgtcagtgaaaaccaggtggcatccagcgagggctacgtgctgttttaccaactgatgcaggagccaccccggtgcctgtgacacctttaagctttggcacctgtgaagccctttaaacacccttaagcccccaggctccccgtttacctcaaaaacgtctatctttgtgtctttttaatcggggaagggggaagcggtggttgtaactccattattttgtttattaaaaaatacccttccacctggaggctcccttgtctcccagccccatgtacaaagctcaccaagcccctgcccatgtacagcccccagaccctctgcaatatcactttttgtgaataaatttattaagaaaa

SEQ ID NO: 255682 - DNA, 630 bp, Homo Sapiens
ttgtgcctgcaaggccatgggtgggtacctttccggggagcttatggtaagtgaggacgccagacagaacaagctggccggtaggtgcttcaacgggcccaaggagcaaatggataggtcctcagcccaggtggtggccgaaatgttattttaacaaggaaagaccacagcaagattctttcattcgtctcctccaagcctgggggaccaggctcgaactgaccctggacatcaaaggagggattatgtggctgctaaagccatcggcccacagccctgttcacatcttggtgcttctctttcccagaggctggtcccagccaggcacacacaaaaggcagattctcgtaaacgcagcctccctccctggaggctgcctcctgccctggatctggagtggagctgctctgagattttgagttcttctgcagagatgattaaatatatccaagagacattggaaaacctgctgaacattttacattggtctgctcagcacatggctggatgcggatatttctataattccagaaagtcacacagctcctctgtatgagaccagtgggcgccatttaaaagaacaggatgagaatctaagatatattattaataaatgtaatggatttttaa

SEQ ID NO: 255683 - DNA, 1367 bp, Homo Sapiens
  misc_feature (682)..(682): n is a, c, g, or t
ttcttacaaaaaactaaaaccaaatgcatcatctaagtcgtgtgaaatcatgtggtagctcatggctgtgagcggggcggggcggggctttcggaggagctcctgttgttctgggcgcggtgaactctctcttgtatttgcagtccaggccttcgcgtctcctgcgccagcagacggtgcccacggagctcccagctgaggcgctgcttctccgggctgtcgattggacccgccctccggtgcctactgagctgatatcagttctcattttacacactggctcagttcagcaggaacaggagtcgagcccttgagcaaaaagccttcgtgtctgtaagtgcccgaggctcaggagagctggggctcccactcgcggcagacaggcccgcgtccaccctgcgtccaccccggcccggcggcagcacggtgccagtcatctgcatgtgctcctgcggcgtggggggtttgtagacttggaaaaccccgttggcagaaagttaagagctcccaggcctgaaggcaggacacagtgccagcagggggccgtttgcccccatgtgtaagggaggcagggcccagctctcccacggcgaggtgagctgagactttctgagaatagttagagtgggtgcgtgtctgaaatgggtactcctaagcagctattgtgtacgcaaagcctgangtacagcctgctggtgtcatggccacgttgtgagcaggccagcgtcacacggctcgctgtgacccgtcccggagactgaaatgggcctgggtcttctccttgtcctgtgattaaagtcctctcttgaaagtggagagcaaaggcacacagaggtgcgcgctcacaagaattcctcccggtgactgggtaatcaatgttactgctgtttcctttgcaggaaagaccacagcaagattctttcattcgtctcctcctagcctgggggaccaggctcgaactgaccctggacatcaaaggagggattatgtggctgctaaagccatcggcccacagccctgtgtcacatcttggtgcttctctttcccagagagctggtcccagccaggcacacacaaaaggcagattctcgtaatacgcagactccctccctggaggctgcctcctgccctggatctggagtggagctgctctgagaatttgaggtcttctgcagagatgattaaatatatccaagagacattggaaaacctgctgaacattttacattggtctgctcagcacatggctggatgcggatatttctataattccagaaagtcacacagctcctctgtatgagaccagtgggcgccatttaaaagaacaggatgagaatctaagatatattattaataaatgtaatgga

SEQ ID NO: 255684 - DNA, 464 bp, Homo Sapiens
  misc_feature (118)..(118): n is a, c, g, or t
  misc_feature (387)..(387): n is a, c, g, or t
cgagcccttgagcaaaaagccttcgtgtctgtaagtgcccgaggtcaggagagctggggctcccactcgcggcagacaggcccgcgtccaccctgcgtccaccccggcccggcggcanacggtgccagtcatctgcatgtgctcctgcggcgtgggggtttgtagacttggaaaaccctgttggcagaaagttaagagctcccaggcctgaaggcaggacacagtgccagcagggggccgtttgcccattgttgtaagggaggcagggccagctctcccacggcgaggtgagctgagactttctgagaatagttagagtgggtgcgtgtctgaaatggggtactcctagcagctattgtgtacgcaaagcctgagttacagcctgcntggtgttcatgggcaacgtgtgaagcaaggccagcgttcaaaagggttcgttgtggaacccttcccggagattgaat

SEQ ID NO: 255685 - DNA, 1122 bp, Homo Sapiens
  misc_feature (137)..(172): n is a, c, g, or t
ggcgctggacaaacattcctttgctggtcaagatcctaaagctgatcatcaacgagctctccaacgtcatggaggctaatgccgctcgccaggccactcctgcagagtggagtcaagatgactccaatgatatgtgnnnnnnnnnnnnnnnnnnnnnnnnnnnnnnnnnnnntggtttagctggccaacttttatctgacattcttgctacaagtaaatatgaggaggattactacgaggatgatgaggaagatgaccctgatgccctgaaggatcctctctatcagattgatctgcaggcatatctcacagatttcctctgccagtttgctcagcagccctgctacataatgttttcaggccaccttaatgacaatgagaggcgagttctacagaccatcggcatctaaaaaggggagcctttctacatttgctccttctgggccagccgcaaaccattttgcagccctcactggccttgagatgcactttcttctcaacctaaagtggcatcttgacccttggcccttggcctcggcagtgacactgatgacaattcagaccaggctcaccggtgccgtcacttaggaatgctggaacaaaggacatttctcaaagttcccctgaagacatgccatctctagaaccttttttctccccgactctacccccacctctgttcctagagccctctgctggcgagtccagaaacattattgcccagaaggattatgtgtttatggattattttgccccgcctcaggagcgcaggaagtcactaccatttatattctaaaacagacctatctatgttcataggacttctgatgtgttcagataggaatcctcatgagagatcattatgctttgtgccctggaccactgctgctctgggttctcaggaggaacaggcaagagcagcttcattctaagcctttccagtgacctcagccttgcttctcttctacaacactaaggctcctctgtcagaggaggtcgtcttgtttttgctttcattgcatggacataaacccttccccctcaagctggtccctatattatacatggcacccccccaaaattaaagcccaaaaaagaatgggcaaaatttgaaaccttccc

SEQ ID NO: 255686 - DNA, 681 bp, Homo Sapiens
  misc_feature (230)..(230): n is a, c, g, or t
ttgtcttcttgtcctcaaaagcaggtggtgtaccgtggaacctgaccggggaccacgggtgtccaaaataattgtggcgtggccccaaaacatagtgcggtctcctttttcgtggagccagttttagttttaaagccattagttaagatcagctccttgtgtggaaaacgcccttctgttataaagctcaggggcaataaggaagcagaggccctttgggggtgccctcntgaagagagcgtcaggccatcagctctgtccctctggtgctccaacgtctgtccttcaccctccatctctgggagcagctgcacctgactggccacgcgggggcagtggaggcacaggctcagggtggccgggctacctggcaccctatggcttacaaagtagagttggcccagtttccttccacctgaggggagcactctgactcctaacagtcttccttgccctgccatcatctggggtggctggctgtcaagaaaggccgggcatgctttctaaacacagccacaggaggcttgtagggcatcttccaggtggggaaacagtcttagataagtaaggtgacttgcctaaggcctcccagcacccttgatcttggagtctcacagcagactgcatgtgaacaactggaaccgaaaacatgccgcagtataaaacaaacattataaaacg

SEQ ID NO: 255687 - DNA, 708 bp, Homo Sapiens
  misc_feature (176)..(176): n is a, c, g, or t
tttcgcaaagggctggctacagtgataagccaccttccaagattctgggcaacaactactttattaagccctgcatagaccaggagtaccagatcatcgcccagatcaatggcaactacgcccgcttgctggacacagttcctctggattatgagtttctggccactgagggcaanagtgtctgttaaaaatgccccattaggccaggatctgctgacataattgcctagtcagtcctagccttctgcatggccttcttccctgctacctctcttcctggatagcccaaagtgtccgcctaccaacactggagccgctgggagtcaaactggctttgccctggaatttgccagatgcatctcaagtaagccagctgctggatttgcatctgggcccttctagtatctctgccgggggcttctggtactcctctctaaataccagagggaagatgcccatagcactaggacttggtcatcatgcctacagacactattcaactctggcatcttgccaccagaagacccgagggaggctcagctctgccagctcagaggaccagctatatccaggatcatttctctttcttcagggccagacagcttttaattgaaattgttatttcacaggccagggttcagttctgctcctccactataagtctaatgttctgactctctcctggtgctcaataaatatctaatcata

SEQ ID NO: 255688 - DNA, 702 bp, Homo Sapiens
  misc_feature (155)..(155): n is a, c, g, or t
ttagcaggtctttaaagccagagcccaaaaatgcctgttgtattttgggaaacctccaatgttggatcctttagcacctaggaaccattacttcaccggggcatcctgcacctgtacactgttagctcccacatagtaagcggtgtatattacantcagtgtctgtaaattggtagttagatcaactttcacagaaaatagtctttaacgttcgattgtgtagagatatatatcttgcgtttaaaaaaatgacataaaatgtgtctaacactacccagactttaatcagcatctgtattcagtatcaaatgttttgtattttcgaggctgaaaagaaatttgtaactttatcatatgccacataccaatgacttcaacttttaaacagaattgaaggacatctcccaattgcatgtgcctaccatatatttaaaaaggttttactgagaaccaccccccggccccagggaggatccacatgaaatgatcctcctgctagatttgatgttatcccggtatagactggtatatgtaatgtaaaaattttttcatttcatgttagatggataatgtgctcatggggtaaacaggtttgaaggaggcatatctcatgtgactgggagaagccaatcatcatgcttatgaactacaagaggatctatactggtatattttcttggatttaataaagctttaacaata

SEQ ID NO: 255689 - DNA, 1450 bp, Homo Sapiens
  misc_feature (1369)..(1390): n is a, c, g, or t
agtacccagtagtcatctgtgccagggggttatccaggtacagaacattcccatcgttgcagaaggttctatcagctagcactgggttggacgacacttgccaagacgagctggctagaggatggttctccggacctggtcccacgtggttcccagctggctggaggcgtgatcctgggtgtggccctgtggctccgccatgacccgcagaccaccaacctcctgtatctggagctgggagacaagcccgcgcccaacaccttctatgtaggcatctacatcctcatcgctgtgggcgctgtcatgatgttcgttggcttcctgggctgctacggggccatccaggaatcccagtgcctgctggggacgttcttcacctgcctggtcatcctgtttgcctgtgaggtggccgccggcatctggggctttgtcaacaaggaccagatcgccaaggatgtgaagcagttctatgaccaggccctacagcaggccgtggtggatgatgacgccaacaacgccaaggctgtggtgaagaccttccacgagacgcttgactgctgtggctccagcacactgactgctttgaccacctcagtgctcaagaacaatttgtgtccctcgggcagcaacatcatcagcaacctcttcaaggaggactgccaccagaagatcgatgacctcttctccgggaagctgtacctcatcggcattgctgccatcgtggtcgctgtgatcatgatcttcgagatgatcctgagcatggtgctgtgctgtggcatccggaacagctccgtgtactgaggccccgcagctctggccacagggacctctgcagtgccccctaagtgacccggacacttccgagggggccatcaccgcctgtgtatataacgtttccggtattactctgctacacgtagcctttttacttttggggttttgtttttgttctgaactttcctgttaccttttcagggctgacgtcacatgtaggtggcgtgtatgagtggagacgggcctgggtcttggggactggagggcaggggtccttctgccctggggtcccagggtgctctgcctgctcagccaggcctctcctgggagccactcgcccagagactcagcttggccaacttggggggctgtgtccacccagcccgcccgtcctgtgggctgcacagctcaccttgttccctcctgccccggttcgagagccgagtctgtgggcactctctgccttcatgcacctgtcctttctaacacgtcgccttcaactgtaatcacaacatcctgactccgtcatttaataaagaaggaacatcaggcatgctaaacaaagacatgacacagaaagcccataagctcgagnnnnnnnnnnnnnnnnnnnnnnaaaattatgaaatatgttaatgttaattttagggaacagctatacacaaatgtttatctt

SEQ ID NO: 255690 - DNA, 431 bp, Homo Sapiens
ttggagtcctggacgttggagggattacccactactgatacctgcagaatggactgcagaaaagtctcaaaaataatgcctttattccttccctccctaaggaggcaaagagttgatttacctttgtgaagagaaaacccttatctaggacatccacagggtagaggttgggtgtgtgtacgggagtgtctgaggcccagtgtgttttttagggttaccccatgtaaagcacttaccgctgtgcttggaattcagcagctgtcaaaggtgcaatttcaggggcagggaacctttgaggatttgggcccgaccctcactacccctgagatattagttcccaggcctgttttcccacaggattgtgggctctctgcttccttagtcggaagtgttttcaactaatcaaataaatgaatgaatgatggtttggg

SEQ ID NO: 255691 - DNA, 1643 bp, Homo Sapiens
gtgcgcagcggcgtatgtggggccgtgtgcagacccgcgtgtggcgcaggcaaggaccctcaaaataaacagcctctaccttgcgagccgtcttccccaggcctgcgtccgagtctccgccgctgcgggcccgctccgacgcggaagatctgactgcagccatgagcagcaatgagtgcttcaagtgtggacgatctggccactgggcccgggaatgtcctactggtggaggccgtggtcgtggaatgagaagccgtggcagaggtttccagtttgtttcctcgtctcttccagatatttgttatcgctgtggtgagtctggtcatcttgccaaggattgtgatcttcaggaggatgaagcctgctataactgcggtagaggtggccacattgccaaggactgcaaggagcccaagagagagcgagagcaatgctgctacaactgtggcaaaccaggccatctggctcgtgactgcgaccatgcagatgagcagaaatgctattcttgtggagaattcggacacattcaaaaagactgcaccaaagtgaagtgctataggtgtggtgaaactggtcatgtagccatcaactgcagcaagacaagtgaagtcaactgttaccgctgtggcgagtcagggcaccttgcacgggaatgcacaattgaggctacagcctaattattttcctttgtcgcccctcctttttctgattgatggttgtattattttctctgaatcctcttcactggccaaaggttggcagatagaggcaactcccaggccagtgagctttacttgccgtgtaaaaggaggaaaggggtggaaaaaaaccgactttctgcatttaactacaaaaaaagtttatgtttagtttggtagaggtgttatgtataatgctttgttaaagaaccccctttccgtgccactggtgaatagggattgatgaatgggaagagttgagtcagaccagtaagcccgtcctgggttccttgaacatgttcccatgtaggaggtaaaaccaattctggaagtgtctatgaacttccataaataactttaattttagtataatgatggtcttggattgtctgacctcagtagctattaaataacatcaagtaacatctgtatcaggccctacatagaacatacagttgagtgggagtaaacaaaaagataaacatgcgtgttaatggctgttcgagagaaatcggaataaaagcctaaacaggaacaacttcatcacagtgttgatgttggacacatagatggtgatggcaaaggtttagaacacattattttcaaagactaaatctaaaacccagagtaaacatcaatgctcagagttagcataatttggagctattcaggaattgcagagaaatgcattttcacagaaatcaagatgttatttttgtatactatatcacttagacaactgtgtttcatttgctgtaatcagtttttaaaagtcagatggaaagagcaactgaagtcctagaaaatagaaatgtaattttaaactattccaataaagctggaggaggaaggggagtttgactaaagttctttttgtttgtttcaaattttcattaatgtatatagtgcaaaataccatattaaagaggggaatcaaccggactg

SEQ ID NO: 255692 - DNA, 1333 bp, Homo Sapiens
  misc_feature (1295)..(1295): n is a, c, g, or t
gggggggccgtgtgcagacccgcgtgtggcgcaggcaaggaccctcaaaataaacagcctctaccttgcgagccgtcttccccaggcctgcgtccgagtctccgccgctgcgggcccgctccgacgcggaagatctgactgcagccatgagcagcaatgagtgcttcaagtgtggacgatctggccactgggcccgggaatgtcctactggtggaggccgtggtcgtggaatgagaacccgcaaaagaaacagcctctacctcgcatagacgtcttccccaggcctgcgtccgagtctccgccgctgcgggcccgctccgacgcggaagatctgactgcagccatgagcagcaatgagtgcttcaagtgtggacgatctggccactgggcccgggaatgtcctactggtggaggccgtggtcgtggaatgagaagccgtggcagaggtggttttacctcggatagaggtttccagtttgtttcctcgtctcttccagacatttgttatcgctgtggtgagtctggtcatcttgccaaggattgtgatcttcaggaggatgcctgctataactgcggtagaggtggccacattgccaaggactgcaaggagcccaagagagagcgagagcaatgctgctacaactgtggcaaaccaggccatctggctcgtgactgcgaccatgcagatgagcagaaatgctattcttgtggagaattcggacacattcaaaaagactgcaccaaagtgaagtgctataggtgtggtgaaactggtcatgtagccatcaactgcagcaagacaagtgaagtcaactgttaccgctgtggcgagtcagggcaccttgcacgggaatgcacaattgaggctacagcctaattattttcctttgtcgcccctcctttttctgattgatggttgtattattttctctgaatcctcttcactggccaaaggttggcagatagaggcaactcccaggccagtgagctttacttgccgtgtaaaaggaggaaaggggtggaaaaaaaccgactttctgcatttaactacaaaaaaagtttatgtttagtttggtagaggtgttatgtataatgctttgttaaagaacccctttccgtgccactggtgaatagggattggatgatgggaagagttgagtcagaccagtagcccgtcctggggtcctttgaaatgttcccatggtaggaggaaaaccattctggaagtgtctatgaacttcataataacttttaattttagaataatgatgggcctgggattgtcttgacctccnttagctattaaataacatccagtaaacatctggtatcg

SEQ ID NO: 255693 - DNA, 854 bp, Homo Sapiens
  misc_feature (660)..(660): n is a, c, g, or t
  misc_feature (777)..(777): n is a, c, g, or t
gggatgtggggccgtgtgcagacccgcgtgtggcgcaggcaaggaccctcaaaataaacagcctctaccttgcgagccgtcttccccaggcctgcgtccgagtctccgccgctgcgggcccgctccgacgcggaagatctgactgcagccatgagcagcaatgagtgcttcaagtgtggacgatctggccactgggcccgggaatgtcctactggtggaggccgtggtcgtggaatgagaagccgtggcagaggtggttttacctcggatagaggtttccagtttgtttcctcgtctcttccagatatttgttatcgctgtggtgagtctggtcatcttgccaaggattgtgatcttcaggaggatgcctgctataactgcggtagaggtggccacattgccaaggactgcaaggagcccaagagagagcgagagcaatgctgctacaactgtggcaaaccaggccatctggctcgtgactgcgaccatgcagatgagcagaaatgctattcttgtggagaattcggacacattcaaaaagactgcaccaaagtgaagtgctataggtgtggtgaaactggtcatgtagcccatcaactggcagcaagacaagtgaagtcaactgttaccgctgtggcgagtcaggtcaccttgcacggnaatgcacaattgaggctacagccctaattattttcccttgtccgcccctccctttttctgaatgatgggtgcaattaattttctctgaaatcctcttcactgggccaaagggttggncagaataaaggcaaattccccaggcccagttgagctttacttggcccctggtaaaaggaggaaaaggggttggaaaa

SEQ ID NO: 255694 - DNA, 192 bp, Homo Sapiens
gcactatgaagattgttcacctttgctgcatttgggagttatatggttatttggtaacattaagaactactggattttaatgcaatcctgcataaaaatataatttatactatgtgaaaaaataagacaggacttaccactaggaaccaccaagaccaatcatcattaacttttttaagattgtgttttatt

SEQ ID NO: 255695 - DNA, 467 bp, Homo Sapiens
  misc_feature (90)..(90): n is a, c, g, or t
tagtgaaggtggcttttgctttatagtttggctggggagcacttaattcttcccatttcaaaaggtaatgttgcctggggcttaacccanccctctttgggcaaggttgggacaaagccatctgggcagtcaggggcaaggactgttggaggagagttagcccaagtataggctctgcccagatgccatcacatccctgatactgtgtatgctttgaagcaccttccctgagaagggaagaggggatctttggactacgttcttggctccagacctggaatccacaaaagccaaaccagctcatttcaacaaaggagctccgatgtgagaggcaaggctgccccctgccccagggctcttcagaaagcatctgcatgtgaacaccatcatgcctttataaaggatccttattacaggaaaagcatgagtggtggctaacctgaccaataaagttattttatgattgc

SEQ ID NO: 255696 - DNA, 518 bp, Homo Sapiens
cccccagtccttccggttccaatggggggcctgctggagcaatttgcccgttggtgttggaatccggagcaatcagcagcaatgtccttgtgaagaagccagccccatgacattttcctgctcctctctcagctgagcccttagcagagaatcaaaaccatgcctggccgaaggggtacttccaggtcaggggaaatttcagtcccccatctccatcatgaacatggcagccccaaagctgagcaaggccaaagacagggttttccaacccccagcctcttgactggtgaccaccaccccttcttgtcactgtctcccacccaccccatctttgctgggattcccatcaactctcagaactgtgtggggtttccctggggccttgtggaagccatgacttcacaaagaccctacctgtcagttcttgtttctggggaggagggatcacctgcactgagaatgaggcagtttgacacagatcacaaaataaaatcaaagtctttttgaatagccgaaaa

SEQ ID NO: 255697 - DNA, 1593 bp, Homo Sapiens
ggtccatatgctacactgaccatgactttggcacagaccaacttctgcaagaaacatggatttgatccacaaagtcccctttgtgttcacataatgctgtcaggaactgtgaccaaggtgaatgaaacagaaatggatattgcaaagcattcgttattcattcgacaccctgagatgaaaacctggccttccagccataattggttctttgctaagttgaatataaccaatatctgggtcctggactactttggtggaccaaaaatcgtgacaccagaagaatattataatgtcacagttcagtgaagcagactgtggtgaatttagcaacacttatgaagtttcttaaagtggctcatacacacttaaaaggcttaatgtttctctggaaagcgtcccagaatattagccagttttctgtcacatgctggtttgtttgcttgcttgtttacttgcttgtttaccaatagagttgacctgttattggatttcctggaagatgtggtagctacttttttcctattttgaagccattttcgtagagaaatatccttcactataatcaaataagttttgtcccatcaattccaaagatgtttccagtggtgctcttgaagaggaatgagtaccagttttaaattgcccattggcatttgaaggtagttgagtatgtgttctttattcctagaagccactgtgcttggtagagtgcatcactcaccacagctgcctcctgagctgcctgagcctgggtgcaaaaggattggcccccattatggtgcttctgaataaatcttgccaagatagacaaacaatgatgaaactcagatggagcttcctactcatgttgatttatgtctcacaatcctgggtattgttaattcaacatagggtgaaactatttctgataaagaacttttgaaaaactttttatactctaaagtgatactcagaacaaaagaaagtcataaaactcctgaatttaatttccccacctaagtcgagacagtattatcaaaacacatgtgcacacagattattttttggctccaaaactggattgcaaaagaaagaggagaagaatattttgtgtgttcctggtattcttttataagtaaagtttacccaggcatggaccagcttcagccagggacaaaatcccctcccaaaccactctccacagctttttaaaaatacttctactcttaacaattacctaaggcttcctcaactgccccaaatctcttaatagcttctagtgctgctacaatctaagtcaggtcaccagagggaagagaacatggcattaaaagaatcacatcttcagaagagaagacactaatattattacccatatacatgatttcagaagatgacataagattcctcttaaagaggaaatgtcaggaatcaagccactgaatccttaaagagaaaagttgaatatgagtcattgtgtctgaaaactgcaaagtgaacttaactgagatccagcaaacaggttctgtttaagaaaaataatttatactaaatttagtaaaatggacttcttattcaaagcatcaataattaaaagaattattttaatgaaaa

SEQ ID NO: 255698 - DNA, 1236 bp, Homo Sapiens
  misc_feature (519)..(527): n is a, c, g, or t
tcctggctttcataggcttcctcaagtctgaacataaacatttggctttttgccaatttctctggagtcacataaatcagcttaaactcggagtttttatttcccatttcagcatgaacccatttaaccatgctcctaggaactagaagcatttaacatggttgctgaaattcctaaatggtttttaaaaccattaattggtcttccataagagagatcaatgggcaaatgacgagtgtaaaaccatctgaacataatgctggtaactggtaacataagctctttccacctcctgtaggcataacaagaaatacctcctttccagccattgttacgttaatagtttcaagctgaagtggtctgaacttttccagtttaaagacattttgcagaatatctttaactttaccagaccatggaaaatcttctttattccaagcggcaggtgaagaatcatattcattgcttgccccggcatcagaatcctctaaacactgctttattttctttgtcaggacnnnnnnnnnctgaataagctcttgttgcctttccgtaagttcttgaatttgaatttctactgcatgtagctcactggttatagaatccagttcctcagttagagctgaaacggacgccattctttttctttccaaatttgtttctaaaataatccaaatttctttcaacaaatggcagctgctaataaacaggctttggtggccaatcctccgagaagcccagtctaactctccggtgtttgactgtccggtgtccgactgtcctgtgtccgactctccgatctccgactctcggatctccgacaccaaagcacccaggcctcgagcagatctttccgctactcgggagtaaaatcttccccattaaaatcctacaattaaatggcaagaagtgcctcagagagagacagccatgataaagtgggaatccctggctatagtagagatactaaagccagccttttcaaccagtgggcaactgtgacaccaagccaagtaactcaacagttctcattaatcacagattggccttgaggtgctccaaaatccttattcaaattccagaagcacattgagatttataaatgtttgatgtacatggtgagccaagagtaaatatcgggtaataactgatttagtattgcttagttcttatcctgggtatgcctcaaccgtaacatatcacattgaccaataaatgcttttgcttatccatctt

SEQ ID NO: 255699 - DNA, 1014 bp, Homo Sapiens
  misc_feature (511)..(519): n is a, c, g, or t
  misc_feature (724)..(724): n is a, c, g, or t
  misc_feature (730)..(730): n is a, c, g, or t
gctgggtggcgaattcggcacgagggaaagatctgctcgaggcctgggtgctttggtgtcggagatccgagagtcggagatcggagagtcggacacaggacagtcggacaccggacagtcaaacaccggagagttagactgggcttctcgggcgaggccggtctgtagcggatcacttcctttcgcccacacattggcggaggagaaaccggaaagttaatcactgccctgctctgagaactcgggcctttaggggcacgttcgcctgctgaccggtcttctgatctccccattcttttccatgcaggaggattggccaccaaagcctgtttattagcagctgccatttgttgaaagaaatttggattattttagaaacaaatttggaaagaaaaagaatggcgtccgtttcacctctaactgaggaactggattctataaccagtggagctacatgcagtagaaattcaaattcaagaacttacggaaaggcaacaagagcttattcagnnnnnnnnngtcctgacaaagaaaataaagcagtgtttagaggattctgatgccggggcaagcaatgaatatgattcttcacctgccgcttggaataaagaagattttccatggtctggtaaagttaaagatattctgcaaaatgtctttaaactggaaaagttcagaccacttcagcttgaaactattaacgtaacaatgggctggaaagganggtatntcttgttatgccctacaggagggggaaagagcttatgttaccagttacccgcattatggttcagatggttttaccctcgtcatttgcccattgatctctcttatggaagaccaattaatgggttttaaaacaattaggaatttccgcacccatggttaaatgctcctagttctagggagcatggtaaatggggttccagccggaaatgggaaaataaaaaccccgcgattaaagccggttttatgggagctccaagaaaaattggccaagagcaaaatgggttt

SEQ ID NO: 255700 - DNA, 931 bp, Homo Sapiens
ataccggtgaacaatgcactaaaattatccacatgaaaacaatggtctgtaatcttataaaccacatagcatttcactgtcaacaatgtgaaaatttaatatcttctcaaacaggcataagatgaagaagtgctattttttaattgtaaaaggaacttatgtaatgtaaaattacattataattgtgttcattccgaattgacacaatgatttcaaaacaacggatcacaagtttgactgcacaatagtaatgcaatataatttcataaaaatccttcaatttctatttttttccttttctgtagttgacatatgaagaccacttcaatttctaaaaaagggaaccattccaattttccctccccaagaaaatgtctcacaattacaaagtagaaaaacagccgttcataaatgcaaaaaaattctgatttatatatgaaataatttctagatcaattcaacatatttgatgacatttgttgagtttaaaaatactttgaaatattgcttttcatgcttaaagtacagaatgttttaatgacatcaataaaagtgatatacatgtaatgctgcataatgaagtgaagtagaaccctgatacaaatatccttgttgaaatcatttacttcatctaacagtgcctgtttggaacatatgattaaaaacaaaaacataattcttagaggatgaattccctttgttttttgctctgttttgaaacccctgagacactatctgtttccaaagctttctcttttgagttaatttcactaaatccatttgctgtcccattttgttcttcagttatttcttcgtttgcaggggaagcagattcccccttttctaatttttgctgcatttcacggagcttggtaacagctttatctattgacattatgctaataagattaaagtcatgcatgctgactag

SEQ ID NO: 255701 - DNA, 780 bp, Homo Sapiens
tgtttaaaggtatatcttccttatatagcataagagagtagtctttacatatatattgcaagtcattcaaggtcgtccatagagataggtgtttatcccatggtgcaatgacagcaccactccacagttctactgcaagtgtaatacttcttcaggttggcatggtatgaactcaatcgcctgcaatagccattcgaagcagtctttgcgttcacctctccctttaggtaagggaatctcggtatgtataataagcttgtaaggaccctttatgtatcacaggtagttttgtgcctgcactgtcaaccatagaaggcatttggtcaaaggtgtcataaaaggggcagaagaggtacatcagagcacagagttgggatcgattatttttttcaagttaattgcccatagtagcaaaagtatcaaacaaaatttagaatagccgtgtccatccatttaacaacagagcatgcagcacgcctgtgcagacaatagctgttagacacaaacttcgatctggtgggagcaacaagaatgcatcttaaaaagtgaaaaattcatttgtgtgcaatgaatagtgtagtgagctgcatggtgccccctccccaaaaaagatattcaatatcctactccctggaacctgtgatagtaccttatttggaaaaaaggtcctttcagatataattaagaatcttggaataagggaattatcatgggtaatctggatgggccctaagtcccgtcacaagtgtccttataagagagaggcagaggtagattata

SEQ ID NO: 255702 - DNA, 692 bp, Homo Sapiens
  misc_feature (31)..(31): n is a, c, g, or t
  misc_feature (119)..(119): n is a, c, g, or t
ttaaaatccttaagcctaaaaagagtccaantattccaagttgtttgaagtcctacttttaaatctctagtgagttccatgcggaaccacgcaaaataaaataccctccagatattggnagtttttcaaattgctaatttaatgtataaaaagcagctaaacactggtactttataaaaatgaaacagcattttgaaacaaatgttacagatctataaatattcattatatagaataaaccctagttacttgcatgcaccacctcaaatcatatttctttacactgacctattatatacacaaagtatacagtggttaatgatcttctcttctgtttgtttgtttgtttgtttgttaggaaatttcctcaataagccagaaaaccttaggtattattttcacaaaagttaactcaggagaaattgtaaggaagtccttgacccatggagaaggtcactgtttgtttgtttgttagatacgtgtgtctgtcataaaacaaaatgacaccagtaattacttggtaatttaaaaacaagttcataaaaagaaaatacctgcaggtaatttttatggtcagttatattctataacctgaacactgaaaactaaaaacttttacttacaaactattattatctgagcacagcacagtccttgctttaattggaaataaaaatgcatgagtggaagat

SEQ ID NO: 255703 - DNA, 587 bp, Homo Sapiens
gatttctacatatttattttatcacacttcgttttcaatttacaacaaatagtggctagctaaactttcatttcatgtgtctgtgtttagtggaaaataagcacctgtcatttgttttgggtttatcaccacatctgtttattaataaatatttgcaaatgttcaacatggatcttttaattcatacaaataaaaacatttttttccttatttcatattttggaaatccaaatccaccagtttcttgaagcaatgttctcttagtcatcctagctattgtgcagagtacagttaaatgaactagagctctcacccccaaaaaggtgagataaaatgaggatgtcccttagaggacagtgtaccatattacagtctcaaaaagacacagcaaaagaaaaatcaaatggagtttctgaaattaattttcctgattcctctgtgctaggtccaatatttttgcagggctggaggtagagacctgaatgtctttggaacaacctcactaaaatggtcagcagaaagatgagatgttatttctatgtgccttctaccttaaggcttaaaactaacaataacagagacataaa

SEQ ID NO: 255704 - DNA, 420 bp, Homo Sapiens
  misc_feature (400)..(400): n is a, c, g, or t
ctgctagaaatgagtttattacagagagaggagacagggctccgacaggacgcacacacacggcactcatgctcctaaaacactgggtttgtgaagggacattataaaaatgaggaaataagctgtgatgttcagcatgtgtcagtttctaggaatacagagaaggggagagctgcaaggtggagcgattctgagggctgaaaatccctttcccagtacgaagacagcatccttcatccccgccagctcatgtgcatctgagggtgggggctctgtcttcatgctaggaaacccaaactgctctcacagcttccctgcttaaatcaccacggctaacgggataaggcaggagacgggcttatccagtcttgactacttgaggcacttcaaggtcgtcagnccagtgggcctacccggggg

SEQ ID NO: 255705 - DNA, 1232 bp, Homo Sapiens
aaatgaggaaatacgctgtgtagttcagcatgtgtcagtttcaaggaatacagagaaggggagacctacaaggtggagcgattctgagggctgaaaatccctttcccagtaccaagacagcaacctacaatcccgccagcacatgtgcatccgagggtggggctccggcatcatgctagaaaccaaactgctctcacagcttcctgctaaatcaccacggctaacggataaacagagacggactagacagtctgactactgagcactcaagtcgtcagtccagtggctaaacgggaacgggggcagacagtgtgcgtgcacgtctacggggctggacagagcgtggttaaccggggaactgggcaagccggcgccgagcctgcgtcagccgtgcaagccgctcattcaggaacttccgcttgtcgcttggtgtcgctccgctccttcaggagccagctgtaggtgtccttgtcctgcaggagctgcagcatggccttctgaagctgctggccgtacgtctggagcatgaagaactggatgatcaaagggatgtggctggagatgcgcttgctggcctcctggtgataggccatcaggtgctgaaagatctcctccatggaagagtctgttgccgagctggactggaaagccccaaaatcccaggatttcttcttcttttcttcttccagctccttctctctgaccttctgcaacgcacccctgtatacctggtcctggcagtagacaatctgttccatctggaagtggaggcggatcagcttctcaccttctctctcttgttctgctctaatgtcttcaattttggacttggcggttctgtggaggttaaaaaactcttcaaaattttttatcgaaacatctgtgaaagcaagccggaccatatccgtcacggtgtgtagcatatccacagccggctcttccagtgccttgatttgctgtttcacgattgtctcaaatgtcctgtaattcacaaagcctggcagctctctaccacgatactgattttcaaatttctggatttttctactcaaaattttatggccttcttgaaaattgttttcaattattgtactccatttgtggaactcgtgtcggagtctggtaaacagccgaatgtcttcctcccctacagtttcctctccttgcatgagagcagtgatgtcctgattaaaggcattaattttatctatcaggaagaacattttttcacc

SEQ ID NO: 255706 - DNA, 881 bp, Homo Sapiens
  misc_feature (230)..(248): n is a, c, g, or t
catttacattagagtggagttgcatcatactcaggggttagcttccaaggtcagtacataggtaaaatgggctattaggatgatccttgaaagccctttagaagggtgccatgttggaaacctgtacatccacaacaagtagcttttcctcctatgttggaaaaaaagactgtttctttgtttgaagaccaagtgaagttgttggtgtttgtttaggggccattttgttnnnnnnnnnnnnnnnnnnngcacataacttttaacactagaatcagcccgcaagatgcttgccccgctagtggcagatgtgaactgacaaggagtgaagcgcccacccagcggatggacagcacccacctgggtttactcaagggtgtgcattcattttaggtgggatcgccacaggatttcatgttatttcccttacggcttccttttcactgacctcatttgttgagttaatgtaagttaaatgtgtttatgatataactccactgtacatcatcctttgagtagtaaaggataaaagcatatatactacctatatgtatgtgctgtatgtgggcatttcattgagatctaattaatagctagcctatttatggttattcgttttagtaagttctgtgggagcaaggtatttaaaatcaaaactaataactacatcatggtttttgattaggatctaaatattcaggttttaagcctgctgcaaacttttaaaatattatgatagattctgtactacatgtgggaaacaagcaagaactaaataatcaaatgttgtcaaccaaaagtaatagttgggtattggagatttttttaaaatgtttttatgttattagctatttggagttaaataaaaacagaacaaggaaaca

SEQ ID NO: 255707 - DNA, 1026 bp, Homo Sapiens
gctcatacctcttgtagttgggggattgcagtttataattccaataaatggggcaaattcaataataacataatacaaatgagtttgaatgcaggacaggtcttcaaagcatacacaacatgggcctacatatgtacaacaataataatttataagttacagtttggatggaaagtaaaagtacagaaaatttgttaaaggaaattaaaatggagatcatgtctcaataatctctgagcagacaaaattagttaggtctcataagtgatctcaacctcgcttgatttgcaaatacaaacaaaacttaaattatttcttgtagctgcatattgaaaaaagagaaatgaagctcaaccagtcagaagtagccaacaaccttatataaatagaaactgtccaacaaggtaaacagacagaagtagccaacaaccttatgttgtgctaccaccaatcaaatgatttctttgtttctacatttttcaaataaatacttgcttcttacactgtcaatgaagcactcaatatctttccgtctgatattttataatttatcaattgctcttactcaaataaacactttgcaatttcaaaaaaaataatgtaaaataagaagaaatgtataagctgaatctgcaaaaacatgtgttgctgaagagatccactgtacaatgtgacaaatcacttcatacaccgtcttgaatacacataatgcacagttgcacctcttagtgaaatctctggtgatatggctgtctgctgctcgtatcatgatcctgagagaaacgaatgcttcttgcatcaccaatatgacatcctaaatctccaccgagtggttagaccagacgttgatgtgatgaacactgctttacatgacagttaagacacatgatagattaactacttatctgaaatcggcagaagacattcttacttttatgcataggcactcaaattgtttgctaaaggtctaaaggtgacaatactgaacgtttaacaaccgttgataaaaacgtctacagggtagca

SEQ ID NO: 255708 - DNA, 1026 bp, Homo Sapiens
  misc_feature (578)..(664): n is a, c, g, or t
  misc_feature (669)..(696): n is a, c, g, or t
  misc_feature (705)..(721): n is a, c, g, or t
  misc_feature (848)..(856): n is a, c, g, or t
aaaagttaaaacatccagatatataagctattttttcctaaggataaagtacctttgagcatgagtgtatcacagctttcattaggaaaacttttcattacatacttgtttaaactctgtcttccagggtaaaaataataaggttgaatcattttattaaaaatactttttaagaaaataactatgaacatctgaatattaaagatataaaaatgcacataattcatatttcaggtggtatttgcattcagtgccttactggtattctcagaacattttaatgatttctaacatttcttaacagtcatagatatatacattttcattttttgtacttgaatattctaaataaaactgacatttactcttgacaaataaaacatatatttactaaaatgtgtttaattttcctttctgaaaactctcattttaaaaacgttcatttaattatgtatttgaattattttggagatgaggtattttatgagtattttcagacaatgaaacttattagtctgtgtcagattctgagcaatcatagagtcatctaagttgtaaataaaaccttgcatagcacnnnnnnnnnnnnnnnnnnnnnnnnnnnnnnnnnnnnnnnnnnnnnnnnnnnnnnnnnnnnnnnnnnnnnnnnnnnnnnnnnnnnnnnccccnnnnnnnnnnnnnnnnnnnnnnnnnnnnctttggcgnnnnnnnnnnnnnnnnnaaaaaatttttaaaaccattccttgtggggcgggggcccccaaaaggaaagaaaaacgggcccaaagtggtttccccaagaaaaaccggggcccaagaaatagggcgttgggaattccccaccaatnnnnnnnnncccgcggggggggaaccccaaagggtttttaaaaacaatttcccgggtgggggttttcctggaggggtttttattggggaatcttcatctcaagagggaggccccaaggggagccctccatatatacaaaatttaccccccccgcccggggccttttttattggaagaaa

SEQ ID NO: 255709 - DNA, 916 bp, Homo Sapiens
  misc_feature (21)..(21): n is a, c, g, or t
  misc_feature (434)..(434): n is a, c, g, or t
  misc_feature (438)..(438): n is a, c, g, or t
  misc_feature (443)..(451): n is a, c, g, or t
ccaaagtgccccccttggagnggccccgggcactgcctgaaatttaggggaagggtatgagatttcctaaatgattgataatccacacaggtgacaacctacaacacaaaaaaacccattgacaggaaaaatgaacatagttctccctttttaaagtttctacaaaatagaaatgtcacaagacacatcacaacaatgcagtggaccacattttcttatttattaaagaacagaaataaattttgcttaaatttaaaaaaataacattaaaacttagtttatctttccactgagtaaaactgagaaaaagttggcttttagatcatatatttatttaaaaaaataaaatgggaaattgacaaagttaccacattattctgcatgctaacaggatttcccaagcctgtgagagaatcatttcttgagcaattaanaaanaaaannnnnnnnnggacttcctcaacaatgtaaagataggaaacttttcaatccaaattcaaggtctttattactagttccacctcacaagctagtgggatgtatctgtgtcacaagctgaattcctcagtaaagaaagcttgagaagacactaaacaaggatgttactaaaagacaatgatttgttaaaattataaagcaatcatcttttggcctgcaaacagtcaacattagaactctccaccactgccgatctggctccccatcacagtattattctgaatccaggataattacaatcacatggcatttttttctgcatgctttcttggcccaaaccctgcatgacaacatatacaatttacaagatgggacttgaaattcccattctcacacaggatagttagggcgtgttaccaataataaagaataaaagttatacaacattgcaaaaacaaaaagttcctattgcacaaat

SEQ ID NO: 255710 - DNA, 1431 bp, Homo Sapiens
  misc_feature (66)..(101): n is a, c, g, or t
catataaatttttaagaatcagtgtttaaaggtatgtgaaaccatttgctagatttttgtcctagnnnnnnnnnnnnnnnnnnnnnnnnnnnnnnnnnnnnagtaagcttaagatgtccagtagtttatttgcagacagcatttttaaaaagtgaatagatgtttaactgaagttaaatacaaatttatgtctgtgtaactcttggtaagatataacaaaacctagacatctaaatttttgggaaatttttattttaacaaagtttgttgggaggtaacaattgtgtgactttaccttctggttaatagttttatagttaagaagaaagtccagcgaagtttacttgatctcagttgcactcaagaataggggatttagttccactttggttattttcacttctaccctaaattcatagtccctgatacttaagctttacccttggcttaccagttttcattgcagcgagtaaatggggagtagcagagcctttgttaatgtaaattgacaaaaagtatgtccttttctagcaggagcagataaactgataatggtcttagaaatgtagaaaatgattttttgtagacaggatgatctgtctagattgtagcaaatgatggtacatattcacaacaaagttgtgccactacatttaataaacagccacaaacaacaaaaggacaactggtccccgatataaatggactagctacctggacataatatccttgtgaggcatccttaaaggacaaattgcagctggtatttgggtgaatgttgttgctctgtgcctgttgaatgtccatgctacaagaagttatgagccttgttctaagtacagatgaaccttgtatttgtgtaatctcccaagggagagctatggtttacattcaattttttggtctttctgctatgaaacgtgtttattttgcctctgtcaatgtgtttgcaaccttaagtaaaggaaaagggaaaaaaaaaatagccctctaaactctgatcttttgccgcttctgtagattttgattgtgaagttggaagtgaggacattcaaaagcccatggtgaatgcatatgcctttagaatattgtgcctgttttaaaatgtttgagcttttaaaatacgttgttaaaacatgaatccatttttgtaattgtataaatactcataactaattttgaatgctactgattgtgtaactgaatttttgtatccaaaaatacattcttgagtactacttttcctaccttgaaaatctatttcatttactaaatattgttttctttatgctaacttaactttaaaaggaatgttgccaagctgtctctcctcccccatcacaattgttagttttttttgctttctttcttcaataaatgatagcattatgatctttaatgaaaaaaattcctgcagcccgggggatccac

SEQ ID NO: 255711 - DNA, 310 bp, Homo Sapiens
ggtctggtagatgtccatgcccatgtgctcctgctgggactcaattcaggctatgtatgactatgaagtcaggctcatctgcttactggctgtgtgaactttttgtatcttggttttcttcatccatgaaatccaagtaatactacctaattgttactgtggagattaagttcaaatgcaatgtatagtaatattaagcaatttctagttattattctagccagtaatggacttcagaatcttttattacacaatataagaatatgtatgtaaagacattttggaatttcctggatgagaaggaagtctg

SEQ ID NO: 255712 - DNA, 1512 bp, Homo Sapiens
  misc_feature (222)..(256): n is a, c, g, or t
  misc_feature (361)..(411): n is a, c, g, or t
  misc_feature (1169)..(1193): n is a, c, g, or t
ttgaaaacttatttataagaacaagatatccattctgctcaaaaagaaaatacaattaatttagcatatggaaaccacttgcttttgccaatacaacaaaatatctgtaaattatgtagtgctcaataaagtggatgtaagtttataattgaaacttcattcacacaaaaaaatggtcttttactagcaaaactgaatattacagcttttcaactatattcnnnnnnnnnnnnnnnnnnnnnnnnnnnnnnnnnnncagaataagtgctttatttttttaaatctcacaaaaactgaaactaccatttacatcagttgtaatagcaataaaaattagaaatcaatttgctataactcttgnnnnnnnnnnnnnnnnnnnnnnnnnnnnnnnnnnnnnnnnnnnnnnnnnnntaagtattcattttaaattaaagataatctgactccttatgacatacccacttgcagatgtataaatagcagatgcattcaaaacagtgcaagatttaattaatttaggacaatattccaatcaatcccaatgcaggttttaaattactcgtgcacgtttatatagaatcataaaaataaacctctaatatgtaatcagcttatagccaattcagaaaactccacaccaatacaacaactgtggaaatcatgagatatgactggggggagaaaagcaaaacctagcatcaaaagtgcatatactcattgtaactacaatcttactatatattcctacttttgttttaaaaaaagttttctttaaactatatgtctcaaagggatactaaaggtataatttcatattcttttttgaatttaaaaaacatatacgtaatcctcctttgttttggtaagttcaaatatgaattgacagtggggtaattggattgtggattctttaagaaagctctaagaagagaatacaacatactatatcttctttaaaaagtatgagctgaaatgttaggcattccttgtattgttttttaaatatatttaaggaatgctgtttttgtaaaaccatggctttgaaaaagaaatctgagatcaaaatacattactagaagatctctataaaaggtcaccaagactatccttgtttgtgaaatcagggaaaacatttttagaatttatcttgttagaaaaaatgctaccannnnnnnnnnnnnnnnnnnnnnnnnattatcacaattaaacaccagaagattttccccaaataaatactgatgtaaatgttgacttcaaggacaaagaactttcataagagtctatttctcaggcatttcaccatttcttgagaccacaggacacaggcagcactgtttaatgtgaattgtcactggactccggtgaaatattccttctgggagagtttattggtacctgaagctcactggtagatgtaggtttagcagcatttggtggctttgtagaggaattaggtggaagtctatgacgattactctcctcaccagaagctcgtgccgaattcggcacgag

SEQ ID NO: 255713 - DNA, 584 bp, Homo Sapiens
aaaaacatccaagcttaagacggtgaggtcagcttcacattctcaggaactctccttctttgggccacggaattaacccgagcaggcatggaggcctctgctctcacctcatcagcagtgaccagtgtggccaaagtggtcagggtggcctctggctctgccgtagttttgcccctggccaggattgctacagttgtgattggaggagttgtggccatggcggctgtgcccatggtgctcagtgccatgggcttcactgcggcgggaatcgcctcgtcctccatagcagccaagatgatgtccgcggcggccattgccaatgggggtggagttgcctcgggcagccttgtggctactctgcagtcactgggagcaactggactctccggattgaccaagttcatcctgggctccattgggtctgccattgcggctgtcattgcgaggttctactagctccctgcccctcgccctgcagagaagagaaccatgccaggggagaaggcacccagccatcctgacccagcgaggagccaactatcccaaatatacctggggtgaaatataccaaattctgcatctcc

SEQ ID NO: 255714 - DNA, 454 bp, Homo Sapiens
ggggtcatttcctgggccaagttgggacccggacggcctcaccatgatgaaacgggcagctgctgctgcagtgggaggagccctggcagtgggggctgtgcccgtggtgctcagtgccatgggcttcactggggcaggaatcgccgcgtcctccatagcagccaagatgatgtccgcagcagccattgccaacgggggtggtgtttctgcggggagcctggtggctactctgcagtccgtgggggcagctggactctccacatcatccaacatcctcctggcctctgttgggtcagtgttgggggcctgcttggggaattcaccttcttcttctctcccagctgaacccgaggctaaagaagatgaggcaagagaaaatgtaccccaaggtgaacctccaaaacccccactcaagtcagagaaacatgaggaataaaggtcacatgcagatgta

SEQ ID NO: 255715 - DNA, 940 bp, Homo Sapiens
  misc_feature (661)..(728): n is a, c, g, or t
  misc_feature (839)..(839): n is a, c, g, or t
gggaacacatccaagcttaagacggtgaggtcagcttcacattctcaggaactctccttctttgggtctggctgaagttgaggatctcttactctctaggccacggaattaacccgagcaggcatggaggcctctgctctcacctcatcagcagtgaccagtgtggccaaagtggtcagggtggcctctggctctgccgtagttttgcccctggccaggattgctacagttgtgattggaggagttgtggccatggcggctgtgcccatggtgctcagtgccatgggcttcactgcggcgggaatcgcctcgtcctccatagcagccaagatgatgtccgcggcggccattgccaatgggggtggagttgcctcgggcagccttgtggctactctgcagtcactgggagcaactggactctccggattgaccaagttcatcctgggctccattgggtctgccattgcggctgtcattgcgaggttctactagctccctgcccctcgccctgcagagaagagaaccatgccaggggagaaggcacccagccatcctgacccagcgaggagccaactatcccaaatatacctggggtgaaatataccaaattctgcatctccagaggaaaataagaaataaagatgaattgttgcaactcttnnnnnnnnnnnnnnnnnnnnnnnnnnnnnnnnnnnnnnnnnnnnnnnnnnnnnnnnnnnnnnnnnnnntagaaagaagcctcggccctcaaaaaaactttcaaaaccatttcttttggcgcccgggcccaaaaaagaaagtgaaaagggcccatacctgtttcccaagaaaaacctggncatgactatggcttcggattcccccccaaaaaaaattcccggaggataccgggggggcgggacccatcacaaagggagcaccggggggccttactgggatc

SEQ ID NO: 255716 - DNA, 1529 bp, Homo Sapiens
  misc_feature (1136)..(1145): n is a, c, g, or t
  misc_feature (1339)..(1350): n is a, c, g, or t
gggcacaaagtgcctgatgtcaaaatgaagatagtaaaacaagggaggaagcagtggatggaccaggattaattcctttcatttcttagtaaattaaaacctgcagctggtggattgtgaacacacattcccgaagtaataagtgaggacgaatgcactgctctggaacataacccagtgctaactgggggtttcatttattcagtcaagcacatcttactcacatccagatttattttcctacagtgcaaacacaccagatgaaactttaaaatgttactttttgtaagcttatcataaatgagttgcagtaatttgtttgcttgtttgtttaaccacaaccactattttaatgatatactaaagataacactatttagttttttcagaaacatctgcattatatgtgtgttggttgtggattttgtttctaaaattggcttagtccaataaataaagaaaagcattaaggacttaaagcaacaataaccaaataaaaacttgataggatctttgaagtctatttaaatattcattccattacatctagactcaccaagaactacatgttatgatgttaagttgaagttgaaacatgatgttttgcattaaatttaagatatgcaaatttatgtagagaaaataaatgttatataccctataatctttcacctaattagtatttaattatatggatttgttttatattataaaagatgttttgattttgtcttttgatattgacaaaattgtttggatatccttatgttctcaagtctgtatctgcctcccctgccttatttcttatgttttgccacagttaacccattgtgcttctttgtaatcaaacagtttgtgggagaatgggcttattgaatgtctaacccatactccccggccggcaccctttatactcgtagtcccccgtttgccctgtgccgagcgactcccggccccctctgtattgtcggcccgctctcgggcccctcagaaaagccttttccaaaaccaattccctttgggggggcgaagggcccccaccaagggtaatcgcgccacccgggcccaataacctgggcctccccacgaggaacaccccggggttcaccgggacataatgggtctgtgggcacctnnnnnnnnnnaataccccaaaaaaaccgccctgcggggccgcggagaacgtggtagtaggtttttcctgaaaccaaaccaccccccacaaatcggggagttctctcttagacgcccttctttaaccggggcggattttatctcccgcgtggggtgtcccccaccgcgagacgcctgccaaataaatgacaatatttatcaccgnnnnnnnnnnnngtgccaacgctcctttggacaccccccgcggcttggcgacatccccttaatgacactcttcccgcgctgaacatcgcgtaaacccccctccccacaattgtcgctcaggacggcaaacttgtgcatccgccccccacggggttaccccaccgcccccgggtgagaccccctcggcccat

SEQ ID NO: 255717 - DNA, 398 bp, Homo Sapiens
aaatactgaaagaaattcgagaagctgcaaatgccatgaaattggagcgatttgaaattccaatcaaggttcgattaagcccagagccatggacccctgaaactggtttggtaactgatgctttcaaactgaaaaggaaggagctgaggaaccattacctcaaagacattgaacgaatgtatgggggcaaataaaatgttgttgtcttattgacagttgtgcaggaggtagcctggtggttttcaacctctagaattttaagcctttgttgaactgttagaatgtaaggtatatcattctaaagatagagtaaaaagaaaacaaaaccaaaagttattaaaattgttgtccggtttactttaacttagttttgcatagttctagtgcagctgaaattg

SEQ ID NO: 255718 - DNA, 416 bp, Homo Sapiens
tcataaaaatgaaaaatgtctccctaactgaattataaagtctttgagaccagaagccacactatgttagaattgagcataatcttttgtacagagttgatatttaaatatttgttagttggctagaatacatgagacataaaaatgcaaagtttaaagttccacttcagcatgaatagcagttagcacaatctgactaacttctctcaatattaaaacagaagacattactgaaaaaggtcaagacaagttaaactattggcataaatttttcccctacagaaggtcattctattttgaaaaacattttgaatggtaatagaattgtacaaataaactatctcagaatttaagcaagtgcttactacaatcagctatattaaataataatagtgtttatactttagtcaataaac

SEQ ID NO: 255719 - DNA, 681 bp, Homo Sapiens
caaaccctttggatgcaacaactagcaagatttaggttccaattcccttatctatcctaataaccaggtgaaaaattccaaattccccccttaaggattccaggccttttttaaacacattttaagtttcgggcatttcctagatttccaatagtattaaaactaccaatatataccaaatatttcatttagcaagcttgtaagaaaaagatacaccaaggtaagtttgtaatttgaaatgcaaagtaatattctgaacagttctccagaagtcaaaccaagaaatttatagtccaaaaagttctggagattggttttaggggaggggaaggtgaggagatcaaatatgaatgagtgcctgccattggcaataaaaagaaatgccaactcttcataagaaaaaaatttatataaccttcaaggtccaaatacgaggagaaagctcaatcacccatttgttaatctccgcagctgggatgaacattttcctaaggatggagaagagattatactcactaatacacgagtcagtagttttactttcaggtggctttttatctgatgtttatcttatatgatgacagctgggggacagagaaatgttccacttctacctatgtatcaaactagatacctaagcccttcccttccaacagaacacagagaaatgctggataaaat

SEQ ID NO: 255720 - DNA, 1277 bp, Homo Sapiens
  misc_feature (707)..(736): n is a, c, g, or t
gttggccagattgtggggtgcacctgggtggggcagcacacctctggggggataatgtccccactcccgaaagcctttcctcggtctcccttccgtccatcccccttcttcctcccctcaacagtgagttagactcaagggggtgacagaaccgagaagggggtgacagtcctccatccacgtggcctctctctctctcctcaggaccctcagccctggcctttttctttaaggtcccccgaccaatccccagcctaggacgccaacttctcccaccccttggcccctcacatcctctccaggaagggagtgaggggctgtgacatttttccggagaagatttcagagctgaggctttggtacccccaaacccccaatatttttggactggcagactcaaggggctggaatctcatgattccatgcccgagtccgcccatccctgaccatggttttggctctcccaccccgccgttccctgcgcttcatctcatgaggatttctttatgaggcaaatttatattttttaatatcggggggtggaccacgccgccctccatccgtgctgcatgaaaaacattccacgtgccccttgtcgcgcgtctcccatcctgatcccagacccattccttagctatttatccctttcctggtttccgaaaggcaattatatctattatgtataagtaaatatattatatatggannnnnnnnnnnnnnnnnnnnnnnnnnnnnnagcgcttctgcagcctcggcctaggtcacgttggccctcaaagcgagccgttgaattggaaactgcttctagaaactctggctcagcctgtctcgggctgacccttttctgatcgtctcggcccctctgattgttcccgatggtctctctccctctgtcttttctcctccgcctgtgtccatctgaccgttttcacttgtctcctttctgactgtccctgccaatgctccagctgtcgtctgactctgggttcgttggggacatgagattttattttttgtgagtgagactgagggatcgtagatttttacaatctgtatctttgacaattctgggtgcgagtgtgagagtgtgagcagggcttgctcctgccaaccacaattcaatgaatccccgacccccctaccccatgctgtacttgtggttctctttttgtattttgcatctgaccccggggggctgggacagattggcgatgggccgtcccctctccccttggttctgcactgttgccaataaaaagctcttaaaaacgcacaac

SEQ ID NO: 255721 - DNA, 971 bp, Homo Sapiens
  misc_feature (4)..(4): n is a, c, g, or t
  misc_feature (11)..(11): n is a, c, g, or t
  misc_feature (14)..(14): n is a, c, g, or t
  misc_feature (18)..(18): n is a, c, g, or t
  misc_feature (26)..(26): n is a, c, g, or t
  misc_feature (32)..(32): n is a, c, g, or t
  misc_feature (43)..(43): n is a, c, g, or t
  misc_feature (47)..(48): n is a, c, g, or t
  misc_feature (50)..(50): n is a, c, g, or t
  misc_feature (61)..(61): n is a, c, g, or t
  misc_feature (73)..(73): n is a, c, g, or t
  misc_feature (77)..(77): n is a, c, g, or t
  misc_feature (93)..(93): n is a, c, g, or t
  misc_feature (114)..(114): n is a, c, g, or t
  misc_feature (118)..(118): n is a, c, g, or t
  misc_feature (128)..(128): n is a, c, g, or t
  misc_feature (142)..(142): n is a, c, g, or t
  misc_feature (168)..(168): n is a, c, g, or t
  misc_feature (184)..(184): n is a, c, g, or t
  misc_feature (218)..(218): n is a, c, g, or t
  misc_feature (251)..(251): n is a, c, g, or t
  misc_feature (447)..(447): n is a, c, g, or t
  misc_feature (462)..(462): n is a, c, g, or t
  misc_feature (503)..(503): n is a, c, g, or t
  misc_feature (506)..(506): n is a, c, g, or t
  misc_feature (550)..(550): n is a, c, g, or t
accnccaagtnaanttgncccatatnaatctntaccagagaangaanntnatggactttcncctccagagaangaangcaagaggtcaccttnctgtctgttcacagatgttantgantcagacagancatcgctgcccgtnatagccactgtttttgataaactcanccatgagtataaaaantacctggatgccgagcagagttatgcgatggcgntggaagcagggcagagccgaagcagcccgctcntcaagaggccggtgcggacccaggcggtgctggaccagtcagatgtgtacacccatgtcctgtcagccttcgtggaaaagaaggagatgcctcataaatttgtgatagccgtgctgatggaaaacattcgttctcttaaccagtttcagatcgcagcacagcatcacctacatgaactggttatcaaaacccttgnccagcacaacctctnttatatgctgcatcagttcctgcagtaccacgtcctcagcnacnccaaacctttggcttgtctgctgttatccctagagagtttctancctcctgctcaccagctatctctggacatgctgaagcgactttcaacagcaaatgatgaaatagtagaagttctccctttcccaaacacccaagtgttagctgccttaaggtttatccggggcattggtggccatgacaacatttctgcacgaaaatttttagatgctgcaaagcagactgaagacaacatgcttttctatacaatattccgcttttttgaacagcgaaaccagcgtttgcgagggagccccaatttcacaccaggggaacactgtgaagaacatgttgcttttttcaaacagatttttggagaccaagctctaatgaggcctacaacattctgaaatcacttgctgtttttttatataaaaatgtgtacaaagttaatttattgcattaataaagctctttaaactataa

SEQ ID NO: 255722 - DNA, 430 bp, Homo Sapiens
cctccgggaccatggctgaaagccgacctttccaaccagccaaaatggaggaaaataagtaagaaagttcccccctttcccaaaaacacccaagtgttaagcctgcccttaaggtttatcccggggcattgggtggcccatgacaacatttcctgccacgaaaatttttagattgccgcaaagcagactgaagacaacatgcttttcctatacaatattcccgcttttttgaacagcgaaacccagcgtttgcgagggagccccaatttcacccccaggggaacactgtgaagaacatgttgcttttttcaaacagatttttggagaccaagctctaatgaggcctacaacattctgaaatcacttgctgtttttttatataaaaatgtgtacaaagttaatttattgcattaataaagctctttaaact

SEQ ID NO: 255723 - DNA, 722 bp, Homo Sapiens
  misc_feature (100)..(100): n is a, c, g, or t
  misc_feature (110)..(110): n is a, c, g, or t
cctaaacacttggtgtttggaaaggaagaacttctactaattccatcatttgctgttgaaaagtcgccttcaagcatgtcccagagaatagctgaatganccaggaggantagaaaactctcctagggaataaacaagccagacaaagcccaaaggtttggaatcgcctgaggacgtggtactgccaggaactgatgccagcatataaaagaggttgtgctggacaagggttttgataacaagttcatgtaggtaatgctgtactgcaatctgaaactggttaagagaacgaatgtattccatcagcacggctatcacaaatttatgaggcatctccttcttttccacgaaggctgacaggacatgggtgtacacatctgactggtccagcaccgcctgggtccgcaccggcctcttgaggagcgggctgccttcgctctgccctgcttccaccgccatcgcataactctgctcggcatccaggtactttttatactcatggttgagtttatcaaaaacagtggctatcacgggcagcgatgctctgtctgactcacttaacatctgtgaacagacagacaggatgaccatcttgcattcctttctctggaggagaaagtccatgagtcttcctttgtctggtaagagatttactatgggctcaagtttcacttggaggttccagaggtaaccttgcttgcgctgataatgatgtcaggttg

SEQ ID NO: 255724 - DNA, 852 bp, Homo Sapiens
  misc_feature (44)..(163): n is a, c, g, or t
agtcgacggtaccggacatatgcccgggaattcggccattacgnnnnnnnnnnnnnnnnnnnnnnnnnnnnnnnnnnnnnnnnnnnnnnnnnnnnnnnnnnnnnnnnnnnnnnnnnnnnnnnnnnnnnnnnnnnnnnnnnnnnnnnnnnnnnnnnnnnnnnnnctccttagcctcccaatcctctcttaaaaaagtgatagctcagaaacatttgtaaaagcaaggtttttatttcattttggctctgtcattttcagaggcaaagaagttggcctgtaaaatagagtgctagagctcttacgcccctccccttcttcccaacttcctacttcctagcccttttatcaactcctagaatagttaaagagagacacatctagatgggatgaaaggtgccctaagcaggagaaactgaacaaaaggctagaggcatgggccaggtaaaaattgggcctagagtgaagactgtgctgtcgttaagagctttcgaggaaggagtacttactccccaagtgatgatgaatggaaaaatacttttcagggagaattgaaggggttaaagtgttaaatatgttgcctagacaagggtgctttacagaaagacagcgcaactttgaatgcttgcttacttgtttgtgacctaatttatgtggaagagtgacattacattaggatttagtaaaattgtaaaggctggatctcgagccttatggtggacacctggagctggacaagactattcttcggagttccatgggcgaccattgggcaacgaacacaagcccttacgtggcctgcacaactttccagcacctgtgaatgcacatacggttcaaactggacaagcaacg

SEQ ID NO: 255725 - DNA, 378 bp, Homo Sapiens
ctggggaatgcctccaatctagctcaataccaagacttccagttataagaggtgtgccagaagcaattctgacttgctgcaacttgcaggagctagatgtgcagactgcagtagcactgcagtctgagactgacaagcgggaactactctagaataaagacactaatgtatttatttgtgtatgattattattaatacatggtatctatgccccatactcacactgtaagttaaatttgcaactggaataggtctagaagggcagtggggagatggagggagaggtttctctagtcagaagcacagctgcagaacaagatgtggctcaatgggagaggctggtggttaccatgacattcgctggaagaggaatggaac

SEQ ID NO: 255726 - DNA, 424 bp, Homo Sapiens
ctgcaggattcggcacgaggccatctggattactgcaatagttctctaataggccttctttctttctcttgaccctcaaaatctataatatagtctaccaacagcaagagtgaaccttttaaaagtgagtcaggtcatatcacttgtctgctccaatccctccagtgggttttcagtgatgactttcttgtaccaccctatttaaaacctccatccctgcccctgccctgatttgttatcctttatctgctttattatctctatagcacttatcacctatgtatcataacacatattcgacttgattttttatctcctcccattggaaggcagcgatctttgctccctgctatctcagattctacaatggtgcttggcacatagataacactcaatatcagcatcctaagagagagaaaaatga

SEQ ID NO: 255727 - DNA, 658 bp, Homo Sapiens
  misc_feature (627)..(627): n is a, c, g, or t
accgtctgcaaggcaccaccatcagggaggaagatgagtactcagaactgcgatcagaactcagccagagccaacacgaggtcaacgaggactctcgaagcatggaccaagaccagacctctgtctctatccccgcagaactgcagagggtgctgacagggctggagaatgttgtctgcggcaggaagaagagcagctgcagcctctccgtggccgaggtggacaggcacattgagcagctcaccacagccagcgagcactgtgacctggctattaagacagtcgaggagattgagggggtgcttggccgggacctgtatcccaacctggctgaagagaggtctcggtgggagaaggagctggctgggctgagggaagagaatgagagcctgactgccatgctgtgcagcaaagaggaagaactgaaccggactaaggccaccatgaatgccatccgggaagagcgggaccgggctccggaagagggtgagcatgctgcatccataatggtcaggcccttcctgggcatggggctgaaagaaggctggtgtatagcaccaagggcaccgtgagaattttggggcaattggaaatttgggaatcactggctcttttctggtatgaagnccttcttgaaagtagttccgaattgctaaga

SEQ ID NO: 255728 - DNA, 785 bp, Homo Sapiens
  misc_feature (618)..(618): n is a, c, g, or t
  misc_feature (662)..(662): n is a, c, g, or t
  misc_feature (732)..(732): n is a, c, g, or t
  misc_feature (747)..(747): n is a, c, g, or t
  misc_feature (772)..(772): n is a, c, g, or t
gggaagtgagagtttacagagtcattggaagggccgctgtattagtttgccagggctgctgtaataagatcaaggtcttgggggttaggacttcaacatatgaatttgggggtggcggagcacaagtcagctcataacagctggggaggaggctttaggcctggccctgagaaattactcccagactaaggctgcagaactgaccccctagagagtcaccaccttggtcatagacagcaagcagagagggaggaatcaggaagtccctgctgtagttgctggatccagcggtgaatgttctgagctgtgatcctgggatcaggaagctgcagccactgccacagtgttggttctagagccaggcagcatgagatccagtcatcgcatccacactacagctataagaaggaggaagggcagaaggttgtgctccaccctttaaggacacttgctagaagtcagacagaacgtctggtcacactctgtttgacagaagttagtcacatgcaacatctagctgcatgggaggctgggaaatgtggtctttgttcccaacagctatgcatatacagggccaaaaatctccagggagtatgatgaagggaaaatgggggaatnggagtttgggggtcaagagtggtctctggctggcacctccctgnaacagaggactctagggagactagttaattgaatttcaaggttaaaggcagccagtgtggcccaaggttnttcctttcagttgcntgaggtttttgggcccttagggagnttcaaggcttcct

SEQ ID NO: 255729 - DNA, 2036 bp, Homo Sapiens
ctcgaagcacctactcccaggtccagccggccggtgagcgcctggggaccgcagaggtgagagtcgcgcccgggagtccgccgcctgcgccaggatggagttcgtgaaatgccttggccaccccgaagagttctacaacctggtgcgcttccggatcgggggcaagcggaaggtgatgcccaagatggaccaggactcgctcagcagcagcctgaaaacttgctacaagtatctcaatcagaccagtcgcagtttcgcagctgttatccaggcgctggatggggaaatgcgcaacgcagtgtgcatattttatctggttctccgagctctggacacactggaagatgacatgaccatcagtgtggaaaagaaggtcccgctgttacacaactttcactctttcctttaccaaccagactggcggttcatggagagcaaggagaaggatcgccaggtgctggaggacttcccaacgatctcccttgagtttagaaatctggctgagaaataccaaacagtgattgccgacatttgccggagaatgggcattgggatggcagagtttttggataagcatgtgacctctgaacaggagtgggacaagtactgccactatgttgctgggctggtcggaattggcctttcccgtcttttctcagcctcagagtttgaagaccccttagttggtgaagatacagaacgtgccaactctatgggcctgtttctgcagaaaacaaacatcatccgtgactatctggaagaccagcaaggaggaagagagttctggcctcaagaggtttggagcaggtatgttaagaagttaggggattttgctaagccggagaatattgacttggccgtgcagtgcctgaatgaacttataaccaatgcactgcaccacatcccagatgtcatcacctacctttcgagactcagaaaccagagtgtgtttaacttctgtgctattccacaggtgatggccattgccactttggctgcctgttataataaccagcaggtgttcaaaggggcagtgaagattcggaaagggcaagcagtgaccctgatgatggatgccaccaatatgccagctgtcaaagccatcatatatcagtatatggaagagatttatcatagaatccccgactcagacccatcttctagcaaaacaaggcagatcatctccaccatccggacgcagaatcttcccaactgtcagctgatttcccgaagccactactcccccatctacctgtcgtttgtcatgcttttggctgccctgagctggcagtacctgaccactctctcccaggtaacagaagactatgttcagactggagaacactgatcccaaatttgtccatagctgaagtccaccataaagtggatttactttttttctttaaggatggatgttgtgttctctttatttttttcctactactttaatccctaaaagaacgctgtgtggctgggacctttaggaaagtgaaatgcaggtgagaagaacctaaacatgaaaggaaagggtgcctcatcccagcaacctgtccttgtgggtgatgatcactgtgctgcttgtggctcatggcagagcattcagtgccacggtttaggtgaagtcgctgcatatgtgactgtcatgagatcctacttagtatgatcctggctagaatgataattaaaagtatttaatttgaagcaccatttgaatgttcgtaatagtagaaaatgatgtgaattttcgttctgttcggctcctatttttctcatcattttgttttctttaattgggttgaatggagtagatagaaatatttatggtttaggtaacagttagatgtttcctaagaatgcaaactgccttttccacacaaaggctgggaataaaattctgggtattctcgtattctcatttaaaggagtttagctttcagagagaaacagcaggattgcttttgaccttttagaagattggtctccagtaaaggtggacatttttgagatttttataataaagaatttaattgctctgc

SEQ ID NO: 255730 - DNA, 964 bp, Homo Sapiens
  misc_feature (797)..(797): n is a, c, g, or t
  misc_feature (806)..(806): n is a, c, g, or t
  misc_feature (930)..(930): n is a, c, g, or t
ggcctgggtggcgaattcggcacgaggcgcagaggtgagagtcgcgcccgggagtccgccgcctgcgccaggatggagttcgtgaaatgccttggccaccccgaagagttctacaacctggtgcgcttccggatcgggggcaagcggaaggtgatgcccaagatggaccaggactcgctcagcagcagcctgaaaacttgctacaagtatctcaatcagaccagtcgcagtttcgcagctgttatccaggcgctggatggggaaatgcgcaacgcagtgtgcatattttatctggttctccgagctctggacacactggaagatgacatgaccatcagtgtggaaaagaaggtcccgctgttacacaactttcactctttcctttaccaaccagactggcggttcatggagagcaaggagaaggatcgccaggtgctggaggacttcccaacgatctcccttgagtttagaaatctggctgagaaataccaaacagtgattgccgacatttgccggagaatgggcattgggatggcagagtttttggataagcatgtgacctctgaacaggagtgggacaagtactgccactatgttgctgggctggtcggaattggcctttcccgtcttttctcagcctcagagtttgaagaccccttagttggtgaagatacagaacgtgccaactctatgggcctgtttctgcagaaaaaaaacatcatccgtgactatctggaagaccagcaaggaagaaaaagagttctggccctcaagaggtttgggagcaggtatgtttngaaaagtanggggatttttgctaaacccggagataatggactttggcccgtgcagggcctgaattgaaccttatacccaatgcactgcacccccattcccaagatgtcatccccctaccctttcgagactccnaaaacccggaaggggggttaaactccggtggcta

SEQ ID NO: 255731 - DNA, 621 bp, Homo Sapiens
gcgcagattacacccatgaacttagaccagttgcctttatgtatgatcgtatttatactgagaagttactgtgttttttgactttcttttctatttgctacatattagttcggtctaaacgtttggtcttctggtctccatagttctacattggttaaatgcaactcacttctgggagtagtggtgacattcaactagtaggctttttaataaactacagaagttcattactctcatgtaaggaaggaaaactaatgtaactttcgttaagtatgaaaagcgttggatatccttatagttctttagagttaagggtgagatgggtttagaaagtggccaggcacaagttattttaaaataaaaaatctttggctgtttgttccaatatattaatagttttcccttttttacagcaacgcagtgtgcatattttatctggttctccgagctctggacacactggaagatgacatgaccatcagtgtggaaaagaaggtcccgctgttacacaactttcactctttcctttaccaaccagactggcggttcatggagagcaaggagaaggatcgccaggtgctggaggacttcccaacggtgagtggggttacgcatcttgtc

SEQ ID NO: 255732 - DNA, 432 bp, Homo Sapiens
  misc_feature (105)..(105): n is a, c, g, or t
accgccgccatatgtggactgtccatgagaaccccacctagtaggacccccggccagaatgataattaaaagtattttaatttggaagccccccatttgaatgtnccgtaatagtagaaaatgatgtgaattttcctttcctgttcggctccctatttttcctcatcattttgttttctttaattgggttgaatggagtagatagaaatatttatggtttaggtaacagttagatgtttcctaagaatgcaaactgccttttccacacaaaggctgggaataaaattctgggtattctcgtattctcatttaaaggagtttagctttcagagagaaacagcaggattgcttttgaccttttagaagattggtctccagtaaaggtggacatttttgagatttttataataaagaatttaaattctctgcaaa

SEQ ID NO: 255733 - DNA, 346 bp, Homo Sapiens
aggcattgaaacgtggctagtctaaattgagatgttctgtaagtgtaaaatacacagatattgatttcaggctgaaaaaccaatattttggctctgttgaattaaataagagatgactaaaattatgtttacttgtttctttctcctttctttaacatgactactagaaaatttaagattacatgtgtgagtcatattttcattagacagcactgctctaaacaatcattttaactgactacttagcattactcctactgtgtattctcatctgcatttttccagggagttgacagaagtggaagataaactaacttatgcctaaagaaaatgtttttaaaaattg

SEQ ID NO: 255734 - DNA, 352 bp, Homo Sapiens
ctgctatgctctgccctttcctcccattcataggctccagctacatggactttgctgtttccataatatgccaagcttgtttctacctaagggcctttgcaaatgttcttctttcagcctgcagcactctacttgttcctttacatcctgcacatctctccttaaatgtcatcaactcagagaggctttctctggtcaccttttctaaagaggtcccatctccccactatgtcattctttatcctcttaccctgatttttcatttccccctccttcatttgaatgtaacctgcattagggcaacaactttgtttttttcattgttgtattatcgggacttagagcagtggct

SEQ ID NO: 255735 - DNA, 1964 bp, Homo Sapiens
  misc_feature (33)..(33): n is a, c, g, or t
  misc_feature (1451)..(1500): n is a, c, g, or t
cttgttaaagcaggtttggcattagcactcttntggaggaagccagaaatacgcagatgacaaaaacagaattccaattcggggagacccccacatccttgttgttggagatccaggcctaggaaaaagtcaaatgctacagggcaatgctgtgataaaacataaggaagctgaggctcagagaggtctgagagccacacagctggtgcatggtggagccacgatttaaacaggcagcgtgcaatgttgccccacgtggcgtgtatgtttgtggtaacaccacgaccacctctggtctgacggtaactctttcaaaagatagttcctctggagattttgctttggaagctggtgccctggtacttggtgatcaaggtatttgtggaatcgatgaatttgataagatggggaatcaacatcaagccttgttggaagccatggagcagcaaagtattagtcttgcgaaggctggtgtggtttgtagccttcctgcaagaacttccattattgctgctgcaaatccagttggaggacattacaataaagccaaaacagtttctgagaatttaaaaatggggagtgcactactatccagatttgatttggtctttatcctgttagatactccaaatgagcatcatgatcacttactctctgaacatgtgattgcaataagagctggaaagcagagaaccattagcagtgccacagtagctcgtatgaatagtcaagattcaaatacttccgtacttgaagtagtttctgagaagccattatcagaaagactaaaggtggttcctggagaaacaatagatcccattccccacccagctattgagaaagtacattggcgtatgctcggcagtatgtgtacccaaggctatccacagaagctgctcgagttcttcaagatttttaccttgagctccggaaacagagccagaggttaaatagctcaccaatcactaccaggcagctggaatctttgattcgtctgacagaggcacgagcaaggttggaattgagagaggaagcaaccaaagaagacgctgaggatatagtggaaattatgaaatatagcatgctaggaacttactctgatgaatttgggaacctagattttgagcgatcccagcatggttctggaatgagcaacaggtcaacagcgaaaagatttatttctgctctcaacaacgttgctgaaagaacttataataatatatttcaatttcatcaacttcggcagattgccaaagaactaaacattcaggttgctgattttgaaaattttattggatcactaaatgaccagggttacctcttgaaaaaaggcccaaaagtttaccagcttcaaactatgtaaaaggacttcaccaagttagggcctcctgggtttattgcagattaaagccatctcagtgaagatatgcgtgcacgcacagacagacagnnnnnnnnnnnnnnnnnnnnnnnnnnnnnnnnnnnnnnnnnnnnnnnnnngtcaaatactgtctctctgaaaaatgatgtcccaaaagtattttaataaggaaaaaagcattaaatataataaaactaattttagaaagtgataaaggtctcccgaatgcagtaacctcaccactgttaatcacaggtggactccacgcaggcctgaaggggaaaaggatttccctttgagggccaggggttccgaaaaccaaccctttggggccaacattagccaagaacccccatttttcttttagaaaaacaaacccctaacacatcattccataatacactcgcctggtccgggccgcccctccgggccccctcggaaaaaagttttttttaaaacccctttcctttttgggggcggcgggggccccaattaagggaaagtgggaaacgggggcccataagctgggtttcccccaaggaaaaaccctgggtccatgcccccaaggggctcggaattcccc

SEQ ID NO: 255736 - DNA, 646 bp, Homo Sapiens
  misc_feature (29)..(29): n is a, c, g, or t
  misc_feature (54)..(54): n is a, c, g, or t
  misc_feature (59)..(59): n is a, c, g, or t
  misc_feature (167)..(167): n is a, c, g, or t
acccatcaaggccagatcagatcaagttntatagctgttagaagccatttttcntatcnagtagatagagtggatgaacccactctaagagtgagtggtatagtccatagcggatgttcctcttccggagagctgttcccaattcaccaccaaatcccgatgaggcnccacgtctttgagttcccagttccaagacacaggactcggccagtttgtgaagccttcgtgatgctttgtcgtcaaaactacatacttggcgcccgcggcctggaagaggtcggcccactcctccgggtggaagaagcgcgcagtgaactgcggtccgaagtcggcgtagctgaagccgggcgggtagttgtcgcgcatgaagcgctggtactgcggccgcccctcgccctgccagtgccaccagaaccactcgctgccccaggcgggcaccgagaacacgccccagtggatgaacaccccgaacttggcttcgtcgaaccaggccggcagcggccgagaatccaggctcggccagtctggggtgtagcggcgcggaggctgggcccgacgcaccgactcggccgctccgaggaagagcagcagcagcaacagcgcgggacccgccggccgcgacctcatccccggagcccgcatcgct

SEQ ID NO: 255737 - DNA, 719 bp, Homo Sapiens
  misc_feature (599)..(599): n is a, c, g, or t
  misc_feature (657)..(657): n is a, c, g, or t
  misc_feature (691)..(691): n is a, c, g, or t
gctctagcgtttcaccattttctctgaaaacttctgcttcatgcacacacttcacgaaaccccacagctgattggaggcattccttcctgtggcccatgtggttttgcttaacaatctataaacaaagccactttcagcaatgctaaccataatggatagatacttgcatttactcaaatcccacaaatcataaatgctggcacttctgcaagagttgaatgtgaaatatttttgaaagcttctaagttttaggtaaagctagatctcctggtactccaggtattggttttgttgtttggttactccatcaaggtataaatacacacataaaagtgcacaacacatccatgtatagctccgtgaatttcaaaaagtgaacacacctgtgtaatcagcacccagatcaagaaaaagaacatcacccacatcccagagatcccttgtgctaccacttagtcattattcccagcaagataatcactatctcaagttctaacaccatgtattagttcttcctgtttctaaaaatggtataaatagaattaaacagcatgcactctttgggtcttctttcattccacatcgtgattatgcagtntatgtttttgtatccacgttctttctgatgcatgatattccattatatgcgtatactntcatctatttatctattcttcctcagatggactnttgggcagtttcagttttagatgattat

SEQ ID NO: 255738 - DNA, 357 bp, Homo Sapiens
atggtgcgtacacagtagatccagcagagcacaagacgtccacaccctggtgaggcctctgacttctttgagcagagtactgtccacagccatggcggtcacacgtccggatctcattggaagacttgccagcacatatattagcccatggccctgccagtgacttcctttagtttcttcctctgattagagttgcccccacactctctttgaagaatattcaagtttgaatgaatacttcctagctatttagccttagaattctgcatctctcatttctttagtgtgagacacaaaaagtttaagaggatggagcaagtcaagttctaatattccatggatagctatttgatttgc

SEQ ID NO: 255739 - DNA, 1042 bp, Homo Sapiens
gaatattagaacttgacttgctccatcctcttaagctttttgtgtctcacactaaagaaatgagagatgcagaattctaaggctaaatagctaggaagtattcattcaaacttgaatattcttcaaagagagtgtgggggcaactctaatcagaggaagaaactaaaggaagtaaaaccagatgttttccaccaaagccctccttttggctggtctgatttctaccgcactggcagggccatgggctaatatatgtgctggcaagtcttccaatgagatccggacgtgtgaccgccatggctgtggacagtactctgctcaaagaagtcagaggcctcaccagggtgtggacatcttgtgctctgctggatctactgtgtacgcaccattcactggaatgattgtgggccaggagaaaccttatcaaaacaagaatgctatcaataatggtgttcgaatatctggaagaggtttttgtgtcaaaatgttctacattaagccaattaagtataaaggtcctattaagaagggagaaaaacttggaactctattgcccttgcagaaagtttatcctggcatacaatcgcatgtgcacattgaaaactgtgactcgagtgaccctactgcatacctgtaaatcgaaggccaatggtcagatcttcaaaataaaaagtcatcttaaaaacctggatgcatacccttctcttcaagaaatttgtgttcacaaaggaaaaatgcatgaagggatggataccccattttccatgacatgattattacacattgcatgcctgtatcaaaacatctcacgtacctcataaacatatacacctatgtacccacaaaaattttttaattaaaaaaaggaaatttgagtttaaatagaaacatgataaatgcaagaaagaaaacattttgattttaactcattgtcactctgatgttcatgtgaactggttgctctcgggctctttgatctgtcccctatggaatctgagtgggtttattttttagatttctcagtcccaaagatttaagataa

SEQ ID NO: 255740 - DNA, 881 bp, Homo Sapiens
  misc_feature (376)..(412): n is a, c, g, or t
ttattttggtcgttcagtcagcaaagtggtctttaggacgggtcaaatatttgattgtttgcaaactgtcgtaatggattgctgcagaaacatttggaaaaaaataagaaatttgaaaagcaagaaattgctgtaaatagggcacaagccctgtatatggattagatggtcgatatgccaaaaactacagatggtttctaagtagatttctcacctttccttggaggcatattgtagcttgctaaattgttaagcaaaaccacatgggccacatggaaggaattcctccaatcagctgtggggtttcgtgaagtgtgtgcatgaagcagaagttttcagagaaaatggtgaaacgtccttgaaagtgcctcagctnnnnnnnnnnnnnnnnnnnnnnnnnnnnnnnnnnnnncattttgaaagaagtacaaaatctctacgtatggaacctgcattaaataaatgagcatcaacatctccaggaggcaccccaggtgtagactccacctctcttacctcttccagatattcgaacaccattattgatagcattcttgttttgataaggtttctcctggcccacaatcattccagtgaatggtgcgtacacagtagatccagcagagcacaagacgtccacaccctggtgaggcctctgacttctaggatgtaaataagaacgaacagactgaggaactgccttaggggagctttactgcctgggaacatggtgttagcccactgtttgcagacgaggtaacaaagcttgaagctgccagaacatgttgggatgtcccaggatgcctcactctgtttagcccaattttaacctccctccccgcaggtgctaataaccatatcataaagatgaaagcatttaa

SEQ ID NO: 255741 - DNA, 896 bp, Homo Sapiens
ttcattacacattagtaagtttcgagacgaatgctgtatagagacaaataactccattccttgtaagtaaatgtctaggacagagaatccaccacaatatacagcctgtatggtcctcaaacatttccatgctctgtatctatggagaaaagaaaaacgtaaggaggttgtatcatttcctgaggagcattcagttgagtgtgggcagcagagtgagcttatgcagggtcaggaaactttgtgaaaggccagatggtaattattttaggtttatatgccatgtggtctgtcatgactaatcagcacacaaaggcagccatagccaatgttaataataagtgtggccatgtgccaataaagcttcatttacaaaattaagtgtaaggctagatttggttttaggtgtgtgattagttgaccattgtgttgaaggaagcccaattagctgtgaagtgaaatgtcgcttttagagatagctgtcctacaaataaccaaagcttattgacttttctgggagtgaatatctgaaattggagagtccgctacagaataggcatgctacgccacagttttgtcttggtgtgaggacatgccatgtggattgtctcagatgtaggaaaagccttgtagagaatttaaattgcaggggcccttggagagtgggttaatgccatctagtactggtcataagtggtgaactcttacctgtgctgcagggggcgatatactcagcaaccacagactcatctgaaagataacgttgggtgaaggaagaaacgaaagatctatgaactagggaccatgctaaatctgtctagtcactttactactggagaaaagcacgccctatcagaattgtcaaaacttcatgtaaatagacaagaattaaacaggat

SEQ ID NO: 255742 - DNA, 482 bp, Homo Sapiens
tttcggatgtcactgaccatcagttgcacagtaaaccgtcatgcggccaatatggtgactgtatatgtaaagatggcatccggttttattcccctgaaaccaacagtaaaaatgcctgaaagatccagctctgtgagccggacagaagtgagcaacaaccatgtcctcatttatgtggaacaggtgacaaatcaaacgctaagttttaccgtcatggttctgcaagacatcccagtagcagacttgaagccagcaattgttaaagtcgataagtactatgagacagataagcctgtggttcctgagaatagcgccccctgcagcacagatacagagcatggaaatgtttgaggcccacacagactgcagattttggtggattatctgtccgagacatttacttagaacgaatggagttattggtctctataaaatagacactaaaaatacttgctgaataaaaatgaacttctggtcaaact

SEQ ID NO: 255743 - DNA, 617 bp, Homo Sapiens
  misc_feature (431)..(431): n is a, c, g, or t
  misc_feature (469)..(469): n is a, c, g, or t
  misc_feature (471)..(471): n is a, c, g, or t
  misc_feature (544)..(544): n is a, c, g, or t
  misc_feature (561)..(561): n is a, c, g, or t
gcgaagcgcacgtcgagcgggggagcggcgctgcctgtggagatccgcggaggccgacaggattcgttggctgccgtccccgctgctgtgcattgggttaaaaacgacaaccaacatcagccatgaaagatccaagtcgcagcagtactagcccaagcatcatcaatgaagatgtgattattaacggtcattctcatgaagatgacaatccatttgcagagtacatgtggatggttattgaacgctgtttccaagaaatgctggaagaggaagaagagcatgaatggtttattccagctcgagatctcccacaaactatggaccaaatccaagaccagtttaatgaccttgttatcagtgatggctcttctctggaagatcttgtggtcaagagcaatctgaatccaaatgcaaagggagttgttcctggngtgaagtacggaaatatttgagtagacggggccctctntnggtggatgtagcacaatttccacactgtgaaggcagtattagaagactttaatgtaaagctctcttgcactgngtacacttatgcattgncaaagtttttgtaggcttgcatgcttaataaagtgctgagacttgtactaagtaaa

SEQ ID NO: 255744 - DNA, 1453 bp, Homo Sapiens
gggtgtttgtttggactggagaagggaggcggcgggcgaagcgcacgtcgagcgggggagcggcgctgcctgtggagatccgcggaggccgacaggattcgttggctgccgtccccgctgctgtgcattgggttaaaaacgacaaccaacatcagccatgaaagatccaagtcgcagcagtactagcccaagcatcatcaatgaagatgtgattattaacggtcattctcatgaagatgacaatccatttgcagagtacatgtggatggaaaatgaagaagaattcaacagacaaatagaagaggagttatgggaagaagaatttattgaacgctgtttccaagaaatgctggaagaggaagaagagcatgaatggtttattccagctcgagatctcccacaaactatggaccaaatccaagaccagtttaatgaccttgttatcagtgatggctcttctctggaagatcttgtggtcaagagcaatctgaatccaaatgcaaaggagtttgttcctggggtgaagtacggaaatatttgagtagacggggccctcttttggtggatgtagcacaatttccacactgtgaaggcagtattagaagacttaattgtaaaagctctcttgtcactgtgttacacttatgcattgccaaagtttttgttagtcttgcatgcttaataaaagtgctgagactgttactaagtaaaaagctgtcaaacatttactgaaaatagaattggccccatggcttgatgtgaagacagcaaggaaagaagcaccagtcaagttgtgaacaagcaccaaattaaaagacctaaaccttaccaaattgtctttttttgaggctaatctatcacttgttaatgtctaaactttaaaatcagtacatttaatttgagttccaactgttaagcatatttctcagacttaaatttgattatgtccccatcaaaaagaatctccattttctgaaggtctgttagttaatttgagataatttgttaaaggcaagtatgtcatattactgaggctacaagttagtcagcagatgagtgccagtccagccttttctggtatgttattgttagaaatattgagttctaatgttacatctgaggaagtatgtaatttgagaattgtaacttctaagggattcactgcatcatagctatgcctgtatggagtctaacatatgaccaataccaacccataatccagctgaacaaagatactgtaacattatgatttgagtggtgcttttccttgctttgttaaccatcacgagagtctgcagcacaacttttaacaaagctagaacagttttggcttcttaaacttcatatttgggtaggttaagctgccatacgtgttcagtgtgaatagtgtttaagttgaaaatattgtaaaaaaattatattttttcaaaaatatttaacaacaacgaaacac

SEQ ID NO: 255745 - DNA, 447 bp, Homo Sapiens
  misc_feature (420)..(420): n is a, c, g, or t
aactggagaagggaggcggcgggcgaagcaacgtcgagcgggggagcggcgctgcctgtggagatccgcggaggccgacaggattcgttggctgccgtccccgctgctgtgcattgggttaaaaacgacaaccaacatcagccatgaaagatccaagtcgcagcagtactagcccaagcatcatcaatgaagatgtgattattaacggtcattctcatgaagatgacaatccatttgcagagtacatgtggatggaaaatgaagaagaattcaacagacaaatagaagaggagttatggggaaggaagaatttatttgaacgctgtttccaaggaaattgctgggaaggagggaaggaaggagcatggaattggttttatttcccagcttcgagattctttccccaccaaactatgggancccaaatcccaaggacccgtttttatt

SEQ ID NO: 255746 - DNA, 387 bp, Homo Sapiens
  misc_feature (12)..(12): n is a, c, g, or t
ggtatgggtatngggttaggaaaatattggagggtcccctaatggttaaccatcctggggggaagtatggtaattttggagaattggtaacctccctaaggggattccacctgcatccataggctatgccctgtatgggagtcctaacatatgacccaatacccaaccccataatcccagctgaacaaagatactgtaacattatgatttgagtggtgcttttccttgctttgttaaccatcacgagagtctgcagcacaacttttaacaaagctagaacagttttggcttcttaaacttcatatttgggtaggttaagctgccatacgtgttcagtgtgaatagtgtttaagttgaaaatattgtaaaaaaattatattttttcaa

SEQ ID NO: 255747 - DNA, 383 bp, Homo Sapiens
ggcatgagccaccactcctggccagccatatcttatacacagtgatcttaaccaaagcctcatactcaaatttagtttgcaagacgttgctgaagatagaacgcactgctgatatggctattgagaggaacacagccaaagacagctaatttgtcttttcttgctgctcgaggaagactttaaaatttgaacctggcagcataggttgataaaactgaactgcaacatgtgctacccttcaagaaaaagaaaggatagcccagagggtagagcctcaggccctgagggcagaggcctgagccaaagccttcaagcctgaaggaatttgtcctactggatttcaatgggaatgtcgataacggttacccatgcttgtcccacca

SEQ ID NO: 255748 - DNA, 1355 bp, Homo Sapiens
  misc_feature (3)..(6): n is a, c, g, or t
  misc_feature (11)..(12): n is a, c, g, or t
  misc_feature (18)..(18): n is a, c, g, or t
  misc_feature (27)..(27): n is a, c, g, or t
  misc_feature (34)..(36): n is a, c, g, or t
  misc_feature (47)..(47): n is a, c, g, or t
  misc_feature (50)..(50): n is a, c, g, or t
  misc_feature (59)..(59): n is a, c, g, or t
  misc_feature (62)..(62): n is a, c, g, or t
  misc_feature (77)..(77): n is a, c, g, or t
  misc_feature (94)..(94): n is a, c, g, or t
  misc_feature (97)..(97): n is a, c, g, or t
  misc_feature (101)..(101): n is a, c, g, or t
  misc_feature (107)..(107): n is a, c, g, or t
  misc_feature (141)..(141): n is a, c, g, or t
  misc_feature (145)..(173): n is a, c, g, or t
  misc_feature (175)..(175): n is a, c, g, or t
  misc_feature (178)..(178): n is a, c, g, or t
  misc_feature (180)..(180): n is a, c, g, or t
  misc_feature (368)..(368): n is a, c, g, or t
  misc_feature (1049)..(1235): n is a, c, g, or t
ttnnnngcccnnagccanggccgtgtntcccagnnntcaggaggcgnagnaggagaaangcntcaaaccgggagggngaggttgcagtgagccnagnttgngcgccncactccgccctgggtgacagggtgaaacgccgtnctcnnnnnnnnnnnnnnnnnnnnnnnnnnnnngnacntngatctcaatttaatttttcatattcttgcaatgaaatggacttgaggaagctaagatcatagctagaaatacagataattccacagcacatctctagcaaatttagcctattcctattctctagcctattccttaccacctgtaatcttgaccatataccttggagttgaatattgttttcatactgntgtggtttgaatgttccctccaacactcatgttgagacttaatccctaatgtggcaatactgaaaggtggggcctttgagatgtgattggatcgtaaagctgtgccttcattcatgggttaatggattaatgggttatcacaggaatgggactggtggctttataagaagaggaaaagagaactgagctagcatgcccagcccacagagagcctccactagagtgatgctaagtggaaatgtgaggtgcagctgccacagagggcccccaccagggaaatgtctagtgtctagtggatccaggccacaggagagagtgccttgtggagcgctgggagcaggacctgaccaccaccaggaccccagaactgtggagtcagtggcagcatgcagcgcccccttgggaaagctttaggcaccagcctgcaacccattcggagagccacgtaggctgcacccagcaaaaccacaggcacggggctacctgagccttgggggcccaatccctgctccagtgtgtccgtgaggcagcacacgaagtcaaaagagattattctcttcccacagataccttttctctcccatgaccctttaacagcatctgcttcattcccctcaccttcccaggctgatctgaggtaaactttgaagtaaaataaaagctgtgtttgagcatcaaaannnnnnnnnnnnnnnnnnnnnnnnnnnnnnnnnnnnnnnnnnnnnnnnnnnnnnnnnnnnnnnnnnnnnnnnnnnnnnnnnnnnnnnnnnnnnnnnnnnnnnnnnnnnnnnnnnnnnnnnnnnnnnnnnnnnnnnnnnnnnnnnnnnnnnnnnnnnnnnnnnnnnnnnnnnnnnnnnnnnnnnnnnncttcccacagataccttttctctcccatgaccctttaacagcatctgcttcattcccctcaccttcccaggctgatctgaggtaaactttgaagtaaaataaaagctgtgtttgagcatc

SEQ ID NO: 255749 - DNA, 951 bp, Homo Sapiens
  misc_feature (74)..(406): n is a, c, g, or t
  misc_feature (599)..(777): n is a, c, g, or t
  misc_feature (802)..(867): n is a, c, g, or t
tgaacaaccctttgctacgttaaaagcagctggtacggtcggaatccgggatatcgtcgacccacgcgtcgctnnnnnnnnnnnnnnnnnnnnnnnnnnnnnnnnnnnnnnnnnnnnnnnnnnnnnnnnnnnnnnnnnnnnnnnnnnnnnnnnnnnnnnnnnnnnnnnnnnnnnnnnnnnnnnnnnnnnnnnnnnnnnnnnnnnnnnnnnnnnnnnnnnnnnnnnnnnnnnnnnnnnnnnnnnnnnnnnnnnnnnnnnnnnnnnnnnnnnnnnnnnnnnnnnnnnnnnnnnnnnnnnnnnnnnnnnnnnnnnnnnnnnnnnnnnnnnnnnnnnnnnnnnnnnnnnnnnnnnnnnnnnnnnnnnnnnnnnnnnnnnnnnnnnnnnnnnnnnnnnnnnnnnnnnnnnngaacctggatctcaatttaatttttcatattcttgcaatgaaatggacttgaggaagctaagatcatagctagaaatacagataattccacagcacatctctagcaaatttagcctattcctattctctagcctattccttaccacctgtaatcttgaccatataccttggagttgaatattgttttcatacnnnnnnnnnnnnnnnnnnnnnnnnnnnnnnnnnnnnnnnnnnnnnnnnnnnnnnnnnnnnnnnnnnnnnnnnnnnnnnnnnnnnnnnnnnnnnnnnnnnnnnnnnnnnnnnnnnnnnnnnnnnnnnnnnnnnnnnnnnnnnnnnnnnnnnnnnnnnnnnnnnnnnnnnnnnnnnnnnnnagagaactgagctagcatgcccagnnnnnnnnnnnnnnnnnnnnnnnnnnnnnnnnnnnnnnnnnnnnnnnnnnnnnnnnnnnnnnnnnncccaccagggaaatgtctagtgtctagtggatccaggccacaggagagagtgccttgtggagcgctgggagcaggacctgacca

SEQ ID NO: 255750 - DNA, 927 bp, Homo Sapiens
  misc_feature (25)..(25): n is a, c, g, or t
  misc_feature (299)..(299): n is a, c, g, or t
  misc_feature (579)..(606): n is a, c, g, or t
gaattcggcacgagctccccagcancagaaatgtagagagtcctgttcgagtccatccactgttggctcttccctaacgacaaggaaaattgatccaccagcagtgcctgcgacaggccagttcatgcgtattcagaatgtaggccaaaagaaagctgaagagagtccagcagaaattatcatccaggctattcctcagtatgctattccttgtcactccagctccaatgtggtggtggagcccagtgggcttcttgagctaaacaacttcactagtcaacagctggatgatgaggagncagcaatggagcaggacatagacagtacacggaggatggaactgaacccagcccttctcagagctctgctgaacggtcctagtgtttggacacaatagtgcactttaaaacctgcttggttaccaagtgtccagggaaacccttgtattttgatgactaaaaagagcactttgcccgtacttaggctgtgaaccctaaaacagcagtgtttcaacaagatgttgctgcaggagcagctttttaaaacaagataaaactcacaggggaatgtacttttttnnnnnnnnnnnnnnnnnnnnnnnnnnnngctgcacatttacagtgacttaagacctggtcttctttctctgttggatcatggccggtgaaacagttttgtcttgcagtggaaagagacttcctgtgaatgtttctcaactggtttctgctgagcaaaataccatctaaaaggagaatgtgaatagttgtattttgaaatgatgtgtcaggaaaagttttttaaaaacttgtatgtttttgcaaatccctggaagtgttgaattggttaaaattttacattttctcagttcataattagtttataaacacctagaataatactggcattaaagaatccttgttggatggt

SEQ ID NO: 255751 - DNA, 641 bp, Homo Sapiens
  misc_feature (79)..(79): n is a, c, g, or t
  misc_feature (114)..(114): n is a, c, g, or t
  misc_feature (178)..(178): n is a, c, g, or t
cggcgcccagaagtcaggctctacccaggtgttgctggcttgcacagctccacagggctgagaagccacagctgggacncgaggtgcaccgggccccctctggcaagcaccctntgagcctcaggtgattcctgcaggcatccacaagcttcaccgactgagtagctagtgtctgcgnagactgccagcttcagccctaggcaaaagcgtgtttccctcgagtgggcactctgcaccgggcttccctccaaggccaaggcagtgcgtgtgggtggcagcagctccacaggctccagacaactcgtaatgaatgatcataggctcttcatgttatcaaataccacagataaggaagtgaggtccccaaacaaataagccatgcatccagagctggagttttttcaaggctctggggacactgtcatgcagggtgggtatatccctaagttcctggggtgcctacactggggcaggagcagacacatgtataaataaagaaccaaggtagttaaaagttatgacagatgaaggaaatatcataaaacagagagatgtgacaaagagtaactgggagctgaggtgaggggcatattttagctggggcagtcagggaggtcctctctgaggaggagacatttgag

SEQ ID NO: 255752 - DNA, 761 bp, Homo Sapiens
ctttatcggctctattgccagactactggacttggaggatcagcagttgcaggtcatgcctcagacaagattgaaaacatggtgcctgttaaagatcgaatcattaaaattagctttaatgcagatgtgcatgcaagtctccagtggaactttagacctcagcaaacagaaatatatgtggtgccaggagagactgcactggcgttttacagagctaagaatcctactgacaaaccagtaattggaatttctacatacaatattgttccatttgaagctggacagtatttcaataaaatacagtgcttctgttttgaagaacaaaggcttaatccccaagaggaagtagatatgccagtgtttttctacattgatcctgaatttgctgaagatccaagaatgattaaagttgatcttatcactctttcttacactttttttgaagcaaaggaagggcacaagttgccagttccaggatataattgaagtcagcaactaagtcttccttcaaagttgtgatttttgggaaaatcatatatcctatcttctcaaaggagaaatattgtacaataatatgaaggcttatattttaaataattattttttctcaactaatttttttcacttaaacttgagagaacaagttcagcttttatcataagaaactcatatgcctagctagaatatatgactgactattcaataccatactgaagagtttgatactattaaaataagccgctttgttttttaaatatgca

SEQ ID NO: 255753 - DNA, 624 bp, Homo Sapiens
  misc_feature (48)..(67): n is a, c, g, or t
  misc_feature (175)..(175): n is a, c, g, or t
  misc_feature (384)..(431): n is a, c, g, or t
tcgtgcctctgcactctagcttgggttacacagtgagattccagctcnnnnnnnnnnnnnnnnnnnngtacataccaaaaagagaacattaaagatgatcatttatctagaaataactaagaatccaaacaatagagcacttaggcccaggcacagtggctcatgcctataatcncagcactttgggaaacagaggtgggaggatcatttgagcccaggagttcaagacaagcctgggcaacatagcgacaccctgcctgtacaaaaaataaaattgtggccaggagcggtggctgactcttttgtaataaccattaacacacaaacacatttatagctgtacaaaaattttttctttctttatatcttcattctataagctgnnnnnnnnnnnnnnnnnnnnnnnnnnnnnnnnnnnnnnnnnnnnnnnnaagacacacacacattagcctaggtctacacagggtcaggatcatcaagatgtcactaggcaacagaaatttttttagctccattataatcttacgggacaaccatagaattaatatatgggatctgttatgtggtgcatgacaatatagagagagatccagttatggcctgcatggtttggtattgttcaac

SEQ ID NO: 255754 - DNA, 1021 bp, Homo Sapiens
  misc_feature (425)..(425): n is a, c, g, or t
  misc_feature (457)..(457): n is a, c, g, or t
  misc_feature (502)..(502): n is a, c, g, or t
  misc_feature (509)..(509): n is a, c, g, or t
  misc_feature (518)..(518): n is a, c, g, or t
  misc_feature (862)..(864): n is a, c, g, or t
  misc_feature (873)..(968): n is a, c, g, or t
  misc_feature (995)..(995): n is a, c, g, or t
ctcccacgagatactggttttactttagttaaatgtaattttctatgttctaggcactgatttcagtactgcttttaagattttaattcatttaatccctacaacaacccagtggaattagttactgttactatatctgtagtgcagatgagggaactgaagcacagggacaataagcaacttgcttaggttcacacatcttgtctgtggtggagctaggacttgaactcaggcagcctggctctagaatacgtgctcctaacatgctgcttttcttgctttatcagggcaatgagaaaattagatgtgtaatatatctttcatcaagcaatataaaaacattctttgacatttatataatactatataattcattgagtaccagctgtgtaccagagtggagatggtatttccagaaggccttngagagtcatcaacagttgaactaagttaacanaccttatacgttaaccgactgtgcttataatgtgtattggagaanactttanatacagaanagataaagaaaataaaggtagtgaatagctaagattataagcttgggatctagacctgagtgtgagtctgagctccactctctaagcctcactcctctgtaaacttggggtatagtgtctaattcatggggtttttaaatgaggtttaagtgagataatatgtttaggacggtgcctagcatataataagtattccaaaaccattatcagttattgtaaaaatctctcataatccacatagattctgtctattttgatgtacaaagaagctctcttatttaatgtgattgggaggtagtatttattaaatttaaaaaagttattaatataaggggaatacaaannnccgctcatnnnnnnnnnnnnnnnnnnnnnnnnnnnnnnnnnnnnnnnnnnnnnnnnnnnnnnnnnnnnnnnnnnnnnnnnnnnnnnnnnnnnnnnnnnnnnnnntcccacccgggagggctcatacacccnacggccgttctaggcatgcaataaac

SEQ ID NO: 255755 - DNA, 520 bp, Homo Sapiens
  misc_feature (428)..(428): n is a, c, g, or t
  misc_feature (478)..(478): n is a, c, g, or t
  misc_feature (499)..(499): n is a, c, g, or t
  misc_feature (504)..(504): n is a, c, g, or t
gggtcccctgacttcccggcaaaaccaatccaaggccctcactttaacagtagatacttggcgaggctgtgcatggtgaggctgtgcatgcacctttcattgcaggtcagccactaacatgataagagcttatgtctatttttccacaatttcagttctttctctacaggagataagactctcactcagggcaatcttagcagatttgaggctcaatatctgcttctgaagcctgggagatagaatccccgagttcatcattttctttcatcactttatccactggaacttagggagcaaccaaccaggcttcattatgttccttgggttttccacgtatgggtcaattgtattatgtatagtcactggaactccttgcctctcacggagcgatggaattcaggtgtgtccaaatgcattttattttngcataactctcttaaacagttcacacccaggggctattcagggttccccnatactattagggaggtacagnccttnggcatttttggggggc

SEQ ID NO: 255756 - DNA, 154 bp, Homo Sapiens
aaataaatgagacaaaaatatgcataccaaagctactgttttcttgatgtgcccaaacagatcttgcccatcccttgacatcatgtacttcactttggagaccactgtctgatacagactgtaaatctgcctatacatacacctttggtacgag

SEQ ID NO: 255757 - DNA, 476 bp, Homo Sapiens
  misc_feature (443)..(443): n is a, c, g, or t
ggggagaagtaaaggatggtgctttggatgtaaaaagacaacacaagtgcccaggccccacaagtggccccagcccaggaacgaatctctcaggctgcatcaggatgaatgatgacccaagtatggaagagaatggtgttgaacgcgtgtgtcctgagagcctgctgcagtccagggaatattcctcactaccattacccagacacacttcatcgacagacggtactataacttcaagtgatcctggattagaaattctgaatatggcttcttgtgaccttgacagaaactcgctctgtaagaaagaggaggatacaagatcagcttctcccacgatagaggcccaaggcacaagtccagctcatgataatattgcattccaagactctacgagtaaggataaaaccatattaaatctggaagccaaagaggaaccagatgcnatggtggcagctgcaaatgtacatggaccatgt

SEQ ID NO: 255758 - DNA, 1005 bp, Homo Sapiens
  misc_feature (821)..(821): n is a, c, g, or t
  misc_feature (844)..(883): n is a, c, g, or t
  misc_feature (921)..(930): n is a, c, g, or t
  misc_feature (952)..(953): n is a, c, g, or t
tcggcacgagggagcaggcggggcgggggcgccgaggagagcggcgcggcgtgcgcgggcacgaggcgtagtggtctcccctaaggctgaggcggcggcgggcgtgcgaggctgttgtgctcccggctctcgtgtttcccctcctgagcgggtggaggaggcccaagcggtgctgggcgcgctcccccttcctttccctccggcgtcctctcccggccctctcgcgctgcactgtctctccgacgcaagactgtcccggcccggatatggctcgtggacagcagaaaattcagtctcagcagaaaaatgccaaaaagcaagctggacaaaagaagaaacaaggacatgaccaaaaggctgctgccaaagctgccttaatatatacctgcactgtctgtaggacacaaatgccagaccctaagaccttcaagcagcactttgagagcaagcatcctaagactccacttcctccagaattagctgatgttcaggcataaggttgtttacaggtgaattcatgacacctttgactcttctactgtctcagaccttaggtaacatacctgcagctgcttttctaacaaactgttgatcagcaaaaataaaggggctacagaaacactcatttttatgctgttccctcttgggcttcatgcaaagacaattctgtgtaaatgtacagttgactctgatttggaaatatgaaaatcagtccatccttgttataaaaaatttttttacaattgtaattatattgatgttcatattgtgtaaaataactcatttaataaaatagtactttgatttacgacatccccggngaggggacgcagagcaacggcannnnnnnnnnnnnnnnnnnnnnnnnnnnnnnnnnnnnnnnagactgtggaggagccggaaaggctggacccaccaggnnnnnnnnnnacatcgagcagccccgaggcanncgactgacgcgccggtgaccccgggggggaggatggggaggggtcgggtcgg

SEQ ID NO: 255759 - DNA, 1066 bp, Homo Sapiens
  misc_feature (79)..(79): n is a, c, g, or t
  misc_feature (167)..(167): n is a, c, g, or t
  misc_feature (351)..(351): n is a, c, g, or t
  misc_feature (481)..(493): n is a, c, g, or t
  misc_feature (627)..(637): n is a, c, g, or t
ttttgtgtttctcccgctcctcccaaagttatcaaatttctcctaaatttggtgtggaaggaaaattttaaatccaggncacccctggcttatgattattagccaattggggaaacgcatttggatccaaattgggagaagaatgttttccaaaaattgtatgaaanccattattcagtgttcttttctatgagcaattcaaaaacccctaattctaatgttaaccttaccagttaactttccacgttataaatgaaaattgtactcccacttagagatattttgatcttttataatacacacctggaatgtttaggaaaatagttcggaagctgaaagttacccatttanaatggaataattcttaacggaagtacactttaaatgtataaggaaattcaacaacttaagtgagccattcaatcacgtgtgcaaagtattttagtcttaagggcaacacataggatctatgttgttagcnnnnnnnnnnnnnaaagttctgattggctactgtaaaggcaatcttagaagatgcatgtaaatataatataaatcaactttcttatcaattagacattttccccactcacatctcttagtttttagggtattcagtcccagcaaccnnnnnnnnnnntgtaaatcatattttgtttctggctaatgttcaatcagtttttcttttataagagcttttgatgtactgtttctacggttctttaggcacttacacataaaaacattcagagggttttccccttaacacacaacttttaattctcatgaaaatgttgcacagttagaatttgtcttgcataggtaaattctgtttataacatggactctgataatccaaatattaacattcctaatatagggaaaaataagcaccattcatagctaaaaataatagaatcctgtcataacccaatatcataattacaaggatctggatatattctagaccaaatcacactccctgaaacattaccatgtacaataaagcctgaaatagccaactaattgaatgttattcttaatcctttacactggcactaaaaatagt

SEQ ID NO: 255760 - DNA, 708 bp, Homo Sapiens
  misc_feature (620)..(620): n is a, c, g, or t
  misc_feature (680)..(680): n is a, c, g, or t
ggaatggtctctccccattccaagcggtccacccaacatggacagtcaaggaagggccctgattttcaagggcttgaaggctgggcagatatgggaatatggacaacctaatctgagcccagccctgaccagcctcccccaacagaacgcctgtgccgccactgtcccaaggactggacattcttccaaggaaactgttacttcatgtctaactcccagcggaactggcacgactccgtcaccgcctgccaggaagtgagggcccagctcgtcgtaatcaaaactgctgaggagcagaacttcctacagctgcagacttccagggagtaaccgcttctcctgggatgggactttcagacctaaatcaggaaggcacgtggcaatgggtggacggctcacctctgtcacccagcttccagcggtactggaacagtggagaacccaacaatagcgggaatgaagactgtgcggaatttagtggcagtggctggaacgacaatcgatgtgacgttgacaattactggatctgcactccattgtggtatagcagaacttcacccacttgtaagccagcgcttcttctctccatccttggaccttcacaaatgccctgagacggntctctgttcgatttttcattccctatgaacctgggtcttattctgtccttctgatgcctncaaggttccctggtgtagaagctggggt

SEQ ID NO: 255761 - DNA, 830 bp, Homo Sapiens
  misc_feature (384)..(384): n is a, c, g, or t
  misc_feature (791)..(791): n is a, c, g, or t
ggcagatatgggaatatggacaacctaatctgagcccagccctgaccagcctcccccaacagaacgcctgtgccgccactgtcccaaggactggacattcttccaaggaaactgttacttcatgtctaactcccagcggaactggcacgactccgtcaccgcctgccaggaagtgagggcccagctcgtcgtaatcaaaactgctgaggagcagaacttcctacagctgcagacttccaggagtaaccgcttctcctggatgggactttcagacctaaatcaggaaggcacgtggcaatgggtggacggctcacctctgtcacccagcttccagcggtactggaacagtggagaacccaacaatagcgggaatgaagactgtgncggaatttagtggcagtggctgggaacgacaatcgatgtgacgttgacaattactggatctgcaaaaagcccgcagcctgcttcagagacgaatagttgtttccctgctagcctcagcctccattgtggtatagcagaacttcacccacttgtaagccagcgcttcttctctccatccttggaccttcacaaatcccctgagacggttctctgttcgatttttcatcccctatgaacctgggtcttattctgtccttctgatgcctccaagtttccctggtgtagagcttgtgttcttggcccatccttggagctttataagtgacctgagtgggatgcatttagggggcgggcttggtatgttgtatgaatccactctctgttccttttggagattagactatttnggattcatgtgtaagctggccctgtccctgggggctttt

SEQ ID NO: 255762 - DNA, 384 bp, Homo Sapiens
  misc_feature (61)..(61): n is a, c, g, or t
tgcaatttagggggcgggcctgggtatgttgtatgaaacccactctctgtccctttggganattaagactatttggattcatgtgtagctgccctgtcccctggggctttatctcatccatgcaaactacccatctgctcaacttccagctacaccccgtgcacccttttgactggggacttgctggttgaaggagctcatcttgcaggctggaagcaccagggaattaattcccccagtcaaccaatggcatccagagagggcatggaggctccatacaacctcttccacccccacatctttctttgtcctatacatgtcttccatttggctgtttctgagttgtagcctttataataaagtggtaaatgttgtaactacaaa

SEQ ID NO: 255763 - DNA, 451 bp, Homo Sapiens
  misc_feature (43)..(43): n is a, c, g, or t
  misc_feature (74)..(74): n is a, c, g, or t
  misc_feature (89)..(89): n is a, c, g, or t
  misc_feature (115)..(115): n is a, c, g, or t
  misc_feature (121)..(121): n is a, c, g, or t
  misc_feature (135)..(135): n is a, c, g, or t
cggctactggaacagtggagaacccaaacaatagcgggtaatnaagactgtgacggaaatttagtggcagtggntggaacgacgaatcngatgtgtacgttgaacaattactggnatctgnaaaaagcccgcagnctgcttccagagaccgaatagttgtttcccctgctagcctcagccctccaattgtggtatagccagaacttcacccacttctacaccccgtgcacccttttgactggggacttgcctggttgaaggagctcatcttgccaggctggaagccaccagggaattaattccccctagtccaaccaatggcatccagagagggcatggaggctccatacaacctcttccacccccacatctttctttgtcctatacatgtcttccatttggctgtttctgagttgtagcctttataataaagtggtaaatgttgtaactg

SEQ ID NO: 255764 - DNA, 408 bp, Homo Sapiens
tgggcatctgacctagtcagtagtatttggagtaatgctgacactaaaaactccaacatgggattctgggatgatgcagtgaaagaggtgggacctaggaattcaacaaataaaaataaaaacaacgccagtctcagtaaatctgtaggtgtgtctaaccggcagaataagaaagtagaagaagaagagtggtgtgaacagatgcttcatgcccttaatacggcaaataacttggatgttcccacatttgtttctttcctgaaagaagtagaatctccttatgaggtccatgattatatcagggcctatttaggagatacttctgaggccaaggagtttgccaagcagttccttgagcgccgtgccaaacagaaagccaaccagcagcgtcagcagcagcagctgcca

SEQ ID NO: 255765 - DNA, 905 bp, Homo Sapiens
  misc_feature (522)..(574): n is a, c, g, or t
aaagcccattacatagtgcatacaggtgaacggccctttccctgcacgtggccagactgccttaaaaagttctcccgctcagacgagctgacccgccactaccggacccacactggggaaaagcagttccgctgtccgctgtgtgagaagcgcttcatgaggagtgaccacctcacaaagcacgcccggcggcacaccgagttccaccccagcatgatcaagcgatcgaaaaaggcgctggccaacgctttgtgaggtgctgcccgtggaagccagggagggatggaccccgaaaggacaaaagtactcccaggaaacagacgcgtgaaaactgagccccagaagaggcacacttgacggcacaggaagtcactgctctttggtcaatattctgattttcctctccctgcattgtttttaaaaagcacattgtagcctaagatcaaagtcaacaacactcggtccccttgaagaggcaactctctgaacccgtctctgactgttggagggaaggcaaatgcnnnnnnnnnnnnnnnnnnnnnnnnnnnnnnnnnnnnnnnnnnnnnnnnnnnnngcgggggagggtagggagtgggtgcctttatatccaccccctcaacccattaaattacctagtaccactgactttacgtgccctcagcgacaacgtctgcgatacactaatcaacttcctcttaacgatgttaaccagtctctcccccttcgtatgccccaccaccctctacaaacttactatgccctcaagctgttctcccactacctaaaatttgcccgacaatcgcagtttacctccaattcccgcaaactatcctactcgcgtctcgctttctttggagttgacacctcacatcccccctccccctcctcgccttttaaactagcct

SEQ ID NO: 255766 - DNA, 1034 bp, Homo Sapiens
  misc_feature (746)..(746): n is a, c, g, or t
  misc_feature (882)..(882): n is a, c, g, or t
gtgcctcctgcatgtcctgctgccctgagctgtcccgagctaggtgacagcgtaccacgctgccaccatgaatgaggtgtctgtcatcaaagaaggctggctccacaagcgtggtgaatacatcaagacctggaggccacggtacttcctgctgaagagcgacggctccttcattgggtacaaggagaggcccgaggcccctgatcagactctaccccccttaaacaacttctccgtagcagaatgccagctgatgaagaccgagaggccgcgacccaacacctttgtcatacgctgcctgcagtggaccacagtcatcgagaggaccttccacgtggattctccagacgagagggaggagtggatgcgggccatccagatggtcgccaacagcctcaagcagcgggccccaggcgaggaccccatggactacaagtgtggctcccccagtgactcctccacgactgaggagatggaagtggcggtcagcaaggcacgggctaaagtgaccatgaatgacttcgactatctcaaactccttggcaagggaacctttggcaaagtcatcctggtgcgggagaaggccactggccgctactacgccatgaagatcctgcggaaggaagtcatcattgccaaggatgaagtcgctcacacagtcaccgagagccgggtcctccagaacaccaggcacccgttcctcactgcgctgaagtatgccttccagacccacgaccgcctgtgcntttgtgatggagtatgcccaacggggggtgagctggtcttccacctggtccccgggagcgtgtcttcacagagggaccgggccccgggttttatgggtgcagagaatgtcttcggctcttgagtacttgcactcgncgggacggggtattacggcgacatcaagctggaaaaacttcatgctggaccaagatggccacatcaagatcactgactttggccttctgcaagagggcatcaggggacggggccaccatgaaaacctttctgggggaacccgggagtacctg

SEQ ID NO: 255767 - DNA, 1125 bp, Homo Sapiens
tcctaaccccccttgggggggagggtgctgccccacagcacaaaaaacgtcttttcatctggctcgagaggacagcgtggttctttcaaatgcacccgagaaataaaaaccattaaatacagatcatggcacgaggccgcctctccatccttccaagctatcgtccagcgcagtccaccgccgcctcaggccgtgccgctggccgagtaggagaactgggggaagtggggcctgcgctcgctgtccacacactccatgctgtcatcttggtcaggtggtgtgatggtgatcatctgggccgtgaactcctcatcaaaatacctggtgtcagtctccgacgtgacctggggcttgaagggtgggctgagcttcttctcgtacacgtgctgccacacgataccggcaaagaagcgatgctgcatgatctccttggcgtcctcggagcccccgccaagcctctgcttggggtccttcttgagcagccctgaaagcaaggacttggcctcgggaccaagcgtgcgcgggaagcggatctcctccatgaggatgagctcaaaaagcttctcatggtcctggttgtagaagggcaggcgaccgcacatcatctcgtacatgaccacgcccagcccccaccagtccactgcacggccgtagtcattgtcctccagcacctcgggggccaggtactcaggtgtgccgcaaaaggtcttcatggtggcaccgtccttgatcccctccttgcacagcccgaagtctgtgatcttaatgtgcccgtccttgtccagcatgaggttctccagcttgaggtcccggtacaccacgttcttctccgagtgcaggtagtccagggctgacacaatctcagcgccatagaagcgggcccggtcctcggagaacacacgctcccgggacaggtggaagaacagctcgcccccgttggcgtactccatgacaaagcagaggcggtcgtgggtctggaaagagtacttcagggctgtgaggaaggggtgcctggagttctgcaggacgcggttctcggtgagtgtgtgggccacctcgtccttggccacgatgacttccttcttgagcctcgtgccgaattcgccacccaggcctcgcttcctt

SEQ ID NO: 255768 - DNA, 1034 bp, Homo Sapiens
ggcagtactactaacggtctaaggtagcgaggcctgggtggcgaattcggcacgaggggcccccgaggtgctggaggacaatgactacggccgtgcagtggactggtgggggctgggcgtggtcatgtacgagatgatgtgcggtcgcctgcccttctacaaccaggaccatgagaagctttttgagctcatcctcatggaggagatccgcttcccgcgcacgcttggtcccgaggccaagtccttgctttcagggctgctcaagaaggaccccaagcagaggcttggcgggggctccgaggacgccaaggagatcatgcagcatcgcttctttgccggtatcgtgtggcagcacgtgtacgagaagaagctcagcccacccttcaagccccaggtcacgtcggagactgacaccaggtattttgatgaggagttcacggcccagatgatcaccatcacaccacctgaccaagatgacagcatggagtgtgtggacagcgagcgcaggccccacttcccccagttctcctactcggccagcggcacggcctgaggcggcggtggactgcgctggacgatagcttggagggatggagaggcggcctcgtgccatgatctgtatttaatggtttttatttctcgggtgcatttgagagaagccacgctgtcctctcgagcccagatggaaagacgtttttgtgctgtgggcagcaccctcccccgcagcgggggtagggaagaaaactatccctgcggggttttaatttatttcatccagtttgttcctccgggtgtggcctcagccctcagaacaatccgattcacggtagggaaaatgttaaggacttctgcagctatgcgcaatgtggcatttgggggggccgggcaaggtccctgcccatgtgtcccctcactctgtcagccagcccgccctggggctgtctgtcaacagctatctggccatctctctgggggccccgggggcctcagttcaacctgggggggccccgaatgccaccctcccctatgggggt

SEQ ID NO: 255769 - DNA, 930 bp, Homo Sapiens
gctccttgcaggaacgcactcggcgccccgtggggaagcctgggtggcgaattcggcacgaggggcccccgaggtgctggaggacaatgactacggccgtgcagtggactggtgggggctgggcgtggtcatgtacgagatgatgtgcggtcgcctgcccttctacaaccaggaccatgagaagctttttgagctcatcctcatggaggagatccgcttcccgcgcacgcttggtcccgaggccaagtccttgctttcagggctgctcaagaaggaccccaagcagaggcttggcgggggctccgaggacgccaaggagatcatgcagcatcgcttctttgccggtatcgtgtggcagcacgtgtacgagaagaagctcagcccacccttcaagccccaggtcacgtcggagactgacaccaggtattttgatgaggagttcacggcccagatgatcaccatcacaccacctgaccaagatgacagcatggagtgtgtggacagcgagcgcaggccccacttcccccagttctcctactcggccagcggcacggcctgaggcggcggtggactgcgctggacgatagcttggagggatggagaggcggcctcgtgccatgatctgtatttaatggtttttatttctcgggtgcatttgagagaagccacgctgtcctctcgagcccagatggaaagacgtttttgtgctgtgggcagcacccctcccccgcagcggggtagggaagaaaactatcctgcgggttttaatttatttcatccagtttgttctccggggtgtggcctcagccctcaaaacaatccgattcacgtaagggaaatgtttaagggacttctgccgcctatgcgccatgttggcatttggggggggccgggccagggccctggcccatgtggtcccccctaattttg

SEQ ID NO: 255770 - DNA, 1853 bp, Homo Sapiens
gtagcgaggcctgggtggcgaattcggcacgaggcagcctgagaggagcgcgtgagcgtcgcgggagcctcgggcaccatgagcgacgtggctattgtgaaggagggttggctgcacaaacgaggggagtacatcaagacctggcggccacgctacttcctcctcaagaatgatggcaccttcattggctacaaggagcggccgcaggatgtggaccaacgtgaggctcccctcaacaacttctctgtggcgcagtgccagctgatgaagacggagcggccccggcccaacaccttcatcatccgctgcctgcagtggaccactgtcatcgaacgcaccttccatgtggagactcctgaggagcgggaggagtggacaaccgccatccagactgtggctgacggcctcaagaagcaggaggaggaggagatggacttccggtcgggctcacccagtgacaactcaggggctgaagagatggaggtgtccctggccaagcccaagcaccgcgtgaccatgaacgagtttgagtacctgaagctgctgggcaagggcactttcggcaaggtgatcctggtgaaggagaaggccacaggccgctactacgccatgaagatcctcaagaaggaagtcatcgtggccaaggacgaggtggcccacacactcaccgagaaccgcgtcctgcagaactccaggcaccccttcctcacagccctgaagtactctttccagacccacgaccgcctctgctttgtcatggagtacgccaacggggggcgagctgttcttccacctggtcccgggaagcgtgtgttctccgaggaccgggcccgcttctatggccgctgagattgtgtcagccctggactacctgcactcgaaaaaagaacgtggtgtaccgggacctcaagctggagaacctcatgctggacaaggacgggcacattaagatcacagacttcgggctgtgcaaggaggggatcaaggacggtgccaccatgaagaccttttgcggcacacctgagtacctggcccccgaggtgctggaggacaatgactacggccgtgcagtggactggtgcgcgggctggccgtggtcatgtacgagatgatgtgcggtcgcctgcccttctacaaccaggtaccatgagcaagctctacgagctcatcctccatggaggagatccgcttcccgcgcacgcttggtcccgaggccaagtccttgctttcagggctgctcaagaaggaccccaagcagaggcttgggggggctccgaggacgccaaggagatcatgcagcatcgcttctttgccggtatcgtgtggcagcacgtgtacgagaagaagctcagccacccttcaagccccaggtcacgtcggagactgacaccaggtatttgatgaggagttcacggccagatgatcaccatcagcaccactgaccaagatgacagcatggagtgtgtggacagcgagcgcaggcccacttcccccagttctcctactcggcagcggcacgggctgaggggggtggactggcttggacgatagcttggagggatggagaagggggctcgtgcatgatctgtatttaatggtttgattctcgggtggatttgagagaagcacgctgtctcttgaggccagatggaagaagtttgtgtgtgggagacctccacgagggggttgggaaaaaataatcgggttaattattaaccagtgggtcccgggtgggtaggctaaaaacgataagtgggaaagtaggttggagtgcgcaggattgggggaggatgagggtccaatgtgaacgcgggtgggaaagattattggcgggataactggagagacacatg

SEQ ID NO: 255771 - DNA, 1852 bp, Homo Sapiens
ggcctgggtggcgaattcggcacgagggaagaacgtggtgtaccgggacctcaaggacgggcacattaagatcacagacttcgggctgtgcaaggaggggatcaaggacggtgccaccatgaagaccttttgcggcacacctgagtacctggcccccgaggtgctggaggacaatgactacggccgtgcagtggactggtgggggctgggcgtggtcatgtacgagatgatgtgcggtcgcctgcccttctacaaccaggaccatgagaagctttttgagctcatcctcatggaggagatccgcttcccgcgcacgcttggtcccgaggccaagtccttgctttcagggctgctcaagaaggaccccaagcagaggcttggcgggggctccgaggacgccaaggagatcatgcagcatcgcttctttgccggtatcgtgtggcagcacgtgtacgagaagaagctcagcccacccttcaagccccaggtcacgtcggagactgacaccaggtattttgatgaggagttcacggcccagatgatcaccatcacaccacctgaccaagatgacagcatggagtgtgtggacagcgagcgcaggccccacttcccccagttctcctactcggccagcggcacggcctgaggcggcggtggactgcgctggacgatagcttggagggatggagaggcggcctcgtgccatgatctgtatttaatggtttttatttctcgggtgcatttgagagaagccacgctgtcctctcgagcccagatggaaaagacgttttttgtgctgtgggcagcaccctcccccgccagcgggggtaagggaagaaaactatccctgcccgggttttaatttatttcatccagtttgttctccgggtgtggcctcagccctcagaacaatccgattgcacgtagggaaatgttaaggacttctgcagctatgcgcaatgtggcattggggggccgggcaggtcctgcccatgtgtcccctcactctgtcagccagccgccctgggctgtctgtcaccagctatctgtcatctctctggggccctgggctcagttcaacctggtggcaccagatgcaacctcactatggtatgctggccagcaccctctcctgggggtggcaggcacacagcagccccccagcactaaggccgtgtctctgaggacgtcatcggaggctgggcccctgggatgggaccagggatgggggatgggccagggtttacccagtgggacagaggagcaaggtttaaatttgttattgtgtattatgttgttcaaatgcattttgggggtttttaatctttgtgacaggaaagccctcccccttccccttctgtgtcacagttcttggtgactgtcccaccgggagcctccccctcagatgatctctccacggtagcacttgaccttttcgacgcttaacctttccgctgtcgccccaggccctccctgactccctgtgggggtggccatccctgggcccctccacgcctcctggccagacgctgccgctgccgctgcaccacggcgtttttttacaacattcaactttagtatttttactattataatataatatggaaccttccctccaaattcttcaataaagttgttctcacaccacacaaaagggggcgcctagagtttcctcgaggggccaagctttagcgtacccccttcctgtcaaggggcccataggagcgattataagtaggcggcgcgttacagtcggctggaaacggtccggacttggaggacccctcggggggctttggcacctcagataccaggaataatcaggtaggaccgttcgggatgtcgattatcg

SEQ ID NO: 255772 - DNA, 1335 bp, Homo Sapiens
ccacatatataacaggatttgcaattatacatagctagctaaaaagttgggtctctgagattcaacttgtagatttaaaaacaagtgccgtacgttaagagaagagcagatcatgctattgtgacatttgcagagatatacacacactttttgtacagaagaggcttgtgctgtggtgggttcgatttatccctgcccaccccatccccacaacttcccttttgctacttccccaaggctcttgcagagctagggctctgaaggggagggaaggcaacggctctgcccagagccatccctggagcatgtgagcagcggctggtctcttccctccacctggggcagcagcaggaggcctggggaggaggaaaatcaggcagtcggcctggagtctgtgcctggtcctttgcccggtggtgggaggatggagggattgggctgaagctgctccacctcatccttgctgagtgggggagacattttccctgaaagtcagaagtcaccatagagcctgcaaatggatcctcctgtgagagtgacgtcacctcctttccagagccattagtgagcctggcttgggaacaagtgtaatttccttccctcctttaacctggcgatgagcgtcctttaaaccactgtgccttctcaccctttccatcttcagtttgaacgactcccaggaaggcctagagcagaccctttagaaatcagcccaagggggagagcaagagaaaacactctagggagtaaagctccccgggcgtcagagttgagccctgcctgggctgaaggactgtcttcacgaagtcagtcctgaggaaaaatattggggactccaaatgtcctctggcagaggacccagaaaaccacactggctccaacttcctcctcatggggcattacacttcaaaacagtggggagcaacttttccaccaaagctacaaacctaaaatgctgctgccccaaagcacaagagggaagagcaccgccggggccacaggacgtctgtcctccagtcacaggccatccttgctgctccctactgactctagcttacttcccctgtgaagaaacaggtgttctcggctgagcccccaaccctctgcagaaccaggttgatctgccacagaaaaagcatctttgaagacaaagagggtgaggtcttcatgagtctcctgggcccaaagccatcttctgatggaaggaagagagtagggccagtgaaggctgcccagagagaatgtcacagatgaggctgcccctgccccctccccgccagggaggtttcatgagctcatgtctatgcagcacataagggttcttcagtgaaaagc

SEQ ID NO: 255773 - DNA, 494 bp, Homo Sapiens
atacaggagaagaaacagcggctccattacagacccagccccaggttcaatgtcctccgaagaatgaagtctttccctggtgatggtcccctgccctgtctttccagcatccactctcccttgtcctcctgggggcatatctcagtcaggcagcggcttcctgatgatggtcgttggggtggttgtcatgtgatgggtcccctccaggttactaaagggtgcatgtcccctgcttgaacactgaagggcaggtggtgggccatggccatggtccccagctgaggagcaggtgtccctgagaacccaaacttcccagagagtatgtgagaaccaaccaatgaaaacagtcccatcgctcttacccggtaagtaaacagtcagaaaattagcatgaaagcagtttagcattgggaggaagctcagatctctagagctgtcttgtcgccgcccaggattgacctgtgtgtaagtcccaataaactcacctactcatc

SEQ ID NO: 255774 - DNA, 309 bp, Homo Sapiens
tattcggcaataaaaggtaaaagccctgtcccctctgcaaaaagccactgcttctagctactcgcaatgactttcacagaaataactttctgtatttgtctttcatttgggggatatttaattaaatggtataattaaaacaacaagtccatctggcattcccaggtttggcaagaaacaagaatgactcttggaaagcccaggcctcagctggtgggagcagaagtgtgctggtgtcctaggaaccaggctgccagctaagaatgttcagcctccccccgtactttaccgagggagtgcggagttaac

SEQ ID NO: 255775 - DNA, 410 bp, Homo Sapiens
agtggtctgtgcatactgtagaatggtagtacccggctgagtggctgctgcattggtcatggttaatgtttgcaggccctgtaccccatcggtaccattgttagccagctgtattgctcctccctgggtaatggcaatatactgtccactgctagtttggtaaattggagttggcaccgttacagtggtgatggcaggtgctgaagtctcctcttcagacttctccctgtaggaaggcctccttgaaagaatttcccttcgcttttgggaatcagttacactatccactgactcctgtgaatcttcactttctgcaatagttgaaatctgaactgtttggacttgtggagactgaataactgatggctgggccgcctgaatgactccatggacttaaacagtcatttgtt

SEQ ID NO: 255776 - DNA, 559 bp, Homo Sapiens
  misc_feature (357)..(370): n is a, c, g, or t
attctagactttatggctcataatcataaagctgttatactcagtccaggcacagctagtacaacattctgctcaaccccacaggctccattccctttaccacatatttataatatgtttgggtcactcataggagtgaaacactgtcagcatcaatagttagcagcactttcaaaatacattttattgtcccgaatagaaaccttaactattcaattagtccagtaattccaaatggtcttattacttctatacataagatatgatcttacaacatttatgtagctaaatacttaacttcccatgctttttgaggattcccaaaagactttagggggttcccaagactttcagggnnnnnnnnnnnnnncacaataaaagaaaggaacagtgtcaatccataaagtcagaccagcagtttaataagatcctcttcatagctcagttctcagtgcatacagagattcaatatagccccatcgctctcagttattagaatctgagagggataagagcaataactattgtttaaaagcctaagagtgaaaacagatgtcca

SEQ ID NO: 255777 - DNA, 616 bp, Homo Sapiens
ccagtgagagcggagggtgccagaggtagggggccgagaaacaaagttcccggggctccctcggggccgcggtcggggctgcgcgtttgaccgcccccctcctcgcgaaggcaatggcttccaaactcctgcgcgcggtcatcctcgggccgcccggctcgggcaagggcaccgtgagccagaggatcgcccagaactttggtctccagcatctctccagcggccacttcttgcgggagaacatcaaggccagcaccgaagttggtgagatggcaaagcagtatatagagaaaagtcttttggttccagaccatgtgatcacacgcctaatgatgtccgagttggagaacaggcgtggccagcactggctccttgatggttttcctaggacattaggacaagccgaagccctggacaaagatcgtctcagccgccgctggattcacccttctagcggaagggtatataacctggacttcaatccacctcatgtacatggtattgatgacgtcactggtgaaccattagtccagcaggaggatggataaaccccgaaccagttgctgccagggctaagacagtacaaagacgtggcaaaggccggtcattaattatt

SEQ ID NO: 255778 - DNA, 941 bp, Homo Sapiens
  misc_feature (26)..(26): n is a, c, g, or t
gctgcaaggctacctcagctaggctnctaaatttggacaacagcaccaattactacaccacactattggaatgaatgacccacatcttcctggttcttcccattgggccagggtcaatatgctttctttggactgaataggtgtgatcttgtttgagaaaagtgtgtaaacgtagggccagattttgttcggtctccgttccggaaaattggtggagcactcctcggctcttgtataattcaatgactgctttgccacgtctttgtactgtcttagcctggcagcaactgcttcgggtttatcatcctcctgctggactaacggttcaccagtgacgtcatcaataccatgtacatgaggtggattgaagtccaggttatatacccttccgctaggagggtgaatccaacggcggctgagacgatctttaagtgtttcaaatggaatattcaaactgatcactagatccacttcacagattttgtccagggcttcggcttgtcctaatgtcctaggaaaaccatcaaggagccagtgctggccacgcctgttctccaactcggacatcattaggcgtgtgatcacatggtctggaaccaaaagacttttctctatatactgctttgccatctcaccaacttcggtgctggccttgatgttctcccgcaagaagtggccgctggagagatgctggagaccaaagttctgggcgatcctctggcacacggtgcccttgcccgagccgggcggcccgaggatgaccgcgcgcaggagtttggaagccattgccttcgcgaggaggggggcggtcaaacgcgcagccccgaccgcggccccggaggaagccccgggaactttgtttctcggccccctacctctggcaccctccgctctcactgggactcgccggccgcccctggctggaggcagcactccgagag

SEQ ID NO: 255779 - DNA, 1147 bp, Homo Sapiens
  misc_feature (712)..(732): n is a, c, g, or t
  misc_feature (943)..(953): n is a, c, g, or t
  misc_feature (955)..(955): n is a, c, g, or t
  misc_feature (957)..(958): n is a, c, g, or t
  misc_feature (966)..(966): n is a, c, g, or t
  misc_feature (970)..(974): n is a, c, g, or t
gggcaagcgctggtaccggccggaatttcgggatatcgtcgaccacgcgtcgcacacctattcagtccaaagaagcatattgaccctgcccaatggaagaaccaggaagatgtggtcattcattcaatagtgtgtgtagtattggtgctgtgtccaaattagaagctagctgaggtagcttgcagcatcttttctagttgaaatggtgaactgataggaaaacaaatgagtagaaagagttcatgaagaggccctcctctgcctttcaaaaggctggtcacctacacatgtttaaggtgtctctgcacatgtctcaagcccatcacaagaaagcaagtacagtgtggatttcaaatggtgtgtaacttcagctccagctggtttttgacagctgttgctgtggtaatatttttgacatgtgatggtgatagtctctggttctccccatccccacaaaggctgttgaaccacagcaccaggaagcctgagaatgaatcctgagggctctagcccaggctttgtcccaggctttctggtgtgtgccctcctggtaacagtgaaattgaagctacttactcatagtggttgtttctctggtcttgagtgactgtgtccacagttcatttttttccggtaggaataactccttttctacatccacgctccatagagtctctccttttcagacatcctgggatgaaagaatttggcnnnnnnnnnnnnnnnnnnnnnggacatctggttttcactcttaggcttttaaacaataagttattgcttttatcccctctcaagattctaaataaactgagagccgatgggggctatattggaatctctgtattgcactggagaactggagctatggaagaggatcttatttaaactgctgggtctggactttatggatttgaccctggttccctttccttttatttggggnnnnnnnnnnnanannaaaaaaanaaannnnncccttgtccgggccgccctccgggccctccgagaaagctttttctaaaaccctttccgtttgggggcccccgggccccccatttaaggtaaaggggaaactggggcccataaccctggttttccataggaaaaaaccctgggccatggcaccaaagggccttggaaattcccc

SEQ ID NO: 255780 - DNA, 175 bp, Homo Sapiens
ggcacccttgtttgtgttatgaaaaaaatttttccaaggcgagctagagagaaagatgtttggcatgccaaattaacttgcatgtttgttaaaaaaacaaacacatgttttgaagagaaaccagatctgaacatgtatttgttgagttttgcaaaataaaattaattttgtaagt

SEQ ID NO: 255781 - DNA, 961 bp, Homo Sapiens
ccgagccccagcactggcaacggcggcgagctgctgctacacgagccgtctagattggtctcgcaatgcagggagaactcggcttggaacttactgaagccaccttccaggtagaacgcccggcagccctcgtccttgagcttcttgagcagcagcccgagcaacgactcgccgcccgtattctcgttccagtcgctgctgctctcgtcgtagagcaccactgtgtcggtgccacagcgccgggtgaagcggtcccggtcctcgccgcgcgtgaagagcgcgcgcaccggcaggttacccttctgcaggcgccgcagcatgatgcccgggatggccacgttgatggccgactcgatgtgcgacgactcgtatagctcctgcggccggcagtccatcagcagcagccgctcgttgcccagctccagctgctcgttgagccacgccaccgtcttgctgatcgccatttccgacgcgaagggcacgggtctgagcgtatctatcatgggggtcgagctgcgggagagggcggggtgcctaccagacgcccctcggggcaggcataggccgagcgcaccgcgcgcgaagctgccgctctcggagcggggtttaattccgcctcgccttacccaagccgaggctagcggttggggcagacgagacagaagtaaagccggaggttctctctgcacccagctgcagccgctggctcttagtgtcaatgaatctctctcaatgaagctgcccagatagtttttgttcctccccagtgaatgaaatccaattaattcggactccgtgctactgagaggggaggaaaaaaagtctagcggcttctaatccctccctccaaggctgcacctcaaatctacccgggcgtctttctccccggattatttaagactcgatttgctatctcttggactcagcctcgcacaccccctgcgcgaggcagctcctcaat

SEQ ID NO: 255782 - DNA, 1131 bp, Homo Sapiens
  misc_feature (14)..(14): n is a, c, g, or t
  misc_feature (17)..(17): n is a, c, g, or t
  misc_feature (23)..(23): n is a, c, g, or t
  misc_feature (48)..(48): n is a, c, g, or t
  misc_feature (50)..(50): n is a, c, g, or t
  misc_feature (64)..(64): n is a, c, g, or t
  misc_feature (67)..(67): n is a, c, g, or t
  misc_feature (78)..(78): n is a, c, g, or t
  misc_feature (89)..(89): n is a, c, g, or t
  misc_feature (96)..(96): n is a, c, g, or t
  misc_feature (100)..(100): n is a, c, g, or t
tccacatgagacantcngacacngcatccggcacaaagagctgggagncnagacttctggaaanaanatacctctccntttacgcaccnacatgtnagtncttcggcccaggtgcttctgggaacctggctccgcagcccagccccgcgccctctgcctggcccctgttcctagatggtgggcatcgggacgtcggatgtggacctggacaaatacccccacacgttctgcagcctgctgggcagggagtgaggacagctggggcctctcctaaacgggcctcctccaccacaagggcgacaagaccagccttctcatcgcggttcggccagggctccataattggcgtgcacctggtacacctggcacggcacactcaccttttttcaagaacaggaagtgtataggtgtggcagccaccaagctgcagaacaagagattctacccgatggtgtgctccacggcggcccggagcagcatgaaggtcacccgctcctgtgccagcgccacttccctccagtacctgtgctgccaccgcctgcgccagctgcggccagactcgggagacacgctggagggtctgccgctgccgccgggcctcaagcaggtgctacacaacaagctgggctgggtcctgagcatgagttgcagccgccgcaaggctccagtgtccgatccccaggcagcgacctccgcccaccccagcagtcgcgagcctcggccctgccagaggaagcgctgccgccggacctgactgacttcccagtggaactgccttcttgggctgggacagcccctttcctctgtcccttctttctctgtcccttccttccagccacactccagggcggagttggatgaggcccgtccggagggagccatctcttgctcccgaggctgggacagtcctttctgtgggggctctagggcccctctgctgctgtgctgggtggggaagcggctgccctgagccccaggtcttgtgggaggctgcgaggacgagagcctggctggagcccgcgttgctgttcccacagggcctcggtttttcctaacttgctctgcatgctgtcagcggctgccccgccgtcatagacttaaaggactgcaataaatgtagagttgatgtct

SEQ ID NO: 255783 - DNA, 1157 bp, Homo Sapiens
  misc_feature (8)..(8): n is a, c, g, or t
  misc_feature (22)..(22): n is a, c, g, or t
  misc_feature (41)..(41): n is a, c, g, or t
  misc_feature (55)..(55): n is a, c, g, or t
  misc_feature (63)..(63): n is a, c, g, or t
  misc_feature (76)..(76): n is a, c, g, or t
  misc_feature (86)..(86): n is a, c, g, or t
  misc_feature (97)..(97): n is a, c, g, or t
  misc_feature (103)..(103): n is a, c, g, or t
  misc_feature (107)..(108): n is a, c, g, or t
  misc_feature (115)..(115): n is a, c, g, or t
  misc_feature (131)..(131): n is a, c, g, or t
  misc_feature (136)..(136): n is a, c, g, or t
  misc_feature (188)..(188): n is a, c, g, or t
  misc_feature (210)..(210): n is a, c, g, or t
gcccgcgnagcgaaaccctcanttttcccaatttgccgcantgcgaagcggtgcngcacagantggaggaatgcgntgcacagagnggtacttcatntgctcnggcnncgtgagnacaccatcggtaaatntcttntctgcagcttgttgctccacacctatacactcctgttcttgaaaaggtgatntgccgtgccagtgtccaggtgnacgccaatgatggagccctggccgaaccgcgacgagaagctggtcttgtcgcccttgtggtggaggaggcccgtgtaggagaggccccagctgtcctcatccctgcccagcaggctgcagaacgtgtggcggtatttgtccaggtccacatccgacgtcccgatgcccaccatctaggaacaggggccaggcagagggcgcggggctgggctgccggagccaggttccccagaagcaccctgggccgaagcaacttaccatgtcggtgccgtagacgggagaggtcatcttgatctcccagaagtgctggccctcccccagctccttggtgccccggatggccgctgtgccgcagctgtactccatgtggaagctgacttacggttgtcacagctcagcagggtggctgatgacttatttaagtcatcccagacccagtcgaaatctgcaagagaggcccaggctggggcagccctgagagctccatggggctctgccctgcccacccccaggcccgcccgcagtgcagtcccagcaggggctgggccccacgctcacactcgtcttcctctccgcagcggcagtccctgccccggtgggccgagtgcaggctgctacagaaggaggcctcgctctgcccagcacagtcacagaaggactcgccggtcacgggcaccgcactggggatggatggcggcagcgtggagtactcggggtcggagtccgagtcgctgtgctgcccatcagagtcgtagccccagttagtggagcctgctagagccacggcccgggcatctgcgtctcggcgggctgcactcaggacgaagtgccaggccctgctgttccgggggcgtctggccatggtggaaagaatctgcagcccccgctgcgcgctccgccggcccggccctgacccactttccgccccggagcgagacgtaaacaac

SEQ ID NO: 255784 - DNA, 1017 bp, Homo Sapiens
  misc_feature (304)..(304): n is a, c, g, or t
  misc_feature (309)..(309): n is a, c, g, or t
  misc_feature (328)..(328): n is a, c, g, or t
  misc_feature (342)..(342): n is a, c, g, or t
  misc_feature (351)..(351): n is a, c, g, or t
  misc_feature (789)..(789): n is a, c, g, or t
  misc_feature (832)..(832): n is a, c, g, or t
  misc_feature (840)..(840): n is a, c, g, or t
  misc_feature (844)..(844): n is a, c, g, or t
  misc_feature (860)..(860): n is a, c, g, or t
  misc_feature (863)..(863): n is a, c, g, or t
  misc_feature (867)..(867): n is a, c, g, or t
  misc_feature (875)..(875): n is a, c, g, or t
  misc_feature (878)..(878): n is a, c, g, or t
  misc_feature (880)..(880): n is a, c, g, or t
  misc_feature (896)..(896): n is a, c, g, or t
  misc_feature (903)..(903): n is a, c, g, or t
  misc_feature (926)..(926): n is a, c, g, or t
  misc_feature (933)..(933): n is a, c, g, or t
  misc_feature (935)..(936): n is a, c, g, or t
  misc_feature (938)..(938): n is a, c, g, or t
  misc_feature (950)..(950): n is a, c, g, or t
  misc_feature (972)..(973): n is a, c, g, or t
  misc_feature (975)..(975): n is a, c, g, or t
  misc_feature (1015)..(1015): n is a, c, g, or t
agattctttccaccatggccagacgcccccggaacagcagggcctggcacttcgtcctgagtgcagcccgccgagacgcagatgcccgggccgtggctctagcaggctccactaactggggctacgactctgatgggcagcacagcgactcggactccgaccccgagtactccacgctgccgccatccatccccagtgcggtgcccgtgaccggcgagtccttctgtgactgtgctgggcagagcgaggcctccttctgtagcagcctgcactcggcccaccggggcagggactgccagctgcngagangaaaacgaatgtaagcgtngggcccaacccctnctgggactncactgcgggcgggcctgggggtgggcagggcagaaccccatggagctctcagggctgccccagcctgggcctctcttgcagatttcgactgggtctgggatgacttaaataagtcatcagccaccctgctgagctgtgacaaccgtaaggtcagcttccacatggagtacagctgcggcacagcggccatccggggcaccaaggagctgggggagggccagcacttctgggagatcaagatgacctctcccgtctacggcaccgacatgatggtgggcatcgggacgtcggatgtggacctggacaaataccgccacacgttctgcagcctgctgggcagggatgaggacagctggggcctctcctacacgggcctcctccaccacaagggcgacaagaccagcttctcgtcgcggttcggccagggctccatcattnggcgtgcacctggacacctggcacggcacactcaccttttttnaagaacangaantgtataggtgtggcancancaanctgaaaanaananatcaaccgatggtgtntcacggnggccggagcacatgaagtcaccnctctgtncnncncacttcctccantcctatgtgcaacgctgcgcanngnagcaaaatcgggaaaagctggaaggttccgctgcgcgggnct

SEQ ID NO: 255785 - DNA, 914 bp, Homo Sapiens
  misc_feature (808)..(808): n is a, c, g, or t
  misc_feature (872)..(872): n is a, c, g, or t
agacgtaccctccctcgctgcctgcctgcggcctgccctgcatgcaggatggccctgaggaaagattctttccaccatggccagacgcccccggaacagcagggcctggcacttcgtcctgagtgcagcccgccgagacgcagatgcccgggccgtggctctagcaggctccactaactggggctacgactctgatgggcagcacagcgactcggactccgaccccgagtactccacgctgccgccatccatccccagtgcggtgcccgtgaccggcgagtccttctgtgactgtgctgggcagagcgaggcctccttctgtagcagcctgcactcggcccaccggggcagggactgccgctgcggagaggaagacgagtatttcgactgggtctgggatgacttaaataagtcatcagccaccctgctgagctgtgacaaccgtaaggtcagcttccacatggagtacagctgcggcacagcggccatccggggcaccaaggagctgggggagggccagcacttctgggagatcaagatgacctctcccgtctacggcaccgacatgatggtgggcatccggacggcggatgtggacctggacaaataccgccacacgttctgcagcctgctgggcagggatgaggacagctggggcctctcctacacgggcctcctccacacaagggcgacaagaccagctttctcgtcgcggttcggccagggctccatcattggcgtgcacctggacacctggcacggcacactcccctttttcaagaacaggaagtggtataaggtgtggcangccaccaagctgcagaacaagagattcttacccgatgggtgtggctccacggcggcccggagancagcatggaaagtcaccccgctccctgtgcccagcgccactt

SEQ ID NO: 255786 - DNA, 749 bp, Homo Sapiens
  misc_feature (23)..(23): n is a, c, g, or t
  misc_feature (60)..(60): n is a, c, g, or t
tacgggctcctgaagcgttctgnagccctggctgggcaccggtgcggcccctgcagtccncactttgagtgggtccgtggcccagcctggaagctcagggctgggagtgctgtgagtcttcctttgcccagagcctgtgttttcttctagattctttccaccatggccagacgcccccggaacagcagggcctggcacttcgtcctgagtgcagcccgccgagacgcagatgcccgggccgtggctctagcaggctccactaactggggctacgactctgatgggcaggtaggttccagcgggcgaggcggacgtggctggcctaaggtgtggagatgccctaggcaggcaggcagacattacctgaacacggaatcagtcggagaaaaagatgccttctgaggcctagaggaccagtcccaaaccctgggcctgtctccctggatgcaccgcattcagtaagactctttaatttggcaaaggacacacacagcctcaggggtgacaggacctcagaacacactgcattcttcactgtgctttctcctctgaaacacatggtgcatggagaggttggcagttgcttttggttcattcaacagaaattctccactacggggctgggcactgtggctcacacctataatcctagcactttgggaggctgaagctggaggaccacttgagccccaggagtttgagacctgcctgggcaacatggtgaaacactgtctctacaaaaatttaaa

SEQ ID NO: 255787 - DNA, 984 bp, Homo Sapiens
  misc_feature (127)..(127): n is a, c, g, or t
ccctgtctgttgccagcaaatggtacttcattgcttcaatgaggtaatctttgcaagcactgctattcttgaccaatgcttcctcttcaaccctctgaactaaatattcccgagaaagcaaaggtanccgtacatgttccatcagtcgggccataaactcttgcctcacatccttgtcatggttcacccatgctattactgcttcaaataccttctcttctgaagaaatggtaagtttgtcacttgagattaagctgcacacttgttcgatgccaagattgagaaattcttcactaagtacaacatctgcaaaatgttgctctgcataggtgttggccttgttcagaaggtcggtacatgcatgcatatcagcaaaagcccggattcctaagcagttgacagggtgaagctgggattccaaaaattcacaacaagtcttctcttctgtaacctgaatttctgcagtgtaaacataatcaattagcatcctcagggtccagccatctacctcttttattctaactctctttgctcggctctcactcatctcacctgtaaacatggcatgaaaataaggactacaggcggccagcaccactctatgagcagaaatttccatgtcttctgccacaattgtgacatcgcacagcaaattttgacttcttaattcgttcatgactttgaaagctttcttcatatgccaaggattcactgtccctgcacagtgtttttcggtattatcatcttataaatccagaggcttatgatcaccctcctttgtgcatgcatgaggcagcgccggcgtatccactgtggctcctctaggtcttcaaaacgcaggcaccgaccatcacagccagcaccattccatccgcggacgccggctctgaccgcccgccgaaccgcgttccacacgccacgcagggggcgccgagctctcctcaccgtgcgccacctcttgcggcgacggccaccgagaccatg

SEQ ID NO: 255788 - DNA, 730 bp, Homo Sapiens
  misc_feature (97)..(97): n is a, c, g, or t
attataaactgttgcacaaggtaaatgtcctgtgcatgaaatattaaggtacactcaaatattatctctttctctcaataattccaattggtctganttatataaggggaagatttctgtaacagtacttcctaaagatctctgggtaggatgggctgttattctttgaacccagagagcttatccctactcatggtgacagcagctgctgcaagggaattcagcctggtcctacggcagcaccaggacagacaaggaacgcagagcctttgatagattgctgaggacgctaaatgcatttcttacatgtgaaacccatgagccgaagggtttcttgaatgataatatttaaggcatagttaatggtcattgccatatttctctaatgcttttgattttgtgtttagaaatttaacaatgactggtggatagggcgattggtaaaagaaggctgtgaaatcggattcattccaagcccagtcaaactagaaaacatgaggctgcagcatgaacagagagccaagcaagggaaattctactccaggtatgagacagatgtcaagtgtttgcataaaacttagattataccactatctgtgtactgttgtctgctgtattctgtatcctttattatgtattaacaaggaggctggtaatatggtttattgatagcatcacaaatcttgcattttcctgcatttaaaaaacttcagtccagcacctgattttc

SEQ ID NO: 255789 - DNA, 728 bp, Homo Sapiens
  misc_feature (358)..(366): n is a, c, g, or t
  misc_feature (504)..(620): n is a, c, g, or t
  misc_feature (638)..(638): n is a, c, g, or t
gttgaaatggtggtttatatactcattggggacaatggcagtatcttaataaaaatttattaatttaatacctggactttcataacatcagggatttttctgccaaatagcagagacaaaaacaagacatattttctgtcaggttttagacctctctgggaaactgattctgtggcccaacttaatcatcctgactgaaaactcatttcactgagactctcagtctaaatcacccacaaggatgttgtgtatgagaatttaaaactaaatatcacaccaaaccctgaattttaagtcagtatccaccgttttcgtatgaattcatttcccaactcttctcccttaatctgtcccctcnnnnnnnnngagatgaggtctcactttgtcatcaaggctgagtgcagtggcacagtcatagctcactgcagcctcgaacttctgggcccaagcaatctcttgccttagccttccaagtagctgggactgtaggtatgcaccaccatnnnnnnnnnnnnnnnnnnnnnnnnnnnnnnnnnnnnnnnnnnnnnnnnnnnnnnnnnnnnnnnnnnnnnnnnnnnnnnnnnnnnnnnnnnnnnnnnnnnnnnnnnnnnnnnnnnnnnaccacacctagctatcgncttctatttatccatcttgtgctccacctacatattcatctttcatccattcattcatccattattcagtactatataaattaaaggggg

SEQ ID NO: 255790 - DNA, 714 bp, Homo Sapiens
  misc_feature (74)..(82): n is a, c, g, or t
tcactcggtgtgtcatgtatgcttagccaatgtatataatctccattatgtccctatcccctgcaaccactttnnnnnnnnnttaggtcagggggtacatgtgcaggtaaactcgtgacaagggggtttgttatacagattatttagtgacccaggtactaagcctagtaccccatagtacttttccggtcccgtccccttttccccaccctccaccctcaggtggccccagtatgttattcctttgtgtccatgttatttcactcccacttgtgagaacatggaaaatttggtttcctgttcctatgttagtttgttaaggataatggcctccagccccatccatgttcctgcaaaggacatgatctttctttggcaaccactttttactgtcgccatagttctcccttttctagaatgtcatattggaatcatatagtatgtagcctcatcagactggcttctttcacttaataatatcgcaattaaggttcctccatgtcatttcatggcttaatagtgcatttatttttagcactgaataatactccattgtctagatgaatagtttatccattcacctattgaaagacttcttggtggtttccaagttttggcaattatgaataaagctgttgtaaacatctttgtgcaggtttttctatgggcatgtttttaattcatttgaataaataccaagagcttcagtgctgg

SEQ ID NO: 255791 - DNA, 1386 bp, Homo Sapiens
  misc_feature (24)..(24): n is a, c, g, or t
  misc_feature (27)..(27): n is a, c, g, or t
  misc_feature (91)..(91): n is a, c, g, or t
  misc_feature (105)..(105): n is a, c, g, or t
aaggctcccaagcagctgggcttnggntcttctctgactctctggaggctggggcaaaggcctgaaagggagagaagattggcgctgggtnccggggcccctttngctcctcaccgtgatgcattctgccttcctgtctactaggatgacaaggagtatgtgggctttgcaaccctccccaaccaagtccaccgaaagtccgtgaagaaaggctttgactttaccctcatggtggcaggagagtctggcctgggcaaatccacacttgtcaatagcctcttcctcactgatctgtaccgggaccggaaacttcttggtgctgaagagaggatcatgcaaactgtggagatcactaagcatgcagtggacatagaagagaagggtgtgaggctgcggctcaccattgtggacacaccaggttttggggatgcagtcaacaacacagagtgctggaagcctgtggcagaatacattgatcagcagtttgagcagtatttccgagacgagagtggcctgaaccgaaagaacatccaagacaacagggtgcactgctgcctgtacttcatctcacccttcggccatgggctccggccattggatgttgaattcatgaaggccctgcatcagcgggtcaacatcgtgcctatcctggctaaggcagacacactgacacctcccgaagtggaccacaagaaacgcaaaatccgggaggagattgagcattttggaatcaagatctatcaattcccagactgtgactctgatgaggatgaggacttcaaattgcaggaccaagccctaaaggaaagcatcccatttgcagtaattggcagcaacactgtagtagaggccagagggcggcgagttcggggtcgactctacccctggggcatcgtggaagtggaaaacccagggcactgcgactttgtgaagctgaggacaatgctggtacgtacccacatgcaggacctgaaggatgtgacacgggagacacattatgagaactaccgggcacagtgcatccagagcatgacccgcctggtggtgaaggaacggaatcgcaacaaactgactcgggaaagtggtaccgacttccccatccctgctgtcccaccagggacagatccagaaactgagaagcttatccgagagaaagatgaggagctgcggcggatgcaggagatgctacacaaaatacaaaaacagatgaaggagaactattaactggctttcagccctggatatttaaatctcctcctcttcttcctgtccatgccggcccctcccagcaccagctctgctcaggccccttcagctactgccacttcgccttacatccctgctgactgcccagagactcagaggaaataaagtttaataaatctg

SEQ ID NO: 255792 - DNA, 682 bp, Homo Sapiens
agagtggtcagtaggagtgcagtggtttggcatagatcggctccagaacataatggattaaaaccaagaagaggcctccaaggaagatggcactaaggaaagccagcaggacatagaggccaatgaaaaagtcatccacaatcttaacttccacttctggggctgggaattcaccagctcgcgggaaaagcaacagaactgatgtgatgatcacagcaccgaagaataaaaaaatgacagagaacctcgccgccccggaggctctggacagcagcacacacagcagcagcactgccacccagagcagggctaagatgaacacgcccgcaccgactccgagcacagtgccagccatcccgcggggaggcagcggcggccccccgccctgcgcgccgcacgatcgagtgtcctctgtgctccagtgcgacacacaggcaatggatcacaagacagaaagttcccactctgttgtcgagttcttattcaagaggacgaaaactcccagtccttaaagaagaggaacagccatcactatttttgaacattcactgtgtgctaagtgccgtacaaacatatctcattgaatcccggagcgaagcttctgagaaaggtattactatagccatgttacagaatgggtaagtgagatataagcgcgatggggtatctattagtttcctaa

SEQ ID NO: 255793 - DNA, 1559 bp, Homo Sapiens
  misc_feature (1326)..(1338): n is a, c, g, or t
taggagcgaggcctgggtggcgaattcggcacgagggtggatccaggtgaagggggcagaggactgggagttttcatcctcttgaataagaactcgacaacagagtgggaactttctgtcttgtgatccattgcctggtgagtcacagctcacaccatggatttaacctgagagcttcaacttctgctttggccctggagttcccatgccctggtgtcttctaccagttcttagtgtgttgcactggagcacagaggacactcgatcgtgcggcgcgcagggcggggggccgccgctgcctccccgcgggatggctggcactgtgctcggagtcggtgcgggcgtgttcatcttagccctgctctgggtggcagtgctgctgctgtgtgtgctgctgtccagagcctccggggcggcgaggttctctgtcatttttttattcttcggtgctgtgatcatcacatcagttctgttgcttttcccgcgagctggtgaattcccagccccagaagtggaagttaagattgtggatgactttttcattggccgctatgtcctgctggctttccttagtgccatcttccttggaggcctcttcttggttttaatccattatgttctggagccgatctatgccaaaccactgcactcctactgaccactcttcaggaaaacgaaaacctgttctctccttcattgtgatgacattgatgagcaggaaggcactattcagagccttgttttgacagccctcatgccttaaggttagaggagtatctgtccatcactaagacaaatctctggagtcctggcttccagaaacaggattgccaaattgtccctgtgggggctagattcttaccagcttaagaaggatattgctatcttctttagtacccgtaccttaggatttccaactgttttgaaagggaaatagtaacagtgatctgcttagagtggattttcactcaagtccttagtaagtggattttggggaaaaaagcacctgggcttctggttctttttgataatatataaaattattcattatgaggttgcagttgtttgcaaaggagaggcactcaaatttgaaaggttattttaatgtgataatttggaagacttactcagatgttggtcattgaccactctgtgcatatatttctgcagagctctgtgaaggcaatgagtgtcacttccctctgctctaataaagcaataaataatagctaaagggctgactttcacttcgaactcttggccacggctttttaatcaagttctttaggtttccttgggattagaggaaaggtatggaaatattgnnnnnnnnnnnnngtcttgccatgtatctgtaggtttttttcttccatgatgtggtgggctgtgtgtgccttatttaattaccatgagtccattttggggtgtcttcacttttcatctttgtagccctttctccaaagctagtgaggaaggtatattctcaacatcagatataactctatacctgtctgatctcccagaccaaatgaaatttgccttaaatggaggggccctgg

SEQ ID NO: 255794 - DNA, 617 bp, Homo Sapiens
tttgtttaagaataaattcaaaattcagaattataattgtatactcttataagagaaaacagattcattttatataaaatatattgtgctaatttacacactttttgatccctaataataaatacaactctgttagatggcttaaaagcaatctttacattgcttagagaacgttaaatatcaattgtgtatttaaattttctacttatatgaaagcatgctatttttccttaactttgggtaaataattttatggtgtgattaaaccgatctgactttttgaaaaagggcatgtttcttaatgaaatataaaagagttgtaattttagttattcagtgttgcgcaaacctacttttttggcttcatttgcaaaaggttgttggataacctttatcttttaccactaacttcttactctgatccaaaatatttggcttttaaaattctccttatttcattatttgtcttcatatttaaaatatcttctgtgatatttcacttctaattttttaatatttttacatgaaaagagatgaatactgatatccctgaattttaagagaggatttttattgccctgttaatttggaaaaaacatgcgataatatgattttaa

SEQ ID NO: 255795 - DNA, 956 bp, Homo Sapiens
gtgagccactgccccaggcctgtttgcttttatgaattggaggactgcctgggcccagggaagccgctattcatctgcctaagctgtagctgttggatgacacaggatcctcatctcaagttgctttgaggacaagaccactttcttgggcccctctgcacgtgggcagtccttccatgatgacagctgccctgttatggtgggattactttggagggtggatgtggcccacggaagtgtgtactctcagtgggcaggccttctgttttgatcattttgtagcccagcatctaacacaaggtgctcgtgactcaagaccttatgtaaagagggagggatgaacacaaggaagaaagttccccagaaatccttccttacacctgaaccgattccttcctatatgtcctcagcttgagtcattttctgtagctccctcttatttccatcagatacttggatacattttaaattgtatcccccaaatatcagtgagagaaatcacatccatgatctacactgcattgaccaggccatccagacagagagcggggatggcttgtctcccagggcagtggtgccacgtgccagcctagaggtttcggtttacctgcatgcaccacggtcccttgagaatctgtgcccttcccctcctggtaggggatgcttggaaagggtcaatctgaggcccttgctttcatgaagggccttgaggcccacagccaggcttctagaaatctagaattgaccctggtttccagaatgaccagtttgcatttcctttatctgcacaaagaagcggatttcttgggggtcttctgggtgtgagcgtagtgagtgtgaatgcatcaaggtgcctaaaaatacaaggacagatgccaaatataagcatttttaccttgaagctgccttgaattgagtttcgcaggaaaagtgtattaaaataattcttaaaaact

SEQ ID NO: 255796 - DNA, 731 bp, Homo Sapiens
  misc_feature (49)..(49): n is a, c, g, or t
tgggtctttaggtaaatgctttggaatagagggtgaacttgaattctgnagtgatctgcatggcttgggatgaggccagcctggttcaggcatacattggtgagctgcagccacttccagaacgttgagcttgatgataccatctccatccttgtcaaatgcatgaaaagctctgaacatgccctccagcctaacgaagcagcagatgaaactgtcaaagtcgatgttcatgtgtttgtctgcgtaccgcatggtaatgatgtcatagagctggttgttgaggtggaatcctgcgtcgttgactgcatttcgcatctgccaggccttaatcttgttccagaggtggtggaactcctgcaggttgagctttccagagccatctgtctggaggagggaggtcagggatccatgagcgcaatcatgctacggcaggactccagtgtgaacccgtgtgtcttcaggtccttgtgtttgttcacgactgtgttaaggaccttcttgagctcatctgcacagatctccatgtcatctcctgctatctgcttgaaaatgttccggaattgttgctgttcctcactttcctgatcagagctgccaggctgtggctgtggggactgcttttgcttatcagggcttgttttgcctttgccctcctctgactcctggtccacacccagctccttgttgctgtttgctctgtccgaaacgaagatgatgggcctggttttttt

SEQ ID NO: 255797 - DNA, 1074 bp, Homo Sapiens
ggctgcaggattcggcacgagagtccccacagccacagcctggcagctctgatcaggaaagtgaggaacagcaacaattccggaacattttcaagcagatagcaggagatgacatggagatctgtgcagatgagctcaagaaggtccttaacacagtcgtgaacaaacacaaggacctgaagacacacgggttcacactggagtcctgccgtagcatgattgcgctcatggatacagatggctctggaaagctcaacctgcaggagttccaccacctctggaacaagattaaggcctggcagatgcgaaatgcagtcaacgacgcaggattccacctcaacaaccagctctatgacatcattaccatgcggtacgcagacaaacacatgaacatcgactttgacagtttcatctgctgcttcgttaggctggagggcatgttcagagcttttcatgcatttgacaaggatggagatggtatcatcaagctcaacgttctggagtggctgcagctcaccatgtatgcctgaaccaggctggcctcatccaaagccatgcaggatcactcaggatttcagtttcaccctctattttcaaagccatttacctcaaaggacccagcagctacacccctacaggcttccaggcacctcatcagtcatgttcctcctccattttaccccctacccatccttgatcggtcatgcctagcctgaccctttagtaaagcaatgaggtaggaagaacaaacccttgtccctttgccatgtggaggaaagtgcctgcctctggtccgagccgcctcggttctgaagcgagtgctcctgcttaccttgctctaggctgtctgcagaagcacctgccggtggcactcagcacctccttgtgctagagccctccatcaccttcacgctgtcccaccatgggccaggaaccaaaccagcactgggttctactgctgtggggtaaactaactcagtggaatagggctggttactttgggctgtccaactcataagtttggctgcattttgaaaaaagctgatctaaataaaggcatgtgtatggctggtc

SEQ ID NO: 255798 - DNA, 1430 bp, Homo Sapiens
  misc_feature (570)..(570): n is a, c, g, or t
gggagtgacagtcatggtcataatcctgaccctgagccagtgccaggtctccaagtgccttctgaatgaccacaggcgattggttttagtggtaggtgtgtggggatctgttctggtcatctggatgctggtcatcggtgtgcagtattgatcaggacctgcaaacccaaaagcttatgggagctggcacgtcaccccatcatcttcgtttcggacagagcaaacagcaacaaggagctgggtgtggaccaggagtcagaggagggcaaaggcaaaacaagccctgataagcaaaagcagtccccacagccacagcctggcagctctgatcaggaaagtgaggaacagcaacaattccggaacattttcaagcagatagcaggagatgacatggagatctgtgcagatgagctcaagaaggtccttaacacagtcgtgaacaaacacaaggacctgaagacacacgggttcacactggagtcctgccgtagcatgattgcgctcatggatacagatggctctggaaagctcaacctgcaggagttccaccacctctggaacaagaataanggcctggcagaaaattttcaaacactatgacacagaccagtccggcaccatcaacagctacgagatgcgaaatgcagtcaacgacgcaggattccacctcaacaaccagctctatgacatcattaacatggcggtacgcagacgaacacatgaacatcgactttgacagtttcatctgctgcatcgttaggctggagggcatgttcagagcttttcctgatttgacaggatggagatggcatctcaagctcggggtctggaagggtcgtcacggctcgcatctaataggcgacagccgacagaggcctcgcccgcacaacacgacatacacgatcacgatggtcccgtgtcctgcgtggaggggtcggcctctccttcgttctgcccctcgcacccccgggcgcgggggaccacaggcgggaacaggggtgtgaccacctaaacacgggggacacaacaaaatacatggggggggcggcccacccgcgcgcgccccctacccacacccgccgccaccccagctgctcgaagagccgggggcgctccggcgcgatcaaatggggttaaacaaaacagaaaggaacaggcattcaatgggcggggagggcggggacaagagcagacgacacgtgggataggtagtcagggtgtcatggtgttgtgcttgctcctgtataaaattaactaaaggggagaaacacacacatggtggtgggaatatacaccggtgtgagcgcctgagagtgtgcagacccggggggtggatgcggggggtgtgggaccgggtgaacaacctacaccatacacgagacgtttgtgacagtacaacacacgagcagcagacccaagggagacgagcg

SEQ ID NO: 255799 - DNA, 625 bp, Homo Sapiens
cagcagtttttactgagctccagggggggctggcccagcatggccagtacagcaggctgccctcaagggccagtctgtggcatgacaggaaatgcaggggtgcacatgttggggctgccctttggcactcactggggtgggtcaagggagagcaaacaccaaggtcctctggagaccagaatcggccagtgcagccatttggcttctccttcaggaccagctgggtcagttcccaggccctgaggcaatgcctgcatcctgggtccgtggggcactactgctgtcactgctctgagggagaaagacgaccagcagcacaatcaggatgatgagcaggacaccaaccaccaccagccccacgcagatccggtaacggatgttctcccagcacttcttctgggccaggttctgtgtagtcttgttgaaggttgagctcatatccaggagttggtctgaacgctgctgcagttcggccagcttcacaccacgctccaggaccttgccgaagttgttacgcataatttccgtcacctcgttcgcctgctgctggcaccgctccaactctattcctgccatcgctgctgccgccgccgcctcgcccgctcccggcttctctgcctgcccc

SEQ ID NO: 255800 - DNA, 670 bp, Homo Sapiens
ccttcaaatgtcctgagcataatggtgtccaaaccctaaggtgccttctggtttctacaagaggtgtcaactgggttcctggtcttaggggcattggggatgtatttggaatcccgaaccaggcttccattaagatgtgtttttaaattcgttggggtggttatgtttgcatgcttaagcacacatttgaaaattaattatagctgtactacccgatgtttttccttggggatgatggccttgttcctttttaaattctgatgcttgaattctattttctagtgatttttcacatctcccctttaagtttttgctgcagccaatttgagagagtacttttgattaaatgattctgatggtgggcaccaatctacaactatgtcattaactgaagatacatgttttaatcttgttgggaataagcttacccactttctccttggtaaagcgtttacttaacaaaataatacccgagaatgtaaggtctctaagtcattactaacaaagagcaaaaataatatctgcagtattgtttttcccattgattttaagtcagtttagagtacaaactgtatattagaatttgcctgtaaaatgaattctaaaaagcagatgtaaagtctctcctgaaaatgttggcatagtaaataaaaataaagttcatacttat

SEQ ID NO: 255801 - DNA, 745 bp, Homo Sapiens
aaagcctcttatataagcttcttatatagcataaggtcctggacccaaaaacacttgaccaacggaccaacctttcccccttgcccttttccacagtgttcgagcagagaggaagcactccctttgggctgctggacagctcagcgagtccactgacctggaacaggcccaggaaggcaaagggggagaggagggtagagcagacactcaggactcaacagcaggaataaacaggtccagacgggccacccaggatacagtaaagggcctgaagtcattgttttggtaagggagccccatgggacaagagccaggaaaataaaaaaacgtatttcaatagatacccatttctacaaagcagcgataagctaagagctgctttgctgagaagtaattgacaaaaagtaacaagtagaagacttcttggtcttgaggaccttcttgtaaaaggcagaagcccgtgacagatgccaaactgctagctttgagcagcagtcccattgtgccggcccagctggtaaaccatgactagaagcactctcagggctctgaagctacgttaagtgcctcctggactcctcaagacacgaccatgagttgtttggtttcaggtttgaaaagcctggctgagagcctgggctccaccacccatgtgtgttcagagagctcttgcttatgcttcaaaaccctatttcatcagcatcacctcctctgcaaaaccacccgtgggctcatctaaaatttt

SEQ ID NO: 255802 - DNA, 233 bp, Homo Sapiens
cctgtgacttttggttactccccttctgtagaaaagatgagcaggtattgagagaagtaaactgtaaacttgcagaggagttaaaaacagactcaggttttcttgaacagtggacatggtggcactgtccctttgtcatgaacatagtccacatatgccattacaaactgttgacagtactgtaaaatataacacattctaggtaaggtattgtctatatggtagattaaatc

SEQ ID NO: 255803 - DNA, 1146 bp, Homo Sapiens
  misc_feature (706)..(706): n is a, c, g, or t
  misc_feature (883)..(883): n is a, c, g, or t
gatggaataggccctaggacacctttctaaaaagactccctgtggtgttcagaatcactcctacagtcaggttctccacaatggatctcagtgctgcaagtcaccgcatacctctaagtgatggaaacagcattcccatcatcggacttggtacctactcagaacctaaatcgacccctaagggagcctgtgcaacatcggtgaaggttgctattgacacagggtaccgacatattgatggggcctacatctaccaaaatgaacacgaagttggggaggccatcagggagaagatagcagaaggaaaggtgcggagggaagatatcttctactgtggaaagctatgggctacaaatcatgtcccagagatggtccgcccaaccctggagaggacactcagggtcctccagctagattatgtggatctttacatcattgaagtacccatggcctttaagccaggagatgaaatataccctagagatgagaatggcaaatggttatatcacaagtcaaatctgtgtgccacttgggaggcgatgggaagcttgcaaaggacgctggcttggtgaaatccctgggagtgtccaattttaaccgcaggcagctggagctcatcctgaacaagccaggactcaaacacaagccagtcagcaaccaggttgagtgccatccgtatttcacccagccaaaactcttgaaattntgccaacaacatgacattgtcattactgcatatagccctttggggaccagtaggaatccaatctgggtggatggttcttctccacctttgttaaaggatgcacttctaaactcattggggaaaaggtacaataagacagcagctcaaattgttttgcgtttcacatccagcgagggngggttggcaatcctaaaagctttaatctgaaaggatcaaagaaaatttcagggggcgccaacatcctgaataccatttcatgatgaatactgactgcccgggaagttctgacagaattttcactcccatgagtgccaagaccgggcaagggggtatcccttagagggaaaatgaaagagaggggttatacctccctggaaaaataatgatggaacatggttaaggttggggcgggaaaagactttactaagcacactgaagga

SEQ ID NO: 255804 - DNA, 859 bp, Homo Sapiens
  misc_feature (192)..(192): n is a, c, g, or t
  misc_feature (437)..(446): n is a, c, g, or t
taacgatttacactctgtaataggctttgtagagtagatcgattattcttgagctaagcatatctaactgcctcatcatgataggactaccagtaaattataaattccaaaggttagaagatagttttcccacccctttaaattgggtggcagcaaactattacccataacccaatttcaaccccaccccanaaatatttgctatcggccttttcaagaaaaagtttgctgaaggtgtttgaatttcggacagatggtttccaatggaaccagggaagatttaaatttgctcccttaatagattcaaaatccattattcttttgataatatcatccacttggaaaacaaataagtttatattaaacaaagacttacatccttgaaatgttaaggaccagcaaacccaatcatatataaaagcagtatatttctaagnnnnnnnnnncaataaatgaacaatttaaattacatttttaagtaacaatttcagagatcctcagagaatgccaggcagttaaaggacagatctcaaaaatccatatagcagatttctggtttccaaatttctgggatacagtatttaacacagtatttgaaactctacaattgctacggaagcgacattgtggagagttacatattatccaaaaacacatttttcacaagtaagatattttaaaataagaaaccaaccaaaaaagaatggccaacaatctaaatctttttttccattaataaggagctacatagtctgctggtgaagaacttgatagaaattgactgttttcacttagtgggctgatccccgtgtatctgtgtcagataaaatcatagcatttattcgttaccatggatacc

SEQ ID NO: 255805 - DNA, 1905 bp, Homo Sapiens
  misc_feature (1497)..(1497): n is a, c, g, or t
  misc_feature (1501)..(1501): n is a, c, g, or t
  misc_feature (1582)..(1656): n is a, c, g, or t
  misc_feature (1775)..(1775): n is a, c, g, or t
  misc_feature (1777)..(1777): n is a, c, g, or t
  misc_feature (1788)..(1788): n is a, c, g, or t
  misc_feature (1802)..(1802): n is a, c, g, or t
  misc_feature (1825)..(1825): n is a, c, g, or t
  misc_feature (1829)..(1829): n is a, c, g, or t
  misc_feature (1832)..(1832): n is a, c, g, or t
  misc_feature (1835)..(1835): n is a, c, g, or t
  misc_feature (1846)..(1846): n is a, c, g, or t
  misc_feature (1858)..(1858): n is a, c, g, or t
gggggaacctccgggtgtcatccgcggggaaagaacttggtcctgatgtctgaccatggagatgtgagcctcccgcccgaagaccgggtgagggctctctcccagctgggtagtgcggtagaggtgaatgaagacattccaccccgtcggtacttccgctctggagttgagattatccgaatggcatccatttactctgaggaaggcaacattgaacatgccttcatcctctataacaagtatatcacgctctttattgagaaactaccaaaacatcgagattacaaatctgctgtcattcctgaaaagaaagacacagtaaagaaattaaaggagattgcatttcccaaagcagaagagctgaaggcagagctgttaaaacgatataccaaagaatatacagaatataatgaagaaaagaagaaggaagcagaggaattggcccggaacatggccatccagcaagagctggaaaaggaaaaacagagggtagcacaacagaagcagcagcaattggaacaggaacagttccatgccttcgaggagatgatccggaaccaggagctagaaaaagagcgactgaaaattgtacaggagtttgggaaggtagaccctggcctaggtggcccgctagtgcctgacttggagaagccctccttagatgtgttccccaccttaacagtctcatccatacagccttcagactgtcacacaactgtaaggccagctaagccacctgtggtggacaggtccttgaaacctggagcactgagcaactcagaaagtattcccacaatcgatggattgcgccatgtggtggtgcctgggcggctgtgcccacagtttctccagttagccagtgccaacactgcccggggagtggagacatgtggaattctctgtggaaaactgatgaggaatgaatttaccattacccatgttctcatccccaagcaaagtgctgggtctgattactgcaacacagagaacgaagaagaacttttcctcatacaggatcagcagggcctcatcacactgggctggattcatactcaccccacacagaccgcgtttctctccagtgtcgacctacacactcactgctcttaccagatgatgttgccagagtcagtagccattgtttgctcccccaagttccaggaaactggattctttaaactaactgaccatggactagaggagatttcttcctgtcgccagaaaggatttcatccacacagcaaggatccacctctgttctgtagctgcagccacgtgactgttgtggacagagcagtgaccatcacagaccttcgatgagcgtttgagtccaacaccttccaagaacaacaaaaccatatcagtgtactgtagccccttaatttaagctttctagaaagctttggaaagtttttgtagatagtagaaagggggggcatcacctgagaaagagctgattttgtattttcagggtttgaaaagaaataactgaacatntttnttaggcaagtcagaaagagaacatggtcacccaaaagcaactgtaactcagaaattaagttactcagaaattaagtagctnnnnnnnnnnnnnnnnnnnnnnnnnnnnnnnnnnnnnnnnnnnnnnnnnnnnnnnnnnnnnnnnnnnnnnnnnnnttcctctcagctatccttctaatttctctctaatttcaatttgtttatatttacctctgggctcaataagggcatctgtgcagaaatttggaagccatttagaaaatcttttggatttncntgtggtttatngcaatatgaatggngcttattactggggtgagggacngctnacnccntttgaccagantgtttggctaanacatcccgaagaatgattttgtcaggaattattgttatttaataaat

SEQ ID NO: 255806 - DNA, 539 bp, Homo Sapiens
  misc_feature (171)..(245): n is a, c, g, or t
agtttttgtagatagtagaaaggggggcatcacctgagaaagagctgattttgtatttcaggtttgaaaagaaataactgaacatattttttaggcaagtcagaaagagaacatggtcacccaaaagcaactgtaactcagaaattaagttactcagaaattaagtagctnnnnnnnnnnnnnnnnnnnnnnnnnnnnnnnnnnnnnnnnnnnnnnnnnnnnnnnnnnnnnnnnnnnnnnnnnnnttcctctcagctatccttctaatttctctctaatttcaatttgtttatatttacctctgggctcaataagggcatctgtgcagaaatttggaagccatttagaaaatcttttggattttcctgtggtttatggcaatatgaatggagcttattactggggtgagggacagcttactccatttgaccagattgtttggctaacacatcccgaagaatgattttgtcaggaattattgttatttaataaatatttcaggatatttttcctctacaataaagtaacaattaacttaa

SEQ ID NO: 255807 - DNA, 423 bp, Homo Sapiens
  misc_feature (53)..(53): n is a, c, g, or t
  misc_feature (71)..(71): n is a, c, g, or t
ccgggagagaggggctaacggtgcaaccaactgacggctgaaacacagattcngctgaaatgcagcttcgnagagcgggggccggcttccctcctagcccttcagctgctcaccctgtccctgcagctctgaaaaacgcccttccagtaagcggccaaggagcacacgagctcctcccaccagcaaaggggaaggggaggccttggacagacggggcagtgagtgtgtctgggcatgagcccaaaggccaccaccagcaaatcctccccacggatgccagggagagctctgatcctaaccaccaccacctctcccttcagcaaaatcaaaacagggaaagataaaagtaagagttgttccgtaaaccagcactgagctggtcacacggcctctggtctacctgctgagcatgtcagaaatccc

SEQ ID NO: 255808 - DNA, 369 bp, Homo Sapiens
atacacagtatataaaactcctacttgaggctggggtggaagatgaaatctttcttgcttatcaaatgctctgggaagaggcgttcagaaaatggagactcataaacttccatgggtggccaggtacaaaccaggtgctgatctccatatatgtcatcaatccgggcaatcgttggccagaatttgttctctggtttcacgaaggggagtgggaatgctgccacctctctggaataaggccggtcccagtgggaagatgtaacgcaggtcagggagtgtggagacatcttcagcggattgaccctggggtcgatgcggccctcctcaatgtcagcaatttcctgccgaatgctgatcatggcatcacag

SEQ ID NO: 255809 - DNA, 1252 bp, Homo Sapiens
  misc_feature (52)..(52): n is a, c, g, or t
  misc_feature (59)..(59): n is a, c, g, or t
  misc_feature (1197)..(1208): n is a, c, g, or t
tactaaagcggaatgaggatccctgtcctgtgggaaccgtcagtgcggcccnatgggtnccagttccatcttgcccatttcctgggcttatatcaagatgatgggaggcaagggtcttaaacaagccacggaaactgcgatattaaatgccaactacatggccaagcgattagaaacacactacagaattcttttcaggggtgcaagaggttatgtgggtcatgaatttattttggacacgagacccttcaaaaagtctgcaaatattgaggctgtggatgtggccaagagactccaggattatggatttcacgcccctaccatgtcctggcctgtggcagggaccctcatggtggagcccactgagtcggaggacaaggcagagctggacagattctgtgatgccatgatcagcattcggcaggaaattgctgacattgaggagggccgcatcgaccccagggtcaatccgctgaagatgtctccacactccctgacctgcgttacatcttcccactgggaccggccttattccagagaggtggcagcattcccactccccttcgtgaaaccagagaacaaattctggccaacgattgcccggattgatgacatatatggagatcagcacctggtttgtacctgcccacccatggaagtttatgagtctccattttctgaacaaaagagggcgtcttcttagtcctctctccctaagtttaaaggactgatttgatgcctctccccagagcatttgataagcaagaaagatttcatctcccaccccagcctcaagtaggagttttatatactgtgtatatctctgtaatctctgtcaaggtaaatgtaaatacagtagctggagggagtcgaagctgatggttggaagacggatttgctttggtattctgcttccacatgtgccagttgcctggattgggagccattttgtgttttgcgtagaaaggtttaggaactttaacttttaatgtggcaagtttgcagatgtcatagaagctatcctggagacttaatagacatttttttgttccaaaagagtccatgtggactgtgccatctgtgggaaatcccagggcaaatgtttacattttgtataccctgaagaactctttttcctctaatatgcctaatctgtaatcacatttctgagtgttttcctctttttctgtgtgaggnnnnnnnnnnnnaatctgcatttattagtattctaataaaagcattttgatcggaa

SEQ ID NO: 255810 - DNA, 495 bp, Homo Sapiens
gttgaaagaatacacagaaagcctggaaaaggtttccaggggtgtcaatacgccctgtcaactgagaattaagaggatccggctggtcacttgcctggagaggatcctgcatgctgatagtgctgaggcacctgccagctaagaaccaccgggaggaactgggccattctaacacccgttgctaccatgctggccacccgcctctccagacccctgtcacggctcccaggaaaaaccctaagtgcctgtgatagagaaaatggagcaagacgcccactattgcttggttctacttcctttatcccgattggccgtcggacttatgccagtgcggcggacgtttgggcaagcaaagctgttcctgggtcacaggctgtgactctggatttgggttctcattggccaagcatcttgcatttcaaaaggcttccttgtgtttgctggctgcttgatgaaggacaaaggccatgatggggtcaaggagtggacagcttt

SEQ ID NO: 255811 - DNA, 829 bp, Homo Sapiens
  misc_feature (353)..(361): n is a, c, g, or t
  misc_feature (550)..(550): n is a, c, g, or t
  misc_feature (566)..(566): n is a, c, g, or t
  misc_feature (729)..(729): n is a, c, g, or t
  misc_feature (787)..(787): n is a, c, g, or t
gggaatgccatcagagataatatcaaaattggagaagatcgtgctgctagacttgacaggaaaatggaagaacagcaggtcagacttaatgaggcagaacaaaagtacaaggatattcaagacaaactagaaaagattagtgaagagacaaatgcacgagcaccagaatgtatggcattgaaagcagatgttgttgctaagaaaagggcctataatgaagctgaggttttatataaccgatccttaaacgaatataaagcattaaagaaagatgatgagcagctttgtaaacgaattgaagagctgaaaaaaagtactgaccaatctttggaacctgaacggttggaaagacnnnnnnnnntatcttggttaaaagagagagtaaaggcctttcaaaatcaagaaaattcagtcaatcaagagatcgaacagtttcagcaagccatagaaaaggacaaagaagaacatggcaaaattaagagagaagaattagatgtgaagcatgcactgagctacaatcaggggcaactggaagaaattgaagatagtnaaactgatcgactcanaagatttggccctaatgttccagctcttcttgaagccatagatgatgcttatagacaaggacattttacctataaacctgtaggccctttaggagcttgcattcatcttcgggacccagaacttgctttggctattgaatcttgcttaaaagggcttctgcanggcctattgttgccataatcatgcctggatgaaagggtcctttcagcactccatgaanaaggtttttatttaccaggggacctcacggccaccgaataat

SEQ ID NO: 255812 - DNA, 841 bp, Homo Sapiens
  misc_feature (724)..(761): n is a, c, g, or t
gcctgggtggcgaattcggcacgagggaaggagctacgagtagccgccgagaggccgcggagccagcgacgaccgacccagccgagccgccgccgccgccgcgcccccatggcggccgccaaggacactcatgaggaccatgatacttccactgagaatacagacgagtccaaccatgaccctcagtttgagccaatagtttctcttcctgagcaagaaattaaaacactggaagaagatgaagaggaactttttaaaatgcgggcaaaactgttccgatttgcctctgagaacgatctcccagaatggaaggagcgaggcactggtgacgtcaagctcctgaagcacaaggagaaaggggccatccgcctcctcatgcggagggacaagaccctgaagatctgtgccaaccactacatcacgccgatgatggagctgaagcccaacgcaggtagcgaccgtgcctgggtctggaacacccacgctgacttcgccgacgagtgccccaagccagagctgctggccatccgcttcctgaatgctgagaatgcacagaaattcaaaacaaagtttgaagaatgcaggaaagagatcgaagagagagaaaagaaagcaggatcaggcaaaaatgatcatgccgaaaaagtggcggaaaagctagaagctctctcggtgaaggaggagaccaaggaggatgctgaggagaagcaataaatcgtcttannnnnnnnnnnnnnnnnnnnnnnnnnnnnnnnnnnnnnaaaaaatttaccctgccccctctttttccgggtgggttttattctttccatttttacaagggacgttatataaaggaacg

SEQ ID NO: 255813 - DNA, 943 bp, Homo Sapiens
  misc_feature (834)..(834): n is a, c, g, or t
  misc_feature (870)..(870): n is a, c, g, or t
  misc_feature (894)..(894): n is a, c, g, or t
gggaggaggcccaagaggaaaaggatgtggctcaggctgggagggacttcagttagcatggtgggggagaaccagtaccacatacccagtaggtaataaggtgtccagcagaggatgaaggtcagcaagataagcagggccagtctcagggcccggagacgaacacggggacaattgtcaaaggagcgggggagggcaaattcaccagcaggggctaggaatttagaaaatatactgtaattcagacactcagcttctgatctgagtatagggtgaattgatggaggggcatagctagtgagacagagctcacctcctacaaggaggagaatgttgcaaaccgttttccccttcccaacctgggactatatgatttcttacccccagggattatgatagaaatatgaagccaccaagtctagacttgatggtgttcaagaataaataatactgattgcctccctagtccttgtccagctaactcagctgtttataattgaagggattcaacaaaattatctctagcatcaggtgctagacatggttagaatctcaccatggtttagtgactggtagatagctattaggtaggtagataaataaatgatgctagaggcaacaggtctagggttaaggattaaggcctgggaattggagtctcaccatgggctccccttccttgtctggggcctggacacactgaggacaatgcgggctatagcagatggccatggcagttcagtgggcagcagaaagaggcagcagaaggtgaagaggttataggtggtctcttgccattgagccttgaagctgcctttggtgacacactgagtnaaagggactgggccagctcagtggacccgtgtggancagggaacagctggagtggagttnaggactattgagaacttggttccccctgcacccaccccaacctacccca

SEQ ID NO: 255814 - DNA, 1762 bp, Homo Sapiens
  misc_feature (459)..(468): n is a, c, g, or t
  misc_feature (1203)..(1207): n is a, c, g, or t
  misc_feature (1211)..(1211): n is a, c, g, or t
  misc_feature (1213)..(1213): n is a, c, g, or t
  misc_feature (1215)..(1215): n is a, c, g, or t
  misc_feature (1420)..(1445): n is a, c, g, or t
  misc_feature (1752)..(1752): n is a, c, g, or t
cttcaaatgtaccagaacctgagccaacgcctccctgtgaaactgttgctgatctgtagtacagtaccaggaagaaacctcttttgttctctttagacatcttctacttgctcttggccttgagatcgtgtaacaaaatgaaggagggctctcttctttcttcctcatcctactcaaaaacttcccgagagcagtggtggttttgagggttttgacttctattacttttggcagcctggaaagttgtgtcttctgggaaagagacccggggaggccaggagtagctgagggtcctttctgtgcccttaaaccgcccagaggagccctattccactctggttttaggctgatctgagagggtctccctttgttcctttctggagcatttctctaacgtttattacaattaggagggggaccccacatctgtgagattctgtttcatttgaggtttacagnnnnnnnnnngtggccagatgtgttccccccatgggtgagaggcctgggcaactgcctggtgaatgtgtcttgcggcagctgcagcaagtggaggggctgaactactggccagctcactggatgatgggttaatacaacaactgcactgtaaggactcagagccacacagaacttctgagaggggctgttagcattgcgcagcatcttcagttctccagtaaatgatattgcgttcgtgcctcagctttaagcacaagtagcagcagctcctgcttgagttctgagggcatcatgggccctatgattaaccagagtgatctaacctagactaaaattgggaacttatttgcaatttttgaccctgaccactaactagtgattcttctccaaaattgagaaagacagcacccattgaagcagatatgtgtgtgaaagtatatttttcaattccagatttttaattttaaggctccaggaaagaaaggagagtagaacatttttcctcattttatcaaatcctctcttgccctccctcaattcccctgtaacattcctgaagctgttcccactcccagatggttttatcaatagcctagaggtaaagaactgtctttttctctgattctttaataaattatctttatagaatatgcacaagtttttctacactcagtgttaaagtatttattaatgggaagtcaacttaatgttttgaaataaatatatgactctgtttaatgcacnnnnnccanananatagaaaaaacaaacaaacacgaaaaccccgaggcgcgaggcatgcatagcatgcaccatcctggttgtgcttgggcggggccgcccaaaaacctcgcctgaccaaatcgttatatacccccctgcccccgtgagcgcagggccccaaagggccgcaagggtcttcccacgaagtccctgggaaacgcccgacgcgggggggaannnnnnnnnnnnnnnnnnnnnnnnnnaagtgcgaccgcgctcgacgtgcgaacaaccctccattcggaccgctgcgagggcctccacatcggccttttacgccgcggcgccgcgctatgggagccgaaaggatacacggggaaaaccgcaatgggagtgtcagtgccttcgcccagcaataagcactctccgtgcgtggatgcgccttaagccggctataggaaaaccacccgcccatacccgggctcgatatacgcttcgcgatgtccccttactgaccacctcccccaagtctgccccctcgacgaaataccaatcctcccctctgggtgntacgcggcgg

SEQ ID NO: 255815 - DNA, 516 bp, Homo Sapiens
ctcaactcaagatccttaattgcatctgcaaggactctttttccagataaatctacattcacaggttccagaggttgggcgcatctttagggggggaggccaccattcaacccaagacactaatcttcaaggaccagctatcctgagtcttcgctgtctcatctatgagttcaggggcatatgtgcaggtttgttacacaggtaaattccatgtcacaggggttgggtgtacagatgatttcaccacccaggtaatgagcatagtacctgataggtagttttccgatcctttctctcctccctccctcaccctcgagtaggccctggtgtcaactgttcctttctttgtgtccatgtgtactcaatgtttagctcctgcttagaagtgagaatgtgcagtacttggtttcctgttcctgtaatatgtggccaatgacaggagcttgatgaaggttaagtggattgtcttccctgccaccccagccatcatcaccgcaggggagcagtgcctcggta

SEQ ID NO: 255816 - DNA, 421 bp, Homo Sapiens
  misc_feature (30)..(30): n is a, c, g, or t
  misc_feature (49)..(49): n is a, c, g, or t
cggggaaccccaattctaacatgctgcccnagagggaaactggctggancccggaccagctggggctgatgcttttggcagtggtcatgtgattgtgaccctggtagcctacttatcagagagccagaccctgctgtccctgggagacaggagcgatgcctcaggaatcagcccaatgtctgatgtcactgagactgtacctgtggccttcttctgagtttgctatggctccaggccctgccggtggggtgagcctcctaggccttggaggaccaggagtcaacagtggcatatgccatcctcggccaggttaatatactgcagaggaaaagccctgaagagaggcaagtggatttactccagcatgtagacatttgaaccagtgaaatcaaacacaaaataaatgtctgtctagtttcaa

SEQ ID NO: 255817 - DNA, 376 bp, Homo Sapiens
ccctcccccttaaatactgaggaactttgtatctgccagggcttaaaaaggtgcttttctgaggatggatttatcagctaaatgccttgacatggaatgtatgtgaactcccctcccacagcatctgtcacagctcaccctcatcatcttagaagcatcaggataaaaaggcttgatttctttggtataatctctcccaggatcttgcactgcaactcttctggcttcccttatggcaccgtttttggtccatggaatccccacttttggcactgctgtaagcacggacagctggacttcagtgcgcacttcagcaagagcagcacttggatttgtctcggcacagcactttgggcctttgagaatataagcttcg

SEQ ID NO: 255818 - DNA, 358 bp, Homo Sapiens
aaatagtgagctgcggttgtgctccctgggggcgtctcactggctgccacggcgcatactggagggaaaccaagcgccgaacaatgtagcgcggatattaaatagtaatgggaggacgaaggctcggggagtcccgtgcatcctggaagatggacacttgcggcttcaagctctccgaaggatgggtgttttcaatgtttgttgaggtatttctcactacctgaatcttctacagcattcctgcagactggggacatcgaacccattaaatgaagccattgtggttttgaacagttccatttttcgggccgccttccttttattaagctgaaatctgtatcacttcaacctttttccc

SEQ ID NO: 255819 - DNA, 623 bp, Homo Sapiens
  misc_feature (595)..(595): n is a, c, g, or t
  misc_feature (599)..(599): n is a, c, g, or t
aaatagtgagctgcggttgtgctccctgggggtgtcttactggctgccacggtgcatactggagggaaaccaagtgccgaacaatgtagtgtggatattaaatagtaatgggaggatgaaggcttggggagtcttgtgcatcctggaagatggacacttggggcttcaagctctttgaaggatgggtgttttcaatgttaaaacttgtttgaaaggccttgccgaaggaagtccttgaagtagctttcttgtctgttgaggtatttctcactacctgaatcttctacagcattcctgcagactggggacatcgaacccattaaatgaagccattgtggttttgaacagttccatttttcgggccgccttccttttattaagctgaaatctgtatcacttcaccttccatacattgttctgatctcgtcccttggagacttagaggattcttgccataacgtcttcctcatggaggctcttcatgtgggcctgtgtagttggcacaccccctgcctgggcttctggctataggctgctcaagcctctgcttcctgcaacagccgttctgggtgaggtcttgtggacctttatcatntcgnccttttgtaaaaaatgatgtctac

SEQ ID NO: 255820 - DNA, 466 bp, Homo Sapiens
  misc_feature (326)..(326): n is a, c, g, or t
  misc_feature (364)..(364): n is a, c, g, or t
  misc_feature (411)..(411): n is a, c, g, or t
gcccgaggaagatactgagggagcacaggagcagtcaccgctgccactgctactgccgctactgctgccggcgcgtctgcacctctcggcctgccagtgtacctgccggcgcctcggtcgaccgcccccgccccctctcccgctgcgtccgcactcctgttcctggtcctgacgcccccctcccgcccggaaagctgcccagccaccagcaaccccccagtgccaccatggcaactgcaccatacaactactcttacatctttaaatatattattattggggacatgggagtaggaaaatcttgcttgcttcatcaatttacaganaaaaaatttatgggctgatttgttcctcacacaaattnggtgttgaatttgggtacaagaataattcgaagttagtgggccaaanaataaaaattgcagtttttgggataagggcagggtcagggagcgaattttagggg

SEQ ID NO: 255821 - DNA, 374 bp, Homo Sapiens
ccacagacagctcggggcccctggaggaggcagaggaggccccccagctgatgcggaccaagagcgacgccagttgcatgagccagaggaggcccaagtgccgcgcccccggtgaggcccagcgcatccggcgacaccggttctctatcaacggccacttctacaatcataagacctccgtgtttactccagcctatggatccgtgaccaatgtgagggtcaacagcaccatgacaaccctgcaggtgctcaccctgctgctgaacaaatttagggtggaagatggccccagtgagttcgcactctacatcgttcacgagtctggggagcggacaaaattgatcgccaggatcttactgatggaagctgacttg

SEQ ID NO: 255822 - DNA, 1059 bp, Homo Sapiens
tattctctgaccgctcccttcgcaaagtgccctggtacgtgctagccggaaaccatgaccaccttggcaatgtctctgcccagattgcatactctaagatctccaagcgctggaacttccccagccctttctaccgcctgcacttcaagatcccacagaccaatgtgtctgtgggccatttttatgctgggacacagtgacactatgtgggcaactcaggatgacttcctcagccagcagcctgagaggccccgagacgtgaagctggcccgcacacagctgtcctggctcaagaaacagctggcggcggccagggaggactacgtgctggtggctggccactaccccgtgtggtccatagccgagcacgggcctacccactgcctggtcaagcagctacggccactgctggccacatacggggtcactgcctacctgtgcggccacgatcacaatctgcagtacctgcaagatgagaatggcgtgggctacgtgctgagtggggctgggaatttcatggacccctcaaagcggcaccagcgcaaggtccccaacggctatctgcgcttccactatgggactgaagactcactgggtggctttgcctatgtggagatcagctccaaagagatgactgtcacttacatcgaggcctcgggcaagtccctctttaagaccaggctgccgaggcgagccaggccctgaactcccatgactgcccagctctgaggcccgatctccactgttgggtggggtgggccctgccgggaccctgctcacaggcaggcttttcctccaacctgtggcgctgcagcagggcaggaaggggaaacacagctgatgaactgtggtgccacatgacccttgtggcacagatgcccacgtatgtgaaacacacatggacatgtgtccccagccacagtgttatgctctgtggctggctcacctttgctgagttccggggtgcaatgggggagggagggagggaaagcttcctcctaaatcaagcatctttctgttactgatgttcaataaaagaatagttccaaggctgaaaaa

SEQ ID NO: 255823 - DNA, 1232 bp, Homo Sapiens
ccgggccactgtcatacaggcctttagggacatgaacagattcaccgtaaatgagacagtgctttccaccaaggacgtccttgtcctcttgcacaagtggagcctcattgaaagagacctcaagctccaggaagacctgagagcagccattgagaaggcccaagcccgggagctcatgcggggccgaaagaggaggcctgaggaggcacgaggagatggctgaccctgagctgatggcatctaccttggagacatgcaagggcctcctgaggtccatcttgacttactggagaccagtgatccctggtcctgaccccactcaggagcctgtggactcagccagccccgagagcgatgcgccaggccccgtatatgctgccgcttccctggcagtcagttgggtgctgcggtcggtggccgagcacccgctcagcagggcagaggctgcaggactcattggctggcttaagagccatattttgccacaccctgtggtcgtggctgacctccttaaggacagtgccgtgaggagcagcatattcaggctgtatagccggctctgtggggctgaggggctggcagggcctgtgcaggaggtggcctgcctgttcaatacggtcatgctgcagctggtggccgcccagggccgggcagggagccccttccacccggccatggaagccctctccctgtcttctctgagtgagaaggatgaagccacacaagcctccgcagcattcctagtgtctctctacataaaggacatctggctgggggctcagcggccggacaccctcttaacccacgtccggatggtgtgtgaggccgcaaatgatgccccgagcagtgaagaggaggccatcgtggagctctgcaaggacgcctgacagcgcagcctcaaatgcttgacgccttgccgcccagcaccttgcaccctgatgaccagaccctcgacccaatcgcccccctctaacagtttcactaccgtccaccttccccactatacggatcgcacccccccggatgccgaccgctgccttcattctttccgaacaccaaccgactagcagcgaattccataaaatcgccccattcgcaatataaagacaacggacgcgacagacgataacccagacccatgagccagcgcagtgcgtccccatctacccggacggatcgacccccaccaccccgaccgccattcgccagcgcgctcgccccgtccgtacatc

SEQ ID NO: 255824 - DNA, 680 bp, Homo Sapiens
  misc_feature (568)..(576): n is a, c, g, or t
  misc_feature (655)..(655): n is a, c, g, or t
ccagaatcctgggaggagaggctgctcactgaagggaagcagcttcagtctagagtaatttgaggataggaatttcagtcaacagcagcctgtgaagaacactacatggcttccatacgtaggtctgattccccatcactttcagtttgcactagtcctttaccttcagtcttggacatcctacctccaactgatctttattttgagcagcacagtccaattctttaactaaaggtgaagggatcgctgcactgacgttcttcccctttgagaaaagaatcgtaattttaagagtctgaaggagtttagtggtcacctagtctctcctcccttgatacctctactgatactttctactcaagcattgggaagcttttttagaagaatcttatcttcactatacaaagaacacaaaagtttctggagggtggaaccgggcatactgaagttcaagccaatgtaatttgctttagggagtgcagagacctactgcaggtggcagatgtcccactgtccacacaccgtgcttagctacactactattcttcacagcttctaggaattacannnnnnnnnggtagtttatgggcagtggtgcctaaatatagttgtacctccaaaggtttcagaacagggaactgggaatcctgaggantcttgtggaaaatatcctcttatgg

SEQ ID NO: 255825 - DNA, 453 bp, Homo Sapiens
  misc_feature (436)..(436): n is a, c, g, or t
gaatttcagtcaacagcagcctgtgaagaacactacatggcttccatacgtaggtctgtttccccatcactttcagtttgcactagtcctttaccttcagtcttggacatcctacctccaactgatctttattttgagcagcacagtccaattctttaactaaaggtgaagggatcgctgcactgacgttcttcccctttgagaaaagaatcgtaattttaagagtctgaaggagtttagtgggtcacctagtctctcctcccttgatacctctactgatactttctactcaagcattggggaaggcttttttagaaggaatcttatcttcaaaaattctaccttttttaatgtgtgtatttgtggggccctcaggaagttcctaaaattctataccaagggacacaaagtttccgggagggtggggaccggggcntctggaggttcaggcca

SEQ ID NO: 255826 - DNA, 934 bp, Homo Sapiens
  misc_feature (23)..(23): n is a, c, g, or t
  misc_feature (68)..(68): n is a, c, g, or t
tattactctaccaatataccccntggtgaaaagatgtcaacagtctcctttctgaaagctgttagttngatgttagatcaatcactgactaagcatttattgagcatctactataactgtacccagtctttaactaataagaaaaaaatacctgctccaaatgcaagatgatatttgtaagggaggataatttatcaactttttctaatagaatgctccttgaatcaatatctgccatatgaaattatatgacaagtaaaccctcaaatttattacctatcaccttataatgataaataagcaatctaaagtatgctgcatagtaccttgaggaaagtgactgctatacttaaaattaaggctgattcctaaaaggtatggaagaaaagccagaatgttattgtttgtaaaccactaaagacttaatatgaacagtttacataactatctggttaatttgggcaaatgagcacttgtgtttggtttctaactttgctggaaggtgttggtctaataaagaaaactgctttaagtaggagcacttttagcatacacaaaaataaaaatcctttgtaaatttcacttgcaatgttgtgcaactgtatatctttgccttatgcatttgaaactgattatgtattttatgcaaaatggtatatttttcccaaagctaagaatatggacaatgatgatatgatagctaagctagttttatctttctagcttttatcaactcttgacttgttgaattcctacaatgtgcaaggcagtatgcaatgtgttgaacatatatgaggtctacacataaaacaaagggaaactgaagtctttggaagcaaaatagttgtcaatttgaaaaccaacggtaatcattttcctcaacagtatttctaaaagttgagaatgatgtcaactaaaacaaaatacaatcatc

SEQ ID NO: 255827 - DNA, 425 bp, Homo Sapiens
tgcagcaataagtgggggtcgctggaataaggcacctgtcagagtttctagggccctagaaagctgggtccccccttcaatagcattgtgcagccggacaatccccacatactctttgcctgcactctgttgtgacttcaccaagcgagtggctcgttctatgcacacgattaaacaaccagtcaccttgggatccagagtaccactgtgccctgtcttctccacccgaagtatccgtcgaatccaggctaccacctcatgggaagaggggttagagggcttgtcaagattaatgaaacctgtcctgatatagtccccaatctctctcttcagaggatttgaaccacatgcaagaggtgtatagtgtgttgtccttacattcagcttatcaaaattctttagcaaaaggggccactgagacgtgt

SEQ ID NO: 255828 - DNA, 414 bp, Homo Sapiens
ccgggctgcaggaattcggcacgagggacagtcaaagctccaaggaagactgcatgggcttctagtcgccgggttttgtgaatctttttaccaggcaaggaagaaggggatggcgcacggtgtggatggtaggcagcgcggacagagctcactgaggaccttggagaacctatggaaggcgcagtgtctctgcagtgggagcgaggattcacgataagagaggagagtgtcttcaggaatgttcactgctagcaagcgcggggaggcactggtggatgcctgctccacatggggctgcgggtaggagcacggtagtcggtccctgccaggcaggtcgttaaagagcagtcggaacaacctacgaccttgctctacttgcattccccggctgttcttcagtttagggacatttct

SEQ ID NO: 255829 - DNA, 637 bp, Homo Sapiens
  misc_feature (539)..(539): n is a, c, g, or t
gaaagaatggattcctgggaaaataaacatctgcaattaactgtaaacaactgcatcaaagtgttggctttagaatttgaaatgttcctatctgggtttttgtaggacctgagggcactcgctttgctcctgtcagtacacactcccaaacagttaaacccagctctaattccaactctgcaagagcttttaagcaaatgcaggacttgtctgcaacagagaaactcactccaagagcaagaagccaaagaaagaaaaactaaagatgatgaaggagcaactcccattaaaaggcggcgtgttagcagtgatgaggagcacactgtagacagctgcatcagtgacatgaaaacagaaaccagggatggtcctgaccccaaccgagcacttctgacaatgagaccaagagactcctcaattattgatccaggaactgagcaagatcttccttcccctgcatgtcaaatatcaggtcacagcatgcagaagaacagtccaacaatggtagatatgacgattgtaaagaatttaaagacctncactgttccaaggattctaccctagctgaggaagaatctgagttcccttctacttctatctctgcagttctgtctgacttagctgacttgagaagctg

SEQ ID NO: 255830 - DNA, 1206 bp, Homo Sapiens
  misc_feature (29)..(29): n is a, c, g, or t
  misc_feature (52)..(52): n is a, c, g, or t
  misc_feature (60)..(60): n is a, c, g, or t
  misc_feature (109)..(109): n is a, c, g, or t
aacctaatacaaaacaaccagggggttgnggggttaaagggaccttaaaaantaagacangccctacacccctaatgtcaaaaaagcaaccttggtttccctttggccnagatatcccttgtgacgaccatggattgtagattccaatggtccctacacagggtatcctaaaatgtcatgttgctgcatatgactaaagagtcctctggaatggcccacaactgagagataaagcaacctcagggtcctgggagggcaaagcttggccatcacagcttctcaagtcagctaagtcagacagaactgcagagatagaagtagaagggaactcagattcttcctcggctagggtagaatccttggaacagtggaggtctttaaattctttacaatcgtcatatctaccattgttggactgttcttctgcatgctgtgacctgatatttgacatgtcttctgaaaacgaagatggaacttccattcggtattctttaacagaactattttcaggggaaggaagatcttgctcagttcctggatcaataattgaggagtctctggtctcattgtcagaagtgctcgttggggtcaggacctccctggtttctgttttcatgtcatgatgcagctgtctacagtgtgctcctcatcactgctaacacgccgccttttaatgggagttgctccttcatcatctttagtttttctttctttggcttcttgctcttggagtgagtttctctgttgcagacaagtcctgcatttgcttaaaagctcttgcagagttggaattagagctgggtttaactgtttgggagtgtgtactgacaggagcaaagcgagtgccctcaggtccccatttaaagaagcacttgctttggaaatttcaactcggttggagaaatcagactgtaggttctgatactggcttatcaagtttgtaataagagtgctgatcaaattggcacagtttgcttcagaaaacacttgactttgaacctttagaaggaaatgtgtcatgaacgtgtagacaatgttgttgtttaaaaaagttctttcatccattaggatacatttaatatattctgcgaaaacaggatcttcacacaaaagcttgatgcagttttttgacatagcagactgagtctggcatagctcagtccaaagtttggggaacagtgcaagatgaagtggcaaaccttcata

SEQ ID NO: 255831 - DNA, 1033 bp, Homo Sapiens
gaacttgcaccttatgccatagagcacagccaaattgttgagtgtggcagcctcagaaggatggtcagctcccaaggttctctcccggatgctaagggcatcattcagcaggtggtcagcttccttatacttatgctggtcacgatacaccaaagcaaggatgttgagcatggtggcgacatcagggtggccacggcctgatgtgcgctccaggtcctctagtgcctgcttacagagtggcacggccacctcatagcgaccttgggctgcgtactggatcaccaggttgtgcaacgtccgcaaccttgctgggatctcatatccaccctgctgagctgctgtagcaccttgaccacgggacaagccattgctggggtcctcttcctcctcattaggaaagaggtcatccagggaatccttggtggcatcgccttctttctcctccgaggtatgtccatcctcatcatactgccgcagctgccccaggaactccaggtgcttcttttcctcctccagctgagccacagcctgttcactgcgctgtagccgctgctgggtgccagccagctcatcccgcagccactggttctcctggcatagccgccgcacctgagcccgcagcttctgtttctccgactccactgtgctcaggtggctggctagagccagcatcacctgggcctcactcagcccgagctcaatgttttccatagaacggcgaagctgccgggccttctcatgcaccagcccttcctcatggcctccctgctgcagacactcaatggtctgggacaggctttgcagcacggcctggtgttcactgcgtagggcctctagcccttggctgaccagccgtgtgctccccaggatctcctcttggctgagccggtggcctgcaggctcatcccgctgccccaacaccaggcctgacatcctggcctgggggaccttgcccggtctgtgtacagagcagaggccctggctgtggcactcaggccagagcacgcctcgtgccgaattcgccacccaggcc

SEQ ID NO: 255832 - DNA, 670 bp, Homo Sapiens
  misc_feature (363)..(465): n is a, c, g, or t
  misc_feature (656)..(656): n is a, c, g, or t
cagagtctcctggctccgggcaagttctcacctgctggtgtggaaggctgccctgcattaccacacaatcttgttggagacttcagaatttcatcctctcatctaagtattgatgttattttcagactcgtggcaatatgtgacatttcagctgacacaggagggtctatagagtttatgactgagtgtacaacaatagagcatcccttttgcatgtatgatgcagaccagcatattattcatgacagtgttgaaggctcggggatcctgatgtgttccattgacaatttgccggcacagctcccaattgaagctacagaatgctttggagacatgctttacccttatgttgaagaaatgatnnnnnnnnnnnnnnnnnnnnnnnnnnnnnnnnnnnnnnnnnnnnnnnnnnnnnnnnnnnnnnnnnnnnnnnnnnnnnnnnnnnnnnnnnnnnnnnnnnnnnnnagccaggaccacagatattatcagacgcgacacagcctcttgaaagtcagaatttttctcctgtggtgagagatgcagtgattacatccaacggtacattacctgataaatataaatatatccagacactccgggagagcagggaacgtgctcagtcactttcaatgggcaccaggaagaaaggttttggnttcttggatctggc

SEQ ID NO: 255833 - DNA, 629 bp, Homo Sapiens
gagaaatagaatgtttgaaaggctatcccaaaagacttttttgaatctgtcattcacataccctgtgaagacaatactatctacaattttttcaggattattaaaatcttcttctttcactatcgtagcttaaactctgtttggttttgtcatctgtaaatacttacctacatacactgcatgtagatgattaaatgagggcaggccctgtgctcatagctttacgatggagagatgccagtgacctcataataaagactgtgaactgcctggtgcagtgtccacatgacaaaggggcaggtagcaccctctctcacccatgctgtggttaaaatggtttctagcatatgtataatgctatagttaaaatactatttttcaaaatcatacagattagtacatttaacagctacctgtaaagcttattactaatttttgtattatttttgtaaatagccaatagaaaagtttgcttgacatggtgcttttctttcatctagaggcaaaactgctttttgagaccgtaagaacctcttagctttgtgcgttcctgcctaatttttatatcttctaagcaaagtgccttaggatagcttgggatgagatgtgtgtgaaaggatgtacaagag

SEQ ID NO: 255834 - DNA, 711 bp, Homo Sapiens
atagatgccacttttaggtagtaatttttattgttattcaccaacttagaagtgaatccatgttttagtttactttggatatatactgtttaaatctgctctgtcactgacatttaaaaatttggttacgttaggaagatcattttaatttccatagtacatgatgctaaaattaaagacactgagtactaaatgaacttcatcctagtaaataattatgaaccaaattattctatatagtttcggccttaagtatactaagagcatacaatataataaaatccagcttctctgggccttttgttttcaatgtgtatttttctaaatctgaaaatacctattcggcagcaagtataacaaaagcaaagacacaaattaaaactattgattattctgtttaaggccagggtttctgagttttagtctgattttaaaaaacctccgtctgtccctctctccctccctccctctcacggtaacagccggagaggcaagtatggtaaggtcgacctttaaacgtttgctggatcagcactgggtggggataagaaaagatcaagggcaaacagaagatatttgcgaaagggatctatttgcacactgaagttgatttaaaagtacgtttaaaaatcaagttggtcttaattcgtctgttctattttccatattcgtggtgacaaagggaaaaagaatctctggctgcccccaaac

SEQ ID NO: 255835 - DNA, 598 bp, Homo Sapiens
  misc_feature (494)..(494): n is a, c, g, or t
ggaagagggagaacgtctacctgacggctgaaagagtccgcaaggaggttggcgaagtctcagtcctggtcaataatgctggtgtggtctctgggcatcaccttctggaatgtcctgatgagctcattgagagaaccatgatggtcaattgccatgcacacttctggaccactaaggcttttcttcctacgatgctggagattaatcatggtcatattgtgacagttgcaagttccttgggattgttcagtactgccggagttgaggattactgtgccagtaaatttggagttgtgggttttcatgaatccctgagccatgaactaaaggctgctgaaaaggatggaattcgaatcacgaaagaaattgagccttttctgccacctctgaagcctgattactgtgtgaagcaggccatgaaggccatcctcactgaccagcccatgatctgcactccccgcctcatgtacatcgtgaccttcatgaagagcatnctaccatttgaagcagttgtgtgcatgtatcggttcctaggagcggacaagtgtatgtacccctttattgctaaagaaagcatgccacaaacagtaatgaagca

SEQ ID NO: 255836 - DNA, 623 bp, Homo Sapiens
ttgacaagggccactcttagttcttgctgtttggccactggctaccacccatattatcactctaagatataattctgagatgagctaggaattccaaagacgcctcaagctgaggtgtcagactccttcctctgtcaggctgcctgtcattttgaggcctttgtcttttctccctattgaggctgtgagcctgctgcccaacactggctggctctgtacctagcagcaccttggtagacgctgatgccgagggacacagctgacccctctgagtctcgacacccagcgcccttggtttgtgctggcggctctgctagcctacaggattctttggtgtgtcaaagcagaactgtctgcctggggaacgcagcatggtgtagtttcatgcaaattaaaggagatcatcttgatttctgaagcagcacccaggcatctcacacatgtgacctgggaaagacggggcaacaatctacatacacttcaaactggttaatgaaccagggaatggggcagaggaggacacagggccatcctgcaaaatcaaaagctgaagtcaacggaccctaccattctgactctagaaggatgtggatagcgggcgctcgtgccgaattcggcacgag

SEQ ID NO: 255837 - DNA, 1219 bp, Homo Sapiens
caactctgctctgcccatccttctacaccggacttgcccctcctaagcaaagaatgcctatgaggctgcttgctgctgggaaacctggcacagccaattaccaccctctgctgcttagtgcttgagtacctcttgcaataaccaactcttagttgttccctttccctggggcttttccatgtaacacatggagcccttcccccagaaggctacttccttgttttagaggaaggtactgcccattgggagatggggacattgggacctcagcaatgaagaacccttgtgaagtaaccaggaggaatggggaaagaagcaagttgggcaggatatggcctacttccataggcttttcttttttcaggtttgatgtaagcatgggcttacatcccccaggtacatacttttacttattgtgggataacctggcactagtaggcaggtaaagtcacaaatttggtgtcttttcaccttttgactgttgacttaatagctcctctcactctgcctggagatacttcctgcctcagatgaggagccagaagaaacagagcccgacttgaatgaactcagctcagagttctaaggaccagcattctgggggccattttctctacaggcaaatggaattgcttttccataacatccaaattgtaatgtggttgctgctgaaggaggaggcagcagcgaggtcctgcggtacccatggggtgatgctacttctgcatgcatctacagggcatctgacacctaacatgagacgtggcatgtgagatgagacttggcatgtgagacatagggtcactagagacccttctgggtcagaggagagagactgaattggactaaacccgtcctctgttcccagcacgtttctcatatagccctcagtcactgagggagtcccccgcaggattggagaggcacattcccttgggacagaggctacaggttggagctttttttcccctgtcccccaaccccatccccacctccacttcagaacatggcaccccacccaactggccaagtgttaagtgatgtgcttattgagagcaactccgggtgtcttttaaaatgtagagaaaaggtgacagtttaaggaaaaatatatatagaataccagaaatgccgtttacccggagaatttttttctccccatttgttttgtttttactcaatgacaccatttttagttttatttcctgatagcaaaagg

SEQ ID NO: 255838 - DNA, 731 bp, Homo Sapiens
tttaagccttctcctcatagcgtccatggtatctactgtagtcctgcagatggaaatcctatcctactaacagctggctcagatatgaaaataaggttttgggacttggcttacccagaaaggtcctatgttgttgcaggaagtactagttccccatctgtgtcctactacaggaaaataattgaaggcactgaagttgtccaggaaattcagaataagcagaaagtaggaccaagtgatgacacccctcgaaggggcccagagtccctgcccgtgggacatcatgacatcatcactgatgtcgccacattccagaccacacagggcttcatcgtaactgcttctagagatgggattgtgaaggtgtggaaataaaacctactgatttgtataaattttaatagttataaatataatactataactcgagaaaaggcatttctagagaacagattcatttgcttaattttcaaaattatgtctccatattactgtttcatgactgactgactaaatgacacccaaaatggttaagatgtaccttgacctagtttaccttatgcatctctttgcaagaatcagccagccaacaatgtctgggatttttatggtatatgttatagaggtgagaaatgtaaaatatgaaaatgaatatgtttaatttgtattgaaaaagatggttgaaaagatggttgtaagctattatagtataaacacatttttgctattaa

SEQ ID NO: 255839 - DNA, 648 bp, Homo Sapiens
cacagtaagctattctgcattgaagtggtcttttataactaaggcctggactttgctccaacagagtcgtggtcttctgaatagtgacttaaggagttttgtttgcttaagtcagataatagcacattcacagggaaacaaagagagttggtggatagaattttctgactattaatttttcttccatgaaattttattatgcctttggcactttctgccactcttacagcatatcacaagatatctgtttagcagaagattatgtagttactttaattttaatataaaagtagcttgtgatacattaccaagagatctctgattctttagtaagtttgagaacacctattctacagagatgataggtacttagaaatgaagactttaaagtacattttaatctaatataggccagtaattgggggaaggggctttgagcagtacaattttaagatgattttgagggttgtatttctttatcatttaaaaatatcctaaagtcagtaatttatatgaaggaaactcattcattattgaaggtattatgctataaagccctattaatgaagaatacttccagtagaagtaatagctggagcttacctagtgtgtaaatgaagtgtgttaattatgtgacttgataccaga

SEQ ID NO: 255840 - DNA, 690 bp, Homo Sapiens
acaatgaacaacttgctgtgctgcgcgctcgtgtttctggacatctccattaagtggaccacccaggaaacgtttcctccaaagtaccttcattatgacgaagaaacctctcatcagctgttgtgtgacaaatgtcctcctggtacctacctctactacacagacagctggcacaccagtgacgagtgtctatactgcagccccgtgtgcaaggagctgcagtacgtcaagcaggagtgcaatcgcacccacaaccgcgtgtgcgaatgcaaggaagggcgctaccttgagatagagttctgcttgaaacataggagctgccctcctggatttggagtggtgcaagctggaaccccagagcgaaatacagtttgcaaaagatgtccagatgggttcttctcaaatgagacgtcatctaaagccccctgtaaaaaacgcacgaattggaggggtcttttgggtcctcctggctaactcagaaaggatatggcacccccgaacaacatatggttccggaaacagggaatcaactcaaaaatgcgggaaaagatgttaccctggggtgaggaaggcattcttccaggctttggctggttcctaacaaaggttttccccccaaactgggccttaaaggggcctggggaaagaacaattctttgcccgtgggccccgcaaaagtaaaacgcccga

SEQ ID NO: 255841 - DNA, 677 bp, Homo Sapiens
  misc_feature (508)..(508): n is a, c, g, or t
  misc_feature (543)..(543): n is a, c, g, or t
  misc_feature (549)..(549): n is a, c, g, or t
  misc_feature (578)..(578): n is a, c, g, or t
  misc_feature (659)..(659): n is a, c, g, or t
cagagttcacagcatatattggtggattcttgtccatagtgcatctgctttaagaattaacgaaagcagtgtcaagacagtaaggattcaaaccatttgccaaaaatgagtctaagtgcatttactctcttcctggcattgattggtggtaccagtggccagtactatgattatgattttcccctatcaatttatgggcaatcatcaccaaactgtgcaccagaatgtaactgccctgaaagctacccaagtgccatgtactgtgatgagctgaaattgaaaagtgtaccaatggtgcctcctggaatcaagtatctttaccttaggaataaccagattgaccatattgatgaaaaggcctttgagaatgtaactgatctgcagtggctcattctagatcacaaccttctagaaaactccaagatcaacaacctgacagagtctgtgggcccactttccaaatctctggaggatctgcagcttactcataacaggatcactaagctgngctcttttgaaaggatggtaaacctgaccttcatncatctncagcacaaccggcttgaagaggatgctgnttcagctgcttttaaagggtctaaatcactcgaatacccttgacttgagcttcaatcagataagccagactgccttctggncttccctgcttttctcta

SEQ ID NO: 255842 - DNA, 934 bp, Homo Sapiens
atatattggtggattcttgtccatagtgcatctgctttaagaattaacgaaagcagtgtcaagacagtaaggattcaaaccatttgccaaaaatgagtctaagtgcatttactctcttcctggcattgattggtggtaccagtggccagtactatgattatgattttcccctatcaatttatgggcaatcatcaccaaactgtgcaccagaatgtaactgccctgaaagctacccaagtgccatgtactgtgatgagctgaaattgaaaagtgtaccaatggtgcctcctggaatcaagtatctttaccttaggaataaccagattgaccatattgatgaaaaggcctttgagaatgtaactgatctgcagtggctcattctagatcacaaccttctagaaaactccaagataaaagggagagttttctctaaattgaaacaactgaagaagctgcatataaaccacaacaacctgacagagtctgtgggcccacttcccaaatctctggaggatctgcagcttactcataacaagatcacaaagctgggctcttttgaaggattggtaaacctgaccttcatccatctccagcacaaccggctgaaagaggatgctgtttcagctgcttttaaaggtcttaaatcactcgaataccttgacttgagcttcaatcagatagccagactgccttctggtctccctgtctctcttctaactctctacttagacaacaataagatcagcaacatccctgatgagtatttcaagcgttttaatgcattgcagtatctgcgtttatctcacaacgaactggctgatagtggaatacctggaaattctttcaatgtgtcatccctggttgagctggatctgtcctataacaagcttaaaaacataccaactgtcaatgaaaaccttgaaaactattacct

SEQ ID NO: 255843 - DNA, 485 bp, Homo Sapiens
  misc_feature (331)..(331): n is a, c, g, or t
  misc_feature (426)..(426): n is a, c, g, or t
  misc_feature (439)..(439): n is a, c, g, or t
  misc_feature (449)..(449): n is a, c, g, or t
  misc_feature (458)..(458): n is a, c, g, or t
ttacattcatacatatccggtggaagactggtttctgagatgcgattgccatccaaacgcaaatgcttgatcttggagtaggataatggccccaggatcttgcagaagctctttatgtcaaacttctcaagttgattgacctccaggtaatagttttcaaggttttcattgacagttggtatgtttttaagcttgttataggacagatccagctcaaccagggatgacacattgaaagaatttccagggtattccactatcagccagttcgttgtgaggataaacgcagatactgcaatgcattaaaacgcttgaaatactcatcagggantgttgctgatcttattgttgtctaaggtaggaggagttaggaagaagagacaggggagaccagaagggcagttctgggctatctgatttgaaggntcaagttcaaggnatttcgagtngttttaagnccctttaaaaggcagctgaaacagcct

SEQ ID NO: 255844 - DNA, 621 bp, Homo Sapiens
taaaaaagtccggttggtcctgtctggggagaaagttcttgaaactctgcaagagaagggggaaaggacaaacccaaaccatcctaccctttggagaccagagtatgggagttacatgattgaagggacaccaggacagccctacggaggaacaatgtccgagttcaatacagttgaggccaacatgcgaaaacgccggaaggaggctacttctatattagaagtcacactgcccgaggtcaaacccaacccagtggaaggaggagcttccaagtccctcttctttccagatgaagcaataaacaagcaccctcgcttcaggtgagtatggctttgtgttgaaatgcagatgcccttcactagacccctgacttctgagagtatagtatttctgtctagaaatcctttttgagcattaactgagttttggctctctttctaagtaaccagagaagatagccgatgtgcacctggtcacatcttcagtacccccaggcttcttgggtgttgatgcatgcacccaggcttgatttggcaattcttcaagtcgtgaccaaggtatttgcttggccactgggaattaaccctttatttggggagatttttaaagtcctaggctgg

SEQ ID NO: 255845 - DNA, 1627 bp, Homo Sapiens
  misc_feature (530)..(538): n is a, c, g, or t
gttgtaacaaaaccgctcaagtctgccttaaagagccttacaagccagccagtccctgcagctccacaaactgacccatcctgggccttgttctccacagaatgggtctgctccttcccctggcactctgcatcctagtcctgtgctgcggagcaatgtctccaccccagctggccctcaacccctcggctctgctctcccggggctgcaatgactccgatgtgctggcagttgcaggctttgccctgcgggatattaacaaagacagaaaggatggctatgtgctgagactcaaccgagtgaacgacgcccaggaatacagacggggtggcctgggatctctgttctatcttacactggatgtgctagagactgactgccatgtgctcagaaagaaggcatggcaagactgtggaatgaggatattttttgaatcagtttatggtcaatgcaaagcaatattttatatgaacaacccaagtagagttctctatttagctgcttataactgtactcttcgcccagtttcnnnnnnnnngatttacatgacgtgccctgactgcccaagctccatacccactgactcttccaatcaccaagtgctggaggctgccaccgagtctcttgcgaaatacaacaatgagaacacatccaagcagtattctctcttcaaagtcaccagggcttctagccagtgggtggtcggcccttcttactttgtggaatacttaattaaagaatcaccatgtactaaatcccaggccagcagctgttcacttcagtcctccgactctgtgcctgttggtctttgcaaaggttctctgactcgaacacactgggaaaagtttgtctctgtgacttgtgacttctttgaatcacaggctccagccactggaagtgaaaactctgctgttaaccagaaacctacaaaccttcccaaggtggaagaatcccagcagaaaaacacccccccaacagactccccctccaaagctgggccaagaggatctgtccaatatcttcctgacttggatgataaaaattcccaggaaaagggccctcaggaggcctttcctgtgcatctggacctaaccacgaatccccagggagaaaccctggatatttccttcctcttcctggagcctatggaggagaagctggttgtcctgcctttccccagagaaaaagcacgcactgctgagtgcccagggccagcccagaatgccagccctcttgtccttccgccatgagaatcacacagagtcttctgtaggggtatggtgcgccgcatgacatgggaggcgatggggacgatggacagagacagagcgtgcacacgtagagtggctagtgaaggacgcctttttgactcttcttggtctcagcatgttgactgggattggaaataatgagactgaccctcggcttgggctgcactctaccctgtacactgccttgtaccctgagctgcatcacctcctaaactgagcagtctcataccatggagagatgcctctcttatgtcttcagccactcacttataaagatacttatcttttcagcagtatatatgtgctgaaatctcagcatgaaagcattgcatgagtaaagatactttccctaacaa

SEQ ID NO: 255846 - DNA, 490 bp, Homo Sapiens
  misc_feature (312)..(312): n is a, c, g, or t
  misc_feature (416)..(416): n is a, c, g, or t
  misc_feature (432)..(432): n is a, c, g, or t
  misc_feature (448)..(448): n is a, c, g, or t
  misc_feature (460)..(460): n is a, c, g, or t
  misc_feature (468)..(468): n is a, c, g, or t
tgtactaaatcttatgccagcagctgttcacttcagtcctccgactctgtgcctgttggtctttgcaaaggttctctgactcgaacacactgggaaaagtttgtctctgtgacttgtgacttctttgaatcacaggctccagccactggaagtgaaaactctgctgttaaccagaaacctacaaaccttcccaaggtgggaaggaatcccaggcaggaaaaacacccccccaacagactccccctccaaaggctggggccaagagggatctgtccaatatctttcctgacttgggatggataaaaattcccnggggaaaaggggccctcagggaggggcttttcctggtggcatctggggaccttaaccacgggaattccaagggggagaaacccggggggtattttcccttcccntttccggggggggctntgggagggagaagctnggtttgttcctngccttttnccccaggaggaaaaaggcacgg

SEQ ID NO: 255847 - DNA, 498 bp, Homo Sapiens
  misc_feature (17)..(17): n is a, c, g, or t
  misc_feature (394)..(394): n is a, c, g, or t
  misc_feature (453)..(453): n is a, c, g, or t
tgtactaaatcccaggngggcagctgttcacttcagtcctccgactctgtgcctgttggtctttgcaaaggttctctgactcgaacacactgggaaaagtttgtctctgtgacttgtgacttctttgaatcacaggctccagccactggaagtgaaaactctgctgttaaccagaaacctacaaaccttcccaaggtggaagaatcccagcagaaaaacacccccccaacagactccccctccaaagctgggccaagaggatctgtccaatatcttcctgacttgggatgataaaaattcccggggaaaaggggccctcagggagggcctttcctgtggcatctgggacctaaccacggaattccccgggggaggaaacccgggggatattttngccgtcctctttcctggggaggcctatgggagggagaaggttgggttggttcccggccnttttccccagagaaaaagcacggaataggtggagtggccaggggt

SEQ ID NO: 255848 - DNA, 473 bp, Homo Sapiens
  misc_feature (369)..(369): n is a, c, g, or t
  misc_feature (388)..(388): n is a, c, g, or t
  misc_feature (435)..(435): n is a, c, g, or t
gtccctgcagctccacaaacttgacccatcctgggcctttgttctccacagaatgggtctgctccttcccctggcactctgcatcctagtcctgtgctgcggaaaatgtctccaccccagctggccctcaacccctcggctctgctctcccggggctgcaatgactccgatgtgctggcagttgcaggctttgcctgcgggatattaacaaagacagaaaggatggctatgtgctgagactcaaccgagtgaacgacgcccagggaatacagacggggtggcctggggatcctcttgtttctaatctttacactgggatgtgcttaggaggattggattgccatgtggtttcaggaaaggaagggcatnggcaagattgtgggaattnaggatatttttttggaatcagttttatgggtcaatgcaaagcaattntttttattattggaaccaacccaagtaggagtttttct

SEQ ID NO: 255849 - DNA, 378 bp, Homo Sapiens
ctcactgatatcccagtaaatacctacaagtgacacaatatcataaaatcactgtgaactgataaaacagaagccaggtgaggtggtgctggtagcagaaccagggcaaatggagaagaaaagggagctggaatggtgagcacaaagaagatgtttcccatcatggaagcaccagcatgggtgaatacagataccagcagttggaggaagggcaccaatggtgaagcctgtatgcaggaaaagtccatgggctggcctcccccacccagactgaaacaggaaatataaccactaaggatccttaacaatcttccaagaaggtgcttaaatttccagagtggggattatcaccccaaaatatgttcctctttggcttag

SEQ ID NO: 255850 - DNA, 416 bp, Homo Sapiens
gtttttttcttaacctcgtcaggcccagagttcacttctttgtttctctgtttcttttgtcttgtcttagagatgagggggctacagcagcatcatgcaaagagggaaagatgaagggatagaagaagagaaaatccccctgttctgataggaacggcctgttccattgttaaatggcaaatggcccaatttaagggctttggatctaatttgcctctgatgtttcctttggaaacatttaggaatatttttctccccctaccccataaattgtgtagcactttttattccatttgctttcaaatgactacactaagcctaataatacaagctccagtgttatacaataacccatcagtgattggggaatcaaacattttggtttaaaaaacatgattatttaaaactggaaacta

SEQ ID NO: 255851 - DNA, 371 bp, Homo Sapiens
gtaggattgtaaaagtcattaagaatttaaaagaaattaagaacaaagtagtcttgatctgcgactacaaagtattttaagaccaaaagtctaaatacaatttagtatatgctactaaatagtcttttaagatactacgacaaagtctgtattgaaaacatcctatgtgccaacatgtatctgcttttccagggtgtcagggcaggcagtggttctagtttccacaaggttacaaccctgttcaaatttagaagcaatgtcagaagggtgacaaggcaccattgtgacagttacaggaaagaggactcagggtgaaagttaccctgggtgaagactcctgccttgattttatcttccaagtgggaaaagag

SEQ ID NO: 255852 - DNA, 424 bp, Homo Sapiens
cagacacttactgtttcacaaaccatatcacctgaaaggcagcgccatctcatctgtgtatatgatagggaaggggtaaataaatttactcagtatgggaaattcatcttctaagctcttgttacccggtcctgcccaaagacaccctggcatgaataacatgcaggaagttggacatgttactctagtccaacctcagttgtttcactctgtcctctgcagaaatatctagaggtccaggcaagaagcatacctcctgagtgaaacgtgttataaacaccataaccataatattagcagaattctcatgaattctagctcaagcgcactcagatcatagtggtattaatgatacagatactgctttcccattgcttacagcaattgtggccatgattaccatactttttaagaataaatttgc

SEQ ID NO: 255853 - DNA, 384 bp, Homo Sapiens
ttgatttggattttagagactagaagttccaagctcaaggtgccaatagatttggtgtgtgtgtcagtggagttctcgtcgggagcctgggcatccacacccacctggcggtaataagaatggtggcacaggaggcctgctgaaaatgggatgtaaatatgattctacatcttaacccacaatactcgaaatacccaggcttcaatggaaaatcacttactacaccaagaatcaggaagatctcaagcagattgtaaacagatccttctgcctcagcctccagagtactgggactacagccccaagacctggatgaccaggaagccagcaactcgaccagaatggcaagctgtggaaagaagtcatttggtgagcttcagactg

SEQ ID NO: 255854 - DNA, 637 bp, Homo Sapiens
  misc_feature (543)..(543): n is a, c, g, or t
ctttagtgactttgtagcctatcctcctctcaaaataattagctccttgaggaagaataatagattttctttttaaaaccccactatatctaacacaacagattcttcctaaataccattggttaaataggccatgcacatcatagccttgtcattacagatggtaccagattaaactgattgttggatttgctttggtacctgtataaccatacaaacccagatattaaaacaccagctctgttccattgtttccttatggtggcctggtgaagttaatctgtatcagataaactctccttatatgtgaatatgtaaagtcagctttttaggtcagctaaattttgctttgcctactaaattaacatggtaaaattagaaacagtctgacaaagtagttaatgtataattctaaaaggccttgagattttagtacttgaccattttgaacatttggtaggtacatctgctcagtctattgacttgtgaatagtcaatagaacaaaacttcagagttctctgttgactttttggagaagattntatattagcagatgaaatataagtggtgaaaataaaaatggaagagagtctgtaggcctactttctctatgagaatcggcatgttagtccatct

SEQ ID NO: 255855 - DNA, 1169 bp, Homo Sapiens
  misc_feature (94)..(94): n is a, c, g, or t
  misc_feature (105)..(113): n is a, c, g, or t
  misc_feature (359)..(359): n is a, c, g, or t
aaagatgtttatgcggagctctccaaaaagggagggcctctcaagccaatttgtgagcgcccaaggtgtttttctccgccttgggggggaattnaagcgacgttnnnnnnnnnaaaaggcccgagttcttgtgcactttgttgaagaatgcgttttgtgccccgttcgaccaagaagtttgggaaggttctttcaaggcgagaaattgttgtgagaaaatgtcttcgggctggcgccataggaattgaggcgctttgtgcgctttgggaagttcaccccccttttggcgtaagttgtgcccaaatcccggtatcgaaaggttataacccacggcaaaattagtttccccaggtggtttnttaattttaagggggggttagaaaaagaatttcacgccccccaggccaatgggccgtgggggttggaaaaaagcgccttcatcgcgcatgtaaggggtttagggcccagaaaaagtggtgaatctgttaggcttgggttaattaacaaacccagctttctcttgattgggtggggctgctggttgttaactggggtcctctaaatgaagcccatgagacccttattatttttttaaaaaaaacagaaagtgcgtaagttatttcctctgtgtaggctgtgcaaattaaaacaaaaacaaccatttaaaaataatgaaaaataatctctttattctctctctccaacagatctctgacccagtccttctccaatacaaaggaaagacgatcaagagcgtgaaggccagctagcgcagatgggcgggccgcaggtggctagagcaaccggtgtactctcgggggatgcagcgagatgcgccatctctgacggcaaaccgaccgacgatgcctacacggggcacctggttcctgtccagtatggctatagagtgtgcccaagaacctcggaggcaagagaaacacggtcagtattcctgatcatttccactgcagcaagcgctgcactccagagatggttaccatccaggagttctgaaacatatgcagtgtgcacaaaagccaggggtttagttcagactcctctccccatctcctgtggccacccccctcatccattggttaaagctgattgtgcctcgtgccgaattcgccacccaggcctaagggtcgtcgttgggtgcggagcgtggg

SEQ ID NO: 255856 - DNA, 523 bp, Homo Sapiens
  misc_feature (264)..(358): n is a, c, g, or t
  misc_feature (452)..(452): n is a, c, g, or t
  misc_feature (464)..(464): n is a, c, g, or t
  misc_feature (472)..(472): n is a, c, g, or t
  misc_feature (474)..(474): n is a, c, g, or t
  misc_feature (486)..(486): n is a, c, g, or t
  misc_feature (498)..(498): n is a, c, g, or t
  misc_feature (508)..(508): n is a, c, g, or t
caaacaaacttgttctctgtagctttcaatcctttatacatagtgttccttttttttaaatactgtcttccccttgttcatcttccacctaactgttcttactaatccttcgtgattagcttagatatcaatttctccaggaaattgtccccactgatccccaagcctgggttaggttcccgggagtcctgtgtgccttctgtaacaccttgtgttttcctatcatagctctcagcagcctgtttacttgtctgaacattactnnnnnnnnnnnnnnnnnnnnnnnnnnnnnnnnnnnnnnnnnnnnnnnnnnnnnnnnnnnnnnnnnnnnnnnnnnnnnnnnnnnnnnnnnnnnnnnattatcagcaccttcatctatcataattctcaaatgtctgggttgtgcataaataactcttaagtatgccaagaagcttcagagtaaagtacangactgacaaggncatgcatngnttcagagccatngttgggaccttngttttcactnagtcaaatcatttcc

SEQ ID NO: 255857 - DNA, 109 bp, Homo Sapiens
aaatcttccaaaagctgacgatttttaatttaacagaaaagaaaatgaaattaatttttataaaaatgatccaagtgtccaaggcacaaatttttctctcaaacagcag

SEQ ID NO: 255858 - DNA, 630 bp, Homo Sapiens
  misc_feature (15)..(15): n is a, c, g, or t
  misc_feature (38)..(38): n is a, c, g, or t
  misc_feature (44)..(44): n is a, c, g, or t
  misc_feature (155)..(155): n is a, c, g, or t
  misc_feature (172)..(172): n is a, c, g, or t
  misc_feature (212)..(212): n is a, c, g, or t
aaagactgactgttncagactaaagtgctatggggccntaatanccctgaaaggcagtctaggccacaaggactgccactgcagttgagtcctggtgctgaattggacccagaaacagtggatttgcaggtggcgcagatgacctactgagaaancagccatggtagctaanaaagtgctggcatcactccttccataactccaggctaaanagcttatggctctcttgcattttgggtaccaggtcagccatggcaaaacagggcaccatgggtcagaatcatcaggcctcctttccaggccctagctcctgggtgaaatttctagacactccctgataaaaaagggaactgacacccacgaagggaaggatgcagtcctggcagaattaaatgtctgttaactaaagagccctttgacctgaataagaaatagcaatatccaggtactacatcaagagtcttgggtgagactttgagacttgcttttttctggtgaaactcagaacattctaagctgtggtggccatggagccaagactctgttccccttgataaaagtggaagaaaaattaaagggaattttgtcttgtacctgaggtgccagttcagcaacaaaaggaaaaagtac

SEQ ID NO: 255859 - DNA, 1389 bp, Homo Sapiens
  misc_feature (583)..(597): n is a, c, g, or t
  misc_feature (1097)..(1258): n is a, c, g, or t
  misc_feature (1303)..(1314): n is a, c, g, or t
gggcccgccgcccggggggatgtcttacaaaccgaacttggccgcgcacatgcccgccgccgccctcaacgccgctgggagtgtccactcgccttccaccagcatggcaacgtcttcacagtaccgccagctgctcagtgactacgggccaccgtccctaggctacacccagggaactgggaacagccaggtgccccaaagcaaatacgcggagctgctggccatcattgaagagctggggaaggagatcagacccacgtacgcagggagcaagagtgccatggagaggctgaagcgcggcatcattcacgctagaggactggttcgggagtgcttggcagaaacggaacggaatgccagatcctagctgccttgttggttttgaaggatttccatctttttacaagatgagaagttacagttcatctcccctgttcagatgaaacccttgttttcaaaatggttacagtttcgtttttcctcccatggttcacttggctctgaacctacagtctcaaagattgagaaaagattttgcagttaattaggatttgcattttaagtagttaggaactgcccaggnnnnnnnnnnnnnnnaagcattgatttaaaagatgcacggaaagttatcttacagcaaactgtagtttgcctccaagacaccattgtctccctttaatcttctcttttgtatacatttgttacccatggtgttctttgttccttttcataagctaataccactgtagggattttgttttgaacgcatattgacagcacgctttacttagtagccggttcccatttgccatacaatgtaggttctgcttaatgtaacttcttttttgcttaagcatttgcatgactattagtgcttcaaagtcaatttttaaaaatgcacaagttataaatacagaagaaagagcaacccaccaaacctaacaaggacccccgaacactttcatactaagactgtaagtagatctcagttctgcgtttattgtaagttgataaaaacatctggaagaaaatgactaaaactgtttgcatctttgtatgtatttattacttgatgtaataaagcttattttcattannnnnnnnnnnnnnnnnnnnnnnnnnnnnnnnnnnnnnnnnnnnnnnnnnnnnnnnnnnnnnnnnnnnnnnnnnnnnnnnnnnnnnnnnnnnnnnnnnnnnnnnnnnnnnnnnnnnnnnnnnnnnnnnnnnnnnnnnnnnnnnnnnnnnnnnnnnnnnnnnntggggggcccccccccccccaaaaaatttttaaaaaacttttgtnnnnnnnnnnnncccaaagggaaaggaaagggggcaaaagtgtttcccgagaaaaaccggggaaaaaaaggggggtggtttcccccc

SEQ ID NO: 255860 - DNA, 582 bp, Homo Sapiens
ttgggctcaagagatcctctctctttagggactccaaggcttgatccattattctagtttataaaacagcaactttccttgacatgatggccctctccgttttatcagaatttctggttaaaacaacccgtttagctagacaaatgaagagtgttgggggtgagcggtttttgtgtgtagatactcccatccgtaggaaaattttgaatggaggatctttgattataggcatcacatgtctgtagaacatcagggccttctgctgacacctggagcccgtgttggggaatctgtgcgttcttcccaaagtgggcacgactcccagctggctttttgcttcttgacctggccaggctgcatcctggactgtgcagctgtgtgttcacatgggattggagtccaaacacaataagaagagttatatccgctgcggaagcagcagcttatctggaaggagggacgagggcagcgatggaagctcatgatgtcatatgccaaaccacattacatgttgggtttgctatgcagagtggattgtcacataatatgtttctaatttttcatgcttgatttttgccctga

SEQ ID NO: 255861 - DNA, 458 bp, Homo Sapiens
  misc_feature (108)..(108): n is a, c, g, or t
agatactgccaactgatcttgtactaaagaaatattctgtttcttattctctccctccaaaacttggtaaagcctatgagtagaataacccttagtatcaagggtaantccttggatttaatctgttgagaaactgatggatctgttaacatttctaattgcttgtagagcatcatgttactttgactaagttcttgaaccaaattttcaagttgacgatatatgtcccgatgctttcttaattcaatttcatatgataactgtagaagttcaaatgatgccttttgttttattaattgatttaaaactaactcttgtcttgctgtataataatcttgtttagcaatctgcagatcaaaatctccctttaccactggcatattcaataactgggcattctctcttaccacagcaggtaaacttctgtcttttatttgagtgacctctttttcaagttt

SEQ ID NO: 255862 - DNA, 660 bp, Homo Sapiens
  misc_feature (221)..(236): n is a, c, g, or t
  misc_feature (594)..(594): n is a, c, g, or t
cagaggggctatgccatctgtttatgccatacagcaaacaatcagagctgtttctcaagctcaggttctgtgtttgaaccacattttatatgcccttaatggatttctaagtcaagtccagaagtgctaggcatttttagaaagtctccctcttttttactctcctctctttcttttatgaggttttcattatattcacaacatgcattgtcttctacgcnnnnnnnnnnnnnnnngcctctgagtctctattttagaatagaatctgtgtttggaataatcctttttatttgtttatttggaccatagttaatgagcatactcagagattttatggtttgaagggagagtttgttggtaaaggaatcataggtttactgttgcatagcagagctaaatcaaagtagaaaaaatcgttgcaagactgagttctctaaatttagatgtttatgttctgggcaatagttttttagccatcagagtcttcattttttcagccatatgttcccatgtttggaacataaagaaaataatatcagggtttaaagataaaagaaaaaataggtaactagttataatcagtggaacactctncttggtctgagcaaggttcatgtttggctttcaatccgtttctgatcaagttattcttcacataga

SEQ ID NO: 255863 - DNA, 413 bp, Homo Sapiens
gcagaatgaaggtaagtcatcatccagggaacagccagcccccactggagtggcactttatactgtcagcccatgggaacaccacggatactaagtcagaaactctaaaacttctggatccattcaagtgagaatcatgtcgcttgtgccaaagaatgacatcaatagtctttcatactagcaactggtaagaagcgcccatccatagcagcctactgcctacttaatgttaatcagtactggctccagtggcccaagataattttctcaggccttgactgttatgaattaacctaactcaattttgccagtcaaaattatcagattcatttggttatcagtagtttcaaatgcttagaagcagactaaggatacaagactcctcccaaaaacctccccagcaggcttcactg

SEQ ID NO: 255864 - DNA, 554 bp, Homo Sapiens
gaatttcacccaggaaacagcttatgcccatgatccgcccaagctccgaaattaacccctccctaaagggaccaaaaagctgaagctccgaccgcggtgcgggccgctctaaaacagtgggatcccccgggctgcaggaattcgcacaagagagcctcagcgctgggttaaaatagaactggtgtcctgataatgggtgaggccccagtggaataacgcacgtgaaatacacatactgggcgtccacttaattaaggccctatcctcattgcctgccaagttcccaaaagagggatgggtttgggtgggaggttgagaggggaggttcccggcctttccagcagtgccccctctgccgtctgggcctggcagatgcgtgttgatcccagcgttttctccagcgtgcgctcgcttgctaggtcgacgtgatcagtgagctttctccgcccgtgttctcctgagtgtcctgagagcagcccgtttctgcccctcttgcgattacaaagtcaagcccagagcctgacccacagtagtgctcaataaaggcttagaaa

SEQ ID NO: 255865 - DNA, 362 bp, Homo Sapiens
gtgcaaccttaaaataaatatatatataaataaagacctctggagccagggctgaaataaggatattgttatgaagcggattattcctttaaggtccgtgccacattgcgaccacagattctctgattgtcggtattccgtgtagaaacgccttggcctgatttgccaggtttttgttgcttaactttctccatcatttgttcactccttctctttcctaagactgactttatggcctttcaccaagaacatgaagtgcgtatgtcacacttggaagatattctgggaaaactgagagaaaaatctgaggccatccagaaggaactagaacagaccaagcaaaagatcagcaagtcggttct

SEQ ID NO: 255866 - DNA, 677 bp, Homo Sapiens
  misc_feature (216)..(374): n is a, c, g, or t
  misc_feature (504)..(504): n is a, c, g, or t
caggtttggggatgtctactcctgctgcctggcctctccccactcctggtgctcactttgatatccaagcatggttggggctgagccctggcactgtcacagcctggctaggtgtggacaggctggggcactgctgacccaccagccccctgccaccttggccccctctggacaggagggaatccaaagggtatgctgaggacagctcacagtgtnnnnnnnnnnnnnnnnnnnnnnnnnnnnnnnnnnnnnnnnnnnnnnnnnnnnnnnnnnnnnnnnnnnnnnnnnnnnnnnnnnnnnnnnnnnnnnnnnnnnnnnnnnnnnnnnnnnnnnnnnnnnnnnnnnnnnnnnnnnnnnnnnnnnnnnnnnnnnnnagtattctatctgggatgagtggaaggaagcttcactcatggggtttcagctggggctgttggctggaacacctacaagaggcacctgcatgtggccaggacttcctcacagcacagtggcctcagactnttactaggtgatttgaacctacaaatacaattaaggttaaatcacctatgaagatttagtctcagaaattacctaatcaatgagccactaatgtcaattcagattccaggagaagggacagatttcagctctggatgggaggtatgtcaaagaattagtggatgtgatgtaaa

SEQ ID NO: 255867 - DNA, 393 bp, Homo Sapiens
gggctgcaggattcggcacgagatcgcctacactcggggcgacctgaacaaagcccacgtcggtaactacacgccttgcgtggccaatgtctataacttcccttctgccttcctcttcttcatcgagacggaggccaccatcggctatggctaccgatacatcacagacaagtgccccgagggcatcatcctcttcctcttccagtccatcctgggctccatcgtggacgccttcctcatcggctgcatgttcatcaagatgtcccagcccaagaagcgcgccgagaccctcatgttcagcgagcacgcggtgatctccatgagggacggcgcgcagattcgctgcaagctgctcaaaggatgacttgtcaagctcgaacatcatatactgaa

SEQ ID NO: 255868 - DNA, 422 bp, Homo Sapiens
  misc_feature (82)..(91): n is a, c, g, or t
cccagattcaacatgatatctccagggtcaggaaactcctgaaggagtgccttccatctttggacatctctaacagaaaggnnnnnnnnnnaatatggagctctcccaattgatgtagattttccatttatagttatactacattagtctacttttcccccataatgatcctttagattcatgcattcattcagcaaaaatttactgaacacctattatatacaaggttctgtacgagacaatgagggattcagcagtgaacaagaccaacttggcctctgccttcagaaactgtcttctgtctagtagggaagataggaaattagcaaaaataataataagtaaacaagtaatattaattctattaataatattaacaataacaataagtaaacaaataacaaaagaagtatagtttgaga

SEQ ID NO: 255869 - DNA, 223 bp, Homo Sapiens
catgtacacagaaggggaaccttgaagacattatctccatgcctcaaccgtgtctcaagtgtatattttgtccagttataactggatggtaagacagtattaagagtgcaagtacctggcacttgaagtttgtcccaggaaaatgcctgtgtataattacctaacttcagatctgcacattaacttatttaacaaaataaatcagccgggcgcagtggctcat

SEQ ID NO: 255870 - DNA, 613 bp, Homo Sapiens
gccatgttcataccattgattggcagaaggaacccttttttgatttcttaaaattcaggagtttgaagtgagtaatatctgaattggtgttagaactgttggtggtttattgtattacaagatatttcaaattcctttttttgtttacatttttaaactattgatgcacttgaatatgtttatgcagttgtgaaaaaatagtgtaaagaaagcagtacaaattatcttgagtttatataagatgattcaagatttgtgccggacaaggagaaaaagaaaatttgttgatatctttgggtgaggatggagaggtccaagaaaccattttgcaaatgttttatattactaacaagacaatctaaacctaaataaacatctttttcagagaaaagacactagagaaagatttaatttgtgatatttcaagctagattataaactgtgatctttgtgaatgaattaattcattccagaattaaattttggtctttgtattttgattccttttactttagtgaggattttgtagagaagatgaaatttcacctctataataatagaagttaggagtgaggtctcacaaacatgggctgtcttctagatttgggatata

SEQ ID NO: 255871 - DNA, 485 bp, Homo Sapiens
cagcaatattttaaagtgtttggttatcatctggcataaaaatttcagttagctatcttttctagatgtgcacaaaattgatgttaataaaactggttcctgccctctaagaatattctagtgaaggttcatacaaacaaccacaagttggcttagaaaacaaacacctgggccttctgaggtccaagcaatcagacaaagagcaccgtgagggaggtcacactctaggtcagggtgaaagacagacagacacacgtttaccctctctccttcctcatatcccactgaagagacacgattcacagaagagaataagtccacagcagatgaaccagaataaaggggccatatcctttaatacggggtacagaagaagctggaatcagagatgagagccattcttggtggggcagtcccaccaagcaccaaaggatgaataaaaagactctcagccctagagacaaatttgtgaaattgaaaatgaa

SEQ ID NO: 255872 - DNA, 764 bp, Homo Sapiens
ccaccctcctaaaataaaaaccttaaatctgcccaaaactaataatccccccaaccttttccttccccccaactatcaaaaacccaatcctaggaaataacgtcaactcctaccaaaaatgattgaattgtgttgggcctggggaaaaagtcgggcaaaaggagcctttcttgtggctgctgatagttaggttcatccaccaccgcactttgagctcgactagagtcgccatggggtttcatctgtctttgtggccccacagtgctcacatgttccacttcagctgtgccaataggtggtagcagattatttcgactcaggggcgtcggtgagggagaggagagcgagtcgggtgccactgggactcgggctcctctgaggatttcttccacagatcttggtgtttcagcacatgaatggctcgtgctgatcggatgaagagttcgtggtggtggattgcgtctcctggtggactgcactgtgtatgacagagatgatgtactaaactccacagctcgatttggccaatttcgagttgaaaggatggtactggacccaggcctcataagtagcttgtcatcaagatctaggagcttgtccattagggagagatttcttggctgtagaggcattccatgaaccaagagatcattcacatttggctgatgtctgcttgcttgacagagactcatctacgccaactttgccaaaagttaatatttccaatttggttatttatactttttccccatgctttaattttt

SEQ ID NO: 255873 - DNA, 577 bp, Homo Sapiens
  misc_feature (19)..(19): n is a, c, g, or t
ctccctctccccctcaccngacgcccccccgagtccgaaaataatcctgcctacccaaccctattggcacagcctgaaagtggaaccatgtgagccacctgtggggccccacaaagacagatgaaaccccccatggcgacctcctagtcgagcctcaaagtgcggtggtggatgaaccctaactatcagcagcccacaagaaaggctccttttgcccgactttttcccccaggcccaacacaactcaatcatttttggtagagtgacgtacttcctagaatggtcttgatagttggggaaagaaaaggtggggggaataatagtttggcagacttaagattttatctagaggcttaacccagaataaaagttgagtttccaacaataaaaagtgttataaatacattttgttcaaattctaactagtccctgatgcctattctttaatgccttatacagaaatcacaaatattctaagcaatttaacacttaagatatgtctgaccacaagcaagaatattaaatcccagtacacatcagataagcataactttattatgtaatcctgttcttcctg

SEQ ID NO: 255874 - DNA, 979 bp, Homo Sapiens
  misc_feature (311)..(350): n is a, c, g, or t
ggatgttccattcctttggtcaaggagttaaaccctgttacttctggaccaattaggccatatttattctctaaagtaaggttctgtgattttacccatatagcaaaggccaaggagggaaagtggcaaaagccaaaacaattttcataagtgaggagtcatttaatgtctttctgggctggtcttaaaattttaaagttgatataattttcaattctgtttagcattcttatttatggggatttctagctattaaagaagttttatcccacattttagatatatcaatggcatcagatccaccccaaagnnnnnnnnnnnnnnnnnnnnnnnnnnnnnnnnnnnnnnnnctatttaatttaccaccaggagtcaacacacgtttccaaattccacaaatggggctttcttaaggttcacacatttgactctataaatgatcgctttggtttggctgcagtgaggtggctcctgtgggcttcattactaatatgaggctgctgtttggagatactttcctggtacagatgagaaacagtcttagttatcctgttctcttgagagtggactggaatttggcacttgctttcttctagctccttcacttgtgccccattgtggacacttgcactcagggtagaaacagaacaggttttggcttggttattatatcctcccacttgcatgagagagggcttctcagtgttagcagactgcaggccagctgcagaagacgtgtttgtcagcagcccctctggtgccggacagtgccagctgcggcttggaggattgctctgctgttggaacctcgcagtcttatccatgatgcccatgaacggcgtgttgcggggtctgtgctcagctgtaccgctctgaacgtgggttacaaccttgtctttaattctagtatctggtccttggaccttgaagccatctgaaaaacctcgtgccaattcctgcagcccgggggatccactag

SEQ ID NO: 255875 - DNA, 564 bp, Homo Sapiens
actcctcagaggtgatttctactgcatgctcttttctgctctatagatcatatgttcctgattctttgcatgtctggtaattaaaagttcaacatgggatatattgcaaatatggttctgttaatttcttctgaggagcagtgatttttattctagtacatataagtcagttaatagttgactccttgaacttgtataggtttggatttaacctttggtatgctgatctgctgaaagctcaggatatttcccaggcttctctatctcggtgagactcattgtccaaatttggtctaccctgtaagaattaattggggccttcttttactagtcttagcctgggtctagagtaggccttatattagagcatggtccttgttcctcaaacctatcttttgtgttatctcagctagataactgaagttaacaaggatttctccatgttgactgggttggaactccagattccccacggctctatctctaatattacaattccactctcattctgtagcatctaatctctggtaagccttgggcagtctcattcagtgaacacgtagc

SEQ ID NO: 255876 - DNA, 581 bp, Homo Sapiens
ttctaaaggaaatccatcaaaaagaattgtggtatcttccacagtgtcaatagcaactccagccattccaacatcaccacgaactcgagggttgtctgaatcatagccacgatgtgtcgccagatcaaaggcaactgataatccctgctgaccagccttaatgttgtccttatagaacttattgctttcttccacagtactaaaaccagcatactggcggatggtccagggcctaaaggtatacatggtaggatatggtccacgtgtgaatggcttcactatagagatcccttccggggtgtgccatattaggtcttctgggtttttgcctttcagctgctttttagccagggcagcccattctgggtgaaggggctgttgctggtgtagaagtcgttgctgtatgagcctggagcctgatgattcttttacctgcctcaggtaatgaggtgaaagtaaaaaaagctgattcttagctcttaacatggtggagcatggaaacacccaatagaaataagaactgactggtaggcctgttttggactccgctgtgggagagggcggctgcacttctgcgtccc

SEQ ID NO: 255877 - DNA, 882 bp, Homo Sapiens
gggggatgtctgacaggtgaggcgggggacgcagaagtgcagccgccctctcccacagcggagtccaaaacaggcctaccagtcagttcttatttctattgggtgtttccatgctccaccatgttaagagctaagaatcagctttttttactttcacctcattacctgaggcaggtaaaagaatcatcaggctccaggctcatacagcaacgacttctacaccagcaacagccccttcacccagaatgggctgccctggctaaaaagcagctgaaaggcaaaaacccagaagacctaatatggcacaccccggaagggatctctataaaacccttgtattccaagagagatactatggacttacctgaagaacttccaggagtgaagccattcacacgtggaccatatcctaccatgtatacctttaggccctggaccatccgccagtatgctggttttagtactgtggaagaaagcaataagttctataaggacaacattaaggctggtcagcagggattatcagttgcctttgatctggcgacacatcgtggctatgattcagacaaccctcgagttcgtggtgatgttggaatggctggagttgctattgacactgtggaagataccaaaattctttttgatggaattcctttagaaaaaatgtcagtttccatgactatgaaatggagcagttattccagttcttgcaaattttatagtaactggagaagaacaaggtgtacctaaagagaaacttactggtaccatccaaaatgatatactaaaggaatttatggttcgaaatacatacatttttcctccagaaccatccatgaaaattattgctgacatatttgaatatacagcaaagcacatgcc

SEQ ID NO: 255878 - DNA, 2531 bp, Homo Sapiens
  misc_feature (1740)..(1754): n is a, c, g, or t
  misc_feature (1843)..(1852): n is a, c, g, or t
  misc_feature (1926)..(1926): n is a, c, g, or t
  misc_feature (1956)..(1956): n is a, c, g, or t
ctttcctggaacacaaatacttgggcctttttgtctgcatgctcctgcatgggatgcccatcttcactcattcctgagcctagttcagatatcacctgcctctagatagccatctctgacattccatgccaggcagagttgattcctccttcctgtgatcccatatatctgggaacatatatttaccagaactttttcacttcattttctaattactttttcctcctctgttctttgtgtccggcttctaggctgttttattcaaatttgtatcccagtgtccagtacagttgtctggcatatagttggtggtaagaatgaaatcaagaagctgatctacgtacatctggtcatatggctgctgctggttgctaagatgagcgtgggacacctgaggctcttgtcacatgatcaggtggccatgccctatcagtgggaatacccgtatttgctgagcattttgccctctctcttgggccttctctcctttccccgcaacaacattagctacctggtgctctccatgatcagcatgggactcttttccatcgctccactcatttatggcagcatggagatgttccctgctgcacagcagctctaccgccatggcaaggcctaccgtttcctctttggtttttctgccgtttccatcatgtacctggtgttggtgttggcagtgcaagtgcatgcctggcagttgtactacagcaagaagctcctagactcttggttcaccagcacacaggagaagaagcataaatgaagcctctttggggtgaagcctggacatcccatcgaatgaaaggacactagtacagcggttccaaaatcccttctggtgattttagcagctgtgatgttggtacctggtgcagacccaggccaaagttctggaaagctccttttgccatctgctgaggtggcaaaactataatttattccctggttggctagaactgggtgaccaacagctatgaaacaaatttcagctgtttgaagttgaactttgaggtttttctttaagaatgagcttcgtccttgcctctactcggtcattctccccatttccatccattaccccttagccattgagactaaaggaaatagggaataaatcaaattacttcatctctaggtcacgggtcaggaaacatttgggcagctgctcccttggcaggctgtggtctcctctgcaaagcattttaattaaaaacctcaataaagatggccctgcccacactgtgccttgtgtttggggcttgatagagtgtgaaaggtgtgttgcttgaaaggtgtggccttagacactaggagatgatgggtagaagctccttgagaaacctagcagtggccatagagaagtagactgggtatggggaacctaagtcatagttgtaacctacagctgattggtaagaactatgggccagacatttaatctctccatctatgaaatagtccattctcatttatctagcttacgttatgggctcttcttttagttggatattcacatttatctttcaccgttaactgggcatcagttatgagtctactactgtataatggcatccaaaagaattttaaagtaccctcggcttataggcatttacaattcacgtagaaacttgttattcatgtgaaacagtgaacataatatctaatgatgtggagcaaggtaccttcaacaacaggaaggaacgagatccggtgatttaaactaaaaggcccgctttnnnnnnnnnnnnnnngccgaatgcgccaccccacgacatgacaccctttgtttcggcccgcccctccggcccctccgaaaaaaacgtttgtcctaaaacccaannnnnnnnnngcaaccccgtcgggccccccacccccaggcttcacggggcccaaccgtcgggcccccacatagcgctgtggttntccccctccgccgacaaataatcccgtggngcccacatctggagccttaaaggccggcctgttgcgggacacctcctctctcccccacttgaagcttcgcccgacatttcccccctctctctttcccggcggcgcggggtatatggacatctctcggtaagaccccgggttccccgcttggagtcagcccgagatctcttccccgcgaaacgcgagcccgcactttcccccgtgagacacgggcgcctctttatacgagtcggggaggtacttgtcctacgtatcgcaaacctacgcgggggcggtggccccacaatcgggggggagaacgcgctcacggaacatagcgtcggagaacttttaagagccccgccgcccccaccccccgcttgggcccacatctccaatcccacccccctatagaccacgggctgcacggtcaaataattatgtcttacccggcctcttcctccttggccggccacctatggtagaaaagccctccttcgcccctggagattcgctgctcattggccaacacccacccccccttttagttgtgtacgcggtgagcggtgacacacagcccgcttcgcttgggctgg

SEQ ID NO: 255879 - DNA, 923 bp, Homo Sapiens
  misc_feature (889)..(889): n is a, c, g, or t
gggtctcttcacggagccgcgcggctgcgggggcgcaaatagggtcactgggccgcttggcggtgtcgttgcggtaccaggtccgcgtgaggggttcgggggttctgggcaggcacaatggcgtctcgagcaggcccgcgagcggccggcaccgacggcagcgactttcagcaccgggagcgcgtcgccatgcactaccagatgagtgtgaccctcaagtatgaaatcaagaagctgatctacgtacatctggtcatatggctgctgctggttgctaagatgagcgtgggacacctgaggctcttgtcacatgatcaggtggccatgccctatcagtgggaatacccgtatttgctgagcattttgccctctctcttgggccttctctcctttccccgcaacaacattagctacctggtgctctccatgatcagcatgggactcttttccatcgctccactcatttatggcagcatggagatgttccctgctgcacagcagctctaccgccatggcaaggcctaccgtttcctctttggtttttctgccgtttccatcatgtacctggtgttggtgttggcagtgcaagtgcatgcctggcagttgtactacagcaagaagctcctagactcttggttcaccagcacacaggagaagaagcataaatgaagcctctttggggtgaagcctggacatcccatcgaatgaaaggaccctagtacagcggttccaaaatccccttctgggtgattttagcagcctgtgatggttggtacctgggtgcagaccagggccaaagttctgggaaagctcccttttgccatctgctgaggtggcaaaactataattttattcctgggttggcttagaactggggtgacccgacagnctatgaaaacaaatttccagcctgttttgaagtt

SEQ ID NO: 255880 - DNA, 641 bp, Homo Sapiens
  misc_feature (61)..(61): n is a, c, g, or t
ttcgtgacaggtgattatttatgctcatagtcagaagaatcgaagggcttgcggagtagancagcatgagcaaggtggtggcgagacagatgctctcagtgggcttgcaaggggctgcaaggctcaaactagtttcaggtgcaacctggacactttcagtgctgaactcctattgcctagattccaatactctgatgtgtcatttgcaatattatatgcaatgtacacaatgaataaactgtcaaatccgagcaagcattgtacatatgctgcatatacctcttacatatgtcaaatgatgattatgatacagatgtaaatattctataccttcaggatcctcagttctgaaaatatttagcccaggtatggtgagtggagagtgacaagatttcctaacaattggatcaatattaaagattgcacagtgggattaggagaaacacacctcaccagaaaactgacattcctgtcaattattttaattatttttcagatacatgacatgctttcatgacattttattctgagaaagcatttgaatatttcagaagaaaattattaagagatggataaaaggaagaatccctacagagttgaactgctttgagatcaatcttcaaaatagttttccagaattt

SEQ ID NO: 255881 - DNA, 693 bp, Homo Sapiens
  misc_feature (98)..(98): n is a, c, g, or t
attcaaaatttaaatgtaataagtgccaaataactaatccttaattctggaaaaattagggttattttacaatattttaatcaaaaacacatttaaanctaaggtcttttcaattaaaaaagtttatacaagcacagcatcatctggggaaaaaattaaaattaactagcttgagcattcaaaagagacttatcatagggaacaaggactgggagggaaaggaatagaaggtagggggatggctaacaaaagcttttaaaaaattaacttaattaccaaggtaatggcagcatcatcttcaggaccagcatatctaaacaagatgcgatgcctttccatatcagcaaaatattcctttgcttctttagctgtactagtacccaatcctgcacaattttaaaaataaaagtgagtcatgaatatcaatgtctgtttaaaaccatcaagtaaaaagctggtggaaaagttgtaatagatggatcaagctggcaacacctatactaagtgatcaatcttaataagcaactaaagacaaagtagacattagatgcttcctgatgaaagcacacaacgctacctatgaaatgtttttgccaaacaaatgtaacccaaatctgatcacgcctctgatttaaccatcagttaacagaaaataagggcaaaggaaaatactatatattaaatgtaactaga

SEQ ID NO: 255882 - DNA, 667 bp, Homo Sapiens
  misc_feature (34)..(34): n is a, c, g, or t
  misc_feature (106)..(106): n is a, c, g, or t
tgtatctctgataggcagcacctataatgggggnaaatacttctgaataaaaacattggctgacttgcaactgtgcatataatgtctattcagggggcagtgtgcntagcatgatcctgaaatgttgagataaaaagaagttggcattaaagcactatttgtcttatatgaaaagagtgactctatcttccagtaaccaagatttcctgcaatgaaaaagaaatttttccttcattatctataaactatacaaataaccttcctttttaacctaagactcaaacatttatatttgattttattctatttgataccaattggtatgtccagctgacgcatttgcagatacaaaagaatattgctttgtgtttgcacagtcccttcctttcaaggaacttaaagaacttgatggagaaaagaacttgacggacattctctctgaagtcttaaggaggtcaaaagtaatgaaggaaaacagaaggggagtgctcgttagagcccaccatgccccacagttctgaggatgcgggtgcgaggactctgaagcaaagcaaagcagagggatctctcagacgccaagtcacacagctctttacacatcgaaaatctgagttaatgttaagacaatgattagtcaatcctgaacccatttagtgcaattggggat

SEQ ID NO: 255883 - DNA, 627 bp, Homo Sapiens
atggtttatggcattctgcatcagtcagagaaggataatactgccaatagcagacataggcaaatgtcattccaatcatggatccaactagtacatcttgcaagtaatgcttgtagtcacatgtgcgggacagtgcaatcacagctgcaaaaagtagaggtgacagaaaggcacagaacctccaagatttcccacggcccttgtggtgtgaagcagtgtaacttccctgccaggtagaaggacgcaaaggccagaccagcaaatgcaaaggaagaatgtccactggggaagctctttcggccctcattcaccacgtccttatcccctgtacacatcaagtcagaatgggctagcccaattgtgttggtaaagacgccattcagagccagggcaaggctggcagccaggcaggcttgtctgctgtctcttgtgtctgccttcttgagaaatttggccaggaagatcagagacagtggagagagaaatgcaataacaaacatcggcttggtggggaaatactccgcctccacgtaggggttccggtagagccacatctcctccggctggatgagtctctggaacggggggagcagctccgtcaccaggaaggccgcgaacagcgcgagc

SEQ ID NO: 255884 - DNA, 1639 bp, Homo Sapiens
tgggtttaagcacacacctgaaggggagatattgggggacacggtggccactcgcggtctgtgtcatgacacttcccattcacatcattggcctgcgttgctggggctttgaaccaccaccccgtactttgttttgcctgtagagtgttgtgagaccacctacccaccaccttcccaggtcacctgcctggtccctgaaagaaagcatttgtgtgggcaatcccaacatgaaatgtagacagcgtgaatacggacaggaggtgatgccatattcacagtgggggatggagggcccccacccctgcttcacagaataatgggaagtgactctagtctttgtaagcaattttcattctcattaggaagttaaatgtagattcacagatacatttactttcagaatcctcaagaggatttcaaatgctaacttttagtttcttgggattgatcaaggcaagagaagtggctttaaccatgccagccagaatgaagcatcatgggtcctgatggtttcccgttttcatggtaacaaattcgcacagaggttttgctttatactgtagaataccgactttcatgatgacaacttggtttatgcatgaatattgcagtatttccatatagcaaaataacatttctacccaggataatagtcacagttttccagggagggaatgatataattttcatgacaatgtcatgtgatgatagaatttctccattgatgaatctctagtatgtgtgtatactttatttacccatacgtatattttatgaccatgagctaagttgttatttctttcattcatatccctgctgaaatattggtactagcaacttaaagttggcaagtctcatcttcagtaatacggatggccatgggagtggccaggccagacttgaaggtgaatatgggagcagtagcagaagcctcattccagaacccatctggccagagaagcagcagcatcctgggggatggccgtgcatggggtgtacactcgctataggcataggcccggcatggctgtcgctggacgccagctgtgcacacccagccacacctgctgcacgccgcgttagtgtgcggcttccgggcctgagcattcgcaaagctcgcttctccagggagcctcctcttggctttggaaaagagcccagggacttaacgtgctgcctgttgtactctgtcccctcatgactttttagacacagggactaggacatcgaccaccctctgcccctcctgcagtcagaacccgagtagtgcaagaacggccacccggttttgccagcgttcagcgtctgcccatggacccataaggcacattagcgttgggggtctcttttcagcagcctcacagacattcccgtcctttctggttggtgttgactgtgtttcagcatcactctaccctcccatgtccttagcattgctgtgcgtgtttccaggcacttaggacacccttccccacgttgccatcttactgacagttcaaatgactctccttttttgttcgttagtaacaatcttcatttgacaccttaatacatttctgactgttcttaaaacagtgggggatgcctatattttccttgagtttttgtgactgactttggctatatatacctttctggg

SEQ ID NO: 255885 - DNA, 1109 bp, Homo Sapiens
actacgtactgtcactttcctcccgtgccattactgcatcataatacaaggaacctcagagcccccatttgttcattaaagaggcaactacagccaaaatcactgttaaaatcttactacttcatggagtagctcttaggaaaatatatcttcctcctgagtctgggtaattatacctctcccaagcccccattgtgtgttgaaatcctgtcatgaatccttggtagctctctgagaacagtgaagtccagggaaaggcatctggtctgtctggaaagcaaacattatgtggcctctggtagtttttttcctgtaagaatactgactttctggagtaatgagtatatatcagttattgtacatgattgctttgtgaaatgtgcaaatgatatcacctatgcagccttgtttgatttattttctctggtttgtactgttattaaaagcatattgtattatagagctattcagatattttaaatataaagatgtattgtttccgtaatatagacgtatggaatatatttaggtaatagatgtattacttggaaaagtctgctttgacaaactgacaaagtctaaatgagcacatgtatcccagtgagcagtaaatcaatggaacatcccaagaagaagataaggatgcttaaaatggaaatcattctccaacgatatacaaattggacttgttcaactgctggatatatgctaccaataaccccagccccaacttaaaattcttacattcaagctcctaagagttcttaatttataactaattttaaaagagaagtttcttttctggttttagtttgggaataatcattcattaaaaaaaatgtattgtggtttatgcgaacagaccaacctggcattacagttggcctctccttgaggtggcacagcctggcagtgttgccaggggtggccatgtaagtcccatcaggacgtagtcatgcctcctgcatttcgctacccgagtttagtaacagtgcagattccacgttcttgttccgatactctgagaagtgcctgatgttgatgtacttacagacacaagaacaatctttgctataattgtataaagccataaatgtacataaattata

SEQ ID NO: 255886 - DNA, 970 bp, Homo Sapiens
  misc_feature (888)..(888): n is a, c, g, or t
tccggaccggtttcgcctcgcggagccggtaggtccaggtgcagcggccgcagtgctgcgtccgtgcgccgcgggctggggcggtctcaggtgtgccgaagctctggtcagtgccatgatccggcaggagcgctccacatcctaccaggagctgagtgaggagttggtccaggtggttgagaactcagagctggcagacgagcaggacaaggagacggtcagagtccaaggtccgggtatcttaccaggcctggacagcgagtccgcctccagcagcatccgcttcagcaaggcctgcctgaagaacgtcttctcggtcctactcatcttcatctacctgctgctcatggctgtggccgtcttcctggtctaccggaccatcacagactttcgtgagaaactcaagcaccctgtcatgtctgtgtcttacaaggaagtggatcgctatgatgccccaggtattgccttgtaccccggtcaggcccagttgctcagctgtaagcaccattacgaggtcattcctcctctgacaagccctggccagccggtgacatgaattgcacacccagaggatcaactacacggaccccttcttcaatcagactgtgaaatctgccctgattgtccaagggcccccgggaagtgaaaaagcgggagctggtcttcctccagttccgcctgaacaaggagtagtgaggacttcagcgccattgattacctcctcttctcctctttccaggagtttcctgcaaagcccaaaccagggtaggcttcctgcaggccctggtgagagtgcctattcccagctggaaagccctcctggggggcttcccgcacctgggggccaagaagttcactgggtaaagaacaaggaaggaaggatgggcnccggaaaaccattgggaatttccggggaaggaagaacagttgggtgggttaacttacttgtggaccacaaggccaagctggc

SEQ ID NO: 255887 - DNA, 1668 bp, Homo Sapiens
  misc_feature (140)..(165): n is a, c, g, or t
  misc_feature (511)..(511): n is a, c, g, or t
  misc_feature (524)..(524): n is a, c, g, or t
acctgagaattccccagccgaaacggctgctggggcaagaaacttcttgttagaactttccacctccggcttccccctccacctcttttaccgtcccaaccttaggagacgctttttctcccccagaggagaatttatcnnnnnnnnnnnnnnnnnnnnnnnnnnctcacccggtgctttgcatttgggaagaggtgatttcaagagtggccaggtgggacgcctctctcctccttattcggtttactatttattgttcggggtgttttttaattcctgtattgctcggcccggggagtttcgccccctgcccggctccgcggcgcggaggatggtgtggaaacggctgggcgcgctggtgatgttccctctacagatgatctatctggtggtgaaagcagccgtcggactggtgctgcccgccaagctgcgggacctgtcgcgggagaacgtcctcatcaccggcggcgggagaggcatcgggcgtcagctcgcccgcgagttcgcggancggcgccaaaaanattgttctctggggccggactgagaaatgcctgaaggagacgacggaggagatccggcagatgggcactgagtgcaattacttcatctgtgatgtgggcaaccgggaggaggtgtaccagacggccaaggccgtccggggagaaggtgggtgacatcaccatcctggtgaacaatgccgccgtggtccatgggaagagcctaatggacagtgatgatgatgccctcctcaagtcccaacacatcaacaccctgggccagttctggaccaccaaggccttcctgccgcgtatgctggagctgcagaatggccacatcgtgtgcctcaactccgtgctggcactgtctgccatccccggtgccatcgactactgcacatccaaagcgtcagccttcgccttcatggagagcctgaccctggggctgctggactgtccgggagtcagcgccaccacagtgctgcccttccacaccagcaccgagatgttccagggcatgagagtcaggtttcccaacctctttcccccactgaagccggagacggtggcccggaggacagtggaagctgtgcagctcaaccaggccctcctcctcctcccatggacaatgcatgccctcgttatcttgaaaagcatacttccacaggctgcactcgaggagatccacaaattctcaggaacctacacctgcatgaacactttcaaagggcggacatagagacaggatgaagacatgcttgaggagccacggagtttgggggccacagcacctgggcacacacccgagcacctgtccattggcatgcttctgctgggtgagcaggacagctcctgtccccagcgaagaatccggctgcccctgggccagtcccaggacctttgcacaggactgatgggtataactgacccccacagggaggcaggaaaacagccagaagccaccttgacacttttgaacatttccagttctgtagagtttattgtcaattgcttctcaagtctaaccagcctcagcagtgtgcatagaccatttccaggagggtctgtccccagatgctctgcctcccgttccaaaacccactcatcctcagcttgcacaaactggttgaacggcaggaatgaaaaataaagaaagatggcttttgtg

SEQ ID NO: 255888 - DNA, 570 bp, Homo Sapiens
  misc_feature (435)..(459): n is a, c, g, or t
cgggatccgcagcgcagcagtgggcttaccccgccctgcggccccccactccctggagtcgcagtgcctggtacctttctggcgccgcgctcccgaactcgcgggcgagctgacgcccgatgcctctcccgccgccggtgatgaggacgttctcccgcgacaggtcccgcagcttggcgggcagcaccagtccgacggctgctttcaccaccagatagatcatctgtagagggaacatcaccagcgcgcccagccgtttccacacccattgctccgccgcggagccgggcagggggcgaaactccccgggccgagcaatacaggaattaaaaaacaccccgaacaataaatagtaaaccgaataaggaggagagaggcgtcccacctggccactcttgaaatcacctcttcccaaatgcaaagcaccgggtgagnnnnnnnnnnnnnnnnnnnnnnnnngataaattctcctctgggggagaaaaagcgtctcctaaggttgggacggtaaaagaggtggagggggaagccggaggtggaaagttctaacaagaagtttcttgcccccaa

SEQ ID NO: 255889 - DNA, 727 bp, Homo Sapiens
gaagagcagaagttagagaaaaaaagccaccggaggaaaggaaaaaacatcggccaacctagaaacgttttcattcgtcattccaagagagagagaggaaagaaaaatacaactttcattctttctttgcacgttcataaacattctacatacgtattctcttttgtctcttcatttataactgctgtgaattgtacatttctgtgttttttggaggtgcagttaaacttttaagcttaagtgtgacaggactgataaatagaagatcaagagtagatccgactttagaagcctactttgtgaccaaggagctcaatttttgttttgaagctttactaatctaccagagcattgtagatatattttttttacatatatagtgtaaaatagatgatgataacggggcagagaactctcttttctctgcaagaatgtgacatattgtatagataaatgagtgacatttcataccatgtatatatagagatgtgctataagtgtgagaaagtatatgctctaatagatactcgtgttataagatatttttaattaaatatatttttgtaatattatagtgtgtgtgtttttttaatctatgggaatatatcttttgggtgtggcctgctctaatatgcttttgttttgcccacatagactcggaagaacactatagctcgtgggcttgctgattgctgagatgtttatcacaaataaactcgtgtgagac

SEQ ID NO: 255890 - DNA, 403 bp, Homo Sapiens
ccctaaccactcttaagtggaaaccaattctggactataaatgcagaatcagctatagcagaagcagtcattaatatagattcgctagtgccacacacaagacaccagtcagcttttaactgagcacttcacctttttcattcttttaaacatatttgatcatgtttttatgttctagtcataaaacaataccccaatacattatataaagctttagtgttacaaaacagaataaatcatttccctatctcctaaacaacaaaattttctcatatatctagaataattttttttcatattttaaatttgtcaggtcagaatgtctcctgtagttggtgatttctcagcaccattttctcagcatatttcttcagtaagttacataaaataatgatgtatctca

SEQ ID NO: 255891 - DNA, 912 bp, Homo Sapiens
  misc_feature (633)..(641): n is a, c, g, or t
tagccgccctcaggctgtcccttgtttcaaaatatgccctttgcagaaaagagtgaattggtgtcaaatttgggttgattacgtcatatgtggaggtgtgagtcagatcaaagctgttctttttggaagttgggaacaagagaaccatggagtacattctaaatagtgctgcaaaagtgaaatgttgtattcatctgaccaaaggaaactccaagattcttccgctaactctccagaaactgtccagttgcaataaaaggttttgtttatcagtatttaaactctaacttatcttttaatgggtacttccacatgcctacaacccgaatggagaatgacattaatagaatgaccttgtagccctcaagttattttaaaagtgctttctgacctgttaaataagataaacagtagtataatttgggaattaaccgtaatttatagtgcagtaatgctctggcaattggggtcagcatgtgtgagtgtgtgtgtttactcttatttgaccacataattgaagtagaatatgcctttttatgattactttgatttaaatgatgttaatcagcccaggatggtcaaaaggggcacataccatagcattcatgcttggtttttattttccttgatttnnnnnnnnntcaacttagatattgttaaaatgcatcacagtacctctttgtcagcaagtcagtcaaaaagatttccaaacagctttacggtttccagctgccctctggaagcaacactagtttcacctcaaacaaggaagacacctcttggagtttcagctgttacaactcagctaaatttcaaggtctgtgttcccatattctctgtagtattttaaaccttctcagagcacttgttttgtcaatgggatgctgcattcctggtaaaacagcaatcatg

SEQ ID NO: 255892 - DNA, 540 bp, Homo Sapiens
aaagtggcaatcttgagaagtatttacaaagtttgtaattctataccatgcactagcaatgatcactttaaacaggctactacacagataatataaaactatgcataatttctacagtaattccacttccctttcttctgctcaagaaattactggatttcaagtgaccgaaattatagtgataactttgactttgtcaagtttcacacatcgtggggccatgatttgagccagggcagtctgactctgaatttgaacagtgtttaattgccaggaacaaaccacagggaaaacttctaaacagaagaatacagagcaaaaggaaatgcctaggattgttctttctaaattctcaacatttcccaatacaaaaagtattatggtataattacagttctataaaacaatgtgctctatgtataataaaaataccagcaaaataaagagattacctgaaaattgtaaatcgaaggacacattcacataactgagatacaactggatttttccctaaatttgttagataattccacaattgcc

SEQ ID NO: 255893 - DNA, 383 bp, Homo Sapiens
ggcaattgtggaattatctaacaaatttagggaggtaatctctttattttgctggtatttttattatacatagagcacattgttttatagaactgtaattataccataatactttttgtattgggaaatgttgagaatttagaaagaacaatcctaggcatttccttttgctctgtattcttctgtttagaagttttccctgtggtttgttcctggcaattaaacactgttcaaattcagagtcagactgccctggctcaaatcatggccccacgatgtgtgaaacttgacaaagtcaaagttatcactataatttcggtcacttgaaatccagtaatttcttgagcagaagaaagggaagtggaattactgtagaaattatg

SEQ ID NO: 255894 - DNA, 1080 bp, Homo Sapiens
  misc_feature (215)..(215): n is a, c, g, or t
agtgggcgccagggcctgagcagcgtggacagggggtccggccatggccctctgcagcgcctcctgccgggtagggcctgtgtgtggaagggggctggccctgtgaaccccaggggtgtgacccggtgacctttgctcccagaatccctcaccagagtccaactgtcactcggatctcctggcgaccctgcctgagccagcctccccggggcgcncaggcctgcggcaggaggcacaagaagaggacgtttcctgcggccacgtatcatcggcggctcctcctcgctgcccggctcgcacccctggctggccgccatctacatcggggacagcttctgcgccgggagcctggtccacacctgctgggtggtgtcggccgcccactgcttctcccacagcccccccagggacagcgtctccgtggtgctgggccagcacttcttcaaccgcacgacggacgtgacgcagaccttcggcatcgagaagtacatcccgtacaccctgtactcggtgttcaaccccagcgaccacgacctcgtcctgatccggctgaagaagaaaggggaccgctgtgccacacgctcgcagttcgtgcagcccatctgcctgcccgagcccggcagcaccttccccgcaggacacaagtgccagattgcgggctggggccacttggatgagaacgtgagcggctactccagctccctgcgggaagccctggtccccctggtcgccgaccacaagtgcagcagccctgaggtctacggcgccgacatcagccccaacatgctctgtgccggctacttcgactgcaagtccgacgcctgccagggggactcaggggggcccctggcctgcgagaagaacggcgtggcttacctctacggcatcatcagctggggtgacggctgcgggcggctccacaagccgggggtctacacccgcgtggccaactatgtggactggatcaacgaccggatacggcctcccaggcggcttgtggctccctcctgaccctccagcgggacacccctggttcccaccattccctgccttgctgacaataaagatatttccaagaac

SEQ ID NO: 255895 - DNA, 983 bp, Homo Sapiens
  misc_feature (132)..(245): n is a, c, g, or t
gtcactaagtctggagtgcagtggtggtgatcttggctcactgcaacctctgcctcctgggttcaagtgatcttccccctcagccttctgagtagctgtgactacaggtacatgccaccacacccaactaannnnnnnnnnnnnnnnnnnnnnnnnnnnnnnnnnnnnnnnnnnnnnnnnnnnnnnnnnnnnnnnnnnnnnnnnnnnnnnnnnnnnnnnnnnnnnnnnnnnnnnnnnnnnnnnnnatgaggcaccgcacccaggcataaattaattctttatgaaaccttctcttaatgaaacaaggagcatatatatacacagaattacatctcaaaacccccccaaaatttatatatgtccacagcaagagccagttagcatggaaacacaccaatagccaactttctcctcctgtcctacgttgattaataatatcagcccatcacatagcctatttcaactttactattagcagcacaggattccatatacactaaagacaactcaaggtgcccatgaactatcagttgccttaaaatgtaataccctatttgacgactggacttccccacatctatgctaccacacccttgacccaaatcaatacaaatacttacagccactgtcacattccttcctttcacacagaggctcctaccaactgagtgaagacctgatctcaagttctactgtatacttgttaaaaatagcagttgattcaaaacttcctgaggcagggatcatccttccttgagctttgtctgtgtggccttgattaacaggcaggaaaatatcttagcccagctctgtcagtatagctgaccaaaactgttatatacagaaagcacacaaaagtgttattcttggcagagcaactgctaactaagaattccatcaacttttatttaaaccattcctacatacaaatttctgggaaaaccagctttgccagcaaataaactttggtgatagtctgacgc

SEQ ID NO: 255896 - DNA, 787 bp, Homo Sapiens
caaagagcgtgccgaagcgctggagggagcttcacggacgcgagctaggcaccggctcgcctaatccggtactaatccggcttgctgcttcccgtccaggcctcgctcgccatgggggaggtggagatctcggccctggcctacgtgaagatgtgcctgcatgctgcccggtacccacacgccgcagtcaacgggctgtttttggcgccagcgccgcggtctggagaatgcctgtgcctcaccgactgtgtgcccctcttccacagccacctggccctgtccgtcatgttggaggtcgccctcaaccaggtggatgtgtggggagcacagcccggtctggtggtggctggttactaccatgccaatgcagctgtgaacgatcagagccctgggcccctggccttgaaaattgctgggcgaattgcagaattcttccctgatgcagtacttattatgttggataatcaagaaactggtgcctcagcctcgtgtgcccccggtcatcgtcctggagaaccaaggtctccgctgggtccctaaggataagaacttagtgatgtggagggactgggaagagtcacggcagatggtgggagctctactggaagatcgggcccaccagcaccttgtggactttgactgccaccttgatgacatccggcaggactggaccaaccagcggctcaacactcaaatcacccagtgggttggtcccactaatggaaatggaaatgcctgaagccgaggccagcggggcccggttccaataaagagacttgggctgaaa

SEQ ID NO: 255897 - DNA, 838 bp, Homo Sapiens
  misc_feature (408)..(408): n is a, c, g, or t
atttagcatagtatcgaccctggggccgcgctgcgaggcggaggttcggtcccagctggggtgaagtgtgcagaccggttgcgattgtggtcagacgcagcacctacttctaatctgaggacccgcgatttacacttttgctgaataggacactgtggaatgaaacagaacagagatcaaaagtgtcctgtttcccagaggaacagttcatttcaacagccagggagaaagcctggatgctcaagttggggaatggcggtcaatgtgtattctacctcgataacccaagagactatgagcagacatgacatcattgcatgggttaatgacatagtatctttaaactacacaaaagtggaacagctttgttcaggagcggcctattgccaattcatggacatgctcttncctggctgcattagtttgaagaaagtaaaatttcaagcaaagctggaacatgaatatattcaccattttaaactctgcgagattatttaagccaatggaccgttataagggatttcaatggaaagcctggaaaggacctttcaagacaacctggatttattaaagggttaagaattcttgatgctaactccaaggaaagagtttagacctttaaaggcccacagggcaaaaccattcctcttcggaccttggaaaagatttaacctccagatcccacctttggacctataagcaaagggctttccagggctcagatcaacgtaaataaaccagatcagtatacagcatataactgctgagctgaagaggtttctgagaactctcacggatcgatgcttaacgcacggcacaatcctctggtagagaacac

SEQ ID NO: 255898 - DNA, 769 bp, Homo Sapiens
  misc_feature (625)..(625): n is a, c, g, or t
tcgaagaacctttaatatcccacgaaaaccttccaagtagtaatcaggaagtaccgcatcaaagtcccccaaatagtccattctatatctaagaataaccatataaaagaaaattagattacaatttcatttccaatagcatcccaaagaataaaaaatacctagaattaatcaagaaggcaaaagactcgtacactgaaaacccacaaaacactgctgaaagaaatcaaagaaaacccaaaagatatccacatccatggattggaagacttaatattgttaagatgaccaccactaccccagattgatacagatattgaatctgtattgatcaatatggattttattgattctgtacattcaataaaatcccctatcaaaatccaaatgacttctttttttcagaaataaaaaaatccatcctaaaattcatatggaatctcaaaggaccctgaatagtcaaaagcagcttgaaaaaaagaacaaagttggaggacacataccttcctgatttgaaaactggctacaaagctaaagcgtggtattggcaaatcagacatacagaccaacagaataaacagcccagaaataatcccttgcatatatggtaaaatgcctattgacnaatggtgccacagtcatgcaatggggaaaggacagtcttttcaacaaatggtgcttgggaaaattggacattcacattcaaaaagatgaagttggacccttacccaacaccatatacaaaatttaacttaaaactggataaaag

SEQ ID NO: 255899 - DNA, 568 bp, Homo Sapiens
cagatacatatctgtgtattatctcaaggaatgtacaaactttagtttttgattataaggacttcactgcaagttttagttaagaggtttgtatataaatctgttatagaacaggctgaaatttcttgtcataagattatgaaaccacatgagaagtgataaaatgtttgttaaagctagatagaggttaagaatcaagatataatggataattttcatagctgcctatcagaatttcccaaatatttagcatcttccttgataatatgtattttcttcttgaatttcactggcctaatgagataatactcttatctttggctctacctaaaagttggttaaaaatgcaattggcattaacaaggaaaaatactgaattagtaattttaaaagtctcacaaagaaaatcccaggcctagatggctgcattggtgaattctgccaaacattaaaattagcactaattttttgcacactgtttctaaaagtaggagaggaaagaacacttcccaacttactctagggtcagtattaccctgatactagactagacatcacaaggaaacta

SEQ ID NO: 255900 - DNA, 339 bp, Homo Sapiens
ttaaagtcccatggaaaaaactcccagcagagttcagcatctgggaacggttggcaggccccacaggaaccacagcttctgcctttatgatgctgagaaacacttcactgttgacttcccccatctaagggggccagagctaaattttgggcagctgtgtttatcctgggggtccacatatttgcatcattctttcttctcatcgtgatgttctaccttgttggtactgttctcttccttctttgtgtgagttcctgttgtgagcttccccttgttcactgaggtaatgtagccaaacaaggttaaaaagcccccagtaagccgggtgcggtggctcat

SEQ ID NO: 255901 - DNA, 624 bp, Homo Sapiens
caataatttagtgccccttcaacagccatactcagcaagaagaatcagaagcttgatcctctaacagaaatagaagagggtagctttgcccattgccactgtctttactgccccttctgcccctccacccacatccacattcagcatcactccaaggatgtgtcagcatcttgcccatgcaggtagaaatttgtgagtaggcctccatacttcctcgggggaagaaagagaaactagtgctggttttaagaatgtagctggcttttcatcagaacccttacgctaacctgaccacacttgctctcggggaagttcaagcctgtgatgtgcataaactccaacaagcctggctttggtgttcagcatgcacattccataaatatctcttgcaggcataccccacagctagactgcaggattaaaataacttccaaaaggtgctgggattgggagtttgttcaaatttcttcattaaccacttaatgttaatttcataccaaatggcaaagtatttcttaaaccaggctggatgctggtcagtgtttcaagtttttaaggtggactttcaaacacaaggggaggtgttttccatggggggggccacatcttcatggagggtaaaaa

SEQ ID NO: 255902 - DNA, 561 bp, Homo Sapiens
  misc_feature (18)..(18): n is a, c, g, or t
  misc_feature (32)..(32): n is a, c, g, or t
  misc_feature (41)..(41): n is a, c, g, or t
  misc_feature (61)..(78): n is a, c, g, or t
  misc_feature (127)..(198): n is a, c, g, or t
  misc_feature (212)..(220): n is a, c, g, or t
gccccggaagcttcaagnacgaacccggggcnaaccatagnaaagacccctatcttttacnnnnnnnnnnnnnnnnnnttagcccaggtgtaaatagcacatgcctgtctgtaatcccagctacttnnnnnnnnnnnnnnnnnnnnnnnnnnnnnnnnnnnnnnnnnnnnnnnnnnnnnnnnnnnnnnnnnnnnnnnnagaactcatctctnnnnnnnnntttttaaataaagcaaaatatgccacagcatagatctgattgtagaaaattattatatggagaactgaaaaatctcctaatcaagacaaaaattttaaatagaggaaaaaaatactatctatcattagttcaagtttccattaagagtagagtgtgaagtagctccaagttcagagctggagaattttgcatctctccctcttaccagccaattgactttaggtaaagaatactagagttttttagttagtaaaatatagttaataattctgtataaaggagcaaaagtaagtttctcattgtttcctatctcccttcaataggtttgacatgttgaaatt

SEQ ID NO: 255903 - DNA, 904 bp, Homo Sapiens
ctcccagcaccccagcttgctggctgccctctttgcccacccaggagcctagaccccagacccagaatcttggcacccctggtccagctctgtcccactctcgaggtcccagccatcccctggacctggggacctcctctcctaacacctctcagatacactggaccccgtaccgggcgatgtaccagtacaggccccagaacgaagacgagctggagctgcgcgagggggacagggtggatgtcatgcagcagtgtgacgatggctggtttgtgggtgtctcccggaggacccagaaattcggaacgttccctggaaattacgttgccccggtgtgagtggtctccatggcaacttggagccaccccactccccaaatacagaggtctgctttgaagcggagaccatttccaggccttattgagaccagaccccaagtcccccatccccatcctgctccagcgtttcctctaacagggaccagctctccgctttgcccccacggggttcctctaaccagaaccagcttcctagcctcgtagagaccaaaggccgcccccgcctgctggggttcctcccagcaccccagcttgctggctgccctctttgccttctggcctccagctgggtgtgggggggcggagcaaggcgggggacagacgcagcaccttcttagcgatctaggcctggcaagagctcttgccccaaggcctcctcttcccaggggctgccaagtcctggccctggccctggcatatcaccccgcactgtggggccaggcaccactagcctggctcaaatattccccagggagactgctgtgtgctgcccgcctgcctgctggctctcccccagccccacatcccctctggaagagaatgtaaaataaacctggacacaaggg

SEQ ID NO: 255904 - DNA, 536 bp, Homo Sapiens
  misc_feature (82)..(82): n is a, c, g, or t
  misc_feature (164)..(164): n is a, c, g, or t
  misc_feature (419)..(419): n is a, c, g, or t
  misc_feature (467)..(467): n is a, c, g, or t
ggggacttggggtctggtctcaataaggccctggaaatggtctccgcttcaaagcagacctctgtatttggggagtggggtngggaggaaatgaaagggctgtgggaggaatgcctgtgagtcgtgggtgggaatcagtccagggggcttcgaggggggtccgngggaaaggctgcgggggtcgtctgcagatgctgggagctcaggtcctggggaaggaggatgtgggcgggggtcctctccctcccacgagtgccaccgctccccaccccatcctggctggctccaagttgccatggagaccactcacaccggggcaacgtaatttccagggaacgttccgaatttctgggctctccgggagacacccacaaaccagccatcgtcacactgctgcatgacatccaccctgtcccccntgcgcagctccagctcgtcttcgttctggggcctgtactggtacatcngccggtacggggtccagtgtatctgagaggtgttaggagaggaggtccccaggtccaggggatggctgg

SEQ ID NO: 255905 - DNA, 456 bp, Homo Sapiens
  misc_feature (263)..(263): n is a, c, g, or t
  misc_feature (304)..(304): n is a, c, g, or t
tatatatttcctctatctctctatctctgtagagacaaatcaagaattatattcacctaaagtggattacgattatttttaggtgtaggaatgtgggtgtagacggaactccagaaaccatcatggaccatgaggcaactctgaggatggaagccacacactaaggacggtaaagcagaaagaagagctgaaaccctgatgataaagaagcagccaattccgtcctgcactgcccacctccagatctcattcatgtgaaacanagagaaactttatcttgttcaagtcactttagtcaagattnttattatcagatgaatgcaatttctaattgatacaccttaaaattttcaacatgtacacctgatttaacaaaatctagaattaagtcaatacttctacatgcattatagaccaaaggtcactgctataagaactttgggtatatagtcaaat

SEQ ID NO: 255906 - DNA, 400 bp, Homo Sapiens
attaagattggtttccttccttcactgtcatatcacatcattaaaaaaacttgcttcccaagtacttcccttttataaccaaaagccacaatgccagtttatcatactgagtttttttaaactaggtcaatgtaccaaagtcacaattttaggtgtttttaacctattccatagtcagagaagagttaactttaacaaatctgtcacgaatgggatttaccagtcttcaatatacttactatgacagcctgtctttggtttaagaaacagcaccgtgtggtgccatgaaagagcacagtagtgatgtcttcctacaaactcattgctgaatttcatctaaagcttcaaagatctgggtggtctaaacacctatagtgaacctcgtgccgaatcctgcagc

SEQ ID NO: 255907 - DNA, 669 bp, Homo Sapiens
  misc_feature (537)..(537): n is a, c, g, or t
  misc_feature (550)..(562): n is a, c, g, or t
  misc_feature (592)..(592): n is a, c, g, or t
  misc_feature (601)..(601): n is a, c, g, or t
  misc_feature (618)..(618): n is a, c, g, or t
  misc_feature (623)..(623): n is a, c, g, or t
  misc_feature (645)..(645): n is a, c, g, or t
caggattcggcacgagcacaaaggaggtgctccaattttttgtgtccttacttccctatgtttgcctagttactgaggctaggtcgagtgtgaagcaataggtgtaagatgctgagagcacatggacagctaccagggagatctgttgcttggttacagggtgtattcatgagtggtagctgcagttgtcgtgagagacatgcttggcatacagagctgtctaatgggtgggagacatgtaatggtagatttagggctgggagcatgattttgggtctgcccaaaggaacatggtgtcacttttgttctttctgacccactaaataaaaagtagtgtaacagggtttcactggaatgtttattagaaagtttacactttttatatttttatgattttaaaaacaaacaataatagaaaaacagattttaaggaacttcagagcagtatatattctgtctaaactcactgaatattttaagttgtaaatcaggtgtccaccaacctttattttttgcattgcaggagatgtgactgtnaaagtaggggagnnnnnnnnnnnnngagacagagtttcacccttgttgcccgggntagagtgtnatgggtgcaatctcctntcacngcaacctctgcctcccgggttncagcgattctcctgcctcagcctt

SEQ ID NO: 255908 - DNA, 1123 bp, Homo Sapiens
  misc_feature (900)..(1050): n is a, c, g, or t
  misc_feature (1053)..(1053): n is a, c, g, or t
  misc_feature (1065)..(1078): n is a, c, g, or t
ccacctggagggaagcttggcgccaccatgggcaattctgaagcggagaggggtgataaaccatgggtaccagggcttcaccttgggggaccgggtttaagcactccacgggctgtggcccactacctgggcattcacgttgcacaacgtgggagggcaacccaaagggcgtggaggcggatcgtacaagcccggcctggcggaacctgcgcactgcacggcaactgcagccaggcatggtgctcaccgtggaaccgggcatctacttcatcgaccacctcatgtataaggccctggcggacccggcacgcgcctccttccttaaccgcgaggtcctgcagcgctttcgcggttttggcggggtccgcatcgaggaggacgtcgtggtgactgacagcggcatagagctgctgacctgcgtgccccgcactgtggaagagattgaagcatgcatggcaggctgtgacaaggcctttacccccttctctggccccaagtagagccagccagaaatcccagcgcacctgggggcctggccttgcaacctctttccgtgatgggcagcctgctggtcagcactccagtagcgagagacggcacccagaatcagatcccagcttcggcatttgatcagaccaaacagtgctgtttcccggggaggaaacacttttttaattacccttttgcaggctcccacctttaatctgtttcataccttgcttattaaatgagcgacttaaaatgattgaaaataatgctgttctttagtagcaactaaaatgtgtcttgctgtcatttatattccttttcccaggaaagaagcatttctgatactttactttctgtcaaaaatcaatatgcagaatggcatttgcaataaaaggtttcctaaaatggtcnnnnnnnnnnnnnnnnnnnnnnnnnnnnnnnnnnnnnnnnnnnnnnnnnnnnnnnnnnnnnnnnnnnnnnnnnnnnnnnnnnnnnnnnnnnnnnnnnnnnnnnnnnnnnnnnnnnnnnnnnnnnnnnnnnnnnnnnnnnnnnnnnnnnnnnaanaaaatgtggggnnnnnnnnnnnnnnaaaaaattttttaaacaactttttggggggcccggccccccaaag

SEQ ID NO: 255909 - DNA, 652 bp, Homo Sapiens
  misc_feature (585)..(585): n is a, c, g, or t
cattacagtgccaagtgagggagctagcaacgttacttcatatgaaagacctagagatccaagactaccaggagagtggggctacgctgattcgagatcgattgaagacagaaccatttgaagttggtgatggaaagccctttgtcatgaatctgcaggatctgtatatggcagtcaccacacaagaggtccaagtgggacagaagcatcaaggcgctggagatcctcatacctcaaacagtgcttccctgcaaggaatcgatagccaatgtgtaaaccagccagaacaactggtctcctcagccccaaccctctcagcacctgagaaagagtccacgggtacttcaggccctctgcagagacctcagctgtcaaaggtcaagaggaagaagccaaggagtctcttcagttaatctgttgtggcctcagctgctgaggatggacttggagaatagctgtcaagcttcacctttgaagaagctgacatggcagtcatagttctaagatagtgatacagtcagaggcctactgtaagggcgagagaactgaagttgatgttgacaggccccacaggaattggccttncttgttcaagtggaagccagtctctgagaatccgtgctctcctctctttggtggaagctctgtaagt

SEQ ID NO: 255910 - DNA, 1202 bp, Homo Sapiens
  misc_feature (318)..(318): n is a, c, g, or t
ccaattcctgtggggcctgtcaacagaaatattgctgccatgtaagcttctttcaaggtgaagcttgaaagctattctccaagtccatcctcagcagctgaggccacaacagattaactgaagagaccccttggcttcttcctcttgacctttgacagctgaggtctctgcagagggcctgaagtacccgtggactctttctcaggtgctgagagggttggggctgaggagaccagttgttctggctggtttacacattggctatcgattcccttgcagggaagccactgtttgaggtatgaggatctccagcgcccntgatgcttctgtcccacttggaccttcttgtgtggtgactgccatatacagatcctgcagattcatgacaaagggctttccatcaccaatgctgcatgcctctggcagtttctctatcataaattgttccaagaaggaattttcttcaaatggttctgtcttcaatcgatctcgaatcagcgtagccccactctcctggtagtcttggatctctaggtctttcatatgaagtaacgttgctagctccctcacttggcactgtaatgccagactcatgcccatcagaggacgaatcaaatgttgggagaccagggaaggactagctagcatgcagtggaaattccaatagaaggggaggccagagagctcacttcgcacccgtagaatcagtgcatctgccacacaatcacaggagaaggtagcttcgctagggtgagcagcgtccttcaacaatgggcgaaggagattatccaaatgacagaggaaagctgcaggaggagcagtgagccgcttgttcagctccttggctcgctggctgaccacactagtgtccacctgttcatgccacacctgttgaagatctgaaaccaacaaggcatagccctgcttggtgataaaaaccttggccaagagggagttctctgcaagctgtagccacgcccatggctgcatcaacaggccttgctccagttcttccatcgtcagcggccgcgagagcgcccactctcttagccgcacgcacgctttcctgcccgctcgcgcaaaccgaaaggcctagagtaagaggccgctttccccccaccgcaagaggaggcagggtcttggcctcgtgccgaattcgccacccagcctcgctaccttaacaccgttagtagtactgcacg

SEQ ID NO: 255911 - DNA, 950 bp, Homo Sapiens
tggcagtactactaacggttttaaggtagcgaggctgggtggcgaattcggcacgaggcagaacacctgcccacctgcctgctgggcctggcatttttggagtactttccagtagagttaattgatttcgctctcagtccagggtttgtcaggttagctcaggagagaactaagtttgacctccttaaggaactatataccctcgatggtacagttggcattgagtgtccagattacagaggcaatcgtcttagtactcaccttcagcaagaggggtctgaattgctgtggtatttagcagagaaggatatgaattcaaagcctgaattcttagaaactgtctttttactggagaccatgctgggggggccccagtacgtcaagcaccatatgattttgcctcatacccgatcttctgacttagaggtccagcttgatgttaacctgaagccattaccatttaatagagaagccacgccggctgaaaatgtagccaaattaaggcttgagcatgtgggagtcagccttacagatgatttgatgaataagttactaaaagggaaagcaagaggacatttccagggcaaaactgagtcagagcctgggcagcagcccatggagttggagaataaggcagctgtacctctggggggcttcctttgcaatgtagcagataaaatcaggggccatgggagatggctggcctgtgccccccaacctgcatgcagaccccaacaatggaagttgggctgttcagttcacaaacaggaaaccaagtattggctatgggctccaggggatcctccttgggacttgcacaattattagaaaggccggcaagttggctccggctttgggctacccgggggggtaaaagttatccttactggggcaatgggcttcccccctacctggaaacggaacctcccctttagaaaaaggcgcgggga

SEQ ID NO: 255912 - DNA, 843 bp, Homo Sapiens
ctggggggccccagtacgtcaagcaccatatgagttttgcctcataccccgatcttctgacttagaggtccagcttgatgttaacctgaagccattaccatttaatagagaagccacgccggctgaaaatgtagccaaattaaggcttgagcatgtgggagtcagccttacagatgatttgatgaataagttactaaaagggaaagcaagaggacatttccagggcaaaactgagtcagagcctgggcagcagcccatggagttggagaataaggcagctgtacctctggggggcttcctttgcaatgtagcagataaatcaggggccatggagatggctggcctgtgccccgcagcctgcatgcagaccccaagaatgaagctggctgttcagttcacaaacaggaaccagcattgctatggctccagggatctccttggactgcacaatatgaagaggcggcagctggctcggcttggctaccgtgtggtagagttatcctactgggaatggctcccactactgaaacgaactcgcttagaaaagttggcgtttcttcatgagaaagtattcacctctgctctctgaagggcactttaggggcatttctatggcaaagctataggtgtatactgtaccaggtgttgcaaaatgattataaaagccagaatgtaagtttggcgataaaatagtgtgttgaggagacttaattgtatccaaggcaggttagagctagtgtatgttactgtgaattgtaatgtagttggattgtacaaattactgcaaatgtatacatgttactcttagtaaataataaacatcttaatatgtcctacggaaaa

SEQ ID NO: 255913 - DNA, 1003 bp, Homo Sapiens
actcctccccctccctcctgcaaacgcccgcatccgtcctaagtagcgaggcctgggtggcgaattcggcacgagggtttgtgctactggtgtccggcctgggcctgggtggcggtggaggcgagagcctgctgggcacccagctgctggtggatgtggtgacggggcagcttggggacgaaggggagcagtgcagcgccgcccacgtctcccgggttatcctcgctggcaacctcctcagccacagcacccagagcagggattctatcaataaggccaaatacctcaccaagaaaacccaggcagccagcgtggaggctgttaagatgctggatgagatcctcctgcagctgagcgcctcagtgcccgtggacgtgatgccaggcgagtttgatcccaccaattacacgctcccccagcagcccctccacccctgcatgttcccgctggccactgcctactccacgctccagctggtcaccaacccctaccaggccaccattgatggagtcagatttttggggacatcaggacagaacgtgagtgacattttccgatacagcagcatggaggatcacttggagatcctggagtggaccctgcgggtccgtcacatcagccccacagcccctgacactctaggttgttaccccttctacaaaactgacccgttcatcttcccagagtgcccgcatgtctacttttgtggcaacacccccagctttggctccaaaatcatccgaggtcctgaggaccagacagtgctgttggtgactgtccctgacttcagtgccacgcagaccgcctgccttgtgaacctgcgcagcctggcctgccagcccatcagcttctcgggcttcggggcagaggacgatgacctgggaggcctggggctgggcccctgactcaaaaaagtggttttgaccagagaggcccagatggaggctgttcattccctgcagtgtcggcattgtaaataaagcctgagcacttgctgatgcga

SEQ ID NO: 255914 - DNA, 1129 bp, Homo Sapiens
  misc_feature (861)..(861): n is a, c, g, or t
tgtaccggtccggaattacgggatatcgtcgacccacgcgtcgggattggcgggatgcggcgcgccgcgcgtgaacctccttggcctgggcgaagctgtgtggaccaagcaagtcaggagtgtggccatgttttctgagcaggctgcccagagggcccacactctactgtccccaccatcagccaacaatgccacctttgcccgggtgccagtggcaacctacaccaactcctcacaacccttccggctaggagagcgcagctttagccggcagtatgcccacatttatgccacccgcctcatccaaatgagacccttcctggagaaccgggcccagcagcactggggcagtggagtgggagtgaagaagctgtgtgaactgcagcctgaggagaagtgctgtgtggtgggcactctgttcaaggccatgccgctgcagccctccatcctgcgggaggtcagcgaggagcacaacctgctcccccagcctcctcggagtaaatacatacacccagatgacgagctggtcttggaagatgaactgcagcgtatcaaactaaaaggcaccattgacgtgtcaaagctggttacggggactgtcctggctgtgtttggctccgtgagagacgacgggaagtttctggtggaggactattgctttgctgaccttgctccccagaagcccgcacccccacttgacacagataggtttgtgctactggtgtccggcctgggcctgggtggcggtggaggcgagagcctgctgggcacccagctgctggtggatgtggtgacggggcaacttggggacgaaggggagcagtgcagcgccgcccacgtctcccgggttatccttcgctnggcaacctccttcagccacagcacccagagcagggattctatcaataaggccaaatacctcaccaagaaaacccaggcagccagcgtggaggctgttaagatgctggatgagatcctcctgcagctgagcgcctcagtgcccgtggacgtgatgccaggcgagtttgatcccaccaattaccgctcccccagcaggccctccaccctgctgttccggctggcactgctactccaggctccagctggtcaccagccctacaaggccaca

SEQ ID NO: 255915 - DNA, 720 bp, Homo Sapiens
tggggtaagccactgagcctgctctcgtccaatgagccaatattcttaaaaataacatgattaacaaaattatatcactttaagagtgtgactagaacccagatttctgaattttaaatcttgctgccaaagtaggcttttgccctactatctcctttctaatatactaaatcactgtttcattgttatttctataagatatataattctcttacatacaaatgtaaaaggtactatactaaaaataaatgtaaatgatgaaaagatatttcccgcatcctccaaaattattgattatatgcaaataagatacatacgaatctttgtgctaaaacttgaaggctaatttttcaaatttattgattattgattatatgcaactaagatacatacaaaattattgattatatgcaaataagatacatacaaatctttgtgcaaaagcttgaagcctaatttttcaaatttactcaatgattcaagaaaattcaaattaatgtactttttcttaggcaggaaaagacaacttttagatttaaaaggctataccaactttaattttttaaaaactttttaccaacttgaacagcctttgacttggtgagctatatatagcacatactatactgagaaagggaggctactttggaagctctgataaatatcaagacattagaacaccattgttttaaagacaagtgcctttttttgtctctcctt

SEQ ID NO: 255916 - DNA, 424 bp, Homo Sapiens
gccatttgtccattcaggagtgacctgtccatacatggccatttgttattcagacgcagtatcattcactggaccggatacatgtctgtgttgcccctcagatccaccctctgccctacttctccctgcctctgtgccctgggaggccgaccaatgtgaactaaatcaaaggacttccctcctttctgtcttcctcattcagccacgaagaggacgagaagctctagcaggagactgggggagggggatggtgggacaatgaggttggagagtttgtttttaagttcaatgtagatttactttattttatgatgttctgcgatacatgtgcaggatgtgcaaatttgttacgtaggtaaacgtgtgtcatggtggtttgctgcacctatcaacccatcacctaagtattaagcctagcatccat

SEQ ID NO: 255917 - DNA, 377 bp, Homo Sapiens
caatacattgccaacttcatgtatggaactgaaagacatctgaggtggtgggagcttccattattgtttgaattaccattaggatagatgtaaataagaaaaggctctctgctgttttacccaatcaaatcaatgttccgctcacctttcatgcaccctgggaacctggcattgaacgctttctcaaaatcctcctctgacatccagcgaccgagctggctgaggcctgttttggggatgggcactgtgtctctttgctcttgggtgacgataaccgtcttgctttcgatcctggccacatccctggggtcagtgagagccaaccagctgcaaaaatcacaggcttcctttcagccaagcaccacgggcagcgaacc

SEQ ID NO: 255918 - DNA, 373 bp, Homo Sapiens
cggcacgaggagtgacagagtgagacccccatctccaaaagaaaaggctatcaatacaaaagtttatctaaattactgtacagctatacaatggaatactctacaaaatggagagatccataagataaagcaaatgaataaagcaaaatgcatgtgttgacagctgttgtgatacctcagttcttgtcttcttggtttaaaagaatttaaatgagacagcaaaggagatgcagcataatttattgcaaaagaattcagggccggctgctcgtaagggtgagacagcattgattattgctggagaaactccctttatgggagttttgcattattattcataaggaggtgaggtgttgcagtaatcatgtcctgg

SEQ ID NO: 255919 - DNA, 680 bp, Homo Sapiens
  misc_feature (516)..(516): n is a, c, g, or t
cggcacgaggagtgacagagtgagacccccatctccaaaagaaaaggctatcaatacaaaagtttatctaaattactgtacagctatacaatggaatactctacaaaatggagagatccataagataaagcaaatgaataaagcaaaatgcatgtgttgacagctgttgtgatacctcagttcttgtcttcttggtttaaaagaatttaaatgagacagcaaaggagatgcagcataatttattgcaaaagaaaaggagtattttgaaagttaggtgcagaacagacagtacacctgagagagagaattcagggccggctgctcgtaagggtgagacagcattgattattgctggagaaactccctttatgggagttttgcattattattcataaggaggtgaggtgttgcagtaatcatgtcctgagtggtcctctgcacaggtgcagtagctgataatgcttgatcatacaccacatgtctcagtagcatcttaaatttccacctagaggtgtngttatttattattatcatgtgcaaaggatcagtttgaggacaggtaaaatcaaaatgtgtatgctctctagaagggaaagtccctactgaagatagctttgcttaaatgagctcaattacaatgtgaatgctgaggcttattgtgttggctggatggtcatgag

SEQ ID NO: 255920 - DNA, 391 bp, Homo Sapiens
ccttcgcagcgccttgcaccccgccaccatgtgcgagctgaacagtaagcgggacactctggggctgaggaagaagcacatcggtgggacactgtcacccaggagtggtcaaagctgccctgaaacagatggaactgctaaatacaaattctcgattcctccacgacaacattgttgagtatgccaaacgcctttcagcaactctgccggagaaactctctgttcgttattttacaaattcaggatccgaagccaacgacttagccttacgcctggctcggcagttcagaggccaccaggatgtgatcactcttgaccatgcttaccatggtcacctatcatccttaattgagattagcccatataagtttcagaaaggaaaagatgtcaa

SEQ ID NO: 255921 - DNA, 371 bp, Homo Sapiens
ggctaacggtatgatgaacctggccctaggccagccccttccccagcaccccctgccaaagtacccttgggaacaggcccatcagcctcactgaagaagtggctgggaccaaccaaccacttagaccaaaggctcagcacaacaggccagacagatgggtccaggatgaaaggcctgagtccaaggatgctttggggaaaacgggataaacactgctaggagctaaaaagtatatggtgtctgcccaaggaaaggacaacagtagggagttcccacgtggaccagctttcattttgcctccataagccctggtatgctggaaaggacgtccacctggaggctggagacagctcctcagagagccagagcta

SEQ ID NO: 255922 - DNA, 371 bp, Homo Sapiens
tatctcaatggtatcagagcatcttaaaagcacaaccactagactctgatagctgctgtgtcagataagaagcaggcaacgtggtgacagaccacacacggacgcaactggctactggctgcctcacagtccgcctctctcctcacagttcagcactttattcggaagagcattagacctgccatccagacagcttgtccaccttcactcacagcctcacaatcccagaacctgtactgccccctgcagaaatcctgcatgtgtttctgtaggaaaagcaaaaggaaaaggattaagttcctaattgttgagtagacacaactcatcgactctaaactatataaatttagtccatcaaaccttagtctaaa

SEQ ID NO: 255923 - DNA, 1057 bp, Homo Sapiens
ggtaccggtccggaattccgggatatcgtcgacccacgcgtccgcatcaatgatacttactctgaagtgaaatctgacttggcacagcagaaagctgaaatggaactctcagatcttatcagaaagggctaccataaagcttggtcaaactaaaactgaaaaaaaataccgtggatgacatttcagagagtctgcggcaaggaggaggcaagttaaacttgtgacgaacttcgacaagatctcaaagggaagggccatactgatgcagagattgaggcaatattcacaaagtacgaccaagatggagaccaagaactgaccgaacatgaacatcagcagatgagagacgacttggagaaagagagggaggacctggatttggatcacagttctttaccacgtcccatgagcagccgaagtttccctcgaagcctggatgactctgaggaggatgacgatgaagatagcggacatagctccagaaggaggggaagcatttctagtggcgtttcttacgaagagtttcaagtcctggtgagacgagtggaccggatggagcattccatcggcagcatagtgtccaagattgacgccgtgatcgtgaagctagagattatggagcgagccaaactgaagaggagggaggtgctgggaaggctgttggatggggtggccgaggatgaaaggctgggtagtgacagagaaatccatagggaacagatggacggtaatacgtgaagaggttgggaacagctgggaaatcgaagaatgaaagcttccagaagtagtcatgtgttaggcaggcaggggcggagtataagggcaaactgggccaggaggtcggacaattttctccaactacaaaagatggaagtgcggtgacagcagtaaggcccaaaagaatgggtcacacatgttgaaacacgagagaaggagaatgtgtagacatatattgcgataccgagtagatagggagtagatgtgtgatgaatgacaaggaaatatacaaaagatgaaaaacgtgtagaggttaaaaaatagtattatgccattgttt

SEQ ID NO: 255924 - DNA, 1320 bp, Homo Sapiens
  misc_feature (6)..(6): n is a, c, g, or t
  misc_feature (9)..(9): n is a, c, g, or t
  misc_feature (17)..(17): n is a, c, g, or t
  misc_feature (21)..(21): n is a, c, g, or t
  misc_feature (23)..(23): n is a, c, g, or t
  misc_feature (33)..(33): n is a, c, g, or t
  misc_feature (36)..(36): n is a, c, g, or t
  misc_feature (46)..(47): n is a, c, g, or t
  misc_feature (49)..(49): n is a, c, g, or t
  misc_feature (53)..(53): n is a, c, g, or t
  misc_feature (60)..(60): n is a, c, g, or t
  misc_feature (66)..(66): n is a, c, g, or t
  misc_feature (83)..(83): n is a, c, g, or t
  misc_feature (125)..(125): n is a, c, g, or t
  misc_feature (139)..(139): n is a, c, g, or t
gactangcnagtggggntgangnagagattcgnatnaattcgaggnntncaanatttgcncccaangctttcttgtccaatgnctttccaaacgagtaagtgcttcagtttctccgcctggccanactgcagaggatangccatctgtatcaaaacctagctcttccagtgaaggactccatatttctcatcatggtcatcagacagaggagttgtgcacttttctatcacttctgaagtaattgtctctactggtatctctagtggttccattttgctgatgagagtctggaatcttttataagttagaggcggttgtccaccattgagttctatgatcttgtctaggtcatataatgtatgtgaaattcttacaatgacttctactccagcttcagttgccagtttcttaatagctgcgtctcgttcctttccaaagggctcagaatcatactcaattgaaagtttagtaatgttccattccttgaaaagcctgggaaacacatctgctggttgtccacgaatcacaaacagacgggagtttaattttcgtagattggcatcaagatcctcaagacactgaagcaaaaatcgccacctgttgatgcccacattggaggagccggcgaaccaggggtccaggatgtagacgcagcggatggtgtcggcgccctgaatgcactccttcagggcggggttgtcgtggagccggagcccctttcggaaccagtgcacggcgttcacccccatgccggggggcgcggcgggtcctccacggagaaattcaaggaaggaggctccggctcatagccgacaccttcgcttccaagagaattgcctcacccggggcgtgaggaaagggcggcagagggggaacaggaaaaaatgactccgaggaggggaccggagaaggcgggggcgctggaggcgcagtggaaagatgaatggaggttgcctagtcggcggagtccgggtgtgacgccctttaggagcccgcgcccgccgcaaccgcctggaggcgacgcataacttcgagggcctcggacctccggagcctgagcaagttccaggagctcgagtcgccacgacggcccgagccggcacggacggccccaggagattcgtcacggaaacctcgccccaccaaggcggcccctaaagacaaaacggcccgcccgaggtgagtcaccgaggagaaccggaggggaatgagcccctgtcggcgacgctgtctctcggcccgggagaaaggaccgggaacggaggctagaggcggtggtcgaggccgctggacggttgccggccggtgaccggtcccga

SEQ ID NO: 255925 - DNA, 593 bp, Homo Sapiens
  misc_feature (303)..(313): n is a, c, g, or t
atacactatcctaactgccattaaaaaacagactgaattgttgtgaaaatacctgtttataattgattctttccccagctggtagatggtctgcattcaacaccactgagtcatagcaacgctgtattcttctaggtcttctaacagttgtgctatcatccagatgatctaacaagttgcagaatttgaaggtccagcagtcttggagacatggactccagatgaccacaaaccaactcttgcactttcatccgcatttcctgttgggttatttagatctttccagctttactgtccacagtnnnnnnnnnnngctgacaaaaattcaagatttcagcaagaagatgcggttccctggtacttcttagaattgagtgtattcagagcagtgtgttcagactgtccaggtatttcaaaatcttcccctgtgatgtgggtgtgctgctgagtgaccagcacattcctagcagcaattggtgaactcagaaaaagtcaaactagacataaacggtagatgcagcccagtaaaactggaaggtaattcaaggaagactgtggacatggtaggtcaatatgatagaaaaataatattt

SEQ ID NO: 255926 - DNA, 593 bp, Homo Sapiens
  misc_feature (339)..(352): n is a, c, g, or t
gaaaaaccccgcgacagtcccccccccagctttctgctcagggctgctgccgaccggatcctctccttctcccttaatgggcagcttctggaatccctgcttctctggctgggtctgttcttcagtttgttcttctgctaagtctggaaggtgcgggggcgggggtctccagaacaagcagcaatggaggcgttcagctggagcgagggctgcctcggccatccctgcatctgtcagtcagtcacgggggcgggccggccgtccctgccaggggctgtggcaccatgagccgcccaccctccagggcacagggccaactccatcatcatgaggtgattnnnnnnnnnnnnnntctttcaacttatagatcgccatgggaaggcagtcaaagactgggagcctaagacagggaaaagcaaaaaaatgaaacaccccgctcggttcagaagccccgggcgctggccttgcccatgcgcatcacagtgtccagggtgagccgcccgtgtgccggcaggggctgaacaagggggccaggagcagaaccagcccccaaggtccacttttctgctggtgtcgggcaaactaaaggcaaa

SEQ ID NO: 255927 - DNA, 919 bp, Homo Sapiens
  misc_feature (380)..(380): n is a, c, g, or t
  misc_feature (647)..(647): n is a, c, g, or t
  misc_feature (657)..(657): n is a, c, g, or t
  misc_feature (675)..(675): n is a, c, g, or t
  misc_feature (699)..(699): n is a, c, g, or t
gccgctcccaaggctgtgtctgatattcttgagcctgttcgagtttccttttccaagcctcctgttctcccacccccacccctgccatgctgcagtgactaaatctgtggttctcatccttggagaacacctgagtagctgctacaagctggccacagcccagcgactctgatgtggttgggctgggtgtggccagcagccagggcatcgggacttttcgaagctcccaggtgactcaccgggcagctggggatgagaactgtcaggagggaaggtcagaagtcccaggatgcacttgaaaagcctctagctccaccagtgaccagctcctggctggactcctggtctggactcagcatcagggaggctctggcctctcngccctcacggctagggggcttcttcacatggtcatcaaagacttggccagttccgcctctcccgcggccgtccttgtctcacccagcatcacgacgcatcagttcaccaacaaacacgattcagtgctgctagtgctgggtcctgttctgggggctggtgatgaggccaagagggaaagagggagctctgtgttccatcgagggggcgaaaagcctggaccagatgaaagtgactcatgttgttaattagcggctttaggccaaagntgcccctggnccagtggcctcagcatcncctgggaaaaggttagaaatgaanattcccaggccccacctcagcctcctgaatcagagcatccctttggcaaaccatactgagaaacaaccacgtgcatcaccaagcgctgtgaagaaggcaagctttgagaccttgaaggaatcatcaaactctgggcctcggtgtgctcacccaggcgagacaaaagacgccatgctcctccaagtgcctccaaaattaaatgagcaatgacttttaaaaa

SEQ ID NO: 255928 - DNA, 536 bp, Homo Sapiens
  misc_feature (419)..(419): n is a, c, g, or t
  misc_feature (463)..(463): n is a, c, g, or t
  misc_feature (473)..(473): n is a, c, g, or t
  misc_feature (514)..(514): n is a, c, g, or t
agaaaaatgagaagagactctaaaggcagtctttcaggattctaaattaaaaggtcttgcaggacactaacacaatatttaactcaatcccagaacctatgcaagacagcagcaaatcccaaacaaatgcacttcagtgccagcaggaggcgcatcgcacaagtaacttctgtttctgctaatccaatcctcccctgccgcccctactggttaaatgtgtttaactgttttaccaatgttggaattagccaaccccaccaccacagtaaataaataagaggaccacactttatcgaatataaatttggttttattgaaggcagcagtcacatgaccttatatctaggcctttaggattagggcctgacagagtgaggccaggccctgaaaaagatgatgtttctttgttggcactaggnggacattaacatgttttacattacatgcatccagtattgggganttgaggcggnctccaaacacaactgtgttgggttaccgggggtagggtacnggccccactgtttctggggtgt

SEQ ID NO: 255929 - DNA, 404 bp, Homo Sapiens
atgagccagcagttggtccagaccaagccagactgcagcttcttagccacccggtggacgcgccccacattgctggaccacacggtagccgccagcccatacttaacgttgttggctctttcaatcacctcctcttcactatcaaaggggacgacacacgtcactggaccaaatatctcttccgtcatgcagcaggattcatccttaatgtctgttatcaccgtgggaagcataaagtagcctgcctggttcctggcagggaggctcaacttatccactccctcaccgcaccaaatttgggcaccttcagcaagagctctcttgacgtaacttctgaccagtggatcagagggaatgccgactttccactttctggtagcttctacaaatctcattaaaaattc

SEQ ID NO: 255930 - DNA, 354 bp, Homo Sapiens
gcccacaggaatataagcatcttatgagaaagagtaagtggcaagaaaacaccatttctgcatgtgatgtgtgtgtgctaataccagtaagtaatactagtctaggaaaatagaaaaaggtaacaaatcattaagaaacttatatctcagcaatgagaacacaaatatatcagtgggaaaattaaactcatgatcctttctcataaagtaaaccaactgctgaaaaaaaatctctaatgatgaactaaccaaactcaagcccatggtattgagtccacattgcagataacagcccatctctaacagaatatatattcacatagtagggtgagaaaaacagaacaatcattatcc

SEQ ID NO: 255931 - DNA, 1175 bp, Homo Sapiens
  misc_feature (388)..(459): n is a, c, g, or t
aaaattttgatggcatatgggtttggttccacttgtagagaataaatgttcacaacttactggtattagcacacacacatcacatgcagaaatggtgttttcttgccacttactctttctcataagatgcttatattcctgtgggcatttgtcttccacactacagcacataatttgatgaaactgattttctgtgcaagagcttgtgtttctccaactctggttttatggaccacttttcattggtatataggaggcggttaaaacgtggtggtagaatgcaggttttaggttagctgggtgtgaagaatcccaggtctttgggatagtcttggcaagttactcaactcctctaagttagtttcttgatctgtcagatgacagtaannnnnnnnnnnnnnnnnnnnnnnnnnnnnnnnnnnnnnnnnnnnnnnnnnnnnnnnnnnnnnnnnnnnnnnnaactttcaaaaataggagtagtaattattacaaagaaatgtgaagaagagtcctagtgggctgcatgttaaaaatagtttttagttaatgaaaattaaatcacatcttagatgtttatcatctgcatggtacttttctggttgctgctttaacctttgtatagttgaaagtctgtaaactttctagtattctttgatttctggcccatttcccttctaccattcacgcttatattttttggttcaagtcaccattccttgcaaaactaattaaatacattcctaaatacataatattgccaatattcattcacattcaccacgtctagatcccaagtcttcatcttctttatgctggcctaatttttgctgagccttagaagcaaagacagactccgggggttgatatgggacctccagaatggggattgcacagaataatcttatttttcctctatacttctagtctgttatgttctgaacccacacatgttttcggaaggaccagatggctgacactggctaatgggaaccaaaagacgagtgaaagtaacctggttgtcacatacccccagcttagaggtgcttcaccctgccccaaggtcaatttcttttttctctagagactttaccccattatatcaaaaacctttactacagcctgactttatctgatgttagagtatcattaagtcaagcagcagcatttattgagtg

SEQ ID NO: 255932 - DNA, 470 bp, Homo Sapiens
  misc_feature (54)..(54): n is a, c, g, or t
  misc_feature (79)..(79): n is a, c, g, or t
  misc_feature (86)..(86): n is a, c, g, or t
  misc_feature (111)..(111): n is a, c, g, or t
  misc_feature (123)..(123): n is a, c, g, or t
aaggccaaagggctttaacacacataaaaccccattaattttccacaaactccngaggtttaactgtccatctgaacangatcaangaaacctaaccttaagaggagttgnagtaacttgccnaagactatccccaaagaccctgggattccttccacaccccagcctaaccctaaaacctgcattcctacccacccacgttttaaccgccctccctatatacccaatgaaaagtggtcccataaaacccagagttggagaaacacaagctcttgcacagaaaatcagtttcatcaaattatgtgctgtagtgtggaagacaaatgcccacaggaatataagcatcttatgagaaagagtaagtggcaagaaaacaccatttctgcatgtgatgtgtgtgtgctaataccagtaagttgtgaacatttattctctacaagtggaaccaaacccatatgccatcaaaattt

SEQ ID NO: 255933 - DNA, 645 bp, Homo Sapiens
tttaaaggtggcaaacatatttattgcatcactgtaaatagagaaaatcttgtcttctctcgaccagatgcccaaaaggttataaaagaagtataacttagctccaatttgaggatatgtactaaaaattttaaacgtcaccttggtgtttttttcaagactaagtgtgataccacgtaaggcatttccatgtcataaattaattctaccatatttttatgtaaaaaatgctgcacgttgttgtgtctgcagctgtgctgtgattatgagacaaatacaatgattcacactggctggaagctaagtctcacgtcccagggatcagggcagtccagcccggtgctgccacaaagggtggtggtatcaggtcacacctaggacctgccactttagactgaccttggtttgatccacgggtgtgaccatgtattaccacaaatttaacaataaaaaattgttttaagagtatctgagaaaggactaagcagtcattccattttgtgtccttcccttgttttaaaataagcaacgtcctatacttccatcatttaagatcatcaagctgacttgttcagtctgggcccatgtcattcttccagaacaagcacatcctaggatttcaaatggttctacaaaataaagtga

SEQ ID NO: 255934 - DNA, 846 bp, Homo Sapiens
  misc_feature (60)..(60): n is a, c, g, or t
ctgtctatatgttatttaaaagaggtgtcaggtttttaagtacagttttgggaccccccnagccctccacctcttactccaaattcggccccgccggccccgcgcccaagtagcctggtccctagacgcccaagcccagggtctgtcacccacagcatggaaagcgttcaggtccactcagcctgtgctgcgatctgaaggaatgataacatacgaggagaaggccctttggtcctaccctgtgaatgagtaaggggcagctgcaaaatgctaagaatgctgagtgcattaagtgaagtgtttctcccaggtgtgcacagggtgtggcttccaaggggaatgtggatgctggaatgagggaggcagccacctaggccggtcaagtcagaggcccagcaaggagaaagcgagccaaggcaaacgccgaacagaagagaacgataaatccgcggcgcactcggcagaacgtccaccgcaccgcataatttagcggggcaatgccgccgggagtccacgccaagttaatggaatatttcctgtaaatattattttcccttcctgtctcatcatctcatttcattcaaaaatctttactaatccgggggagtgaaagtaatgcatcaatttccagagccaatgcccctgcttccgaaatacccttaggaatcactggaagccaccgcggctgcttagggacaggggggcaggccgtttactctggttccttctcctaatgcctcagaggggaccccatagagctcctaattgtgcatctaagtgtacataaaagcccccctaattgcacatcaaataaataagtaaatgctgtctgctgaatatgtaaaa

SEQ ID NO: 255935 - DNA, 799 bp, Homo Sapiens
  misc_feature (188)..(188): n is a, c, g, or t
  misc_feature (261)..(261): n is a, c, g, or t
agcctcccccgaagcatttatcttccaggtgagttaaggcgttaataaatatttttcctttaaccacccaagtgaagacctggcatagtaagaagggggttcccatatctccccttatatttatgaaagtcctggaatgttcttttaatatgcaacaaattccagataataaatcccatcaccttttnttctggggaaaaaacaatcttcctagaatatttgtttatttgcatttttaaaaagcattggaagattccccanaaagaatttgcaggaaaggagaccaaggccaggttctgaagcaaggctgctcaatgtccactgtttttaaatcactttaatttctgaaccatgtggctatactccctatctaaaaggacatgaatattttttaaagtcccattacgtacataaggggcccaatacaagcaagcataaataatcttgaaaataagagaaatctgagaatgcataattttttagttgatgataaacaatagttttagaacttaaaccataattttcagatgcttgaaaaaattctgatcatcttcaaccatggtatttacatgaaccacaaaaacatacaataacatacactctccaaataacaaattgcactcctacttactcctatttctctactcagtgtccatttcctcaaaaaacttttcccaattagcaccaatgaaggacaacactcagactaccctattctttaaacagacatgaatttgtccaatatacatatatgtatttcctggactattaggtcctaaaacactttagcaaagaaagc

SEQ ID NO: 255936 - DNA, 712 bp, Homo Sapiens
cagctgcttagatatcatccagccctgccaagattcaaagtccagcccagacccccccctcacgtgggaagtgtataaacatgaaataatgagcagcgtatccaaataaaaaactcaatgtaatataaaggattcccctccacctaaaagtgaaactatctccagaaaaaagaaaaatcccatttctaacagatcttgtgatatgtgtgtggtgtgcatgcgtgtgtctaagtacaaatcaaattccctttgacactcacccatacatgaagcaagtacttccagaatgccatgcacatgttagcatacggaccaacaaaaaaagcaaagaaactagtcactagcaccatcaaaataatcacaggataacaaaaatagaaatgatttctaatgaagttataaactcattcctagtaactgtcctaaactaaacacacatttaaagaacatattcagatgccaaagcacagagaaaatgcaaagcatctatgagaacaactgggctgagtactcaagtccaacaaaaaggacataaaaacacgtggcaacattaaacatagactccacaaataccaatgaaatatgaggaatgagattctgaagtacttctcagaaaacgctgggggttctgataagcatgaaacaacccatcattaccacaagatgaacaggagcctctccttcattcatttcacagcaacacagacttggc

SEQ ID NO: 255937 - DNA, 929 bp, Homo Sapiens
  misc_feature (856)..(856): n is a, c, g, or t
cccgcccctgcagggggcatgcaccagagccactgagcccagtcccataaacctggccctctttggggaaagatccccacagagcatcctcctctcatctgtgacaactccacgagcccttaatttcttagacctcaccagaagaacaggtctcacaagtatatatttgatggctgtaataaaagtgggaaggtgggtcttaaaacagaccaaaccccgccccgcccccaacaactctgcttttagggaggcctccgaaatgcagataggcggttgagtggggtcctgggaagagcgctgaatccctctgcttgctgcctggtgtgggcctttggaaagcatcttgccttgggacaggatttctaaaattctgtgattcagatttgtcagggaagcacagtgaagcttgcttaaaggcactggccagcagtgtgtgactttggcttttgggatcacaccctgtaatcgggcccgtggaagcagcgtcaaagaggggtcttggagctcctatggagcagactgccccccgagcagtgtccccagcctagccctgtgagaccccatggggacacgggtgcctatgtattttcactaaaatatacatggtagctccatttactgatgcggttgtaatgagctcacatcgtgtctgaagagatggcaccagggaaaagtgggccataagctgctccagagcttttggtatgctgagtgttgacagagctgcactcttaacatcaagagaactgtcaggagcccagaaccaaccccaggtcttggtctccattggcgagaacacaggacgtggtggttcctgagcagagagggatctgcagatacaggcttggcgctcggngtggtctcgtggccaactcttcatgcccctgccgttgtagtggaacctctacatgttttagtttgcttcacct

SEQ ID NO: 255938 - DNA, 629 bp, Homo Sapiens
  misc_feature (97)..(142): n is a, c, g, or t
  misc_feature (335)..(370): n is a, c, g, or t
ggccacataggaataggtgttttaatttacttagagctgtattcaagttgtttgataccagacagaaagctgacagtctgttctttgtaaactgccnnnnnnnnnnnnnnnnnnnnnnnnnnnnnnnnnnnnnnnnnnnnnnactaagccccttctgacacctaggcagataaagataagagtagtgcgcagtacaaatgtcagctctgaagaggaggaagtaaatcttcaatgctagggcagatcttcactatccgtgatccagtcttaatttgagcatgagagcaaaatttagtcatctacacaagaagcaaaagcaaggaatagttgttggnnnnnnnnnnnnnnnnnnnnnnnnnnnnnnnnnnnnaggcaagaagtgttgccggtagggtatgtgtgctttctttgccttcctatttcctttcaaagaaatctcttgtaaattacaaaactgtgaattgggttgccaaaaactgttgcccttcgttagatgcttcaaacagtgtaaatcctatactgcaccctgtccacctctgctccctcctccctcccctgagagtgaggacctcatccgaccatgtaattaccattcgcttgctattaaagagcctttcaaactctgaaaa

SEQ ID NO: 255939 - DNA, 488 bp, Homo Sapiens
  misc_feature (255)..(300): n is a, c, g, or t
ttaatttacaagagatttctttgaaaggaaataggaaggcaaagaaagcacacataccctaccggcaacacttcttgcctaaaagcttcttgtgtagatgactaaattttgctctcatgctcaaattaagactggatcacggatagtgaagatctgccctagcattgaagatttacttcctcctcttcagagctgacatttgtactgcgcactactcttatctttatctgcctaggtgtcagaaggggcttagtnnnnnnnnnnnnnnnnnnnnnnnnnnnnnnnnnnnnnnnnnnnnnnggcagtttacaaagaacagactgtcagctttctgtctggtatcaaacaacttgaatacagctctaagtaaattaaaacatttatttttatgtggcctggcatctacttttaatcgcttgtgcctattcagccttatagtgctttaaatggggtttctaacatgaaatgctcatgggtactatattttg

SEQ ID NO: 255940 - DNA, 527 bp, Homo Sapiens
  misc_feature (181)..(181): n is a, c, g, or t
ccaatttatttagaaaaatagactctggattacattcaccccagggctatgtgggatgacagcaaggagacccctgagatgaaatgaggagggtttgaattctgggtatccaaggggctgggggcaaaagccagaagcctttgtcccttcagagccagagtggcataagtgtcttggctcncctccctctccctcccttcagtagtcttcagccatggccagtaagacaaggctggtccagccgtggaaagggcggcagcccatgcctcgcccatcgcggtcactgtactgctcccaaagaaagcctgtagcctggtactggcgccatacattgcctaccacgttggcacggacgctcaccgtggagtttggcagcccgagcctggtgaggaccctccagatgcccatagtggtggagtgctcccaaagccaggtagttgacattgagccacacagcaccccgccagtaggggggatcatgctctgaattgcgctggccataaaaggagctccaggccgcaagggag

SEQ ID NO: 255941 - DNA, 778 bp, Homo Sapiens
gagtgtcgggggcccttggtgctgagtgaagataaattaaaaatcccaacaagccagtgacattatgtacaggaggaaacggggtggggcttccaggacagaggccgagggtggcagggcaggacttggagtggctgtgacctcggtctggcccagctgcctctcccccttgtggagctgtggttcccagaggtagtgggggtgggagtagaggcaggacagaggagcaaaggcactgggcttcccacaggagaatgcaagaaggtcctcgatgccaccccttccccagctcatggccccatcctcttggtcacttggccctctggctgctccctaagagccttcggcttctttctccagctctggatcagttctggtctctggggctggccgccggtgggccgtgcagcgggaacagcatcgactctccttccccgagccacaggacagtggcagtgaacagtcatcccgctcacagtgaggcaccccatgccccacatctgcaggtgatacagactcatctctccaaaagggggcactgaggggtgccagctctgactctctgggaaccactgccacagcaaaaccggcagacccaggggccctatcagcactgcaatggggtcccacagactaaggggatgggccccgcagacaccagactgggaccactgtgtcgcaagcagcacaggagaaggttagacaacgcaacagctcggggaccaagcccacccggggacaagctgagcgtatctcacatgacctcgtccagtgcacg

SEQ ID NO: 255942 - DNA, 559 bp, Homo Sapiens
  misc_feature (101)..(114): n is a, c, g, or t
gggtttgatagacatgtataactgtgtacagaagtataacagaatgatgctccccatctctcctttaacgaccatggagggtaaaagggagagagggagtnnnnnnnnnnnnnnctgatttggggattgggatttggaaaaggtaaaagattgaggaatagggtagaggaaaaggagtagtgtttttgatgagttttagcctctcagctactcctgtgttctttcttcatgagtgtggtactggccttgtgatagagtagaccaaagatcctgtactgtatacagaactaataaacattgatgttttggttggagaagcaaagaagatcgggaagatggaatgctgctaaggagggaaaattgagtgagttagttgccatagtggagaaccatagtatctgatggacagagtggagaatttaacttcacaattttgtcaagggctgggcccttagaaatgactgtaatttcctaacacattatattcctctagtggttccattttctaatcaatttgctcaggtaaaatatgaaattctcccctgtaaagagaaaaagc

SEQ ID NO: 255943 - DNA, 964 bp, Homo Sapiens
  misc_feature (26)..(27): n is a, c, g, or t
  misc_feature (29)..(29): n is a, c, g, or t
  misc_feature (31)..(31): n is a, c, g, or t
  misc_feature (38)..(38): n is a, c, g, or t
  misc_feature (40)..(40): n is a, c, g, or t
  misc_feature (53)..(53): n is a, c, g, or t
  misc_feature (55)..(56): n is a, c, g, or t
  misc_feature (62)..(62): n is a, c, g, or t
  misc_feature (64)..(66): n is a, c, g, or t
  misc_feature (78)..(78): n is a, c, g, or t
  misc_feature (85)..(85): n is a, c, g, or t
  misc_feature (100)..(101): n is a, c, g, or t
  misc_feature (111)..(111): n is a, c, g, or t
  misc_feature (119)..(119): n is a, c, g, or t
  misc_feature (133)..(133): n is a, c, g, or t
  misc_feature (135)..(135): n is a, c, g, or t
  misc_feature (143)..(143): n is a, c, g, or t
  misc_feature (192)..(193): n is a, c, g, or t
  misc_feature (196)..(196): n is a, c, g, or t
  misc_feature (213)..(214): n is a, c, g, or t
  misc_feature (220)..(220): n is a, c, g, or t
  misc_feature (225)..(225): n is a, c, g, or t
  misc_feature (234)..(234): n is a, c, g, or t
  misc_feature (244)..(244): n is a, c, g, or t
  misc_feature (258)..(258): n is a, c, g, or t
  misc_feature (271)..(271): n is a, c, g, or t
  misc_feature (274)..(275): n is a, c, g, or t
  misc_feature (280)..(280): n is a, c, g, or t
  misc_feature (287)..(287): n is a, c, g, or t
  misc_feature (294)..(296): n is a, c, g, or t
  misc_feature (325)..(325): n is a, c, g, or t
  misc_feature (337)..(337): n is a, c, g, or t
  misc_feature (352)..(352): n is a, c, g, or t
  misc_feature (354)..(354): n is a, c, g, or t
  misc_feature (356)..(357): n is a, c, g, or t
  misc_feature (362)..(362): n is a, c, g, or t
  misc_feature (369)..(418): n is a, c, g, or t
  misc_feature (420)..(420): n is a, c, g, or t
  misc_feature (422)..(422): n is a, c, g, or t
ttggtccaaaaaatcacaagcccagnncnanactcatntngaaggatcaccgngnnagctgngnnnctaaaattcttnaaaacantactcctttactctnncctattacanaatctttnaccatttcaaaatncnaatccccnaaatcagtttttctctttcttactccctatctcccttttaccctccatnntcnttaaaggagagatgggnngcatcntcatnttatacttntgaacacagntatacatgtctatnaaacccaaactcnctnncttantggaaanttgcttnnnagaacatagggatgaagtaaggtgcctgnaaagtttggggnaaaagtctctctcanananntaagntattttnnnnnnnnnnnnnnnnnnnnnnnnnnnnnnnnnnnnnnnnnnnnnnnnnngntngtttatgtgtgtgtaaacacacacgcatacacacatataatggaagcaataagccattctaagagcttgtatggttatggaggtctgactaggcatgatttcacgaaggcaagattggcatatcattgtaactaaaaaagctgacattgacccagacatattgtactctttctaaaaataataataataatgctaacagaaagaagagaaccgttcgtttgcaatctacagctagtagagactttgaggaagaattcaacagtgtgtcttcagcagtgttcagagccaagcaagaagttgaagttgcctagaccagaggacataagtatcatgtctcctttaactagcataccccgaagtggagaagggtgcagcaggctcaaaggcataagtcattccaatcagccaactaagttgtccttttctggtttcgtgttcaccatggaacattttgattatagttaatccttctatcttgaatcttctagagagttgctgaccaactgacgtagtttccctttgtaattaataactggtgtctg

SEQ ID NO: 255944 - DNA, 725 bp, Homo Sapiens
ctttcagctccaagaccaacacgctggtggtgaggcagcgctgcgggcggccaggaggtggggtgctgctgcggtatgggagccagcttgctcctgaaaccttctacagagaatgtgacatgcagctctttgggccctggggtgaaatcgtgagcccctcgctgagtccagccacgagtaatgcagggggctgccggctcttcattaatgtggctccgcacgcacggattgccatccatgccctggccaccaacatgggcgctgggaccgagggagccaatgccagctacatcttgatccgggacacccacagcttgaggaccacagcgttccatgggcagcaggtgctctactgggagtcagagagcagccaggctgagatggagttcagcgagggcttcctgaaggctcaggccagcctgcggggccagtactggaccctccaatcatgggtaccggagatgcaggaccctcagtcctggaagggaaaggaaggaacctgagggtcattgaacatttgttccgtgtctggccagccctggagggttgacccctggtctcagtgctttccaattcgaactttttccaatcttaggtatctactttagagtcttctccaatgtccaaaaggctagggggttggaggtggcgactctggaaaagcagcccccatgtcctcgggtaccaataaataaaacatgcaggctgaccggcgtttttttctt

SEQ ID NO: 255945 - DNA, 761 bp, Homo Sapiens
aggacccgggcaccgaactcctgcactgcgagaatgaggacctaatttgcttcaaagatatcaaaccagcagcaactcatcattatcttgtggtgccaaagaagcatattggaaactgcagaactctaaggaaagatcaagtagaactggttgagaacatggtaactgttggaaaaaccattcttgaaagaaataatttcactgacttcacgaatgtgaggatgggttttcatatgccaccattctgttccatttcccacttgcaccttcatgttctggcaccagtggatcagcttggcttcttatccaagttggtttatagagtcaattcctattggtttatcacagctgatcacttgattgaaaaactaagaacatgaaaatgtcaagagtggaagatttttctaatcttggttcagcatgaagtggtatttaggtcccttttaagtctaattgcaattttaagatttgttgggttttatgagaggctgttacttagtggccttaaatcttttctgaatgtctgtttcctaagatctgtgatacagttatgtgaatattttgttactgacttgtttcaatggttacttgtataaggattttatatatatgatactatagataaaatcctatttaagacaaattctgttaatcaacaagggctctgtatttttttaagttaaaatattttcatttctcagtaagtagtcagttataatagtgatttatttatgaagaataaactactatagaaagtaaaa

SEQ ID NO: 255946 - DNA, 822 bp, Homo Sapiens
gggaggaggaggcgccggcggcgaaaggaggcgtttggggccgcctccagggtccgctctgccattcctgaactgtgccctcgtccccgtgactctggcatcagggaagcgaactgttaggcgagaggaggaggcagccagaaccatatccccttcttcctcggggcgggggccgggccacgccggctgagccgggggagggctccgggagggagtgcctggccaggccggcctgtctgccgcgatggatgacagtaaggtggttggaggcaaagtaaagaagcccggtaaacgtggtcggaagccagccaaaattgacttgaaagcaaaacttgagaggagccggcagagtgcaagagaatgccgagcccgaaaaaagctgagatatcagtatttggaagagttggtatccagtcgagaaagagctatatgtgccctcagagaggaactggaaatgtacaagcagtggtgcatggcaatggaccaaggaaaaatcccttctgaaataaaggccctactcactggagaagagcagaacaaatctcagcagaactcaagcaggcataccaaggctgggaagacagatgctaatagcaattcctggtgaagattatataaagatgagtcagtgattgaagccaatattctgattcccatggaagatggatgggcaagagtgtacttcttggctccatttactacctactgctcagtagtcatctctgtaaatctgcaatttctaccaaaatgtgtgatcgtagatctcaaaggatcttgctttaactttcaacacttagaaaatctacaaacattcagacctgt

SEQ ID NO: 255947 - DNA, 417 bp, Homo Sapiens
  misc_feature (310)..(372): n is a, c, g, or t
  misc_feature (387)..(387): n is a, c, g, or t
gctgcaggaattcggcattagtcgggatatttgggtgcagagggtttgtgcccagttagaagcgacttttgttctcttctgcgtaggcgttggtgcgtccgccgcgtgtgcgtggtccgtgtgccgttgctccggcctgcgtctccatatgtgtaggaaaggacacgccgtctgtcctcacgccccctgtgacttttcatatttccgttttccacttgtggaaaaaaagtgctaaagttttcttcccagagagagcataattccgaaacccagcaggcctccctgaaacactgcttctcggccagcccgnnnnnnnnnnnnnnnnnnnnnnnnnnnnnnnnnnnnnnnnnnnnnnnnnnnnnnnnnnnnnnngacctctctcagccncatcgccccaactccaacctctcggcccca

SEQ ID NO: 255948 - DNA, 472 bp, Homo Sapiens
  misc_feature (164)..(222): n is a, c, g, or t
aaagaagacagagaaccaacaaaaccgcattcagtgcacctgcctcagctacctaatgattccgcgcggagacctcctgacaacgtctcttcaagcatcctcagaagcctcgactgagctttagacagcagagcagatgccgcaggcgcggcggctctgcccannnnnnnnnnnnnnnnnnnnnnnnnnnnnnnnnnnnnnnnnnnnnnnnnnnnnnnnnnnatgactatcacacactttctcttcaatgaaaaaatcgaattggtggcttatattttcagcaaagaattttggggggttttgtgtgttggcaaaagagctactcagaaatggacaaagaaaacgggggggttctccccctcctgattaaaaagggagaaagaaaactgcgattttatagctggagatctgaacccagctgtgcccctcccccagaggcgtgaggctgatcagagaagacgggaggaaagat

SEQ ID NO: 255949 - DNA, 1642 bp, Homo Sapiens
  misc_feature (176)..(203): n is a, c, g, or t
  misc_feature (212)..(212): n is a, c, g, or t
  misc_feature (941)..(949): n is a, c, g, or t
  misc_feature (1237)..(1304): n is a, c, g, or t
  misc_feature (1605)..(1605): n is a, c, g, or t
aggagtggagggagggtgggcagggctggaggatgggagggagcacgtctgatagaaaacgtcaccgagacacaccccagggccagaggcgaacgcatctgaggggtggctgggcaggagcaccagggctatgtacacggtcagggtcttccctggggaggaggcagagggctgcnnnnnnnnnnnnnnnnnnnnnnnnnnnnctgcaaaantttggaagaaaggggagtagctgcggtggggcgatggggccgagaggttggagttggggcgatggggctgagagaggtcggagggcgcggagaggagagaggtagaggaggacgggctggccgagaagcagtttttcagggaggcctgctggctccgcatgctcgaaaagcagtcgagaatcaacccaaaagattgtcaaagttttgtttcggaattatgctctctctgggaagaaaactttagcactttttttccacaagtggaaaacggaaatatgaaaagtcacagggggcgtgaggacagacggcgtgtcctttcctacacatatggagacgcaggccggagcaacggcacacggaccacgcacacgcggcggacgcaccaacgcctacgcagaagagaacaaaagtcgcttctaactgggcacaaaccctctgcacccaaatatcccgacacccacaaacaaaatcagaacagaagagaaaaagacccacatccaaacaaacccaagagcaagtgaaacagtgaaaaaaatactttggcagtgacaaacaaattttggattttgatttcttgtgtttgcttttttggatttcctttggagcagaggtgtgtccggtatccttggctggctagctagcaaggtagttcacaagtatgcttcctttgcttttttaaaaaaactttttggatttttacttaaagccaaagagtttaacattacaggnnnnnnnnntctgaaaccaaaaatgcatcttgagtcagaaatcgaaatctttcctcccgtcttcgctgatcagcctcacgcccctgggggaggggcacagctgggttcagatctccagctataaaatcacagttttctttctccctttttaatcaggagggggagaacccccccgttttctttgtccatttctgagtagctcttttgccaacacacaaaaccccccaaaattctttgctgaaaatataagccaccaattcgattttttcattgaagagaaagtgtgtgatagtcatnnnnnnnnnnnnnnnnnnnnnnnnnnnnnnnnnnnnnnnnnnnnnnnnnnnnnnnnnnnnnnnnnnnnccgccgcgtgcggcatctgctctgctgtctaaagctcagtcgaaggcttctgcaggatgcttgaagagacgttgtcaggaggtctccgcgcggaatcattaggtagctgaggcaggtgcactgaatgcggttttgttggttctgtgtcttctttcggagaggggcagtagcagcagtgactaattggtcggctcccccaggtcaggcggggcgcagtgtctggcaggccaggcatcggaggccaggcacagcatccggtgggcctggagctgggtggggttggcacggtgctgtgtccggnagccaggggccagtggggtcagcgggacacggtgtcc

SEQ ID NO: 255950 - DNA, 664 bp, Homo Sapiens
  misc_feature (39)..(39): n is a, c, g, or t
  misc_feature (50)..(50): n is a, c, g, or t
  misc_feature (79)..(79): n is a, c, g, or t
  misc_feature (419)..(433): n is a, c, g, or t
ccgcgtgtgcgtggtccgtgtgccgttgctccggcttgngtctcccatangtgtaggaaaggacacgccgtctgtcctnaacgccccctgtgacttttcaatatttccggttttccacttgtggaaaaaaagtgctaaagttttcttcccagagagagcataattccgaaacaaaacttgtgacaatcttttgggttgattctcgactgcttttcgagcatgcggagccagcaggcctccctgaaacactgcttctcggccagcccgtcctcctctacctctctcctctccgcgccctccgacctctctcggccccctcaccccagctccgacctctctcagccccatcgccccaactccaacctctcggccccatcgccccaccgcagctactcccctttcttccaaacttttgcagnnnnnnnnnnnnnnnctacagacaaaacagccctctgcctcctccccagggaagaccctgaccgtgtacatagccctggtgctcctgcccagccacccctcagatgcgttcgctctggccctggggtgtgtctcggtgacgttttctatcagacgtgctccctcccatcctccagccctgcccaccatccgtccactcctctgcgaactgcctcagcgatttcaagaaggaaataaagggataaag

SEQ ID NO: 255951 - DNA, 770 bp, Homo Sapiens
  misc_feature (702)..(726): n is a, c, g, or t
cagcccttcccttaaaggagggagccttaagttacctttcaaggttgggggttaggaatctatcataactagtctaaagatttctcaccaagggaaattttccttatctaaaaaaggaacttcaggtctcaaccctgccagtcacacccaattaatgtccttcacaaaaataaacagcatatgttccctttcaatttgagttcagtgagctcacagcaaaatttaccttttaattttcttcagcaaatccaagacgaatatacaaaggatgagattagataaagatttcagtttcccgtatgccaccgctgccgccaattttccaaaaaagcctggctcctcttttcctgttcctccatccaagcccccaaagatctctaaccagaaataaacaggaagactcagtgatttacaaaagacattttagttttacacgtacagaaaattctacccagcattacagaattcttagacttcttaaattcctgattttccttggtatttacattttgataagggagccaatggttcttcaaacatttgaaaagaacacatacacactggacaatttcaaacgatacaaacaaacgcaactgtccttctttctcattcctgtccttcagccacccagtttcttctcccctgagggaatcagttatcatttgctggtcatacttccagattatcctgtgcctatgtaannnnnnnnnnnnnnnnnnnnnnnnncacttttcattttttcaaataaagtattactcaactttgtaaaa

SEQ ID NO: 255952 - DNA, 903 bp, Homo Sapiens
agagggccaacaacaccaggtatggcctggctgcggctgtgttcacccgggatctggacaaggccatgtacttcacccaggcactccaggccgggaccgtgtgggtaaacacctacaacatcgtcacctgccacacgccatttggagggtttaaggaatctggaaacgggagggagctgggtgaggatgggcttaaggcctacacagaggtaaagacggtcaccatcaaggttcctcagaagaactcgtaagagcagctgtcagggaggcccagtcacagtccagcaattccacaaccaccttgaccaatgcttgccaagctgttttaaagccaagaacaccctttctttgttccaaattaactcttagaagaaaccccacaaataaagcaattcaatcaaggctgttctatttaaatcagagatggggaccaggctcagagttctacctatctaacccccaaccacagcccccttggtggcccatgagttgcttccatgaaatcttaggagtctctggaggacagattaaaaaccagtgatctgtaatttgtagctcttcctgctgatccaaggactttcccatgggtgcgcttgatggtttagtggatcgactcaactcagaacacaagcttggaaagtgttaggggttttgaactaggtggatactaaatctcggccccactcttcattggcttaacctaaaaaccagaggtgcttttccttgtctgtgtgccagttgctggctgttttaggggcttgcccttcatcttgctactgatattccttaatcggtgggaaggagcaggcaaagaatatgcttacatgattacacctgtaaagtaagcccaaacatcccaaatgtccatcaactgatgagtggattaataaaatgtttccatgg

SEQ ID NO: 255953 - DNA, 912 bp, Homo Sapiens
  misc_feature (674)..(674): n is a, c, g, or t
  misc_feature (694)..(694): n is a, c, g, or t
  misc_feature (719)..(775): n is a, c, g, or t
cccccccacctatcttctcgtatatctgcgcaccaacaccggcctgggtggcgaattcggcacgagggagaagacaagaaaagcccctggcagaaacgggaggagaggcccctgatggcgtttaacattaaatgagctatcgcagacccacctgactgtggaatataaaattgccaaatatcctttctcatggaagcgcgtacccgttcgtggaggaaacggaacggcagcccagccgtgggacggacgtggacgtttactgcattcctgtttgccgtgtaaatgttagaaaggaattaaagttattactcggaataaaggatgactttggcggatgtcgcccctgcaaggaggtggctgaaagtggtgtccagatgtccttccgaggactcggcgtatccgccaccagggacattaagaaaccgcacgtgatgtcgctatgctctaacgatcacctcagttctccctcggattctgggaacagatgaaactttttgcatcgcttgagtcatttttatcacaataatcctactgtgaagctgtcgttgagaacttaggttggcacgtagcgtctcaaggtatgcgttctctcaaaggaaagctatgcatcgctgcttcgttgtctgattttgcttaaattttgctttggttaggttgcctttttggggtttgcnctttttttgttgggggcttnttggcggtttggttgggaaggattnnnnnnnnnnnnnnnnnnnnnnnnnnnnnnnnnnnnnnnnnnnnnnnnnnnnnnnnnttccgggggcccctgggggcgcctcgttggcgcccccggcctttctggggggcggcgcgggtccctcgtgggtccccggcgggggggcgccccttccgtcgctgcgctcttggcgccggggggcccggtttgtcccc

SEQ ID NO: 255954 - DNA, 745 bp, Homo Sapiens
  misc_feature (87)..(207): n is a, c, g, or t
gagacccactcaagaggagcagaaatcctgttttgctatttccttaattgctactagggctgggattacaggtgtgcgccaccatgnnnnnnnnnnnnnnnnnnnnnnnnnnnnnnnnnnnnnnnnnnnnnnnnnnnnnnnnnnnnnnnnnnnnnnnnnnnnnnnnnnnnnnnnnnnnnnnnnnnnnnnnnnnnnnnnnnnnnnnnntaagccactgcacctggccttcaattcttctctcaatgattttattggaactttagacagctactaactctttttttcttgaagaagttctcttctcttggcttcaaaaaacattgaccttttctgagatttcctcttacctcagaggctgttctttctaagtattctttgggaagggggggtgcatcttcctgtactcatcccttaaatgtgttccctgaggttccgcccccactatattctcctcactccttatataccacacattcactaggtgactttaaccactttacgcatttcgaccgccctctatatccttaatcgctccctaaatctatttctgataaagtataactgacctcctcctctgatagccctctgtaaaccacgagacattctacagcatttatctctgtgcatatgtgcctccctctgttagactagaagggcaggcctagcgctttctctctttctagtatccaggacaatacctggtagataacaggagctccacaaatgtttaataaataaataaaag

SEQ ID NO: 255955 - DNA, 396 bp, Homo Sapiens
acactgcacacactaggacaggatttgattgaatttaaatcctgccacccaccaaggagacctcgggactttactgtagtttaagtatgataagtgggctttgctatcacttattggaaaaaccagtaagaaaagctaattttcaggcgtcaatgtgatttgacatgcaaacgggaagttttgccaggggttaataaaggttgtgaattccaaattcctagccgaatatggctttgctggtaagccccctggaagggaggttgggagggctgaccagatggtcatcggggcactgggatggaggcacgctggggcctgactgcctgctctgctggagactgcagaatggatggcagatccacagtgcatcccccttccaaacccaggaggcatctg

SEQ ID NO: 255956 - DNA, 763 bp, Homo Sapiens
  misc_feature (744)..(744): n is a, c, g, or t
ggggacgctcgaagggcggggagcagagggagatacagaaaccgacaggggccaggcgcccggtggctccgaagcggggaagtgggacaagatggtttacatctcgaacggacaagtgttggacagccggagtcagtctccatggagattatctttgataacagatttcttctggggaatagctgagtttgtggttttgtttttcaaaactctgcttcagcaagatgtgaaaaaaagaagaagctatggaaactcatctgattccagatatgatgatggaagagggccaccaggaaaccctccccgaagaatgggtagaatcaatcatctgcgtggccctagtccccctccaatggctggtggatgaggaaggtaaatgtctgctctaagaagcagacaaccggacatgcgcattcatagcagaaggaaaccatcaagaagtggaaggctgaccatgatgagcagtagatgaatgtgtatgtctaaacaaggactgctctgtgtcctcacagatgaatgaggtcatgctgggaattccctctgcagggaactggcctgactgacatgcagttccataaatgcagatgtttgtctcattacctttttgtatagtttattaaagtattaatatagttttaataagtaaatatttttaggttgcagaatggactcctcatctttatattcacgaaaaagcaatctgaagaaaacaaataaaagcctgtgtattttagtggaacatanttcccattcttctatcacc

SEQ ID NO: 255957 - DNA, 1041 bp, Homo Sapiens
  misc_feature (160)..(160): n is a, c, g, or t
ccagcgtgcgcgggtatctctgaagttggggtttaagattcttgcccgtgagagcgaacgagcctgccgtgcttctgattttgaaacacctgggtctgggcttcccgggcgagcggtggaacctgtgagaagtttctacaatggtgggctcagctctcangaaaggtgcccatgcatatgtctacctggtgagtaaggccagtcacatctccagaggccatcagcaccaggcctggggatcgaggcctcctgcagcagagtgtgccacccaaagagctccaggcagtgtggtggagctgctgggcaaatcctaccctcaggacgaccacagcaacctcacccgggaggtcctcaccagagttggcaggaacctgcacaaccagcagcatcaccctctgtggctgatcaaggagagggtgaaggagcacttctacaagcagtatgtgggccgctttgggaccccgttgttctcggtctacgacaacctttctccagtggtcacgacctggcagaactttgacagcctgctcatcccagctgatcaccccagcaggaagaagggggacaactattacctgaatcggactcacatgctgagagcgcacacgtctgcacaccagtgggacttgctgcacgcgggactggatgctactcatggtgtgggtgatgctacaggcgtgacaggatgactcccagactacctatttccacagctgaggcgtcgggcttctctagaatgagtattgctgtataaagatgaggagctcagctcttgacaagtctcgtctgcatacaagagcaaccatgagcgggacttttattttctaacaccgtccagctatcaactttggagagtgggaaatggtgtgactccttaacacgttgaggggagtcttggagcggggttgtttgttgggtgggagaactttgcaaagggtttcgaaagagagcctcccgtcctttgggagggggtttacaaagtgcctacagggaatctgtaaatatctggggtgtattcacacttgcgaagtccgccgccga

SEQ ID NO: 255958 - DNA, 364 bp, Homo Sapiens
ggtgtattaaacacatttcaacttgcaatactttcaacctatgatgtactcaccggaatgtaacccattgtaaactgaggaacacctgtactcaccccactggaagggatgtgggaggaaggtcaagcgcctcttccaggtcagaaggggcagaggttggatacaaaccaggcagcctgggtccatggtaaaagaacctccactaagtgaggctggcccctctctccagagcgagtcaccccctggctcccagacagccacacctggtgaaggagaatgcggtgacaatggagagaacccccaggttcagtaagctgcctcgtctggctcactacacctagctgtggggagatctcctcgtcag

SEQ ID NO: 255959 - DNA, 942 bp, Homo Sapiens
  misc_feature (699)..(786): n is a, c, g, or t
  misc_feature (791)..(818): n is a, c, g, or t
  misc_feature (829)..(843): n is a, c, g, or t
ccgaccaaccccgagcgcaaagaaattgacctcgcagcggtcctacaatgcttttatatcattggccaagctttaccccgcccctgcctcatgcagcctatgggctaggctttagggtccgcggttggtcagaccggggcacttggcctgaagacctggaattggcgacttcgatattaacaaggatggcggcggccgcagcaagtcgaggagtcggggcaaagctgggcctgcgtgagattcgcatccacttatgtcagcgctcgcccggcagccagggcgtcagggacttcattgagaaacgctacgtggagctgaagaaggcgaatcccgacctacccatcctaatccgcgaatgctccgatgtgcagcccaagctctgggcccgctacgcatttggccaagagacgaatgtccctttgaacaacttcagtgctgatcaggtaaccagagccctggagaacgttctaagtggtaaagcctgaagcctccactgaggattaagagcaacagccccagagcctgggctctgctggacttagtataatgtgaaaaaaatgtgttctcctattcctcataaagcttgtgctgtaaaatactttctcagggtgttcttgtcctcatctaccctctaccccttactgtgcaaccactgaggcaaagtagcttaatataaaaataaaactttattctgtctcnnnnnnnnnnnnnnnnnnnnnnnnnnnnnnnnnnnnnnnnnnnnnnnnnnnnnnnnnnnnnnnnnnnnnnnnnnnnnnnnnnnnnnnnttttnnnnnnnnnnnnnnnnnnnnnnnnnnnnctgtgtggcgnnnnnnnnnnnnnnnaaaaaattttttaaaacctcttcttgtgggcgcgcgggcccccaaaggagaagaagaaaaggggcaaaaattgttgttccccaaagaaaaccccggggc

SEQ ID NO: 255960 - DNA, 362 bp, Homo Sapiens
gacttcgatattaacaaggatggcggcggccgcagcaagtcgaggagtcggggcaaagctgggcctgcgtgagattcgcatccacttatgtcagcgctcgcccggcagccagtgcgtcaggtgaggcgcggcgtggtgaggcgggcgggcttcgggacgccagtgtcacgacctcgacctccctgaagttgagggaagcccccgcccacagcacgcgcggcgctctctccggccccgcagggacttcattgagaaacgctacgtggagctgaagaaggcgaatcccgacctacccatcctaatccgcgaatgctccgatgtgcagcccaagctctgggcccgctacggtgagtgcgggacgc

SEQ ID NO: 255961 - DNA, 1521 bp, Homo Sapiens
  misc_feature (506)..(506): n is a, c, g, or t
  misc_feature (561)..(561): n is a, c, g, or t
gaccggaagtccttcatctcaagcatccaatgctgaaagcggcctgattttctctaccggaagcccttttccagaggctgggaacacggcccacctagcaggaagtcccacctccttgagctccgccacccttcccgaagtttttctgtcacctgtgttaggctccgtcccctttccgcgttttatccccgtaccagaaaaggatacatttagtgcctcccacccagctccactaaacggccttcccgcttcctgtggttgtggccgctgtgctgtggggagcggccccgacccgggggctcattcgagcgacctcggaccacaatgccagcatggactttgcagaccttccagctctgtttggggctaccttgagccaggagggcctccaggggttccttgtggaggctcacccagacaatgcctgcagccccattgccccaccacccccagccccggtcaatgggtcagtctttattgcgctgcttcgaagattcgactgcaantttgacctcaaggtcctaaatgcccagaaggctggatatggtgccgctgtagtanacaatgtgaattccaatgaacttctgaacatggtgtggaatagtgaggaaatccagcagcagatctggatcccgtctgtatttattggggagagaagctccgagtacctgcgtgccgctctttgtctacgagaagggggctcgggtgcttctggttccagacaaataccttccccttgggctattacctcatccctttcacagggattgtgggactgctggttttggccatgggagcagtaatgatagctcgttgtatccagcaccggaaacggctccagcggaatcgacttaccaaagagcaactgaaacagattcctacacatgactatcagaagggagaccagtatgatgtctgtgccatttgcctggatgaatatgaggatggggacaagctgcgggtactcccctgtgctcatgcctaccacagccgctgcgtggacccctggctcactcagacccggaagacctgccccatttgcaagcagcctgttcatcggggtcctggggacgaagaccaagaggaagaaactcaagggcaagaggagggtgatgaaggggagccaagggaccaccctgcctcagaaaggaccccacttttgggttctagccccactcttcccacctcctttggttccttagccccagctccccttgtttttcctgggccttcaacagatcccccactgtcccctccctcttcccctgttatcctggtctaataaccccccacacatacacctctggtgacctatttgcacagaccgtcgtcttccctccagtcttctgagggataggggacattccatcccaagcttctcccttacccacacctatccttttgaggggctttggggtggggctggggcaagcagagggactgggtcttcacttcttgggctaataaaattgtttctttgtggactacccccaaacataaatctattaaaaacccccttgt

SEQ ID NO: 255962 - DNA, 1019 bp, Homo Sapiens
  misc_feature (982)..(982): n is a, c, g, or t
gggatacaagaagctatccattactgctccccagggccaaaaccaagcagttcccccaatcccctgtaaaagggatgaggtaatagcccaaggggaaggtattgtctgaaaccagaagcacccgagcccccttctcgtagacaaagagggcacgcaggtactcggagcttctctccccaataaatacagacgggatccagatctgctgctggatttcctcacgattccacaccatgttcagaagttcattggaattcacattgggtactacagcggcaccatatccagccttctggccatttagaaccttgaggtcaaagttgcagtcgaatcttcgaagcagcgcaataaagactgacccattgaccggggctgggggtgtggggcaatggggctgcaggcattgtctgggtgagcctccacaaggaacccctggaggccctcctggctcaaggtagccccaaacagagctggaaggtctgcaaagtccatgctggcattgtggtccgaggtcgctcgaatgagcccccgggtcggggccgctccccacagcacagcggccacaaccacaggaagcgggaaggctgcagggtgcatggcagcgggaggaaagaggctgaggaggccgcgcgtcctggtagcaaggagcagaagcggagttctgcgccctccctgcccctcctttaggatcccaggggtccaaccacccccaggtcccacttcccagctacatgggggcgccggggaaggaacaccaactcaaagaatgagatatccaacccgtttagtggagctgggtgggaggcactaaatgtatccttttctggtacggggataaaacgcggaaaggggacggagcctaacacaggtgacagaaaaacttcgggaagggtggcggagctcaaggaggtgggacttcctgctaggtgggccgtgttcccagcctctggaaaagggcttccggtagagaaaatcaggaccntttcagcattggatgcttgagatgaaggacttcaggt

SEQ ID NO: 255963 - DNA, 586 bp, Homo Sapiens
  misc_feature (464)..(464): n is a, c, g, or t
tgaaactgtaatagtgcagattaagaagacgtttgagaattaatacatgtttagtatgtaaggacatatttcataaaagtatccttaggtgaggttttgtagagtttttatgcttgatgtgttcttggtatcatgataattgtttacttagtattctaggaatatgtttatagtcttccaagcaaacatgggtggcttttttctatccttgacaaattagttcctagcagtctaaagattttatattgaagaaagagaatgtttttatggttcttcatttttccatcaaccatgtaaatatgactagaaggtttgtgccaatcccatcctctatgacatgccccagagggtttcattttaactttgttctccaacaggcttgatgctggtactttcggaacaatgggagttggtttgggatttgctattgcagctgccgtggtggctaaagatagaagccctgngcaatggatcatctgtgtggaaggagacagtgcatttgggttttctggcatggaggtagaaaccatctgcaggtacaacttgccaatcatactgttggtagtgaataacaatggaatttacc

SEQ ID NO: 255964 - DNA, 2005 bp, Homo Sapiens
aaagcaggctggtactggcccggaattccgggatatcgtcgacccacgcgtccgccagaggtggcgtgctgccgacttcgcgtttgccttgctggatgattccgcttgtttgccggctgcgtgagtgcttagagcttttcggtggaagatgccggacagtaacttcgcagagcgcagcgaggagcaggtgtctggtgctaaagtcatcgctcaggccctgaaaacgcaagatgtggagtacatatttggcatcgtaggcatcccagtgaccgaaatcgccattgctgcccagcagctaggcatcaagtacatcgggatgaggaatgagcaagcggcttgttatgctgcctccgcgattggatatctgacaagcaggccaggagtctgccttgttgtttctggcccaggtctcatccatgccttgggcggtatggcaaatgcaaacatgaactgctggcccttgcttgtgattggtggttcctctgaaagaaaccaagaaacaatgggagctttccaggagtttcctcaggttgaagcttgtagattatataccaagttctctgcccgcccaagcagcatagaagctattccttttgttattgaaaaggcagtgagaagcagtatctatggtcgtccaggtgcttgctatgttgacataccagcagattttgtgaaccttcaggtgaatgtgaattctataaagtacatggaacgctgcatgtcacctcctattagcatggcagaaacctctgctgtgtgcacggcggcttctgttattaggaatgccaaacaaccccttcttatcatcgggaaaggtgctgcttacgctcatgcagaagagagtatcaagaaattggtggagcaatataaactgccatttttgcccacccctatggggaagggtgttgtccctgacaaccatccatactgtgtaggtgcagccagatccagggctttgcaatttgctgatgtaattgtgttatttggtgccagactaaattggattttacattttggactgcctccaagatatcagccagatgtgaagtttatccaggttgatatctgtgcagaagaattggggaataatgtaaagcccgctgttactttgctaggaaacatacatgctgtcactaagcagcttttagaggaacttgataaaacaccatggcagtatcctccagagagcaagtggtggaaaactctgagagaaaaaatgaagagcaatgaagctgcatccaaggaactagcttctaaaaaatccctgcctatgaattattacacagtattctaccatgttcaagaacaactacctagagactgtttcgtggtaagtgaaggagcaaatactatggacattggacggactgtgcttcagaactaccttcctcgtcacaggcttgatgctggtactttcggaacaatgggagttggtttgggatttgctattgcagctgccgtggtggctaaagatagaagccctgggcaatggatcatctgtgtggaaggagacagtgcatttgggttttctggcatggaggtagaaaccatctgcaggtacaacttgccaatcatactgttggtagtgaataacaatggaatttaccaaggttttgatacagatacttggaaagaaatgttaaaatttcaagatgctactgcagtggtccctccaatgtgtttgctgccaaattcacattatgagcaagtcatgactgcatttggaggcaaagggtattttgtacaaacaccagaagaactccaaaaatccctgaggcagagcctagcagacacaactaaaccttctcttatcaacatcatgattgagccacaagccacacggaaggcccaggattttcattggctgacccgctctaatatgtaaataaagacgccagttggtggtcttgagttttctctttcttgcaagatgaaattttattttccacagcaaaattactctactgttaaaattgtgcaaaataaaataaacatttaaaatgtc

SEQ ID NO: 255965 - DNA, 373 bp, Homo Sapiens
gcttcaagcaaacaagaagtataaaagcttcttcaacagttctttccatccagaagagataaggtgttgccccataggaatagttacatctcaactccagtgaggctccttcagagacagtgatgtggatgtcaggctgggtcactgactgggctctggcagttctcaggacaaaatgtatccccagcactgcaagatctccagagaacaggaaggaaagtgtctgaagagaccaagaccaagaggtgtgaggaagtttcgctggagaaactccttgcttatttaaaactacaaaagctgctgagatgaatctggttgctttttaaacctctaattcttgtcacttgtctttgtctggaaagaactcaaccag

SEQ ID NO: 255966 - DNA, 974 bp, Homo Sapiens
  misc_feature (905)..(922): n is a, c, g, or t
aagagagagcagtgttagatccttcaaagtcaagataaaagcagaggattgcaattagggcatgagtcaccagcgagcctcagaaaaccctactgggatgcttccgaaaggccagtgctgtgcagggggcgagacacttcagggagcgggaggctccaaggacagagcttttaaagcagcagcagaagcctgggatgtggaagatctctgtctactctcctattcctgatgggagcagtcgggcaaagcacaccgctcttgactctgctctacaggccattcacataacagcaaattgctgggtttccttcatgtccctattaggaaagcaaaacataccacaaaggataccctgtctcactaaccccctgcagtggaccttaaaatgacctgaaggactgaaaaggtcatagaaaaaacatggtgcttctaggtaatttctgattccttgaagtcagtcagtcttgcaagtagcaatttgccttcaggttaaggagcccaagcacgtgtgaaggacatggcatatctgtgggtccccctgcaagactcttggtgaccaatgcctttgccctccacaatgggcaagagagaggaatagtggtggcttctttagcctaacttgcacctggcaccactctgaccctcctggccccagctgcataaaaataacttcgtgggatccctcttctgctcttcctggagtcccctgagacacagtggcctcacaactactggagcaggtatctgatcctttccttgtccccatcctcttcatattcattcttaaggctaaggtggcaagataaggtgctcagtggagagccaaattgtagattccagggccgccatttcagtgctctcacagaaaacaaatacaaaagaaatggaaaaggggcagagaagcnnnnnnnnnnnnnnnnnngcagttgggctcaataagaagttatatactccaagtttggatttcaacctgc

SEQ ID NO: 255967 - DNA, 536 bp, Homo Sapiens
gggaccttaaaaatctgattcctgaaagtcagtcagtcttgcaagtagcaatttgccttcaggttaaggagcccaagcacgtgtgaaggacatggcatatctgtgggtccccctgcaagactcttggtgaccaatgcctttgccccccacaatgggcaagagagaggaatagtggtggcttctttagcctaacttgcacctggcaccactctgaccctcctggccccagctgcataaaaataacttcgtgggatccctcttctgctcttcctggagtcccctgagacacagtggcctcacaactactggagcaggtatctgatcctttccttgtccccatcctccccttccttgcagcccttcttactgccctggacagaggtggctgtgtatttttcttcatattcattcttaaggctaaggtggcaagataaggtgctcagtggagagccaaattgtagattccagggccgccatttcagtgctctcacagaaaacaaatacaaaagaaatggaaaaggggcagagaagcaaaa

SEQ ID NO: 255968 - DNA, 626 bp, Homo Sapiens
ttttgaacagagacccaaaataattttaatgcaaataacaaaatgagttagtctgtctccatcacatagcccctcaatgaaagaattacagtactttataaaaatgtcataaaatgcgcaaactacagttccttcaaatacagttgatgctatctttggtcctaatatgtgcttcttggatgtctactaattttgttgttgttattgttcttgaataactggtaataagcaccaagtgagggctgattctatctacaggtaagaagcttggatgttttctccctgattttgtcatttctttccaacttcccaaatgcatgtcatacagcagggaagaggcatctctcatgtctcaaaaaagcttaatggcacagatggatgtgggcactgaatgttgtacagtagtggcaaccagccgggaaaatccataggatcatttcagaccgcattcaacacagatactcatgtagccccgacgtttcttgtgaagggaattgatgtattgcttgagggggtcgatctctggttctaaggtgttttgtttgtttccatcgtgactaccagaaaattatagaaggccagacgcagtggctcatgcctgtaatcccagcactttgtgaaccaag

SEQ ID NO: 255969 - DNA, 1051 bp, Homo Sapiens
  misc_feature (34)..(34): n is a, c, g, or t
agttcatttttttcaagacaaatcaaaaactgantttatttgtcctctgcacagatccttacttaggacaccacctcccagccactgcttctgggatgactcctgaggcctatgggccgcattaatggttccagtcccaacaccacgtgtacagggatcttcagaggaggggtgccctcacatcctccaggccatttccaccccgtggaagggtgtagactggcccagatttaacacacagcctgataaggaagcaggaggtaatggcatgggctgaggctccttccacctgctcacacccaccccagttgttagcccaaggatggccctagaggcttggacccttgagtggccacccacggtgacaatgcacccaggagcactatttggtccctgtttctcagctgcgtaacttgaaactttcctaccaacatctccagagagcagaattatctcccaggagaatcatggccaggaggtaatgaaggaggtgggattggtgccctactgaccggacggctccctccctccactttatatctctcccaaggatacaccacccctcatagcacaccccaaatccatgcaaccatgcatccaaccttagcttcatagagccttggccgggcttggagagacccagtacataatggcatccaccaggaaggtgggcatgtagctcatggggaggtagagaagcttggcatcccagccagctgagtagcgagtacgggggtggcaggcaatcagcgcatgctccatgcagttggtcaccaacgacagatcctgtgtgcacttctgctccatttgttcagctgatttcttatagtctgcaacaaacttcctcccataggcctccttgacctctggactggaccggtcccaaatctcccaggaagctctttaagaatctctccttactggtcacagcagtcttgaaatagccaggttcaatcatagccaccttcaccccaaagtaggagagttccctcctgcaagacagagaagcagaggggaaaaacttcgggggtcttggaaggtaaaacacaaa

SEQ ID NO: 255970 - DNA, 593 bp, Homo Sapiens
gagaaataagtgacccaacaaaatttattcatctattatgggtaagatctgccataaattcttcctaaataatttgtttactaactctttaggccactgtgctttgcggtccattagtaaacttgtgttgctaagtgctaaacagaatactgctattttgagagagtcaagactctttcttaagggccaagaaagcaacttgagccttgggctaatctggctgagtagtcagttataaaagcataattgctttatattttggatcattttttactgggggcggacttggggggggttgcatacaaagataacatatatatccaactttctgaaatgaaatgtttttagattactttttcaactgtaaataatgtacatttaatgtcacaagaaaaaaatgtcttctgcaaattttctagtataacagaaatttttgtagatgaaaaaaatcattatgtttagaggtctaatgctatgttttcatattacagagtgaatttgtatttaaacaaaaatttaaattttggaatcctctaaacatttttgtatctttaattggtttattattaaataaatcatataaaaattcaaaa

SEQ ID NO: 255971 - DNA, 376 bp, Homo Sapiens
ttattttcaattataagcaaaacagctactggtaactatatgaccttgcaggcaagagtgggtatcgctgtgatcatctctgtcacagcagttgtttctcatttcattctatattgtgtggtgttgtgtcaccaaaaacaatgattgttttgtgcaagtaaatttcagagatagagcaataagactattttggtagaggaaaaatatttttaaatgagcttggactcagttttagttattgacatgttggtgtgaaatttcttcttaagtattgcagtaatccaacagaaataatagaatttcgttatatttaggaagttacaaattatgtagtcataattttaaacttgtttttccagtagtacttattaacttt

SEQ ID NO: 255972 - DNA, 938 bp, Homo Sapiens
gggaaatgaataaagcacactgattgtcctaagagtcttctgtgactaaaagcacatgagcttctccccaggctgagctttgaccctcccaagcatttccccaaaggccatgacactgcatcagattgctcctggacactttcctcagagttttcaacaaatataaactgaggagtggagcacagcaccagatttgctaatcaagaggcaatggtccccagtccaaatgggtgctgtgtgtgaatacagagccccaggagaagggaaggaggtctgtgaacatcaggaattgcaaaatcttgctgaaccaatagaccaacagccattaacatttgtcaatgcaaagatcctaaaatatacaagtgtggagttgtcctgccctaagagctgaagctgtgacaatcacgctgccatggtagatatttaagctcccctgaggttactgaatctaacaatgaataaacaatgaagagtagctaatttttggaaatctctttctatgaccggaaaatattcacaaactcagagtgattgtttggggtgaaagatggtcccatgccttgtgggcctctctttgctatctatacaacgttggaaatgaacccctcccttacaggaaagtgaacagcaaccaaggtgagcccaccctgggagggcagagtgggtgtactttcctcgaagagccctgaacacaacagggcacacaaacagccacagcaccctcaacaatgccccaccatctgcccaccagggcacacagattcacgcagattcagtgacacattccaaaaaaagggaattaaggaggacccatggcatggctaatggggagagagctttactacttttagcaccattgctaattattggagcaaagaaaggcatacaaggaatggaacccaacctgtttaaagtaataaatgtcaaccctaaagtgc

SEQ ID NO: 255973 - DNA, 938 bp, Homo Sapiens
  misc_feature (102)..(367): n is a, c, g, or t
gggaaataggtgcccacaaaagggccctcccttcctctcctttgctcaaatgccagagatggacagaggtgttctggggagaattttaaaaatatttatagnnnnnnnnnnnnnnnnnnnnnnnnnnnnnnnnnnnnnnnnnnnnnnnnnnnnnnnnnnnnnnnnnnnnnnnnnnnnnnnnnnnnnnnnnnnnnnnnnnnnnnnnnnnnnnnnnnnnnnnnnnnnnnnnnnnnnnnnnnnnnnnnnnnnnnnnnnnnnnnnnnnnnnnnnnnnnnnnnnnnnnnnnnnnnnnnnnnnnnnnnnnnnnnnnnnnnnnnnnnnnnnnnnnnnnnnnnnnnnnnnnnnnnnnnnnnnnnnnnnnnnnnnnttaggtcccagatggacaagacgttgccccttatttgctggggcatgaggaggtctgagggctccagggaactggctgggagtcactgggggaccttcaaggaatgcaaaggactggttattatgtatcattgagtttggaaatacttcaatgtttgaattactggagccgccatatgggtgcatagtggctgactttaagctgtagatgcagccacagtctggactgatgatgtggccttttctggaacatgtgggagctgggcattcctctggatgggactgtctgtttcggacaacttctgggcatgtgtgaccacgtctctctagcactggggcaggccggctatgtagtgtataagtccattccctatggctccttggaggaggtaatcccctacctgatccggagggcccaggagaaccggagcgtgcttcagggtgcccgcagggaacaggagctgctcagccaagaactgtggcggcggctgctgccaggatgccgaaggataccccactagcacccctgagggggtcatgtggtcaataaaagtccttaggtgctgcctaaa

SEQ ID NO: 255974 - DNA, 433 bp, Homo Sapiens
  misc_feature (343)..(343): n is a, c, g, or t
  misc_feature (353)..(353): n is a, c, g, or t
atatctggacaaggagagagcggtggcccagctccatgggatggaagaccccactcagcctgactatgaggccaccagtcagagttacagccgctgcctggaactgatgctgacgcacgtggcccgccatggccccatgtgccacctcatggtgtcttccccacaatgaggaatctgttcgcccaggcaaccaagcgggcaggccggctatgtagtgtataagtccattccctatggctccttggaggaggtaatccccttacctgatccggagggcccagggagaaccggagcgtgctttcagggtgcccgcagggaacagggagctgctcagccaagaacntagtgagcgntgctgccaggatgccgaaggataccccactatgcaccctgagggggtcatgtggtcaataaaagtccttaggtgctgcct

SEQ ID NO: 255975 - DNA, 1873 bp, Homo Sapiens
  misc_feature (438)..(488): n is a, c, g, or t
  misc_feature (774)..(867): n is a, c, g, or t
  misc_feature (869)..(926): n is a, c, g, or t
tgtacggtccggaatcttgggatatcgtcgacccacgcgtcgccacgcgtcggaggacggcagaggcccggcagctcggagctccgggaccttgtggcgcatcaggacgcggctgtccctctgccgggacccagagccgccgccgccgctctgcctcctgcgtgttagcctcctctgcgcgctccgggcaggcggccgtgggagccgctggggcgaggacggcgcgaggctgctgctgctgcccccggcccgcgcggctggaaacggagaggccgagccaagcggcggcccctcttatgctgggaggatgctggagagtagcggctgcaaagcgctgaaagagggcgtgctggagaagcgcagcgacgggttgttgcagctctggaagaaaaagtgttgcatcctcaccgaggaagggctgctgcttatcccgcccannnnnnnnnnnnnnnnnnnnnnnnnnnnnnnnnnnnnnnnnnnnnnnnnnnaacaacagcccgggcaggggccggccgagccgtcccaacaccagttggccccgctgtcgcacagcctcgagccgccggtcaagctcaaggaactgcacttctccaacatgaagaccgtggactgtgtggagcgcaagggcaagtacatgtacttcactgtggtgatggcagagggcaaggagatcgactttcggtgcccgcaagaccagggctggaacgccgagatcacgctgcagatggtgcagtacaagaatcgtcaggccatcctggcggtcaaatccacgcnnnnnnnnnnnnnnnnnnnnnnnnnnnnnnnnnnnnnnnnnnnnnnnnnnnnnnnnnnnnnnnnnnnnnnnnnnnnnnnnnnnnnnnnnnnnnngnnnnnnnnnnnnnnnnnnnnnnnnnnnnnnnnnnnnnnnnnnnnnnnnnnnnnnnnnnagctccacccgtatccgcatccacatccacatccacactctcatcctcactcgcacccacaccctcacccgcacccgcatccgcaccaaataccgcacccacacccacagccgcactcgcagccgcacgggcaccggcttctccgcagcacctccaactctgcctgaaaggggcagctcccgggcaagacaaggttttgaggacttgaggaagtgggacgagcacatttctattgtcttcacttggatcaaaagcaaaacagtctctccgccccgcaccagatcaagtagtttggacatcaccctactgaaaacttgcgattcttcttagttttctgcatacttttcatcacgatgcaggaaacgatttcgagtcaagaagacttttatttatgaacctttgaaaggatcgtcttgtatggtgaattttctaggagcgatgatgtactgtaatataatgtaaatgtatctggatatatgatgatgattagtaatttaaaatgcgttgtactaagacattctgaatgtagaccattttccaaaaaggcaaactttcatgtcgcaaaactaatcgtagtattcctaagtctggagactacaaggcgatgacgcgaaaacatgagattactcataatcaacgagacattccgcacgttgccacttcatagtgtggccgctgttgaataaaaccggacatacgttgcaaaagacaaacacgggcgaccccaaaaaaatacccaagggcccacgtaacgaccagatcttgataacagggccaaacgacaaaaaaaggacacgcacacatcaacgggggtcaacagacagagcactgggacaccaccgacgcacggacacagaacacgacaaaaataagggacaaccgaacggagatcaacaagaccaccaagacaagacgaagagacaaaacacaaaaacaagacacagaaa

SEQ ID NO: 255976 - DNA, 703 bp, Homo Sapiens
  misc_feature (591)..(591): n is a, c, g, or t
agaggtattatgtacatgtctgatgactgctataggaaaaggaggattattgaagaatttgaagtaaaggactggactaattgttttggaagttaaattattcaccctctgctctttgtatgactgcagaatgaatatagagttttgggcttttatagttcctctagtcactgttaaacttcaatatgtgacagtgactgcctgtctgcatgttcagattttcttcacaagcctatgaaagcaaagatcccagataaagctcataggctttctagtgcttaagatgtggcactctttacttgcttttggaaaacattcacatatttcctaaaggggcaagagatatatattcttgaaataaaatagagccacttaatcagagtggtttgccaaaggggactgcctgtggattggattttaatctgtctgtcacagtcaccttttctttttagaatgttcttaatagaatttagaaaacaccataaaatacctcacttatataaagtaaatgtaaaataatgtgtttctgtgaaagcaaaaaagcaagaaatattcaaattcaacagtgtttttatattacttccatctgtnctatggttacaattctgtggtcattactatctcaatggaattcaaaagttttttttcactaccagaatcaacagtaataatgataagcagtcagaataactagactttaccc
